(19) United States
(12) Patent Application Publication
(10) Pub. No.: US 2024/0052049 A1
(43) Pub. Date: Feb. 15, 2024

(54) CIRCULAR RNA ENCODING CHIMERIC ANTIGEN RECEPTORS TARGETING BCMA

(71) Applicant: Orna Therapeutics, Inc., Cambridge, MA (US)

(72) Inventors: Thomas Barnes, Cambridge, MA (US); Amy M. Becker, Cambridge, MA (US); Brian Goodman, Cambridge, MA (US)

(21) Appl. No.: 17/853,576

(22) Filed: Jun. 29, 2022

Related U.S. Application Data
(60) Provisional application No. 63/355,527, filed on Jun. 24, 2022.

(51) Int. Cl. C07K 16/28; C07K 14/725; A61K 47/69; A61K 47/28; A61K 48/00; A61P 35/00

(52) U.S. Cl. CPC C07K 16/2878; C07K 14/7051; A61K 47/6929; A61K 47/28; A61K 48/0033; C07K 16/2803; A61P 35/00; C07K 2319/00; A61K 38/00

(57) ABSTRACT

Circular RNA, along with related compositions and methods are described herein. In some embodiments, the inventive circular RNA comprises group I intron fragments, spacers, an IRES, duplex forming regions, and an expression sequence. In some embodiments, the expression sequence encodes an antigen. In some embodiments, circular RNA of the invention has improved expression, functional stability, immunogenicity, ease of manufacturing, and/or half-life when compared to linear RNA. In some embodiments, inventive methods and constructs result in improved circularization efficiency, splicing efficiency, and/or purity when compared to existing RNA circularization approaches.

### CROSS REFERENCE

[0001] This application claims the benefit of priority of U.S. Provisional Application No. 63/355,527, filed on Jun. 24, 2022, the contents of which are hereby incorporated by reference in their entirety for all purposes.

### SEQUENCE LISTING

[0002] This application contains a Sequence Listing in computer readable form. The computer readable form is incorporated herein by reference. Said ASCII copy, created on Jul. 13, 2023, is named OBS-027_SL.txt and is 3,898,334 bytes in size.

### Ascii Table

[0003] This patent application contains a lengthy table section. A copy of the tables has been submitted electronically in ASCII format and is hereby incorporated herein by reference in its entirety. Said ASCII tables, are as follows:
[0004] (1) Table_A_TRES.txt, 3,228,767 bytes, created Dec. 13, 2022;
[0005] (2) Table_B_IRES2.txt, 258,170 bytes, created Dec. 13, 2022;
[0006] (3) Table_C_A_Permutation_5_Intron.txt, 11,158 bytes, created Dec. 13, 2022;
[0007] (4) Table_D_A_Permutation_for_3_Intron.txt, 11,558 bytes, created Dec. 13, 2022;
[0008] (5) Table_E_Non_A_Permutation_5_Intron.txt, 3,925 bytes, created Dec. 13, 2022;
[0009] (6) Table_F_Non_A_Permutation_3_Intron.txt, 10,096 bytes, created Dec. 13, 2022;
[0010] (7) Table_G_Spacer_and_A_5_Intron.txt, 21,824 bytes, created Dec. 13, 2022;
[0011] (8) Table_H_Spacer_and_A_3_Intron.txt, 21,822 bytes, created Dec. 13, 2022;
[0012] (9) Table_I_CAR.txt, 23,098 bytes, created Dec. 13, 2022;
[0013] (10) Table_J_CAR_Domain.txt, 10,813 bytes, created Dec. 13, 2022;
[0014] (11) Table_K_PD1_PDL1.txt, 3,716 bytes, created Dec. 13, 2022;
[0015] (12) Table_L_Cytokine.txt, 3,716 bytes, created Dec. 13, 2022;
[0016] (13) Table_M_Transcription_Factors.txt, 4,978 bytes, created Dec. 13, 2022;
[0017] (14) Table_N_Accessory_Sequence.txt, 3,466 bytes, created Dec. 13, 2022;
[0018] (15) Table_O_Stop_Codon.txt, 390 bytes, created Dec. 13, 2022;
[0019] (16) Table_P_Immmune_Modulatory_Proteins.txt, 39,276 bytes, created Dec. 13, 2022;
[0020] (17) Table_Q_Protein_for_RGD.txt, 61,166 bytes, created Dec. 13, 2022; and
[0021] (18) Table_R_Aptamer.txt, 334 bytes, created Dec. 13, 2022.

LENGTHY TABLES
The patent application contains a lengthy table section. A copy of the table is available in electronic form from the USPTO web site (https://seqdata.uspto.gov/?pageRequest=docDetail&DocID=US20240052049A1). An electronic copy of the table will also be available from the USPTO upon request and payment of the fee set forth in 37 CFR 1.19(b)(3).

### BACKGROUND OF THE INVENTION

[0022] Conventional gene therapy involves the use of DNA for insertion of desired genetic information into host cells. The DNA introduced into the cell is usually integrated to a certain extent into the genome of one or more transfected cells, allowing for long-lasting action of the introduced genetic material in the host. While there may be substantial benefits to such sustained action, integration of exogenous DNA into a host genome may also have many deleterious effects. For example, it is possible that the introduced DNA will be inserted into an intact gene, resulting in a mutation which impedes or even totally eliminates the function of the endogenous gene. Thus, gene therapy with DNA may result in the impairment of a vital genetic function in the treated host, such as e.g., elimination or deleteriously reduced production of an essential enzyme or interruption of a gene critical for the regulation of cell growth, resulting in unregulated or cancerous cell proliferation. In addition, with conventional DNA based gene therapy it is necessary for effective expression of the desired gene product to include a strong promoter sequence, which again may lead to undesirable changes in the regulation of normal gene expression in the cell. It is also possible that the DNA based genetic material will result in the induction of undesired anti-DNA antibodies, which in turn, may trigger a possibly fatal immune response. Gene therapy approaches using viral vectors can also result in an adverse immune response. In some circumstances, the viral vector may even integrate into the host genome. In addition, production of clinical grade viral vectors is also expensive and time consuming. Targeting delivery of the introduced genetic material using viral vectors can also be difficult to control. Thus, while DNA based gene therapy has been evaluated for delivery of secreted proteins using viral vectors (U.S. Pat. No. 6,066,626; U.S. Publication No. US2004/0110709), these approaches may be limited for these various reasons.

[0023] In contrast to DNA, the use of RNA as a gene therapy agent is substantially safer because RNA does not involve the risk of being stably integrated into the genome of the transfected cell, thus eliminating the concern that the introduced genetic material will disrupt the normal functioning of an essential gene, or cause a mutation that results in deleterious or oncogenic effects, and extraneous promoter sequences are not required for effective translation of the encoded protein, again avoiding possible deleterious side effects. In addition, it is not necessary for mRNA to enter the nucleus to perform its function, while DNA must overcome this major barrier.

[0024] Circular RNA is useful in the design and production of stable forms of RNA. The circularization of an RNA molecule provides an advantage to the study of RNA structure and function, especially in the case of molecules that are prone to folding in an inactive conformation (Wang and Ruffner, 1998). Circular RNA can also be particularly interesting and useful for in vivo applications, especially in the research area of RNA-based control of gene expression and therapeutics, including protein replacement therapy and vaccination.

[0025] Prior to this invention, there were three main techniques for making circularized RNA in vitro: the splint-mediated method, the permuted intron-exon method, and the RNA ligase-mediated method. However, the existing methodologies are limited by the size of RNA that can be circularized, thus limiting their therapeutic application.

### SUMMARY

[0026] In one aspect, provided herein are precursor RNA polynucleotides comprising: a. a 5′ enhanced intron element, b. a 5′ enhanced exon element, c. a core functional element, d. a 3′ enhanced exon element, and e. a 3′ enhanced intron element, wherein the core functional element comprises: i. a translation initiation element (TIE), ii. a coding element encoding a CAR that specifically binds to BCMA, and iii. optionally, a stop codon or a stop cassette. In some embodiments, the CAR comprises an amino acid sequence selected from the group consisting of SEQ ID NO: 3690-3695.

[0027] In some embodiments, the translation initiation element (TIE) comprises an UTR or a fragment thereof, an aptamer complex or a fragment thereof, or a combination thereof. In some embodiments, the UTR or fragment thereof comprises a viral internal ribosome entry site (IRES) or a eukaryotic IRES. In some embodiments, the 5′ enhanced intron element comprises a group I intron or fragment thereof. In some embodiments, the 3′ enhanced intron element comprises a group I intron or fragment thereof. In some embodiments, the 5′ enhanced intron element further comprises a first or a first and a second nucleotide of a 3′ group I intron splice site dinucleotide. In some embodiments, the 3′ enhanced intron element further comprises a second nucleotide of a 3′ group I intron splice site dinucleotide.

[0028] In one aspect, provided herein is a circular RNA polynucleotide comprising a coding element encoding a chimeric antigen receptor (CAR), wherein the CAR comprises an antigen binding molecule that specifically binds to BCMA and comprises an amino acid sequence selected from the group consisting of SEQ ID NO: 3690-3695. In some embodiments, a circular RNA polynucleotide disclosed herein, further comprises a polynucleotide sequence encoding a CAR comprising an antigen binding molecule that specifically binds to CD19. In some embodiments, the coding element is codon optimized. In some embodiments, the CAR comprises an amino acid sequence of SEQ ID NO: 3690. In some embodiments, the circular RNA is formed from a precursor RNA polynucleotide that was transcribed from a vector or DNA comprising a PCR product, a linearized plasmid, non-linearized plasmid, linearized minicircle, a non-linearized minicircle, viral vector, cosmid, ceDNA, or an artificial chromosome. In some embodiments, a circular RNA polynucleotide disclosed herein, further comprises a translation initiation element (TIE), wherein the TIE comprises internal ribosome entry site (IRES). In some embodiments, the IRES is derived from Enterovirus, Bopivirus, Mischivirus, Gallivirus, Oscivirus, Cardiovirus, Kobuvirus, Rabovirus, Salivirus, Caliciviridae, Parechovirus, Hunnivirus, Tottorivirus, Passerivirus, Cosavirus, Sicinivirus, Shanbavirus, Allexivirus, or Megrivirus. In some embodiments, a circular RNA polynucleotide disclosed herein, further comprises an internal spacer sequence. In some embodiments, a circular RNA polynucleotide disclosed herein, further comprises 1 to 100 natural nucleotides derived from a natural exon.

[0029] In one aspect, provided herein is a pharmaceutical composition comprising: a. a circular RNA polynucleotide comprising a coding element encoding a chimeric antigen receptor (CAR), wherein the CAR comprises an antigen binding molecule that specifically binds to BCMA; and b. a nanoparticle, and optionally, a targeting moiety operably connected to the nanoparticle.

[0030] In some embodiments, the nanoparticle is a lipid nanoparticle, a core-shell particle, or a biodegradable nanoparticle. In some embodiments, the nanoparticle comprises one or more cationic lipids, ionizable lipids, or poly β-amino esters. In some embodiments, the nanoparticle comprises one or more non-cationic lipids. In some embodiments, the nanoparticle comprises one or more PEG-modified lipids, polyglutamic acid lipids, or hyaluronic acid lipids. In some embodiments, the nanoparticle comprises cholesterol. In some embodiments, the nanoparticle comprises arachidonic acid, leukotriene, or oleic acid.

[0031] In one aspect, provided herein is an improved expression construct encoding a chimeric antigen receptor (CAR), wherein the CAR comprises an antigen-binding molecule that specifically binds to BCMA, the improvement comprising a circular RNA polynucleotide expression sequence.

[0032] In one aspect, provided herein is a method of treating a subject in need thereof comprising administering a therapeutically effective amount of a composition comprising the circular RNA disclosed herein, a nanoparticle, and optionally, a targeting moiety operably connected to the nanoparticle.

[0033] In some embodiments, the subject has a cancer selected from the group consisting of: acute myeloid leukemia (AML); alveolar rhabdomyosarcoma; B cell malignancies; bladder cancer (e.g., bladder carcinoma); bone cancer; brain cancer (e.g., medulloblastoma and glioblastoma multiforme); breast cancer; cancer of the anus, anal canal, or anorectum; cancer of the eye; cancer of the intrahepatic bile duct; cancer of the joints; cancer of the neck; gallbladder cancer; cancer of the pleura; cancer of the nose, nasal cavity, or middle ear; cancer of the oral cavity; cancer of the vulva; chronic lymphocytic leukemia; chronic myeloid cancer; colon cancer; esophageal cancer, cervical cancer; fibrosarcoma; gastrointestinal carcinoid tumor; head and neck cancer (e.g., head and neck squamous cell carcinoma); Hodgkin lymphoma; hypopharynx cancer; kidney cancer; larynx cancer; leukemia; liquid tumors; lipoma; liver cancer; lung cancer (e.g., non-small cell lung carcinoma, lung adenocarcinoma, and small cell lung carcinoma); lymphoma; mesothelioma; mastocytoma; melanoma; multiple myeloma; nasopharynx cancer; non-Hodgkin lymphoma; B-chronic lymphocytic leukemia; hairy cell leukemia; Burkitt's lymphoma; ovarian cancer; pancreatic cancer; cancer of the peritoneum; cancer of the omentum; mesentery cancer; pharynx cancer; prostate cancer; rectal cancer; renal cancer; skin cancer; small intestine cancer; soft tissue cancer; solid tumors; synovial sarcoma; gastric cancer; teratoma; testicular cancer; thyroid cancer; and ureter cancer.

[0034] In one aspect, provided herein is a eukaryotic cell comprising a circular RNA polynucleotide disclosed herein. In some embodiments, the eukaryotic cell is an immune cell. In some embodiments, the eukaryotic cell is a T cell, dendritic cell, macrophage, B cell, neutrophil or basophil.

[0035] In one aspect, provided herein are circular RNA polynucleotide expression vectors encoding a chimeric antigen receptor (CAR), wherein the CAR comprises an antigen-binding molecule that specifically binds to BCMA.

[0036] In some embodiments, a CAR disclosed herein comprises an amino acid sequence selected from the group consisting of SEQ ID NO: 3690-3695.

[0037] In some embodiments, a circular RNA polynucleotide expression vector disclosed herein further comprises a polynucleotide sequence encoding a CAR comprising an antigen binding molecule that specifically binds to CD19.

[0038] In some embodiments, the protein coding or non-coding sequence is codon optimized.

[0039] In some embodiments, a circular RNA polynucleotide expression vector disclosed herein is optimized to lack at least one microRNA binding site present in an equivalent pre-optimized polynucleotide.

[0040] In some embodiments, a circular RNA polynucleotide expression vector disclosed herein is optimized to lack at least one RNA-editing susceptible site present in an equivalent pre-optimized polynucleotide.

[0041] In some embodiments, a circular RNA polynucleotide expression vector disclosed herein has an in vivo duration of therapeutic effect in humans of at least 20 hours.

[0042] In some embodiments, a circular RNA polynucleotide expression vector disclosed herein has a functional half-life of at least 6 hours.

[0043] In some embodiments, a circular RNA polynucleotide expression vector disclosed herein has a duration of therapeutic effect in a human cell greater than or equal to that of an equivalent linear RNA polynucleotide comprising the same expression sequence.

[0044] In some embodiments, a circular RNA polynucleotide expression vector disclosed herein has an in vivo duration of therapeutic effect in human greater than that of an equivalent linear RNA polynucleotide having the same expression sequence.

[0045] In some embodiments, the precursor RNA polynucleotide is transcribed from a vector or DNA comprising a PCR product, a linearized plasmid, non-linearized plasmid, linearized minicircle, a non-linearized minicircle, viral vector, cosmid, ceDNA, or an artificial chromosome.

[0046] In some embodiments, a pharmaceutical composition comprises a circular RNA polynucleotide expression vector disclosed herein, a nanoparticle, and optionally, a targeting moiety operably connected to the nanoparticle.

[0047] In some embodiments, the nanoparticle is a lipid nanoparticle, a core-shell nanoparticle, a biodegradable nanoparticle, a biodegradable lipid nanoparticle, a polymer nanoparticle, a polyplex or a biodegradable polymer nanoparticle.

[0048] In some embodiments, a pharmaceutical composition disclosed herein comprises a targeting moiety, wherein the targeting moiety mediates receptor-mediated endocytosis, endosome fusion, or direct fusion into selected cells of a selected cell population or tissue in the absence of cell isolation or purification.

[0049] In some embodiments, a pharmaceutical composition disclosed herein comprises a targeting moiety operably connected to the nanoparticle.

[0050] In some embodiments, the targeting moiety is a small molecule, scFv, nanobody, peptide, cyclic peptide, di or tri cyclic peptide, minibody, polynucleotide aptamer, engineered scaffold protein, heavy chain variable region, light chain variable region, or a fragment thereof.

[0051] In some embodiments, a pharmaceutical composition disclosed herein, wherein less than 1%, by weight, of the polynucleotides in the composition are double stranded RNA, DNA splints, DNA template, or triphosphorylated RNA.

[0052] In some embodiments, a pharmaceutical composition disclosed herein, wherein less than 1%, by weight, of the polynucleotides and proteins in the pharmaceutical composition are double stranded RNA, DNA splints, DNA template, triphosphorylated RNA, phosphatase proteins, protein ligases, RNA polymerases, and capping enzymes.

[0053] In one aspect, provided herein is a pharmaceutical composition comprising a circular RNA polynucleotide disclosed herein and a pharmaceutical salt, buffer, diluent or combination thereof.

[0054] In one aspect, provided herein is an improved expression construct encoding a chimeric antigen receptor (CAR), wherein the CAR comprises an antigen-binding molecule that specifically binds to BCMA, the improvement comprising a circular RNA polynucleotide expression vector.

[0055] In one aspect, provided herein is a circular RNA polynucleotide expression vector encoding a chimeric antigen receptor (CAR), wherein the CAR comprises means for specifically binding to BCMA.

[0056] In one aspect, provided herein is a recombinant cell, expressing the CAR encoded by the circular RNA polynucleotide expression vector disclosed herein.

[0057] In some embodiments, the cell is an immune cell.

[0058] In some embodiments, the immune cell is a T cell, an NK cell, or a macrophage.

[0059] In one aspect, provided herein are precursor RNA polynucleotides comprising, in the following order: a. a 5′ enhanced intron element, b. a 5′ enhanced exon element, c. a core functional element, d. a 3′ enhanced exon element, and e. a 3′ enhanced intron element, wherein the core functional element comprises, in the following order: i. a translation initiation element (TIE), ii. a coding element encoding a CAR that specifically binds to BCMA, and iii. optionally, a stop codon or a stop cassette.

[0060] In one aspect, provided herein are precursor RNA polynucleotides comprising, in the following order: a. a 5′ enhanced intron element, b. a 5′ enhanced exon element, c. a core functional element, d. a 3′ enhanced exon element, and e. a 3′ enhanced intron element wherein the core functional element comprises, in the following order: i. a coding region encoding a CAR that specifically binds to BCMA, ii. optionally, a stop codon or a stop cassette, and iii. a translation initiation element (TIE).

[0061] In some embodiments, the core functional element further comprises a noncoding element.

[0062] In some embodiments, the TIE comprises an untranslated region (UTR) or a fragment thereof, an aptamer complex or a fragment thereof, or a combination thereof.

[0063] In some embodiments, the UTR or fragment thereof is derived from a viral or eukaryotic messenger RNA. In some embodiments, the UTR or fragment thereof comprises a viral internal ribosome entry site (IRES) or eukaryotic IRES. In some embodiments, the IRES comprises a sequence selected from Table_A or a fragment thereof. In some embodiments, the IRES comprises one or more modified nucleotides compared to the wild-type viral IRES or eukaryotic IRES.

[0064] In some embodiments, the aptamer complex or a fragment thereof comprises a natural or synthetic aptamer sequence. In some embodiments, the aptamer complex or a fragment thereof comprises a sequence selected from any of the ASCII tables. In some embodiments, the aptamer complex or a fragment thereof comprises more than one aptamer.

[0065] In some embodiments, the TIE comprises an UTR and an aptamer complex. In some embodiments, the UTR is located upstream to the aptamer complex. In some embodiments, the TIE further comprises an accessory element. In some embodiments, the accessory element comprises a miRNA binding site or a fragment thereof, a restriction site or a fragment thereof, an RNA editing motif or a fragment thereof, a zip code element or a fragment thereof, an RNA trafficking element or a fragment thereof, or a combination thereof. In some embodiments, the accessory element comprises a binding domain to an IRES transacting factor (ITAF). In some embodiments, the binding domain comprises a polyA region, a polyC region, a poly AC region, a polyprimidine tract, or a combination or variant thereof. In some embodiments, the ITAF comprises a poly(rC)-binding protein 1 (PCBP1), PCBP2, PCBP3, PCBP4, poly(A)-binding protein 1 (PABP1), polyprimidine-tract binding protein (PTB), Argonaute protein family member, HNRNPK (heterogeneous nuclear ribonucleoprotein K protein), or La protein, or a fragment or combination thereof.

[0066] In some embodiments, the noncoding element comprises more than one noncoding element. In some embodiments, the noncoding element comprises 50 to 15,000 nucleotides in length. In some embodiments, the noncoding element sequence comprises or consists of a sequence selected from any of the ASCII tables.

[0067] In some embodiments, the core functional element comprises a termination sequence. In some embodiments, the termination sequence is located at the 5′ end of the 3′ enhanced exon element. In some embodiments, the termination sequence is a stop codon. In some embodiments, termination sequence is a stop cassette. In some embodiments, the stop cassette comprises one or more stop codons in one or more frames. In some embodiments, each frame comprises a stop codon. In some embodiments, each frame comprises two or more stop codons.

[0068] In some embodiments, the 5′ enhanced intron element comprises a 3′ intron fragment. In some embodiments, the 3′ intron fragment further comprises a first or a first and a second nucleotides of a 3′ group I intron splice site dinucleotide. In some embodiments, the 3′ intron fragment is located at the 3′ end of the 5′ enhanced intron element. In some embodiments, the group I intron comprises is derived from a bacterial phage, viral vector, organelle genome, nuclear rDNA gene. In some embodiments, the nuclear rDNA gene comprises a nuclear rDNA gene derived from a fungi, plant, or algae, or a fragment thereof.

[0069] In some embodiments, the 5′ enhanced intron element comprises a leading untranslated sequence located at the 5′ end. In some embodiments, the leading untranslated sequence comprises a spacer. In some embodiments, the leading untranslated sequence comprises the last nucleotide of a transcription start site. In some embodiments, the leading untranslated sequence comprises 1 to 100 additional nucleotides.

[0070] In some embodiments, the 5′ enhanced intron element comprises a 5′ affinity sequence. In some embodiments, the 5′ affinity sequence comprises a polyA, polyAC, or polypyrimidine sequence. In some embodiments, the 5′ affinity sequence comprises 10 to 100 nucleotides. In some embodiments, the 5′ enhanced intron element comprises a 5′ external spacer sequence. In some embodiments, the 5′ external spacer sequence is located between the 5′ affinity sequence and the 3′ intron fragment. In some embodiments, the 5′ external spacer sequence has a length of about 6 to 60 nucleotides. In some embodiments, the 5′ external spacer sequence comprises or consists of a sequence selected from any of the ASCII tables.

[0071] In some embodiments, the 5′ enhanced intron element comprises, in the following order: a. a leading untranslated sequence; b. a 5′ affinity sequence; c. a 5′ external spacer sequence; and d. a 3′ intron fragment including the first nucleotide of a 3′ Group I intron splice site; wherein the leading untranslated sequence comprises the last nucleotide of a transcription start site and 1 to 100 nucleotides.

[0072] In some embodiments, the 5′ enhanced intron element comprises, in the following order: a. a leading untranslated sequence; b. a 5′ external spacer sequence; c. a 5′ affinity sequence; and d. a 3′ intron fragment including the first nucleotide of a 3′ group I splice site; wherein the leading untranslated sequence comprises the last nucleotide of a transcription start site and 1 to 100 nucleotide.

[0073] In some embodiments, the 5′ enhanced intron element comprises, in the following order: a. a leading untranslated sequence; b. a 5′ affinity sequence; c. a 5′ external spacer sequence; and d. a 3′ intron fragment including the first and second nucleotides of a 3′ Group I intron splice site; wherein the leading untranslated sequence comprises the last nucleotide of a transcription start site and 1 to 100 nucleotides; and wherein the 5′ enhanced exon element comprises a 3′ exon fragment lacking the second nucleotide of a 3′ group I splice site dinucleotide.

[0074] In some embodiments, the 5′ enhanced intron element comprises, in the following order: a. a leading untranslated sequence; b. a 5′ external spacer sequence; c. a 5′ affinity sequence; and d. a 3′ intron fragment including the first and second nucleotides of a 3′ Group I splice site; wherein the leading untranslated sequence comprises the last nucleotide of a transcription start site and 1 to 100 nucleotide; and wherein the 5′ enhanced exon element comprises a 3′ exon fragment lacking the second nucleotide of a 3′ group I splice site dinucleotide.

[0075] In some embodiments, the 5′ enhanced exon element comprises a 3′ exon fragment. In some embodiments, the 3′ exon fragment further comprises the second nucleotide of a 3′ group I intron splice site dinucleotide. In some embodiments, the 3′ exon fragment comprises 1 to 100 natural nucleotides derived from a natural exon. In some embodiments, the natural exon derived from a Group I intron containing gene or a fragment thereof. In some embodiments, the natural exon derived from an anabaena bacterium, T4 phage virus, twort bacteriophage, tetrahymena, or azoarcus bacterium.

[0076] In some embodiments, the 5′ enhanced exon element comprises a 5′ internal spacer sequence located downstream from the 3′ exon fragment. In some embodiments, the 5′ internal spacer sequence is about 6 to 60 nucleotides in length. In some embodiments, the 5′ internal spacer sequence comprises or consists of a sequence selected from any of the ASCII tables.

[0077] In some embodiments, the 5′ enhanced exon element comprises in the following order: a. a 3′ exon fragment including the second nucleotide of a 3′ group I intron splice site dinucleotide; and b. a 5′ internal spacer sequence, wherein the 3′ exon fragment comprises 1 to 100 natural nucleotides derived from a natural exon.

[0078] In some embodiments, the 5′ enhanced exon element comprises in the following order: a. a 3′ exon fragment; and b. a 5′ internal spacer sequence, wherein the 3′ exon fragment comprises 1 to 100 natural nucleotides derived from a natural exon; and wherein the 5′ enhanced intron element comprises a 3′ intron fragment comprising the first and second nucleotides of a 3′ group I splice site dinucleotide.

[0079] In some embodiments, the 3′ enhanced exon element comprises a 5′ exon fragment. In some embodiments, the 5′ exon fragment comprises the first nucleotide of a 5′ group I intron fragment. In some embodiments, the 5′ exon fragment further comprises 1 to 100 nucleotides derived from a natural exon. In some embodiments, the natural exon is derived from a Group I intron containing gene or a fragment thereof.

[0080] In some embodiments, the 3′ enhanced exon element comprises a 3′ internal spacer sequence. In some embodiments, the 3′ internal spacer sequence is located between the termination sequence and the 5′ exon fragment. In some embodiments, the 3′ internal spacer is about 6 to 60 nucleotides in length. In some embodiments, the 3′ internal spacer comprises or consists of a sequence selected from any of the ASCII tables.

[0081] In some embodiments, the 3′ enhanced exon element comprises: a. a 3′ internal spacer sequence; and b. a 5′ exon fragment including the first nucleotide of a 5′ group I intron splice site dinucleotide, wherein the 5′ exon fragment comprises 1 to 100 nucleotides derived from a natural exon.

[0082] In some embodiments, the 3′ enhanced exon element comprises: a. a 3′ internal spacer sequence; and b. a 5′ exon fragment, wherein the 5′ exon fragment comprises 1 to 100 nucleotides derived from a natural exon; wherein the 3′ enhanced intron element comprises a 5′ intron fragment comprising the first and second nucleotide of a 5′ group I intron splice site dinucleotide.

[0083] In some embodiments, the 3′ enhanced intron element comprises a 5′ intron fragment. In some embodiments, the 5′ intron fragment comprises a second nucleotide of a 5′ group I intron splice site dinucleotide.

[0084] In some embodiments, the 3′ enhanced intron element comprises a trailing untranslated sequence located at the 3′ end of the 5′ intron. In some embodiments, the trailing untranslated sequence comprises 3 to 12 nucleotides.

[0085] In some embodiments, the 3′ enhanced intron fragment comprises a 3′ external spacer sequence. In some embodiments, the 3′ external spacer sequence is located between the 5′ intron fragment and trailing untranslated sequence. In some embodiments, the 3′ external spacer sequence has a length of 6 to 60 nucleotides in length. In some embodiments, the 3′ external spacer sequence comprises or consists of a sequence selected from any of the ASCII tables.

[0086] In some embodiments, the 3′ enhanced intron element comprises a 3′ affinity sequence. In some embodiments, the 3′ affinity sequence is located between the 3′ external spacer sequence and the trailing untranslated sequence. In some embodiments, the 3′ affinity sequence comprises a polyA, poly AC, or polypyrimidine sequence. In some embodiments, the affinity sequence comprises 10 to 100 nucleotides.

[0087] In some embodiments, the 5′ enhanced intron element further comprises a 5′ external duplex sequence; wherein the 3′ enhanced intron element further comprises a 3′ external duplex sequence. In some embodiments, the 5′ external duplex sequence and 3′ external duplex sequence are fully or partially complementary to each other. In some embodiments, the 5′ external duplex sequence comprises fully synthetic or partially synthetic nucleotides. In some embodiments, the 3′ external duplex sequence comprises fully synthetic or partially synthetic nucleotides. In some embodiments, the 3′ external duplex sequence is about 6 to about 50 nucleotides. In some embodiments, the 5′ external duplex sequence is about 6 to about 50 nucleotides. In some embodiments, the 3′ external duplex sequence comprises or consists of a sequence selected from any of the ASCII tables. In some embodiments, the 5′ external duplex sequence comprises or consists of a sequence selected from any of the ASCII tables.

[0088] In some embodiments, the 5′ enhanced exon element further comprises a 5′ internal duplex sequence; wherein the 3′ enhanced exon element further comprises a 3′ internal duplex sequence. In some embodiments, the 5′ internal duplex sequence and 3′ internal duplex sequence are fully or partially complementary to each other. In some embodiments, the 5′ internal duplex sequence comprises fully synthetic or partially synthetic nucleotides. In some embodiments, the 3′ internal duplex sequence comprises fully synthetic or partially synthetic nucleotides. In some embodiments, the 3′ internal duplex sequence is about 6 to about 19 nucleotides. In some embodiments, the 5′ internal duplex sequence is about 6 to about 19 nucleotides. In some embodiments, the 3′ internal duplex sequence comprises or consists of a sequence selected from any of the ASCII tables. In some embodiments, the 5′ internal duplex sequence comprises or consists of a sequence selected from any of the ASCII tables.

[0089] In some embodiments, the 3′ enhanced intron fragment comprises in the following order: a. a 5′ intron fragment including the second nucleotide of a 5′ group I intron splice site dinucleotide; b. a 3′ external spacer sequence; and c. a 3′ affinity sequence.

[0090] In some embodiments, the 3′ enhanced intron fragment comprises in the following order: a. a 5′ intron fragment including the first and second nucleotide of a 5′ group I intron splice site dinucleotide; b. a 3′ external spacer sequence; and c. a 3′ affinity sequence, wherein the 3′ enhanced exon element comprises a 5′ exon fragment lacking the first nucleotide of a 5′ group I intron splice site dinucleotide.

[0091] In some embodiments, a provided precursor RNA polynucleotide comprises in the following order: a. a leading untranslated sequence; b. a 5′ affinity sequence; c. 5′ external duplex sequence; d. 5′ spacer sequence; e. 3′ intron fragment; f. 3′ exon fragment; g. 5′ internal duplex sequence; h. 5′ internal spacer sequence; i. a translation initiation element; j. a coding element; k. a termination sequence; l. a 3′ internal spacer sequence; m. a 3′ internal duplex sequence; n. a 5′ exon fragment; o. a 5′ intron fragment; p. a 3′ external duplex sequence; q. a 3′ affinity sequence; and r. a trailing untranslated sequence.

[0092] In some embodiments, a provided precursor RNA polynucleotide comprises in the following order: a. a leading untranslated sequence; b. a 5′ affinity sequence; c. a 5′ external spacer sequence; d. a 3′ intron fragment; e. a 3′ exon fragment; f. a 5′ internal duplex sequence; g. a 5′ internal spacer sequence; h. a noncoding element; i. a 3′ internal spacer sequence; j. a 3′ internal duplex sequence; k. a 5′ exon fragment; l. a 5′ intron fragment; m. a 3′ external spacer sequence; n. a 3′ affinity sequence; and o. a trailing untranslated sequence.

[0093] In some embodiments, a provided precursor RNA polynucleotide comprises in the following order: a. a leading untranslated sequence; b. a 5′ affinity sequence; c. a 5′ external spacer sequence; d. a 3′ intron fragment; e. a 3′ exon fragment; f. a 5′ internal duplex sequence; g. a 5′ internal spacer sequence; h. a translation initiation element; i. a coding element encoding a CAR that specifically binds to BCMA; j. a termination sequence; k. a 3′ internal spacer sequence; l. a 3′ internal duplex sequence; m. a 5′ exon fragment; n. a 5′ intron fragment; o. a 3′ external spacer sequence; and p. a 3′ affinity sequence.

[0094] In some embodiments, a provided precursor RNA polynucleotide comprises in the following order: a. a leading untranslated sequence; b. a 5′ affinity sequence; c. a 5′ external spacer sequence; d. a 3′ intron fragment; e. a 3′ exon fragment; f. a 5′ internal spacer sequence; g. a translation initiation element; h. a coding element encoding a CAR that specifically binds to BCMA; i. a termination sequence; j. a 3′ internal spacer sequence; k. a 5′ exon fragment; l. a 5′ intron fragment; m. a 3′ external spacer sequence; and n. a 3′ affinity sequence.

[0095] In some embodiments, a provided precursor RNA polynucleotide comprises in the following order: a. a leading untranslated sequence; b. a 5′ affinity sequence; c. a 5′ external spacer sequence; d. a 3′ intron fragment; e. a 3′ exon fragment; f. a 5′ internal spacer sequence; g. a noncoding element; h. a 3′ internal spacer sequence; i. a 5′ exon fragment; j. a 5′ intron fragment; k. a 3′ external spacer sequence; l. a 3′ affinity sequence; and m. a trailing untranslated sequence.

[0096] In some embodiments, a provided precursor RNA polynucleotide comprises in the following order: a. a leading untranslated sequence; b. a 5′ affinity sequence; c. 5′ external duplex sequence; d. 5′ spacer sequence; e. 3′ intron fragment; f. 3′ exon fragment; g. 5′ internal duplex sequence; h. 5′ internal spacer sequence; i. a termination sequence; j. a coding element encoding a CAR that specifically binds to BCMA; k. a translation initiation element; l. a 3′ internal spacer sequence; m. a 3′ internal duplex sequence; n. a 5′ exon fragment; o. a 5′ intron fragment; p. a 3′ external duplex sequence; q. a 3′ affinity sequence; and r. a trailing untranslated sequence.

[0097] In some embodiments, the coding element comprises two or more protein coding regions. In some embodiments, the precursor RNA polynucleotide comprises a polynucleotide sequence encoding a proteolytic cleavage site or a ribosomal stuttering element between the first and second expression sequence. In some embodiments, the ribosomal stuttering element is a self-cleaving spacer. In some embodiments, the precursor RNA polynucleotide comprises a polynucleotide sequence encoding 2A ribosomal stuttering peptide.

[0098] In some embodiments, the core functional element comprises two or more internal ribosome entry sites (IRESs). In some embodiments, the core functional element comprises a TIE, a coding element, a termination sequence, optionally a spacer, a TIE, a coding element, and a termination sequence, wherein the TIE comprises an IRES.

[0099] Also provided herein are circular RNA polynucleotides produced from the precursor RNA polynucleotides provided herein. In some embodiments, the precursor RNA polynucleotide is transcribed from a vector or DNA comprising a PCR product, a linearized plasmid, non-linearized plasmid, linearized minicircle, a non-linearized minicircle, viral vector, cosmid, ceDNA, or an artificial chromosome. In some embodiments, the circular RNA polynucleotide consists of natural nucleotides. In some embodiments, the protein coding or non-coding sequence is codon optimized. In some embodiments, the circular RNA polynucleotide is from about 0.1 to about 15 kilobases in length. In some embodiments, the circular RNA polynucleotide is optimized to lack at least one microRNA binding site present in an equivalent pre-optimized polynucleotide. In some embodiments, the circular RNA polynucleotide is optimized to lack at least one RNA-editing susceptible site present in an equivalent pre-optimized polynucleotide. In some embodiments, the circular RNA polynucleotide has an in vivo duration of therapeutic effect in humans of at least 20 hours. In some embodiments, the circular RNA polynucleotide has a functional half-life of at least 6 hours. In some embodiments, the circular RNA polynucleotide has a duration of therapeutic effect in a human cell greater than or equal to that of an equivalent linear RNA polynucleotide comprising the same expression sequence. In some embodiments, the circular RNA polynucleotide has an in vivo duration of therapeutic effect in human greater than that of an equivalent linear RNA polynucleotide having the same expression sequence.

[0100] Also provided herein is a method of making a translation initiation element (TIE) comprising: a. obtaining a viral untranslated region (UTR); b. determining the functional unit of the UTR capable of binding to an initiation factor and/or initiating translation by progressively deleting sequence; c. removing non-functional units of the UTR; and optionally, modifying the ends of the UTR. In some embodiments, the modification of the ends of the UTR is about 1 percent to 75% of the viral UTR. In some embodiments, the functional unit of UTR is determined by deletion scanning from the 5′ and 3′ ends of the UTR or mutational scanning across the length of the UTR to identify important regions.

[0101] Also provided herein is a pharmaceutical composition comprising a circular RNA polynucleotide provided herein, a nanoparticle, and optionally, a targeting moiety operably connected to the nanoparticle. In some embodiments, the nanoparticle is a lipid nanoparticle, a core-shell nanoparticle, a biodegradable nanoparticle, a biodegradable lipid nanoparticle, a polymer nanoparticle, a polyplex or a biodegradable polymer nanoparticle. In some embodiments, the pharmaceutical composition comprises a targeting moiety, wherein the targeting moiety mediates receptor-mediated endocytosis, endosome fusion, or direct fusion into selected cells of a selected cell population or tissue in the absence of cell isolation or purification. In some embodiments, the pharmaceutical composition comprises a targeting moiety operably connected to the nanoparticle. In some embodiments, the targeting moiety is a small molecule, scFv, nanobody, peptide, cyclic peptide, di or tri cyclic peptide, minibody, polynucleotide aptamer, engineered scaffold protein, heavy chain variable region, light chain variable region, or a fragment thereof. In some embodiments, less than 1%, by weight, of the polynucleotides in the composition are double stranded RNA, DNA splints, DNA template, or triphosphorylated RNA. In some embodiments, less than 1%, by weight, of the polynucleotides and proteins in the pharmaceutical composition are double stranded RNA, DNA splints, DNA template, triphosphorylated RNA, phosphatase proteins, protein ligases, RNA polymerases, and capping enzymes.

[0102] Also provided herein is a pharmaceutical composition comprising a circular RNA polynucleotide provided herein and a liposome, dendrimer, carbohydrate carrier, glycan nanomaterial, fusome, exosome, or a combination thereof.

[0103] Also provided herein is a pharmaceutical composition a circular RNA polynucleotide provided herein and a pharmaceutical salt, buffer, diluent or combination thereof.

[0104] Also provided herein is a method of treating a subject in need thereof comprising administering a therapeutically effective amount of a composition comprising the circular RNA polynucleotide provided herein, a nanoparticle, and optionally, a targeting moiety operably connected to the nanoparticle. In some embodiments, the targeting moiety is a small molecule, scFv, nanobody, peptide, cyclic peptide, di or tri cyclic peptide, minibody, heavy chain variable region, engineered scaffold protein, light chain variable region or fragment thereof. In some embodiments, the nanoparticle is a lipid nanoparticle, a core-shell nanoparticle, or a biodegradable nanoparticle. In some embodiments, the nanoparticle comprises one or more cationic lipids, ionizable lipids, or poly β-amino esters. In some embodiments, the nanoparticle comprises one or more non-cationic lipids. In some embodiments, the nanoparticle comprises one or more PEG-modified lipids, polyglutamic acid lipids, or hyaluronic acid lipids. In some embodiments, the nanoparticle comprises cholesterol. In some embodiments, the nanoparticle comprises arachidonic acid, leukotriene, or oleic acid. In some embodiments, the composition comprises a targeting moiety, wherein the targeting moiety mediates receptor-mediated endocytosis selectively into cells of a selected cell population in the absence of cell selection or purification. In some embodiments, the nanoparticle comprises more than one circular RNA polynucleotide. In some embodiments, the subject has a cancer selected from the group consisting of: acute myeloid leukemia (AML); alveolar rhabdomyosarcoma; B cell malignancies; bladder cancer (e.g., bladder carcinoma); bone cancer; brain cancer (e.g., medulloblastoma and glioblastoma multiforme); breast cancer; cancer of the anus, anal canal, or anorectum; cancer of the eye; cancer of the intrahepatic bile duct; cancer of the joints; cancer of the neck; gallbladder cancer; cancer of the pleura; cancer of the nose, nasal cavity, or middle ear; cancer of the oral cavity; cancer of the vulva; chronic lymphocytic leukemia; chronic myeloid cancer; colon cancer; esophageal cancer, cervical cancer; fibrosarcoma; gastrointestinal carcinoid tumor; head and neck cancer (e.g., head and neck squamous cell carcinoma); Hodgkin lymphoma; hypopharynx cancer; kidney cancer; larynx cancer; leukemia; liquid tumors; lipoma; liver cancer; lung cancer (e.g., non-small cell lung carcinoma, lung adenocarcinoma, and small cell lung carcinoma); lymphoma; mesothelioma; mastocytoma; melanoma; multiple myeloma; nasopharynx cancer; non-Hodgkin lymphoma; B-chronic lymphocytic leukemia; hairy cell leukemia; Burkitt's lymphoma; ovarian cancer; pancreatic cancer; cancer of the peritoneum; cancer of the omentum; mesentery cancer; pharynx cancer; prostate cancer; rectal cancer; renal cancer; skin cancer; small intestine cancer; soft tissue cancer; solid tumors; synovial sarcoma; gastric cancer; teratoma; testicular cancer; thyroid cancer; and ureter cancer. In some embodiments, the subject has an autoimmune disorder selected from scleroderma, Grave's disease, Crohn's disease, Sjogren's disease, multiple sclerosis, Hashimoto's disease, psoriasis, myasthenia gravis, autoimmune polyendocrinopathy syndromes, Type I diabetes mellitus (TIDM), autoimmune gastritis, autoimmune uveoretinitis, polymyositis, colitis, thyroiditis, and the generalized autoimmune diseases typified by human Lupus.

[0105] Also provided herein is a eukaryotic cell comprising a circular RNA polynucleotide or pharmaceutical composition provided herein. In some embodiments, the eukaryotic cell is a human cell. In some embodiments, the eukaryotic cell is an immune cell. In some embodiments, the eukaryotic cell is a T cell, dendritic cell, macrophage, B cell, neutrophil, or basophil.

[0106] Also provided herein is a prokaryotic cell comprising a circular RNA polynucleotide provided herein.

[0107] In another aspect, provided herein are methods of purifying circular RNA, comprising hybridizing an oligonucleotide conjugated to a solid surface with an affinity sequence.

[0108] In some embodiments, one or more copies of the affinity sequence is present in a precursor RNA. In some embodiments, the precursor RNA is the precursor described herein. In some embodiments, the circular RNA is the circular RNA described herein. In some embodiments, the affinity sequence is removed during formation of the circular RNA. In some embodiments, the method comprises separating the circular RNA from the precursor RNA.

[0109] In some embodiments, the affinity sequence comprises a polyA sequence. In some embodiments, the oligonucleotide that hybridizes to the affinity sequence is a deoxythymidine oligonucleotide. In some embodiments, the affinity sequence comprises a dedicated binding site (DBS). In some embodiments, the DBS comprises the nucleotide sequence of: of TATAATTCTACCCTATTGAGGCATTGACTA (SEQ ID NO: 3667). In some embodiments, the oligonucleotide that hybridizes to the affinity sequence comprises a sequence complementary to the DBS.

[0110] In another aspect, provided herein are methods of purifying circular RNA comprising: a. contacting a composition comprising linear RNA and circular RNA with a binding agent that preferentially binds to the linear RNA over the circular RNA; and b. separating RNA bound to the binding agent from RNA that is not bound to the binding agent.

[0111] In some embodiments, the binding agent is conjugated to a solid support. In some embodiments, the solid support comprises agarose, an agarose-derived resin, cellulose, a cellulose fiber, a magnetic bead, a high throughput microtiter plate, a non-agarose resin, a glass surface, a polymer surface, or a combination thereof. In some embodiments, the solid support comprises agarose or cellulose.

[0112] In some embodiments, the binding agent comprises an oligonucleotide that is complementary to a sequence present in the linear RNA and absent from the circular RNA. In some embodiments, the binding agent comprises an oligonucleotide that is 100% complementary to a sequence present in the linear RNA and absent from the circular RNA. In some embodiments, the sequence present in the linear RNA and absent from the circular RNA is an affinity sequence. In some embodiments, the sequence present in the linear RNA and absent from the circular RNA comprises a polyA sequence. In some embodiments, the binding agent comprises an oligonucleotide comprising a poly-deoxythymidine sequence. In some embodiments, the sequence present in the linear RNA and absent from the circular RNA comprises a DBS sequence. In some embodiments, the DBS sequence comprises the nucleotide sequence of: of TATAATTCTACCCTATTGAGGCATTGACTA (SEQ ID NO: 3667). In some embodiments, the sequence present in the linear RNA and absent from the circular RNA is 10-150 nucleotides in length. In some embodiments, the sequence present in the linear RNA and absent from the circular RNA is 10-70 nucleotides in length. In some embodiments, the sequence present in the linear RNA and absent from the circular RNA is 20-30 nucleotides in length. In some embodiments, the sequence present in the linear RNA and absent from the circular RNA is present at two locations in the linear RNA. In some embodiments, the sequence present in the linear RNA and absent from the circular RNA is encoded into the linear RNA during transcription of the linear RNA. In some embodiments, the sequence present in the linear RNA and absent from the circular RNA is enzymatically added to the linear RNA. In some embodiments, the linear RNA does not comprise a methylguanylate cap. In some embodiments, the linear RNA comprises a precursor RNA or a fragment thereof.

[0113] In some embodiments, the precursor RNA is the precursor RNA described herein or a fragment thereof. In some embodiments, the precursor RNA is produced using in vitro transcription (IVT). In some embodiments, the fragment comprises an intron. In some embodiments, the linear RNA comprises a prematurely terminated RNA or RNA formed by abortive transcription.

[0114] In some embodiments, the circular RNA comprises the circular RNA described herein. In some embodiments, the circular RNA is produced using a method comprising splicing the precursor RNA. In some embodiments, the sequence present in the linear RNA and absent from the circular RNA is excised during the splicing. In some embodiments, the circular RNA is less than 6 kilobases in size.

[0115] In some embodiments, the separating comprises removing the unbound RNA from the solid support. In some embodiments, the removing comprises eluting the unbound RNA from the solid support.

[0116] In some embodiments, the method comprises heating the composition. In some embodiments, the method comprises buffer exchange. In some embodiments, buffer exchange is performed before the contacting. In some embodiments, buffer exchange is performed after the separating. In some embodiments, buffer exchange is performed before the contacting, and the resulting buffer comprises greater than 1 mM monovalent salt. In some embodiments, the monovalent salt is NaCl or KCl. In some embodiments, the resulting buffer comprises Tris. In some embodiments, the resulting buffer comprises EDTA. In some embodiments, buffer exchange is performed after the separating into storage buffer, wherein the storage buffer comprises 1 mM sodium citrate, pH 6.5. In some embodiments, the method comprises filtering the circular RNA after the separating.

### BRIEF DESCRIPTION OF THE DRAWINGS

[0117] FIGS. 1A-1E depict luminescence in supernatants of HEK293 (FIGS. 1A, 1D, and 1E), HepG2 (FIG. 1B), or 1C1C7 (FIG. 1C) cells 24 hours after transfection with circular RNA comprising a Gaussia luciferase expression sequence and various IRES sequences.

[0118] FIGS. 2A-2C depict luminescence in supernatants of HEK293 (FIG. 2A), HepG2 (FIG. 2B), or 1C1C7 (FIG. 2C) cells 24 hours after transfection with circular RNA comprising a Gaussia luciferase expression sequence and various IRES sequences having different lengths.

[0119] FIGS. 3A and 3B depict stability of select IRES constructs in HepG2 (FIG. 3A) or 1C1C7 (FIG. 3B) cells over 3 days as measured by luminescence.

[0120] FIGS. 4A and 4B depict protein expression from select IRES constructs in Jurkat cells, as measured by luminescence from secreted Gaussia luciferase in cell supernatants.

[0121] FIGS. 5A and 5B depict stability of select IRES constructs in Jurkat cells over 3 days as measured by luminescence.

[0122] FIGS. 6A and 6B depict comparisons of 24 hour luminescence (FIG. 6A) or relative luminescence over 3 days (FIG. 6B) of modified linear, unpurified circular, or purified circular RNA encoding Gaussia luciferase.

[0123] FIGS. 7A-7F depict transcript induction of IFNγ (FIG. 7A), IL-6 (FIG. 7B), IL-2 (FIG. 7C), RIG-I (FIG. 7D), IFN-β1 (FIG. 7E), and TNFα (FIG. 7F) after electroporation of Jurkat cells with modified linear, unpurified circular, or purified circular RNA.

[0124] FIGS. 8A-8C depict a comparison of luminescence of circular RNA and modified linear RNA encoding Gaussia luciferase in human primary monocytes (FIG. 8A) and macrophages (FIG. 8B and FIG. 8C).

[0125] FIGS. 9A-9B depicts relative luminescence over 3 days (FIG. 9A) in supernatant of primary T cells after transduction with circular RNA comprising a Gaussia luciferase expression sequence and varying IRES sequences or 24 hour luminescence (FIG. 9B).

[0126] FIGS. 10A-10C depict 24 hour luminescence in supernatant of primary T cells (FIG. 10A) after transduction with circular RNA or modified linear RNA comprising a Gaussia luciferase expression sequence, or relative luminescence over 3 days (FIG. 10B), and 24 hour luminescence in PBMCs (FIG. 10C).

[0127] FIGS. 11A and 11B depict HPLC chromatograms (FIG. 11A) and circularization efficiencies (FIG. 11B) of RNA constructs having different permutation sites.

[0128] FIGS. 12A and 12B depict HPLC chromatograms (FIG. 12A) and circularization efficiencies (FIG. 12B) of RNA constructs having different introns and/or permutation sites.

[0129] FIGS. 13A and 13B depict HPLC chromatograms (FIG. 13A) and circularization efficiencies (FIG. 13B) of 3 RNA constructs with or without homology arms.

[0130] FIG. 14 depicts circularization efficiencies of 3 RNA constructs without homology arms or with homology arms having various lengths and GC content.

[0131] FIGS. 15A and 15B depict HPLC HPLC chromatograms showing the contribution of strong homology arms to improved splicing efficiency, the relationship between circularization efficiency and nicking in select constructs, and combinations of permutations sites and homology arms hypothesized to demonstrate improved circularization efficiency.

[0132] FIG. 16 shows fluorescent images of T cells mock electroporated (left) or electroporated with circular RNA encoding a CAR (right) in co-cultured with Raji cells expressing GFP and firefly luciferase.

[0133] FIG. 17 shows bright field (left), fluorescent (center), and overlay (right) images of T cells mock electroporated (top) or electroporated with circular RNA encoding a CAR (bottom) and co-cultured with Raji cells expressing GFP and firefly luciferase.

[0134] FIG. 18 depicts specific lysis of Raji target cells by T cells mock electroporated or electroporated with circular RNA encoding different CAR sequences.

[0135] FIGS. 19A and 19B depict luminescence in supernatants of Jurkat cells (left) or resting primary human CD3+ T cells (right) 24 hours after transduction with linear or circular RNA comprising a Gaussia luciferase expression sequence and varying IRES sequences (FIG. 19A), and relative luminescence over 3 days (FIG. 19B).

[0136] FIGS. 20A-20F depict transcript induction of IFN-β1 (FIG. 20A), RIG-I (FIG. 20B), IL-2 (FIG. 20C), IL-6 (FIG. 20D), IFNγ (FIG. 20E), and TNFα (FIG. 20F) after electroporation of human CD3+ T cells with modified linear, unpurified circular, or purified circular RNA.

[0137] FIGS. 21A and 21B depict specific lysis of Raji target cells by human primary CD3+ T cells electroporated with circRNA encoding a CAR as determined by detection of firefly luminescence (FIG. 21A), and IFNγ transcript induction 24 hours after electroporation with different quantities of circular or linear RNA encoding a CAR sequence (FIG. 21B).

[0138] FIGS. 22A and 22B depict specific lysis of target or non-target cells by human primary CD3+ T cells electroporated with circular or linear RNA encoding a CAR at different E:T ratios (FIG. 22A and FIG. 22B) as determined by detection of firefly luminescence.

[0139] FIG. 23 depicts specific lysis of target cells by human CD3+ T cells electroporated with RNA encoding a CAR at 1, 3, 5, and 7 days post electroporation.

[0140] FIG. 24 depicts specific lysis of target cells by human CD3+ T cells electroporated with circular RNA encoding a CD19 or BCMA targeted CAR.

[0141] FIG. 25 depicts total Flux of organs harvested from CD-1 mice dosed with circular RNA encoding FLuc and formulated with 50% Lipid 10b-15, 10% DSPC, 1.5% PEG-DMG, and 38.5% cholesterol.

[0142] FIG. 26 shows images highlighting the luminescence of organs harvested from CD-1 mice dosed with circular RNA encoding FLuc and formulated with 50% Lipid 10b-15, 10% DSPC, 1.5% PEG-DMG, and 38.5% cholesterol.

[0143] FIGS. 27A-27F depict molecular characterization of Lipids 10a-26 and 10a-27. FIG. 27A shows the proton nuclear magnetic resonance (NMR) spectrum of Lipid Lipid 10a-26. FIG. 27B shows the retention time of Lipid 10a-26 measured by liquid chromatography-mass spectrometry (LC-MS). FIG. 27C shows the mass spectrum of Lipid 10a-26. FIG. 27D shows the proton NMR spectrum of Lipid 10a-27. FIG. 27E shows the retention time of Lipid 10a-27 measured by LC-MS. FIG. 27F shows the mass spectrum of Lipid 10a-27.

[0144] FIGS. 28A-28C depict molecular characterization of Lipid 22-S14 and its synthetic intermediates. FIG. 28A depicts the NMR spectrum of 2-(tetradecylthio)ethan-1-ol. FIG. 28B depicts the NMR spectrum of 2-(tetradecylthio)ethyl acrylate. FIG. 28C depicts the NMR spectrum of bis(2-(tetradecylthio)ethyl) 3,3′-((3-(2-methyl-1H-imidazol-1-yl)propyl)azanediyl)dipropionate (Lipid 22-S14).

[0145] FIG. 29 depicts the NMR spectrum of bis(2-(tetradecylthio)ethyl) 3,3′-((3-(1H-imidazol-1-yl)propyl)azanediyl)dipropionate (Lipid 93-S14).

[0146] FIGS. 30A-30C depict molecular characterization of heptadecan-9-yl 8-((3-(2-methyl-1H-imidazol-1-yl)propyl)(8-(nonyloxy)-8-oxooctyl)amino)octanoate (Lipid 10a-54). FIG. 30A shows the proton NMR spectrum of Lipid 10a-54. FIG. 30B shows the retention time of Lipid 10a-54 measured by LC-MS. FIG. 30C shows the mass spectrum of Lipid 10a-54.

[0147] FIGS. 31A-31C depict molecular characterization of heptadecan-9-yl 8-((3-(1H-imidazol-1-yl)propyl)(8-(nonyloxy)-8-oxooctyl)amino)octanoate (Lipid 10a-53). FIG. 31A shows the proton NMR spectrum of Lipid 10a-53. FIG. 31B shows the retention time of Lipid 10a-53 measured by LC-MS. FIG. 31C shows the mass spectrum of Lipid 10a-53.

[0148] FIG. 32A depicts total flux of spleen and liver harvested from CD-1 mice dosed with circular RNA encoding firefly luciferase (FLuc) and formulated with ionizable lipid of interest, DSPC, cholesterol, and DSPE-PEG 2000 (Avanti Polar Lipids Inc.) at a weight ratio of 16:1:4:1 or 62:4:33:1 molar ratio. FIG. 32B depicts average radiance for biodistribution of protein expression.

[0149] FIG. 33A depicts images highlighting the luminescence of organs harvested from CD-1 mice dosed with circular RNA encoding FLuc and formulated with ionizable Lipid 22-S14, DSPC, cholesterol, and DSPE-PEG 2000 (Avanti Polar Lipids Inc.) at a weight ratio of 16:1:4:1 or 62:4:33:1 molar ratio. FIG. 33B depicts whole body IVIS images of CD-1 mice dosed with circular RNA encoding FLuc and formulated with ionizable Lipid 22-S14, DSPC, cholesterol, and DSPE-PEG 2000 (Avanti Polar Lipids Inc.) at a weight ratio of 16:1:4:1 or 62:4:33:1 molar ratio.

[0150] FIG. 34A depicts images highlighting the luminescence of organs harvested from CD-1 mice dosed with circular RNA encoding FLuc and formulated with ionizable Lipid 93-S14, DSPC, cholesterol, and DSPE-PEG 2000 (Avanti Polar Lipids Inc.) at a weight ratio of 16:1:4:1 or 62:4:33:1 molar ratio. FIG. 34B depicts whole body IVIS images of CD-1 mice dosed with circular RNA encoding FLuc and formulated with ionizable Lipid 93-S14, DSPC, cholesterol, and DSPE-PEG 2000 (Avanti Polar Lipids Inc.) at a weight ratio of 16:1:4:1 or 62:4:33:1 molar ratio.

[0151] FIG. 35A depicts images highlighting the luminescence of organs harvested from CD-1 mice dosed with circular RNA encoding FLuc and formulated with ionizable Lipid 10a-26, DSPC, cholesterol, and DSPE-PEG 2000 (Avanti Polar Lipids Inc.) at a weight ratio of 16:1:4:1 or 62:4:33:1 molar ratio. FIG. 35B depicts whole body IVIS images of CD-1 mice dosed with circular RNA encoding FLuc and formulated with ionizable Lipid 10a-26, DSPC, cholesterol, and DSPE-PEG 2000 (Avanti Polar Lipids Inc.) at a weight ratio of 16:1:4:1 or 62:4:33:1 molar ratio.

[0152] FIGS. 36A-36D depict images highlighting the luminescence of organs harvested from c57BL/6J mice dosed with circular RNA encoding FLuc and encapsulated in lipid nanoparticles formed with Lipid 10b-15 (FIG. 36A), Lipid 10a-53 (FIG. 36B), or Lipid 10a-54 (FIG. 36C). PBS was used as control (FIG. 36D).

[0153] FIGS. 37A and 37B depict relative luminescence in the lysates of human PBMCs after 24-hour incubation with testing lipid nanoparticles containing circular RNA encoding firefly luciferase.

[0154] FIGS. 38A and 38B show the expression of GFP (FIG. 38A) and CD19 CAR (FIG. 38B) in human PBMCs after incubating with testing lipid nanoparticle containing circular RNA encoding either GFP or CD19 CAR.

[0155] FIG. 39 depicts the expression of an anti-murine CD19 CAR in 1C1C7 cells lipotransfected with circular RNA comprising an anti-murine CD19 CAR expression sequence and varying IRES sequences.

[0156] FIG. 40 shows the cytotoxicity of an anti-murine CD19 CAR to murine T cells. The CD19 CAR is encoded by and expressed from a circular RNA, which is electroporated into the murine T cells.

[0157] FIGS. 41A-41C depict the B cell counts in peripheral blood (FIGS. 40A and 40B) or spleen (FIG. 40C) in C57BL/6J mice injected every other day with testing lipid nanoparticles encapsulating a circular RNA encoding an anti-murine CD19 CAR.

[0158] FIGS. 42A and 42B compare the expression level of an anti-human CD19 CAR expressed from a circular RNA with that expressed from a linear mRNA.

[0159] FIGS. 43A and 43B compare the cytotoxic effect of an anti-human CD19 CAR expressed from a circular RNA with that expressed from a linear mRNA

[0160] FIG. 44 depicts the cytotoxicity of two CARs (anti-human CD19 CAR and anti-human BCMA CAR) expressed from a single circular RNA in T cells.

[0161] FIG. 45A shows representative FACS plots with frequencies of tdTomato expression in various spleen immune cell subsets following treatment with LNPs formed with Lipid 10a-27 or 10a-26 or Lipid 10b-15. FIG. 45B shows the quantification of the proportion of myeloid cells, B cells, and T cells expressing tdTomato (mean+std. dev., n=3), equivalent to the proportion of each cell population successfully transfected with Cre circular RNA. FIG. 45C illustrates the proportion of additional splenic immune cell populations, including NK cells, classical monocytes, nonclassical monocytes, neutrophils, and dendritic cells, expressing tdTomato after treatment with Lipids 27 and 26 (mean+std. dev., n=3).

[0162] FIG. 46A depicts an exemplary RNA construct design with built-in polyA sequences in the introns. FIG. 46B shows the chromatography trace of unpurified circular RNA. FIG. 46C shows the chromatography trace of affinity-purified circular RNA. FIG. 46D shows the immunogenicity of the circular RNAs prepared with varying in vitro transcription (IVT) conditions and purification methods. (Commercial=commercial IVT mix; Custom=customerized IVT mix; Aff=affinity purification; Enz=enzyme purification; GMP:GTP ratio=8, 12.5, or 13.75).

[0163] FIG. 47A depicts an exemplary RNA construct design with a dedicated binding sequence of TATAATTCTACCCTATTGAGGCATTGACTA (SEQ ID NO: 3667) as an alternative to polyA for hybridization purification. FIG. 47B shows the chromatography trace of unpurified circular RNA. FIG. 46C shows the chromatography trace of affinity-purified circular RNA.

[0164] FIG. 48A shows the chromatography trace of unpurified circular RNA encoding dystrophin. FIG. 48B shows the chromatography trace of enzyme-purified circular RNA encoding dystrophin.

[0165] FIGS. 49A and 49B compare the expression (FIG. 49A) and stability (FIG. 49B) of purified circRNAs with different 5′ spacers between the 3′ intron fragment/5′ internal duplex region and the IRES in Jurkat cells. (AC=only A and C were used in the spacer sequence; UC=only U and C were used in the spacer sequence.)

[0166] FIG. 50 shows luminescence expression levels and stability of expression in primary T cells from circular RNAs containing the original or modified IRES elements indicated.

[0167] FIG. 51 shows luminescence expression levels and stability of expression in HepG2 cells from circular RNAs containing the original or modified IRES elements indicated.

[0168] FIG. 52 shows luminescence expression levels and stability of expression in 1C1C7 cells from circular RNAs containing the original or modified IRES elements indicated.

[0169] FIG. 53 shows luminescence expression levels and stability of expression in HepG2 cells from circular RNAs containing IRES elements with untranslated regions (UTRs) inserted or hybrid IRES elements. “Scr” means Scrambled, which was used as a control.

[0170] FIG. 54 shows luminescence expression levels and stability of expression in 1C1C7 cells from circular RNAs containing an IRES and variable stop codon cassettes operably linked to a Gaussia luciferase coding sequence.

[0171] FIG. 55 shows luminescence expression levels and stability of expression in 1C1C7 cells from circular RNAs containing an IRES and variable untranslated regions (UTRs) inserted before the start codon of a gaussian luciferase coding sequence.

[0172] FIG. 56 shows expression levels of human erythropoietin (hEPO) in Huh7 cells from circular RNAs containing two miR-122 target sites downstream from the hEPO coding sequence.

[0173] FIG. 57 shows luminescence expression levels in SupT1 cells (from a human T cell tumor line) and MV4-11 cells (from a human macrophage line) from LNPs transfected with circular RNAs encoding for Firefly luciferase in vitro.

[0174] FIG. 58 shows a comparison of transfected primary human T cells LNPs containing circular RNAs dependency of ApoE based on the different helper lipid, PEG lipid, and ionizable lipid:phosphate ratio formulations.

[0175] FIG. 59 shows uptake of LNP containing circular RNAs encoding eGFP into activated primary human T cells with or without the aid of ApoE3.

[0176] FIG. 60 shows immune cell expression from a LNP containing circular RNA encoding for a Cre fluorescent protein in a Cre reporter mouse model.

[0177] FIG. 61 shows immune cell expression of mOX40L in wildtype mice following intravenous injection of LNPs that have been transfected with circular RNAs encoding mOX40L.

[0178] FIGS. 62A-62C show single dose of mOX40L in LNPs transfected with circular RNAs capable of expressing mOX40L. FIGS. 62A and 62B provide percent of mOX40L expression in splenic T cells, CD4+ T cells, CD8+ T cells, B cells, NK cells, dendritic cells, and other myloid cells. FIG. 62C provides mouse weight change 24 hours after transfection.

[0179] FIGS. 63A-63C show B cell depletion of LNPs transfected intravenously with circular RNAs in mice. FIG. 63A quantifies B cell depletion through B220+ B cells of live, CD45+ immune cells and FIG. 63B compares B cell depletion of B220+ B cells of live, CD45+ immune cells in comparison to luciferase expressing circular RNAs. FIG. 63C provides B cell weight gain of the transfected cells.

[0180] FIGS. 64A and 64B show CAR expression levels in the peripheral blood (FIG. 64A) and spleen (FIG. 64B) when treated with LNP encapsulating circular RNA that expresses anti-CD19 CAR. Anti-CD20 (aCD20) and circular RNA encoding luciferase (oLuc) were used for comparison.

[0181] FIGS. 65A-65C show the overall frequency of anti-CD19 CAR expression, the frequency of anti-CD19 CAR expression on the surface of cells and effect on anti-tumor response of IRES specific circular RNA encoding anti-CD19 CARs on T-cells. FIG. 65A shows anti-CD19 CAR geometric mean florescence intensity, FIG. 65B shows percentage of anti-CD19 CAR expression, and FIG. 65C shows the percentage target cell lysis performed by the anti-CD19 CAR. (CK=Caprine Kobuvirus; AP=Apodemus Picornavirus; CK*=Caprine Kobuvirus with codon optimization; PV=Parabovirus; SV=Salivirus.)

[0182] FIG. 66 shows CAR expression levels of A20 FLuc target cells when treated with IRES specific circular RNA constructs.

[0183] FIGS. 67A and 67B show luminescence expression levels for cytosolic (FIG. 67A) and surface (FIG. 67B) proteins from circular RNA in primary human T-cells.

[0184] FIGS. 68A-68F show luminescence expression in human T-cells when treated with IRES specific circular constructs. Expression in circular RNA constructs were compared to linear mRNA. FIG. 68A, FIG. 68B, and FIG. 68G provide Gaussia luciferase expression in multiple donor cells. FIG. 68C, FIG. 68D, FIG. 68E, and FIG. 68F provides firefly luciferase expression in multiple donor cells.

[0185] FIGS. 69A and 69B show anti-CD19 CAR (FIG. 69A and FIG. 69B) and anti-BCMA CAR (FIG. 69B) expression in human T-cells following treatment of a lipid nanoparticle encompassing a circular RNA that encodes either an anti-CD19 or anti-BCMA CAR to a firefly luciferase expressing K562 cell.

[0186] FIGS. 70A and 70B show anti-CD19 CAR expression levels resulting from delivery via electroporation in vitro of a circular RNA encoding an anti-CD19 CAR in a specific antigen-dependent manner. FIG. 70A shows Nalm6 cell lysing with an anti-CD19 CAR. FIG. 70B shows K562 cell lysing with an anti-CD19 CAR.

[0187] FIGS. 71A-71E show transfection of LNP mediated by use of ApoE3 in solutions containing LNP and circular RNA expressing green fluorescence protein (GFP). FIG. 71A showed the live-dead results. FIG. 71B, FIG. 71C, FIG. 71D, and FIG. 71E provide the frequency of expression for multiple donors.

[0188] FIG. 72A, FIG. 72B, FIG. 72C, FIG. 72D, FIG. 72E, FIG. 72F, FIG. 72G, FIG. 72H, FIG. 72I, FIG. 72J, FIG. 72K, and FIG. 72L show total flux and precent expression for varying lipid formulations. See Example 74.

[0189] FIGS. 73A-73C show circularization efficiency of an RNA molecule encoding a stabilized (double proline mutant) SARS-CoV2 spike protein. FIG. 73A shows the in vitro transcription product of the ˜4.5kb SARS-CoV2 spike-encoding circRNA. FIG. 73B shows a histogram of spike protein surface expression via flow cytometry after transfection of spike-encoding circRNA into 293 cells. Transfected 293 cells were stained 24 hours after transfection with CR3022 primary antibody and APC-labeled secondary antibody. FIG. 73C shows a flow cytometry plot of spike protein surface expression on 293 cells after transfection of spike-encoding circRNA. Transfected 293 cells were stained 24 hours after transfection with CR3022 primary antibody and APC-labeled secondary antibody.

[0190] FIG. 74 provides multiple controlled adjuvant strategies. CircRNA as indicated on the figure entails an unpurified sense circular RNA splicing reaction using GTP as an indicator molecule in vitro. 3p-circRNA entails a purified sense circular RNA as well as a purified antisense circular RNA mixed containing triphosphorylated 5′ termini. Bars show in vivo cytokine response to formulated circRNA generated using the indicated strategy.

[0191] FIGS. 75A-75C illustrate an intramuscular delivery of LNP containing circular RNA constructs. FIG. 75A provides a live whole body flux post a 6 hour period and 75B provides whole body IVIS 6 hours following a 1 μg dose of the LNP-circular RNA construct. FIG. 75C provides an ex vivo expression distribution over a 24-hour period.

[0192] FIGS. 76A and 76B illustrate expression of multiple circular RNAs from a single lipid formulation. FIG. 76A provides hEPO titers from a single and mixed set of LNP containing circular RNA constructs, while FIG. 76B provides total flux of bioluminescence expression from single or mixed set of LNP containing circular RNA constructs.

[0193] FIGS. 77A-77C illustrate SARS-CoV2 spike protein expression of circular RNA encoding spike SARS-CoV2 proteins. FIG. 77A shows frequency of spike CoV2 expression;

[0194] FIG. 77B shows geometric mean fluorescence intensity (gMFI) of the spike CoV2 expression; and FIG. 77C compares gMFI expression of the construct to the frequency of expression.

[0195] FIG. 78 depicts a general sequence construct of a linear RNA polynucleotide precursor (10). The sequence as provided is illustrated in a 5′ to 3′ order of a 5′ enhanced intron element (20), a 5′ enhanced exon element (30), a core functional element (40), a 3′ enhanced exon element (50) and a 3′ enhanced intron element (60).

[0196] FIG. 79 depicts various exemplary iterations of the 5′ enhanced exon element (20). As illustrated, one iteration of the 5′ enhanced exon element (20) comprises in a 5′ to 3′ order in the following order: a leading untranslated sequence (21), a 5′ affinity tag (22), a 5′ external duplex region (24), a 5′ external spacer (26), and a 3′ intron fragment (28).

[0197] FIG. 80 depicts various exemplary iterations of the 5′ enhanced exon element (30). As illustrated, one iteration of the 5′ enhanced exon element (30) comprises in a 5′ to 3′ order: a 3′ exon fragment (32), a 5′ internal duplex region (34), and a 5′ internal spacer (36).

[0198] FIG. 81 depicts various exemplary iterations of the core functional element (40). As illustrated, one iteration of the core functional element (40) comprises a TIE (42), a coding region (46) and a stop region (e.g., a stop codon or stop cassette) (48). Another iteration is illustrated to show the core functional element (47) comprising a noncoding region (47).

[0199] FIG. 82 depicts various exemplary iterations of the 3′ enhanced exon element (50). As illustrated, one of the iterations of the 3′ enhanced exon element (50) comprises, in the following 5′ to 3′ order: a 3′ internal spacer (52), a 3′ internal duplex region (54), and a 5′ exon fragment (56).

[0200] FIG. 83 depicts various exemplary iterations of the 3′ enhanced intron element (60). As illustrated, one of the iterations of the 3′ enhanced intron element (60) comprises, in the following order, a 5′ intron fragment (62), a 3′ external spacer (64), a 3′ external duplex region (66), a 3′ affinity tag (68) and a terminal untranslated sequence (69).

[0201] FIG. 84 depicts various exemplary iterations a translation initiation element (TIE) (42). TIE (42) sequence as illustrated in one iteration is solely an IRES (43). In another iteration, the TIE (42) is an aptamer (44). In two different iterations, the TIE (42) is an aptamer (44) and IRES (43) combination. In another iteration, the TIE (42) is an aptamer complex (45).

[0202] FIG. 85 illustrates an exemplary linear RNA polynucleotide precursor (10) comprising in the following 5′ to 3′ order, a leading untranslated sequence (21), a 5′ affinity tag (22), a 5′ external duplex region (24), a 5′ external spacer (26), a 3′ intron fragment (28), a 3′ exon fragment (32), a 5′ internal duplex region (34), a 5′ internal spacer (36), a TIE (42), a coding element (46), a stop region (48), a 3′ internal spacer (52), a 3′ internal duplex region (54), a 5′ exon fragment (56), a 5′ intron fragment (62), a 3′ external spacer (64), a 3′ external duplex region (66), a 3′ affinity tag (68) and a terminal untranslated sequence (69).

[0203] FIG. 86 illustrates an exemplary linear RNA polynucleotide precursor (10) comprising in the following 5′ to 3′ order, a leading untranslated sequence (21), a 5′ affinity tag (22), a 5′ external duplex region (24), a 5′ external spacer (26), a 3′ intron fragment (28), a 3′ exon fragment (32), a 5′ internal duplex region (34), a 5′ internal spacer (36), a coding element (46), a stop region (48), a TIE (42), a 3′ internal spacer (52), a 3′ internal duplex region (54), a 5′ exon fragment (56), a 5′ intron fragment (62), a 3′ external spacer (64), a 3′ external duplex region (66), a 3′ affinity tag (68) and a terminal untranslated sequence (69).

[0204] FIG. 87 illustrates an exemplary linear RNA polynucleotide precursor (10) comprising in the following 5′ to 3′ order, a leading untranslated sequence (21), a 5′ affinity tag (22), a 5′ external duplex region (24), a 5′ external spacer (26), a 3′ intron fragment (28), a 3′ exon fragment (32), a 5′ internal duplex region (34), a 5′ internal spacer (36), a noncoding element (47), a 3′ internal spacer (52), a 3′ internal duplex region (54), a 5′ exon fragment (56), a 5′ intron fragment (62), a 3′ external spacer (64), a 3′ external duplex region (66), a 3′ affinity tag (68) and a terminal untranslated sequence (69).

[0205] FIG. 88 illustrates the general circular RNA (8) structure formed post splicing. The circular RNA as depicted includes a 5′ exon element (30), a core functional element (40) and a 3′ exon element (50).

[0206] FIGS. 89A-89E illustrate the various ways an accessory element (70) (e.g., a miRNA binding site) may be included in a linear RNA polynucleotide. FIG. 89A shows a linear RNA polynucleotide comprising an accessory element (70) at the spacer regions. FIG. 89B shows a linear RNA polynucleotide comprising an accessory element (70) located between each of the external duplex regions and the exon fragments. FIG. 89C depicts an accessory element (70) within a spacer. FIG. 89D illustrates various iterations of an accessory element (70) located within the core functional element. FIG. 89E illustrates an accessory element (70) located within an internal ribosome entry site (IRES).

[0207] FIGS. 90A-90C illustrate a screening of a LNP formulated with circular RNA encoding firefly luciferase and having a TIE in primary human (FIG. 90A), mouse (FIG. 90B), and cynomolgus monkey (FIG. 90C) hepatocyte with varying dosages in vitro.

[0208] FIGS. 91A-91C illustrate a screening of a LNP formulated with circular RNA encoding firefly luciferase and having a TIE, in primary human hepatocyte from three different donors (Donor 1—FIG. 91A; Donor 2—FIG. 91B; and Donor 3—FIG. 91C) with varying dosages in vitro.

[0209] FIG. 92 illustrates in vitro expression of LNP formulated with circular RNA encoding for GFP and having a TIE, in HeLa, HEK293, and HUH7 human cell models.

[0210] FIG. 93 illustrates in vitro expression of LNP formulated with circular RNAs encoding a GFO protein and having a TIE, in primary human hepatocytes.

[0211] FIGS. 94A and 94B illustrate in vitro expression of circular RNA encoding firefly luciferase and having a TIE, in mouse myoblast (FIG. 94A) and primary human muscle myoblast (FIG. 94B) cells.

[0212] FIGS. 95A and 95B illustrate in vitro expression of circular RNA encoding for firefly luciferase and having a TIE, in myoblasts and differentiated primary human skeletal muscle myotubes. FIG. 95A provides the data related to cells received from human donor 1; FIG. 95B provides the data related to cell received from human donor 2.

[0213] FIGS. 96A and 96B illustrate cell-free in vitro translation of circular RNA of variable sizes. In FIG. 96A circular RNA encoding for firefly luciferase and linear mRNA encoding for firefly luciferase was tested for expression. In FIG. 96B, human and mouse cells were given circular RNAs encoding for ATP7B proteins. Some of the circular RNAs tested were codon optimized. Circular RNA expressing firefly luciferase was used for comparison.

[0214] FIGS. 97A and 97B show an exemplary RNA circularization process. The schematic shown in FIG. 97A depicts an autocatalytic circularization process. Briefly, precursor RNA molecules containing intron segments and accessory elements that enhance circularization efficiency undergo splicing, resulting in a synthetic circular RNA and two excised intron/accessory sequence segments (spliced out intron segments/fragments). Some circularized RNA (oRNA) is nicked during synthesis. FIG. 97B shows an exemplary chromatogram showing peak residence of different species after size exclusion HPLC analysis.

[0215] FIG. 98 depicts an exemplary negative selection purification method for circular RNA molecules such as oRNA. Oligonucleotides that are complementary to sequences present in the precursor RNA (such as the intron segments or external accessory regions) but not the oRNA are bound to a solid support, such as a bead. oRNA preparations are washed over the bead; precursor RNA, partially spliced RNA, incomplete transcripts, and post-splicing intron segments bind to the oligonucleotide under certain buffer conditions while oRNA and nicked oRNA flow through. Flowthrough is collected for further processing.

[0216] FIG. 99A and FIG. 99B depict an exemplary negative selection purification method for circular RNA molecule such as oRNA. The schematic shown in FIG. 99A depicts enzymatic polyadenylation of in vitro transcription reaction products containing oRNA and linear RNA, resulting in polyadenylation (e.g., via addition of a polyA sequence of SEQ ID NO: 3778) of only the linear RNA. The mixture of linear and circular RNA is washed over beads conjugated to deoxythymidine oligonucleotides (“Oligo dT”; e.g., SEQ ID NO: 3779) under specific buffer conditions. Polyadenylated linear RNA anneals to the beads while oRNA flows through for collection. FIG. 99B shows exemplary SEC-HPLC chromatograms of in vitro transcription (IVT) reaction products prior to polyadenylation and purification (left panel) and of the eluant following polyadenylation using E. coli polyA polymerase and purification with oligo-dT beads in binding buffer (right panel).

[0217] FIG. 100A and FIG. 100B depict an exemplary circular RNA enzymatic purification method. In this method, oRNA is synthesized by IVT in the presence of excess GMP and is autocatalytically spliced during the process. The resulting reaction products are digested with Xrn1 (a 5′ to 3′ exonuclease requiring a 5′ terminal monophosphate) and RNase R (a 3′ to 5′ exonuclease) to remove non-circular RNA molecules. FIG. 100A shows such Xrn1 and RNaseR digestion of linear RNA. FIG. 100B shows exemplary SEC-HPLC chromatograms of IVT reaction products prior to enzymatic digestion (left pane) and of the final, enzymatically purified material (right panel).

[0218] FIG. 101A and FIG. 101B show induction of RIG-1 and IFNB1 RNA expression, markers of immune stimulation, following transfection of the cells with the various RNA preparations indicated. All RNA preparations except for the commercially available 3phpRNA were produced using in vitro transcription and circularization of RNA comprising an Anabaena permuted intron, GLuc reading frame, strong homology arms, 5′ and 3′ spacers, and a CVB3 IRES. RIG-1 and IFNB1 RNA expression was measured using RT-qPCR. In FIG. 101, “IVT” indicates an unpurified reaction mixture; “+GMP” indicates an unpurified reaction mixture in which the in vitro transcription was performed in the presence of 12.5-fold GMP relative to GTP; “+HPLC” indicates a reaction mixture purified by HPLC; “+HPLC/GMP” indicates a reaction mixture purified by HPLC in which the in vitro transcription was performed in the presence of 12.5-fold GMP relative to GTP; “3phpRNA” indicates a positive control comprising a triphosphate hairpin RNA (tlrl-hprna, Invivogen); and “mock” indicates a preparation containing no RNA. FIG. 101A shows immune stimulation of HeLa cells, and FIG. 101B shows immune stimulation of A594 cells.

[0219] FIG. 102A and FIG. 102B show anti-CD19 CAR expression levels resulting from in vitro delivery via electroporation of various circular RNA encoding chimeric antigen receptors in human T cells. FIG. 102A provides representative dot plots from FACs analysis of human T cell expression of CD19-41BBζ, CD19-CD28ζ, HER2-41BBζ, and HER2-CD28ζ CARs. FIG. 102B depicts cumulative data for the MFI of CD19-41BBζ, CD19-CD28ζ, HER2-41BBζ, and HER2-CD28ζ expression collected via fluorescence-activated cell sorting (FACS).

[0220] FIGS. 103A-103C illustrate cytotoxic response to tumor cells upon electroporation of T cells with circular RNA encoding CD19-41BBζ and CD19-CD28ζ and subsequent co-culture with tumor cells. FIG. 103A provides the % specific lysis of tumor cells after coculture with T cells expressing oRNA encoding CD19-41BBζ, CD19-CD28ζ, HER2-41BBζ, and HER2-CD28ζ CARs in comparison to T cells expressing a circular RNA encoding mOX40L. FIGS. 103B and 103C depict IFN-g and IL-2 cytokine in pg/mL, respectively, secreted by T cells expressing the listed oRNA as compared to a circular RNA encoding mOX40L after co-cultured with tumor cells.

[0221] FIG. 104A and FIG. 104B show in vivo mOX40L expression in the splenic and peripheral blood T cells of humanized mice following intravenous administration of LNP formulated with circular RNAs encoding mOX40L. LNPs were formulated with either PBS (indicated as “vehicle” in said figure), or LNP-oRNA constructs formulated with lipid 10b-15 (Table 10b, Lipid 15), 10a-27 (Table 10a, Lipid 27), or 10a-26 (Table 10a, Lipid 26). FIG. 104A depicts mOX40L detection in T cells in the spleen of the humanized mice. FIG. 104B depicts mOX40L detection in T cells in the peripheral blood of the humanized mice.

[0222] FIG. 105 illustrates B cell aplasia in humanized mice after intravenous administration of LNP formulated with circular RNA encoding anti-CD19 chimeric antigen receptor (CAR). Representative FACS dot plots from the peripheral blood of untreated animals (left) and treated animals (right) show the percentage of B cells post 6 days from intravenous administration.

[0223] FIG. 106A and FIG. 106B show % killing of Nalm6 tumor cells after co-culture with LNP-oRNA encoding CAR or control (FIG. 106A) and chimeric antigen receptor (CAR) surface expression (FIG. 106B) following in vitro transfection of LNP-circular RNA (oRNA) encoding CD19-41BBζ or CD19-CD28ζ CARs. FIG. 106A illustrates killing of Nalm6 tumor cells after co-culture of T cells transfected with LNP-oRNA constructs encoding CARs of CD19-41BBζ and CD19-CD28ζ CARs along with HER2-41BBz, HER2-CD28z, or the control LNP-oRNA mOX40L. FIG. 106B provides mean fluorescence intensity (MFI) of the CAR surface expression on T cells treated with the LNP-oRNA CAR constructs.

[0224] FIG. 107 depicts antigen-dependent tumor regression measured by total flux (in photons/sec) following dosing of mice with either PBS, PBMC, LNP-oRNA encoding for mOx40L, LNP-oRNA encoding for CD19-41BBζ (“CD19-41BBζ isCAR”), oRNA encoding for and CD19-CD28ζ (“CD19-CD28ζ isCAR”), LNP-oRNA encoding for HER2-41BBz CAR (“HER2-41BBz isCAR”), or LNP-oRNA encoding for HER2-CD28_{z} CAR (“HER2-CD28z isCAR”). PBS and PBMC solutions lacking oRNAs were used as negative control.

### DETAILED DESCRIPTION

[0225] The present invention provides, among other things, methods and compositions for treating an autoimmune disorder, deficiency disease, or cancer based on circular RNA therapy. In particular, the present invention provides methods for treating an autoimmune disorder, deficiency disease, or cancer by administering to a subject in need of treatment a composition comprising a circular RNA encoding at least one therapeutic protein at an effective dose and an administration interval such that at least one symptom or feature of the relevant disease or disorder is reduced in intensity, severity, or frequency or is delayed in onset.

[0226] As disclosed herein, the improved circular RNA therapy, along with associated compositions and methods, allows for increased circular RNA stability, expression, and prolonged half-life, among other things. In some embodiments, the inventive circular RNA is transcribed from a linear RNA polynucleotide construct comprising enhanced intron elements, enhanced exon elements, and a core functional element. The enhanced intron element, in some embodiments, comprises post splicing group I intron fragments, spacers, duplex sequences, affinity sequences, and unique untranslated sequences that allows for optimal circularization. In some embodiments, the enhanced exon element comprises an exon fragment, spacers and duplex sequences to aid with the circularization process and for maintaining stability of the circular RNA post circularization. Within the same embodiments, the core functional element includes the essential elements for protein translation of a translation initiation element (TIE), a coding or noncoding element, and a termination sequence (e.g., a stop codon or stop cassette). Together, the enhanced intron elements, enhanced exon elements, and core functional element comprising a coding element provides an optimal circular RNA polynucleotide for encoding a therapeutic protein. In one embodiment, the enhanced intron elements, enhanced exon elements, and core functional element comprising a noncoding element provides an optimal circular RNA polynucleotide for triggering an immune system as an adjuvant.

[0227] Also disclosed herein is a DNA template (e.g., a vector) for making circular RNA. In some embodiments, the DNA template comprises a 3′ enhanced intron fragment, a 3′ enhanced exon fragment, a core functional element, a 5′ enhanced exon fragment, and a 5′ enhanced intron fragment. In some embodiments, these elements are positioned in the DNA template in the above order.

[0228] Additional embodiments include circular RNA polynucleotides, including circular RNA polynucleotides (e.g., a circular RNA comprising 3′ enhanced exon element, a core functional element, and a 5′ enhanced exon element) made using the DNA template provided herein, compositions comprising such circular RNA, cells comprising such circular RNA, methods of using and making such DNA template, circular RNA, compositions and cells.

[0229] In some embodiments, provided herein are methods comprising administration of circular RNA polynucleotides provided herein into cells for therapy or production of useful proteins. In some embodiments, the method is advantageous in providing the production of a desired polypeptide inside eukaryotic cells with a longer half-life than linear RNA, due to the resistance of the circular RNA to ribonucleases.

[0230] Circular RNA polynucleotides lack the free ends necessary for exonuclease-mediated degradation, causing them to be resistant to several mechanisms of RNA degradation and granting extended half-lives when compared to an equivalent linear RNA. Circularization may allow for the stabilization of RNA polynucleotides that generally suffer from short half-lives and may improve the overall efficacy of exogenous mRNA in a variety of applications. In an embodiment, the functional half-life of the circular RNA polynucleotides provided herein in eukaryotic cells (e.g., mammalian cells, such as human cells) as assessed by protein synthesis is at least 20 hours (e.g., at least 80 hours).

[0231] Various aspects of the invention are described in detail in the following sections. The use of sections is not meant to limit the invention. Each section can apply to any aspect of the invention. In this application, the use of “or” means “and/or” unless stated otherwise.

### 1. Definitions

[0232] As used herein, the term “circRNA,” “circular polyribonucleotide,” “circular RNA,” “circularized RNA,” or “oRNA” are used interchangeably and refers to a polyribonucleotide that forms a circular structure through covalent bonds. As used herein, such terms also include preparations comprising circRNA, circular polyribonucleotides, circular RNAs or oRNAs.

[0233] As used herein, the term “DNA template” refers to a DNA sequence capable of transcribing a linear RNA polynucleotide. For example, but not intending to be limiting, a DNA template may include a DNA vector, PCR product or plasmid.

[0234] As used herein, the term “3′ group I intron fragment” refers to a sequence with 75% or higher similarity to the 3′-proximal end of a natural group I intron including the splice site dinucleotide.

[0235] As used herein, the term “5′ group I intron fragment” refers to a sequence with 75% or higher similarity to the 5′-proximal end of a natural group I intron including the splice site dinucleotide.

[0236] As used herein, the term “permutation site” refers to the site in a group I intron where a cut is made prior to permutation of the intron. This cut generates 3′ and 5′ group I intron fragments that are permuted to be on either side of a stretch of precursor RNA to be circularized.

[0237] As used herein, the term “splice site” refers to a dinucleotide that is partially or fully included in a group I intron and between which a phosphodiester bond is cleaved during RNA circularization. (As used herein, “splice site” refers to the dinucleotide or dinucleotides between which cleavage of the phosphodiester bond occurs during a splicing reaction. A “5′ splice site” refers to the natural 5′ dinucleotide of the intron e.g., group I intron, while a “3′ splice site” refers to the natural 3′ dinucleotide of the intron).

[0238] As used herein, the term “expression sequence” refers to a nucleic acid sequence that encodes a product, e.g., a peptide or polypeptide, regulatory nucleic acid, or non-coding nucleic acid. An exemplary expression sequence that codes for a peptide or polypeptide can comprise a plurality of nucleotide triads, each of which can code for an amino acid and is termed as a “codon.”

[0239] As used herein, “coding element” or “coding region” is region located within the expression sequence and encodings for one or more proteins or polypeptides (e.g., therapeutic protein).

[0240] As used herein, a “noncoding element” or “non-coding nucleic acid” is a region located within the expression sequence. This sequence, but itself does not encode for a protein or polypeptide, but may have other regulatory functions, including but not limited, allow the overall polynucleotide to act as a biomarker or adjuvant to a specific cell.

[0241] As used herein, the term “therapeutic protein” refers to any protein that, when administered to a subject directly or indirectly in the form of a translated nucleic acid, has a therapeutic, diagnostic, and/or prophylactic effect and/or elicits a desired biological and/or pharmacological effect.

[0242] As used herein, the term “immunogenic” refers to a potential to induce an immune response to a substance. An immune response may be induced when an immune system of an organism or a certain type of immune cells is exposed to an immunogenic substance. The term “non-immunogenic” refers to a lack of or absence of an immune response above a detectable threshold to a substance. No immune response is detected when an immune system of an organism or a certain type of immune cells is exposed to a non-immunogenic substance. In some embodiments, a non-immunogenic circular polyribonucleotide as provided herein, does not induce an immune response above a pre-determined threshold when measured by an immunogenicity assay. In some embodiments, no innate immune response is detected when an immune system of an organism or a certain type of immune cells is exposed to a non-immunogenic circular polyribonucleotide as provided herein. In some embodiments, no adaptive immune response is detected when an immune system of an organism or a certain type of immune cell is exposed to a non-immunogenic circular polyribonucleotide as provided herein.

[0243] As used herein, the term “circularization efficiency” refers to a measurement of the rate of formation of amount of resultant circular polyribonucleotide as compared to its linear starting material.

[0244] As used herein, the term “translation efficiency” refers to a rate or amount of protein or peptide production from a ribonucleotide transcript. In some embodiments, translation efficiency can be expressed as amount of protein or peptide produced per given amount of transcript that codes for the protein or peptide.

[0245] The term “nucleotide” refers to a ribonucleotide, a deoxyribonucleotide, a modified form thereof, or an analog thereof. Nucleotides include species that comprise purines, e.g., adenine, hypoxanthine, guanine, and their derivatives and analogs, as well as pyrimidines, e.g., cytosine, uracil, thymine, and their derivatives and analogs. Nucleotide analogs include nucleotides having modifications in the chemical structure of the base, sugar and/or phosphate, including, but not limited to, 5′-position pyrimidine modifications, 8′-position purine modifications, modifications at cytosine exocyclic amines, and substitution of 5-bromo-uracil; and 2′-position sugar modifications, including but not limited to, sugar-modified ribonucleotides in which the 2′-OH is replaced by a group such as an H, OR, R, halo, SH, SR, NH2, NHR, NR2, or CN, wherein R is an alkyl moiety as defined herein. Nucleotide analogs are also meant to include nucleotides with bases such as inosine, queuosine, xanthine; sugars such as 2′-methyl ribose; non-natural phosphodiester linkages such as methylphosphonate, phosphorothioate and peptide linkages. Nucleotide analogs include 5-methoxyuridine, 1-methylpseudouridine, and 6-methyladenosine.

[0246] The terms “nucleic acid” and “polynucleotide” are used interchangeably herein to describe a polymer of any length, e.g., greater than about 2 bases, greater than about 10 bases, greater than about 100 bases, greater than about 500 bases, greater than 1000 bases, or up to about 10,000 or more bases, composed of nucleotides, e.g., deoxyribonucleotides or ribonucleotides, and may be produced enzymatically or synthetically (e.g., as described in U.S. Pat. No. 5,948,902 and the references cited therein), which can hybridize with naturally occurring nucleic acids in a sequence specific manner analogous to that of two naturally occurring nucleic acids, e.g., can participate in Watson-Crick base pairing interactions. An “oligonucleotide” is a polynucleotide comprising fewer than 1000 nucleotides, such as a polynucleotide comprising fewer than 500 nucleotides or fewer than 100 nucleotides. Naturally occurring nucleic acids are comprised of nucleotides, including guanine, cytosine, adenine, thymine, and uracil containing nucleotides (G, C, A, T, and U respectively). As used herein, “polyA” means a polynucleotide or a portion of a polynucleotide consisting of nucleotides comprising adenine. As used herein, “polyT” means a polynucleotide or a portion of a polynucleotide consisting of nucleotides comprising thymine. As used herein, “polyAC” means a polynucleotide or a portion of a polynucleotide consisting of nucleotides comprising adenine or cytosine.

[0247] The terms “ribonucleic acid” and “RNA” as used herein mean a polymer composed of ribonucleotides.

[0248] The terms “deoxyribonucleic acid” and “DNA” as used herein mean a polymer composed of deoxyribonucleotides.

[0249] “Isolated” or “purified” generally refers to isolation of a substance (for example, in some embodiments, a compound, a polynucleotide, a protein, a polypeptide, a polynucleotide composition, or a polypeptide composition) such that the substance comprises a significant percent (e.g., greater than 1%, greater than 2%, greater than 5%, greater than 10%, greater than 20%, greater than 50%, or more, usually up to about 90%-100%) of the sample in which it resides. In certain embodiments, a substantially purified component comprises at least 50, 60, 70, 75, 80, 85, 90, 95, 96, 97, 98, or 99% of the sample. In additional embodiments, a substantially purified component comprises about, 80%-85%, or 90%-95%, 95-99%, 96-99%, 97-99%, or 95-100% of the sample. Techniques for purifying polynucleotides and polypeptides of interest are well-known in the art and include, for example, ion-exchange chromatography, affinity chromatography and sedimentation according to density. Generally, a substance is purified when it exists in a sample in an amount, relative to other components of the sample, that is more than as it is found naturally.

[0250] The terms “duplexed,” “double-stranded,” or “hybridized” as used herein refer to nucleic acids formed by hybridization of two single strands of nucleic acids containing complementary sequences. In most cases, genomic DNA is double-stranded. Sequences can be fully complementary or partially complementary.

[0251] As used herein, “unstructured” with regard to RNA refers to an RNA sequence that is not predicted by RNA structure predictive tools to form a structure (e.g., a hairpin loop) with itself or other sequences in the same RNA molecule. In some embodiments, unstructured RNA can be functionally characterized using nuclease protection assays.

[0252] As used herein, “structured” with regard to RNA refers to an RNA sequence that is predicted by the RNAFold software or similar predictive tools to form a structure (e.g., a hairpin loop) with itself or other sequences in the same RNA molecule.

[0253] As used herein, two “duplex sequences,” “duplex region,” “duplex regions,” “homology arms,” or “homology regions” may be any two regions that are thermodynamically favored to cross-pair in a sequence specific interaction. In some embodiments, two duplex sequences, duplex regions, homology arms, or homology regions, share a sufficient level of sequence identity to one another's reverse complement to act as substrates for a hybridization reaction. As used herein polynucleotide sequences have “homology” when they are either identical or share sequence identity to a reverse complement or “complementary” sequence. The percent sequence identity between a homology region and a counterpart homology region's reverse complement can be any percent of sequence identity that allows for hybridization to occur. In some embodiments, an internal duplex region of an inventive polynucleotide is capable of forming a duplex with another internal duplex region and does not form a duplex with an external duplex region.

[0254] As used herein, an “affinity sequence” or “affinity tag” is a region of polynucleotide sequences polynucleotide sequence ranging from 1 nucleotide to hundreds or thousands of nucleotides containing a repeated set of nucleotides for the purposes of aiding purification of a polynucleotide sequence. For example, an affinity sequence may comprise, but is not limited to, a polyA or polyAC sequence. In some embodiments, affinity tags are used in purification methods, referred to herein as “affinity-purification,” in which selective binding of a binding agent to molecules comprising an affinity tag facilitates separation from molecules that do not comprise an affinity tag. In some embodiments, an affinity-purification method is a “negative selection” purification method, in which unwanted species, such as linear RNA, are selectively bound and removed and wanted species, such as circular RNA, are eluted and separated from unwanted species.

[0255] As used herein, a “spacer” refers to a region of a polynucleotide sequence ranging from 1 nucleotide to hundreds or thousands of nucleotides separating two other elements along a polynucleotide sequence. The sequences can be defined or can be random. A spacer is typically non-coding. In some embodiments, spacers include duplex regions.

[0256] Linear nucleic acid molecules are said to have a “5′-terminus” (5′ end) and a “3′-terminus” (3′ end) because nucleic acid phosphodiester linkages occur at the 5′ carbon and 3′ carbon of the sugar moieties of the substituent mononucleotides. The end nucleotide of a polynucleotide at which a new linkage would be to a 5′ carbon is its 5′ terminal nucleotide. The end nucleotide of a polynucleotide at which a new linkage would be to a 3′ carbon is its 3′ terminal nucleotide. A terminal nucleotide, as used herein, is the nucleotide at the end position of the 3′- or 5′-terminus.

[0257] As used herein, a “leading untranslated sequence” is a region of polynucleotide sequences ranging from 1 nucleotide to hundreds of nucleotides located at the upmost 5′ end of a polynucleotide sequence. The sequences can be defined or can be random. An leading untranslated sequence is non-coding.

[0258] As used herein, a “terminal untranslated sequence” is a region of polynucleotide sequences ranging from 1 nucleotide to hundreds of nucleotides located at the downmost 3′ end of a polynucleotide sequence. The sequences can be defined or can be random. A terminal untranslated sequence is non-coding.

[0259] “Transcription” means the formation or synthesis of an RNA molecule by an RNA polymerase using a DNA molecule as a template. The invention is not limited with respect to the RNA polymerase that is used for transcription. For example, in some embodiments, a T7-type RNA polymerase can be used.

[0260] “Translation” means the formation of a polypeptide molecule by a ribosome based upon an RNA template.

[0261] It is to be understood that the terminology used herein is for the purpose of describing particular embodiments only, and is not intended to be limiting. As used in this specification and the appended claims, the singular forms “a,” “an,” and “the” include plural referents unless the content clearly dictates otherwise. Thus, for example, reference to “a cell” includes combinations of two or more cells, or entire cultures of cells; reference to “a polynucleotide” includes, as a practical matter, many copies of that polynucleotide. Unless specifically stated or obvious from context, as used herein, the term “or” is understood to be inclusive. Unless defined herein and below in the reminder of the specification, all technical and scientific terms used herein have the same meaning as commonly understood by one of ordinary skill in the art to which the invention pertains.

[0262] Unless specifically stated or obvious from context, as used herein, the term “about,” is understood as within a range of normal tolerance in the art, for example within 2 standard deviations of the mean. “About” can be understood as within 10%, 9%, 8%, 7%, 6%, 5%, 4%, 3%, 2%, 1%, 0.9%, 0.8%, 0.7%, 0.6%, 0.5%, 0.4%, 0.3%, 0.2%, 0.1%, 0.09%, 0.08%, 0.07%, 0.06%, 0.05%, 0.04%, 0.03%, 0.02%, or 0.01% of the stated value. Unless otherwise clear from the context, all numerical values provided herein are modified by the term “about.”

[0263] As used herein, the term “encode” refers broadly to any process whereby the information in a polymeric macromolecule is used to direct the production of a second molecule that is different from the first. The second molecule may have a chemical structure that is different from the chemical nature of the first molecule.

[0264] By “co-administering” is meant administering a therapeutic agent provided herein in conjunction with one or more additional therapeutic agents sufficiently close in time such that the therapeutic agent provided herein can enhance the effect of the one or more additional therapeutic agents, or vice versa.

[0265] The terms “treat,” and “prevent” as well as words stemming therefrom, as used herein, do not necessarily imply 100% or complete treatment or prevention. Rather, there are varying degrees of treatment or prevention of which one of ordinary skill in the art recognizes as having a potential benefit or therapeutic effect. The treatment or prevention provided by the method disclosed herein can include treatment or prevention of one or more conditions or symptoms of the disease. Also, for purposes herein, “prevention” can encompass delaying the onset of the disease, or a symptom or condition thereof.

[0266] As used herein, “aptamer” refers in general to either an oligonucleotide of a single defined sequence or a mixture of said nucleotides, wherein the mixture retains the properties of binding specifically to the target molecule (e.g., eukaryotic initiation factor, 40S ribosome, polyC binding protein, polyA binding protein, polypyrimidine tract-binding protein, argonaute protein family, Heterogeneous nuclear ribonucleoprotein K and La and related RNA-binding protein). Thus, as used herein “aptamer” denotes both singular and plural sequences of nucleotides, as defined hereinabove. The term “aptamer” is meant to refer to a single- or double-stranded nucleic acid which is capable of binding to a protein or other molecule. In general, aptamers preferably comprise about 10 to about 100 nucleotides, preferably about 15 to about 40 nucleotides, more preferably about 20 to about 40 nucleotides, in that oligonucleotides of a length that falls within these ranges are readily prepared by conventional techniques. Optionally, aptamers can further comprise a minimum of approximately 6 nucleotides, preferably 10, and more preferably 14 or 15 nucleotides, that are necessary to effect specific binding.

[0267] An “eukaryotic initiation factor” or “eIF” refers to a protein or protein complex used in assembling an initiator tRNA, 40S and 60S ribosomal subunits required for initiating eukaryotic translation.

[0268] As used herein, an “internal ribosome entry site” or “IRES” refers to an RNA sequence or structural element ranging in size from 10 nt to 1000 nt or more, capable of initiating translation of a polypeptide in the absence of a typical RNA cap structure. An IRES is typically about 500 nt to about 700 nt in length.

[0269] As used herein, a “miRNA site” refers to a stretch of nucleotides within a polynucleotide that is capable of forming a duplex with at least 8 nucleotides of a natural miRNA sequence.

[0270] As used herein, an “endonuclease site” refers to a stretch of nucleotides within a polynucleotide that is capable of being recognized and cleaved by an endonuclease protein.

[0271] As used herein, “bicistronic RNA” refers to a polynucleotide that includes two expression sequences coding for two distinct proteins. These expression sequences can be separated by a nucleotide sequence encoding a cleavable peptide such as a protease cleavage site. They can also be separated by a ribosomal skipping element.

[0272] As used herein, the term “ribosomal skipping element” refers to a nucleotide sequence encoding a short peptide sequence capable of causing generation of two peptide chains from translation of one RNA molecule. While not wishing to be bound by theory, it is hypothesized that ribosomal skipping elements function by (1) terminating translation of the first peptide chain and re-initiating translation of the second peptide chain; or (2) cleavage of a peptide bond in the peptide sequence encoded by the ribosomai skipping element by an intrinsic protease activity of the encoded peptide, or by another protease in the environment (e.g., cytosol).

[0273] As used herein, the term “co-formulate” refers to a nanoparticle formulation comprising two or more nucleic acids or a nucleic acid and other active drug substance. Typically, the ratios are equimolar or defined in the ratiometric amount of the two or more nucleic acids or the nucleic acid and other active drug substance.

[0274] As used herein, “transfer vehicle” includes any of the standard pharmaceutical carriers, diluents, excipients, and the like, which are generally intended for use in connection with the administration of biologically active agents, including nucleic acids.

[0275] As used herein, the phrase “lipid nanoparticle” refers to a transfer vehicle comprising one or more cationic or ionizable lipids, stabilizing lipids, structural lipids, and helper lipids.

[0276] As used herein, the phrase “ionizable lipid” refers to any of a number of lipid species that carry a net positive charge at a selected pH, such as physiological pH 4 and a neutral charge at other pHs such as physiological pH 7.

[0277] In some embodiments, a lipid, e.g., an ionizable lipid, disclosed herein comprises one or more cleavable groups. The terms “cleave” and “cleavable” are used herein to mean that one or more chemical bonds (e.g., one or more of covalent bonds, hydrogen-bonds, van der Waals' forces and/or ionic interactions) between atoms in or adjacent to the subject functional group are broken (e.g., hydrolyzed) or are capable of being broken upon exposure to selected conditions (e.g., upon exposure to enzymatic conditions). In certain embodiments, the cleavable group is a disulfide functional group, and in particular embodiments is a disulfide group that is capable of being cleaved upon exposure to selected biological conditions (e.g., intracellular conditions). In certain embodiments, the cleavable group is an ester functional group that is capable of being cleaved upon exposure to selected biological conditions. For example, the disulfide groups may be cleaved enzymatically or by a hydrolysis, oxidation or reduction reaction. Upon cleavage of such disulfide functional group, the one or more functional moieties or groups (e.g., one or more of a head-group and/or a tail-group) that are bound thereto may be liberated. Exemplary cleavable groups may include, but are not limited to, disulfide groups, ester groups, ether groups, and any derivatives thereof (e.g., alkyl and aryl esters). In certain embodiments, the cleavable group is not an ester group or an ether group. In some embodiments, a cleavable group is bound (e.g., bound by one or more of hydrogen-bonds, van der Waals' forces, ionic interactions and covalent bonds) to one or more functional moieties or groups (e.g., at least one head-group and at least one tail-group). In certain embodiments, at least one of the functional moieties or groups is hydrophilic (e.g., a hydrophilic head-group comprising one or more of imidazole, guanidinium, amino, imine, enamine, optionally-substituted alkyl amino and pyridyl).

[0278] As used herein, the term “hydrophilic” is used to indicate in qualitative terms that a functional group is water-preferring, and typically such groups are water-soluble. For example, disclosed herein are compounds that comprise a cleavable disulfide (S—S) functional group bound to one or more hydrophilic groups (e.g., a hydrophilic head-group), wherein such hydrophilic groups comprise or are selected from the group consisting of imidazole, guanidinium, amino, imine, enamine, an optionally-substituted alkyl amino (e.g., an alkyl amino such as dimethylamino) and pyridyl.

[0279] In certain embodiments, at least one of the functional groups of moieties that comprise the compounds disclosed herein is hydrophobic in nature (e.g., a hydrophobic tail-group comprising a naturally occurring lipid such as cholesterol). As used herein, the term “hydrophobic” is used to indicate in qualitative terms that a functional group is water-avoiding, and typically such groups are not water soluble. For example, disclosed herein are compounds that comprise a cleavable functional group (e.g., a disulfide (S—S) group) bound to one or more hydrophobic groups, wherein such hydrophobic groups comprise one or more naturally occurring lipids such as cholesterol, and/or an optionally substituted, variably saturated or unsaturated C6-C20 alkyl and/or an optionally substituted, variably saturated or unsaturated C6-C20 acyl.

[0280] Compound described herein may also comprise one or more isotopic substitutions. For example, H may be in any isotopic form, including 1H, 2H (D or deuterium), and 3H (T or tritium); C may be in any isotopic form, including 12C, 13C, and 14C; O may be in any isotopic form, including 160 and 180; F may be in any isotopic form, including 18F and 19F; and the like.

[0281] When describing the invention, which may include compounds and pharmaceutically acceptable salts thereof, pharmaceutical compositions containing such compounds and methods of using such compounds and compositions, the following terms, if present, have the following meanings unless otherwise indicated. It should also be understood that when described herein any of the moieties defined forth below may be substituted with a variety of substituents, and that the respective definitions are intended to include such substituted moieties within their scope as set out below. Unless otherwise stated, the term “substituted” is to be defined as set out below. It should be further understood that the terms “groups” and “radicals” can be considered interchangeable when used herein.

[0282] When a range of values is listed, it is intended to encompass each value and sub-range within the range. For example, “C1-6 alkyl” is intended to encompass, C1, C2, C3, C4, C5, C6, C1-6, C1-5, C1-4, C1-3, C1-2, C2-6, C2-5, C2-4, C2-3, C3-6, C3-5, C3-4, C4-6, C4-5, and C5-6 alkyl.

[0283] In certain embodiments, the compounds disclosed herein comprise, for example, at least one hydrophilic head-group and at least one hydrophobic tail-group, each bound to at least one cleavable group, thereby rendering such compounds amphiphilic. As used herein to describe a compound or composition, the term “amphiphilic” means the ability to dissolve in both polar (e.g., water) and non-polar (e.g., lipid) environments. For example, in certain embodiments, the compounds disclosed herein comprise at least one lipophilic tail-group (e.g., cholesterol or a C6-C20 alkyl) and at least one hydrophilic head-group (e.g., imidazole), each bound to a cleavable group (e.g., disulfide).

[0284] It should be noted that the terms “head-group” and “tail-group” as used describe the compounds of the present invention, and in particular functional groups that comprise such compounds, are used for ease of reference to describe the orientation of one or more functional groups relative to other functional groups. For example, in certain embodiments a hydrophilic head-group (e.g., guanidinium) is bound (e.g., by one or more of hydrogen-bonds, van der Waals' forces, ionic interactions and covalent bonds) to a cleavable functional group (e.g., a disulfide group), which in turn is bound to a hydrophobic tail-group (e.g., cholesterol).

[0285] As used herein, the term “alkyl” refers to both straight and branched chain C1-C40 hydrocarbons (e.g., C6-C20 hydrocarbons), and include both saturated and unsaturated hydrocarbons. In certain embodiments, the alkyl may comprise one or more cyclic alkyls and/or one or more heteroatoms such as oxygen, nitrogen, or sulfur and may optionally be substituted with substituents (e.g., one or more of alkyl, halo, alkoxyl, hydroxy, amino, aryl, ether, ester or amide). In certain embodiments, a contemplated alkyl includes (9Z,12Z)-octadeca-9,12-dien. The use of designations such as, for example, “C6-C20” is intended to refer to an alkyl (e.g., straight or branched chain and inclusive of alkenes and alkyls) having the recited range carbon atoms. In some embodiments, an alkyl group has 1 to 10 carbon atoms (“C1-10 alkyl”). In some embodiments, an alkyl group has 1 to 9 carbon atoms (“C1-9 alkyl”). In some embodiments, an alkyl group has 1 to 8 carbon atoms (“C1-8 alkyl”). In some embodiments, an alkyl group has 1 to 7 carbon atoms (“C1-7 alkyl”). In some embodiments, an alkyl group has 1 to 6 carbon atoms (“C1-6 alkyl”). In some embodiments, an alkyl group has 1 to 5 carbon atoms (“C1-5 alkyl”). In some embodiments, an alkyl group has 1 to 4 carbon atoms (“C1-4 alkyl”). In some embodiments, an alkyl group has 1 to 3 carbon atoms (“C1-3 alkyl”). In some embodiments, an alkyl group has 1 to 2 carbon atoms (“C1-2 alkyl”). In some embodiments, an alkyl group has 1 carbon atom (“C1 alkyl”). Examples of C1-6 alkyl groups include methyl, ethyl, propyl, isopropyl, butyl, isobutyl, pentyl, hexyl, and the like.

[0286] As used herein, “alkenyl” refers to a radical of a straight-chain or branched hydrocarbon group having from 2 to 20 carbon atoms, one or more carbon-carbon double bonds (e.g., 1, 2, 3, or 4 carbon-carbon double bonds), and optionally one or more carbon-carbon triple bonds (e.g., 1, 2, 3, or 4 carbon-carbon triple bonds) (“C2-20 alkenyl”). In certain embodiments, alkenyl does not contain any triple bonds. In some embodiments, an alkenyl group has 2 to 10 carbon atoms (“C2-10 alkenyl”). In some embodiments, an alkenyl group has 2 to 9 carbon atoms (“C2-9 alkenyl”). In some embodiments, an alkenyl group has 2 to 8 carbon atoms (“C2-8 alkenyl”). In some embodiments, an alkenyl group has 2 to 7 carbon atoms (“C2-7 alkenyl”). In some embodiments, an alkenyl group has 2 to 6 carbon atoms (“C2-6 alkenyl”). In some embodiments, an alkenyl group has 2 to 5 carbon atoms (“C2-5 alkenyl”). In some embodiments, an alkenyl group has 2 to 4 carbon atoms (“C2-4 alkenyl”). In some embodiments, an alkenyl group has 2 to 3 carbon atoms (“C2-3 alkenyl”). In some embodiments, an alkenyl group has 2 carbon atoms (“C2 alkenyl”). The one or more carbon-carbon double bonds can be internal (such as in 2-butenyl) or terminal (such as in 1-butenyl). Examples of C2-4 alkenyl groups include ethenyl (C2), 1-propenyl (C3), 2-propenyl (C3), 1-butenyl (C4), 2-butenyl (C4), butadienyl (C4), and the like. Examples of C2-6 alkenyl groups include the aforementioned C2-4 alkenyl groups as well as pentenyl (C5), pentadienyl (C5), hexenyl (C6), and the like. Additional examples of alkenyl include heptenyl (C7), octenyl (C8), octatrienyl (C8), and the like.

[0287] As used herein, “alkynyl” refers to a radical of a straight-chain or branched hydrocarbon group having from 2 to 20 carbon atoms, one or more carbon-carbon triple bonds (e.g., 1, 2, 3, or 4 carbon-carbon triple bonds), and optionally one or more carbon-carbon double bonds (e.g., 1, 2, 3, or 4 carbon-carbon double bonds) (“C2-20 alkynyl”). In certain embodiments, alkynyl does not contain any double bonds. In some embodiments, an alkynyl group has 2 to 10 carbon atoms (“C2-10 alkynyl”). In some embodiments, an alkynyl group has 2 to 9 carbon atoms (“C2-9 alkynyl”). In some embodiments, an alkynyl group has 2 to 8 carbon atoms (“C2-8 alkynyl”). In some embodiments, an alkynyl group has 2 to 7 carbon atoms (“C2-7 alkynyl”). In some embodiments, an alkynyl group has 2 to 6 carbon atoms (“C2-6 alkynyl”). In some embodiments, an alkynyl group has 2 to 5 carbon atoms (“C2-5 alkynyl”). In some embodiments, an alkynyl group has 2 to 4 carbon atoms (“C2-4 alkynyl”). In some embodiments, an alkynyl group has 2 to 3 carbon atoms (“C2-3 alkynyl”). In some embodiments, an alkynyl group has 2 carbon atoms (“C2 alkynyl”). The one or more carbon-carbon triple bonds can be internal (such as in 2-butynyl) or terminal (such as in 1-butynyl). Examples of C2-4 alkynyl groups include, without limitation, ethynyl (C2), 1-propynyl (C3), 2-propynyl (C3), 1-butynyl (C4), 2-butynyl (C4), and the like. Examples of C2-6 alkenyl groups include the aforementioned C2-4 alkynyl groups as well as pentynyl (C5), hexynyl (C6), and the like. Additional examples of alkynyl include heptynyl (C7), octynyl (C8), and the like.

[0288] As used herein, “alkylene,” “alkenylene,” and “alkynylene,” refer to a divalent radical of an alkyl, alkenyl, and alkynyl group respectively. When a range or number of carbons is provided for a particular “alkylene,” “alkenylene,” or “alkynylene,” group, it is understood that the range or number refers to the range or number of carbons in the linear carbon divalent chain. “Alkylene,” “alkenylene,” and “alkynylene,” groups may be substituted or unsubstituted with one or more substituents as described herein.

[0289] As used herein, the term “aryl” refers to aromatic groups (e.g., monocyclic, bicyclic and tricyclic structures) containing six to ten carbons in the ring portion. The aryl groups may be optionally substituted through available carbon atoms and in certain embodiments may include one or more heteroatoms such as oxygen, nitrogen or sulfur. In some embodiments, an aryl group has six ring carbon atoms (“C6 aryl”; e.g., phenyl). In some embodiments, an aryl group has ten ring carbon atoms (“C10 aryl”; e.g., naphthyl such as 1-naphthyl and 2-naphthyl).

[0290] As used herein, “heteroaryl” refers to a radical of a 5-10 membered monocyclic or bicyclic 4n+2 aromatic ring system (e.g., having 6 or 10 electrons shared in a cyclic array) having ring carbon atoms and 1-4 ring heteroatoms provided in the aromatic ring system, wherein each heteroatom is independently selected from nitrogen, oxygen and sulfur (“5-10 membered heteroaryl”). In heteroaryl groups that contain one or more nitrogen atoms, the point of attachment can be a carbon or nitrogen atom, as valency permits. Heteroaryl bicyclic ring systems can include one or more heteroatoms in one or both rings. “Heteroaryl” includes ring systems wherein the heteroaryl ring, as defined above, is fused with one or more carbocyclyl or heterocyclyl groups wherein the point of attachment is on the heteroaryl ring, and in such instances, the number of ring members continue to designate the number of ring members in the heteroaryl ring system. “Heteroaryl” also includes ring systems wherein the heteroaryl ring, as defined above, is fused with one or more aryl groups wherein the point of attachment is either on the aryl or heteroaryl ring, and in such instances, the number of ring members designates the number of ring members in the fused (aryl/heteroaryl) ring system. Bicyclic heteroaryl groups wherein one ring does not contain a heteroatom (e.g., indolyl, quinolinyl, carbazolyl, and the like) the point of attachment can be on either ring, i.e., either the ring bearing a heteroatom (e.g., 2-indolyl) or the ring that does not contain a heteroatom (e.g., 5-indolyl).

[0291] The term “cycloalkyl” refers to a monovalent saturated cyclic, bicyclic, or bridged cyclic (e.g., adamantyl) hydrocarbon group of 3-12, 3-8, 4-8, or 4-6 carbons, referred to herein, e.g., as “C4-8cycloalkyl,” derived from a cycloalkane. Exemplary cycloalkyl groups include, but are not limited to, cyclohexanes, cyclopentanes, cyclobutanes and cyclopropanes.

[0292] As used herein, “heterocyclyl” or “heterocyclic” refers to a radical of a 3- to 10-membered non-aromatic ring system having ring carbon atoms and 1 to 4 ring heteroatoms, wherein each heteroatom is independently selected from nitrogen, oxygen, sulfur, boron, phosphorus, and silicon (“3-10 membered heterocyclyl”). In heterocyclyl groups that contain one or more nitrogen atoms, the point of attachment can be a carbon or nitrogen atom, as valency permits. A heterocyclyl group can either be monocyclic (“monocyclic heterocyclyl”) or a fused, bridged or spiro ring system such as a bicyclic system (“bicyclic heterocyclyl”), and can be saturated or can be partially unsaturated. Heterocyclyl bicyclic ring systems can include one or more heteroatoms in one or both rings. “Heterocyclyl” also includes ring systems wherein the heterocyclyl ring, as defined above, is fused with one or more carbocyclyl groups wherein the point of attachment is either on the carbocyclyl or heterocyclyl ring, or ring systems wherein the heterocyclyl ring, as defined above, is fused with one or more aryl or heteroaryl groups, wherein the point of attachment is on the heterocyclyl ring, and in such instances, the number of ring members continue to designate the number of ring members in the heterocyclyl ring system. The terms “heterocycle,” “heterocyclyl,” “heterocyclyl ring,” “heterocyclic group,” “heterocyclic moiety,” and “heterocyclic radical,” may be used interchangeably.

[0293] As used herein, “cyano” refers to —CN.

[0294] The terms “halo” and “halogen” as used herein refer to an atom selected from fluorine (fluoro, F), chlorine (chloro, Cl), bromine (bromo, Br), and iodine (iodo, I). In certain embodiments, the halo group is either fluoro or chloro.

[0295] The term “alkoxy,” as used herein, refers to an alkyl group which is attached to another moiety via an oxygen atom (—O(alkyl)). Non-limiting examples include e.g., methoxy, ethoxy, propoxy, and butoxy.

[0296] As used herein, “oxo” refers to —C═O.

[0297] In general, the term “substituted”, whether preceded by the term “optionally” or not, means that at least one hydrogen present on a group (e.g., a carbon or nitrogen atom) is replaced with a permissible substituent, e.g., a substituent which upon substitution results in a stable compound, e.g., a compound which does not spontaneously undergo transformation such as by rearrangement, cyclization, elimination, or other reaction. Unless otherwise indicated, a “substituted” group has a substituent at one or more substitutable positions of the group, and when more than one position in any given structure is substituted, the substituent is either the same or different at each position.

[0298] As used herein, “pharmaceutically acceptable salt” refers to those salts which are, within the scope of sound medical judgment, suitable for use in contact with the tissues of humans and lower animals without undue toxicity, irritation, allergic response and the like, and are commensurate with a reasonable benefit/risk ratio. Pharmaceutically acceptable salts are well known in the art. For example, Berge et al., describes pharmaceutically acceptable salts in detail in J. Pharmaceutical Sciences (1977) 66:1-19. Pharmaceutically acceptable salts of the compounds of this invention include those derived from suitable inorganic and organic acids and bases. Examples of pharmaceutically acceptable, nontoxic acid addition salts are salts of an amino group formed with inorganic acids such as hydrochloric acid, hydrobromic acid, phosphoric acid, sulfuric acid and perchloric acid or with organic acids such as acetic acid, oxalic acid, maleic acid, tartaric acid, citric acid, succinic acid or malonic acid or by using other methods used in the art such as ion exchange. Other pharmaceutically acceptable salts include adipate, alginate, ascorbate, aspartate, benzenesulfonate, benzoate, bisulfate, borate, butyrate, camphorate, camphorsulfonate, citrate, cyclopentanepropionate, digluconate, dodecylsulfate, ethanesulfonate, formate, fumarate, glucoheptonate, glycerophosphate, gluconate, hemisulfate, heptanoate, hexanoate, hydroiodide, 2-hydroxy-ethanesulfonate, lactobionate, lactate, laurate, lauryl sulfate, malate, maleate, malonate, methanesulfonate, 2-naphthalenesulfonate, nicotinate, nitrate, oleate, oxalate, palmitate, pamoate, pectinate, persulfate, 3-phenylpropionate, phosphate, picrate, pivalate, propionate, stearate, succinate, sulfate, tartrate, thiocyanate, p-toluenesulfonate, undecanoate, valerate salts, and the like. Pharmaceutically acceptable salts derived from appropriate bases include alkali metal, alkaline earth metal, ammonium and N+(C1-4alkyl)4 salts. Representative alkali or alkaline earth metal salts include sodium, lithium, potassium, calcium, magnesium, and the like. Further pharmaceutically acceptable salts include, when appropriate, nontoxic ammonium, quaternary ammonium, and amine cations formed using counterions such as halide, hydroxide, carboxylate, sulfate, phosphate, nitrate, lower alkyl sulfonate, and aryl sulfonate.

[0299] In typical embodiments, the present invention is intended to encompass the compounds disclosed herein, and the pharmaceutically acceptable salts, pharmaceutically acceptable esters, tautomeric forms, polymorphs, and prodrugs of such compounds. In some embodiments, the present invention includes a pharmaceutically acceptable addition salt, a pharmaceutically acceptable ester, a solvate (e.g., hydrate) of an addition salt, a tautomeric form, a polymorph, an enantiomer, a mixture of enantiomers, a stereoisomer or mixture of stereoisomers (pure or as a racemic or non-racemic mixture) of a compound described herein.

[0300] Compounds described herein can comprise one or more asymmetric centers, and thus can exist in various isomeric forms, e.g., enantiomers and/or diastereomers. For example, the compounds described herein can be in the form of an individual enantiomer, diastereomer or geometric isomer, or can be in the form of a mixture of stereoisomers, including racemic mixtures and mixtures enriched in one or more stereoisomer. Isomers can be isolated from mixtures by methods known to those skilled in the art, including chiral high pressure liquid chromatography (HPLC) and the formation and crystallization of chiral salts; or preferred isomers can be prepared by asymmetric syntheses. See, for example, Jacques et al., Enantiomers, Racemates and Resolutions (Wiley Interscience, New York, 1981); Wilen et al., Tetrahedron 33:2725 (1977); Eliel, Stereochemistry of Carbon Compounds (McGraw-Hill, N Y, 1962); and Wilen, Tables of Resolving Agents and Optical Resolutions p. 268 (E.L. Eliel, Ed., Univ. of Notre Dame Press, Notre Dame, IN 1972). The invention additionally encompasses compounds described herein as individual isomers substantially free of other isomers, and alternatively, as mixtures of various isomers.

[0301] In certain embodiments the compounds and the transfer vehicles of which such compounds are a component (e.g., lipid nanoparticles) exhibit an enhanced (e.g., increased) ability to transfect one or more target cells. Accordingly, also provided herein are methods of transfecting one or more target cells. Such methods generally comprise the step of contacting the one or more target cells with the compounds and/or pharmaceutical compositions disclosed herein such that the one or more target cells are transfected with the circular RNA encapsulated therein. As used herein, the terms “transfect” or “transfection” refer to the intracellular introduction of one or more encapsulated materials (e.g., nucleic acids and/or polynucleotides) into a cell, or preferably into a target cell. The term “transfection efficiency” refers to the relative amount of such encapsulated material (e.g., polynucleotides) up-taken by, introduced into and/or expressed by the target cell which is subject to transfection. In some embodiments, transfection efficiency may be estimated by the amount of a reporter polynucleotide product produced by the target cells following transfection. In some embodiments, a transfer vehicle has high transfection efficiency. In some embodiments, a transfer vehicle has at least about 10%, 20%, 30%, 40%, 50%, 60%, 70%, 80%, or 90% transfection efficiency.

[0302] As used herein, the term “liposome” generally refers to a vesicle composed of lipids (e.g., amphiphilic lipids) arranged in one or more spherical bilayer or bilayers. Such liposomes may be unilamellar or multilamellar vesicles which have a membrane formed from a lipophilic material and an aqueous interior that contains the encapsulated circRNA to be delivered to one or more target cells, tissues and organs. In certain embodiments, the compositions described herein comprise one or more lipid nanoparticles. Examples of suitable lipids (e.g., ionizable lipids) that may be used to form the liposomes and lipid nanoparticles contemplated include one or more of the compounds disclosed herein (e.g., HGT4001, HGT4002, HGT4003, HGT4004 and/or HGT4005). Such liposomes and lipid nanoparticles may also comprise additional ionizable lipids such as C12-200, DLin-KC2-DMA, and/or HGT5001, helper lipids, structural lipids, PEG-modified lipids, MC3, DLinDMA, DLinkC2DMA, cKK-E12, ICE, HGT5000, DODAC, DDAB, DMRIE, DOSPA, DOGS, DODAP, DODMA, DMDMA, DODAC, DLenDMA, DMRIE, CLinDMA, CpLinDMA, DMOBA, DOcarbDAP, DLinDAP, DLincarbDAP, DLinCDAP, KLin-K-DMA, DLin-K-XTC2-DMA, HGT4003, and combinations thereof.

[0303] As used herein, the phrase “biodegradable lipid” or “degradable lipid” refers to any of a number of lipid species that are broken down in a host environment on the order of minutes, hours, or days ideally making them less toxic and unlikely to accumulate in a host over time. Common modifications to lipids include ester bonds, and disulfide bonds among others to increase the biodegradability of a lipid.

[0304] As used herein, the phrase “biodegradable PEG lipid” or “degradable PEG lipid” refers to any of a number of lipid species where the PEG molecules are cleaved from the lipid in a host environment on the order of minutes, hours, or days ideally making them less immunogenic. Common modifications to PEG lipids include ester bonds, and disulfide bonds among others to increase the biodegradability of a lipid.

[0305] In certain embodiments of the present invention, the transfer vehicles (e.g., lipid nanoparticles) are prepared to encapsulate one or more materials or therapeutic agents (e.g., circRNA). The process of incorporating a desired therapeutic agent (e.g., circRNA) into a transfer vehicle is referred to herein as or “loading” or “encapsulating” (Lasic, et al., FEBS Lett., 312: 255-258, 1992). The transfer vehicle-loaded or -encapsulated materials (e.g., circRNA) may be completely or partially located in the interior space of the transfer vehicle, within a bilayer membrane of the transfer vehicle, or associated with the exterior surface of the transfer vehicle.

[0306] As used herein, the term “structural lipid” refers to sterols and also to lipids containing sterol moieties.

[0307] As defined herein, “sterols” are a subgroup of steroids consisting of steroid alcohols.

[0308] As used herein, the term “PEG” means any polyethylene glycol or other polyalkylene ether polymer.

[0309] As generally defined herein, a “PEG-OH lipid” (also referred to herein as “hydroxy-PEGylated lipid”) is a PEGylated lipid having one or more hydroxyl (—OH) groups on the lipid.

[0310] As used herein, a “phospholipid” is a lipid that includes a phosphate moiety and one or more carbon chains, such as unsaturated fatty acid chains.

[0311] All nucleotide sequences disclosed herein can represent an RNA sequence or a corresponding DNA sequence. It is understood that deoxythymidine (dT or T) in a DNA is transcribed into a uridine (U) in an RNA. As such, “T” and “U” are used interchangeably herein in nucleotide sequences.

[0312] The recitations “sequence identity” or, for example, comprising a “sequence 50% identical to,” as used herein, refer to the extent that sequences are identical on a nucleotide-by-nucleotide basis or an amino acid-by-amino acid basis over a window of comparison. Thus, a “percentage of sequence identity” may be calculated by comparing two optimally aligned sequences over the window of comparison, determining the number of positions at which the identical nucleic acid base (e.g., A, T, C, G, I) or the identical amino acid residue (e.g., Ala, Pro, Ser, Thr, Gly, Val, Leu, Ile, Phe, Tyr, Trp, Lys, Arg, His, Asp, Glu, Asn, Gln, Cys and Met) occurs in both sequences to yield the number of matched positions, dividing the number of matched positions by the total number of positions in the window of comparison (i.e., the window size), and multiplying the result by 100 to yield the percentage of sequence identity. Included are nucleotides and polypeptides having at least about 50%, 55%, 60%, 65%, 70%, 75%, 80%, 85%, 90%, 95%, 96%, 97%, 98%, 99% or 100% sequence identity to any of the reference sequences described herein, typically where the polypeptide variant maintains at least one biological activity of the reference polypeptide.

[0313] The expression sequences in the polynucleotide construct may be separated by a “cleavage site” sequence which enables polypeptides encoded by the expression sequences, once translated, to be expressed separately by the cell.

[0314] A “self-cleaving peptide” refers to a peptide which is translated without a peptide bond between two adjacent amino acids, or functions such that when the polypeptide comprising the proteins and the self-cleaving peptide is produced, it is immediately cleaved or separated into distinct and discrete first and second polypeptides without the need for any external cleavage activity.

[0315] The α and β chains of αβ TCR's are generally regarded as each having two domains or regions, namely variable and constant domains/regions. The variable domain consists of a concatenation of variable regions and joining regions. In the present specification and claims, the term “TCR alpha variable domain” therefore refers to the concatenation of TRAV and TRAJ regions, and the term TCR alpha constant domain refers to the extracellular TRAC region, or to a C-terminal truncated TRAC sequence. Likewise, the term “TCR beta variable domain” refers to the concatenation of TRBV and TRBD/TRBJ regions, and the term TCR beta constant domain refers to the extracellular TRBC region, or to a C-terminal truncated TRBC sequence.

[0316] As used herein, “autoimmunity” is defined as persistent and progressive immune reactions to non-infectious self-antigens, as distinct from infectious non self-antigens from bacterial, viral, fungal, or parasitic organisms which invade and persist within mammals and humans. Autoimmune conditions include scleroderma, Grave's disease, Crohn's disease, Sjorgen's disease, multiple sclerosis, Hashimoto's disease, psoriasis, myasthenia gravis, autoimmune polyendocrinopathy syndromes, Type I diabetes mellitus (TIDM), autoimmune gastritis, autoimmune uveoretinitis, polymyositis, colitis, and thyroiditis, as well as in the generalized autoimmune diseases typified by human Lupus. “Autoantigen” or “self-antigen” as used herein refers to an antigen or epitope which is native to the mammal and which is immunogenic in said mammal.

[0317] As used herein, the term “cationic lipid” or “ionizable lipid” refers to any of a number of lipid species that carry a net positive charge at a selected pH, such as physiological pH.

[0318] The term “antibody” (Ab) includes, without limitation, a glycoprotein immunoglobulin which binds specifically to an antigen. In general, an antibody may comprise at least two heavy (H) chains and two light (L) chains interconnected by disulfide bonds, or an antigen-binding molecule thereof. Each H chain may comprise a heavy chain variable region (abbreviated herein as VH) and a heavy chain constant region. The heavy chain constant region can comprise three constant domains, CH1, CH2 and CH3. Each light chain can comprise a light chain variable region (abbreviated herein as VL) and a light chain constant region. The light chain constant region can comprise one constant domain, CL. The VH and VL regions may be further subdivided into regions of hypervariability, termed complementarity determining regions (CDRs), interspersed with regions that are more conserved, termed framework regions (FR). Each VH and VL may comprise three CDRs and four FRs, arranged from amino-terminus to carboxy-terminus in the following order: FR1, CDR1, FR2, CDR2, FR3, CDR3, and FR4. The variable regions of the heavy and light chains contain a binding domain that interacts with an antigen. The constant regions of the Abs may mediate the binding of the immunoglobulin to host tissues or factors, including various cells of the immune system (e.g., effector cells) and the first component of the classical complement system. Antibodies may include, for example, monoclonal antibodies, recombinantly produced antibodies, monospecific antibodies, multispecific antibodies (including bispecific antibodies), human antibodies, engineered antibodies, humanized antibodies, chimeric antibodies, immunoglobulins, synthetic antibodies, tetrameric antibodies comprising two heavy chain and two light chain molecules, an antibody light chain monomer, an antibody heavy chain monomer, an antibody light chain dimer, an antibody heavy chain dimer, an antibody light chain-antibody heavy chain pair, intrabodies, antibody fusions (sometimes referred to herein as “antibody conjugates”), heteroconjugate antibodies, single domain antibodies, monovalent antibodies, single chain antibodies or single-chain variable fragments (scFv), camelized antibodies, affybodies, Fab fragments, F(ab′)2 fragments, disulfide-linked variable fragments (sdFv), anti-idiotypic (anti-id) antibodies (including, e.g., anti-anti-Id antibodies), minibodies, domain antibodies, synthetic antibodies (sometimes referred to herein as “antibody mimetics”), and antigen-binding fragments of any of the above. In some embodiments, antibodies described herein refer to polyclonal antibody populations.

[0319] An immunoglobulin may derive from any of the commonly known isotypes, including but not limited to IgA, secretory IgA, IgG and IgM. IgG subclasses are also well known to those in the art and include but are not limited to human IgG1, IgG2, IgG3 and IgG4. “Isotype” refers to the Ab class or subclass (e.g., IgM or IgG1) that is encoded by the heavy chain constant region genes. The term “antibody” includes, by way of example, both naturally occurring and non-naturally occurring Abs; monoclonal and polyclonal Abs; chimeric and humanized Abs; human or nonhuman Abs; wholly synthetic Abs; and single chain Abs. A nonhuman Ab may be humanized by recombinant methods to reduce its immunogenicity in humans. Where not expressly stated, and unless the context indicates otherwise, the term “antibody” also includes an antigen-binding fragment or an antigen-binding portion of any of the aforementioned immunoglobulins, and includes a monovalent and a divalent fragment or portion, and a single chain Ab.

[0320] An “antigen binding molecule,” “antigen binding portion,” or “antibody fragment” refers to any molecule that comprises the antigen binding parts (e.g., CDRs) of the antibody from which the molecule is derived. An antigen binding molecule may include the antigenic complementarity determining regions (CDRs). Examples of antibody fragments include, but are not limited to, Fab, Fab′, F(ab′)2, Fv fragments, dAb, linear antibodies, scFv antibodies, and multispecific antibodies formed from antigen binding molecules. Peptibodies (i.e. Fc fusion molecules comprising peptide binding domains) are another example of suitable antigen binding molecules. In some embodiments, the antigen binding molecule binds to an antigen on a tumor cell. In some embodiments, the antigen binding molecule binds to an antigen on a cell involved in a hyperproliferative disease or to a viral or bacterial antigen. In some embodiments, the antigen binding molecule binds to BCMA. In further embodiments, the antigen binding molecule is an antibody fragment, including one or more of the complementarity determining regions (CDRs) thereof, that specifically binds to the antigen. In further embodiments, the antigen binding molecule is a single chain variable fragment (scFv). In some embodiments, the antigen binding molecule comprises or consists of avimers.

[0321] As used herein, the term “variable region” or “variable domain” is used interchangeably and are common in the art. The variable region typically refers to a portion of an antibody, generally, a portion of a light or heavy chain, typically about the amino-terminal 110 to 120 amino acids in the mature heavy chain and about 90 to 115 amino acids in the mature light chain, which differ extensively in sequence among antibodies and are used in the binding and specificity of a particular antibody for its particular antigen. The variability in sequence is concentrated in those regions called complementarity determining regions (CDRs) while the more highly conserved regions in the variable domain are called framework regions (FR). Without wishing to be bound by any particular mechanism or theory, it is believed that the CDRs of the light and heavy chains are primarily responsible for the interaction and specificity of the antibody with antigen. In some embodiments, the variable region is a human variable region. In some embodiments, the variable region comprises rodent or murine CDRs and human framework regions (FRs). In particular embodiments, the variable region is a primate (e.g., non-human primate) variable region. In some embodiments, the variable region comprises rodent or murine CDRs and primate (e.g., non-human primate) framework regions (FRs).

[0322] The terms “VL” and “VL domain” are used interchangeably to refer to the light chain variable region of an antibody or an antigen-binding molecule thereof.

[0323] The terms “VH” and “VH domain” are used interchangeably to refer to the heavy chain variable region of an antibody or an antigen-binding molecule thereof.

[0324] A number of definitions of the CDRs are commonly in use: Kabat numbering, Chothia numbering, AbM numbering, or contact numbering. The AbM definition is a compromise between the two used by Oxford Molecular's AbM antibody modelling software. The contact definition is based on an analysis of the available complex crystal structures. The term “Kabat numbering” and like terms are recognized in the art and refer to a system of numbering amino acid residues in the heavy and light chain variable regions of an antibody, or an antigen-binding molecule thereof. In certain aspects, the CDRs of an antibody may be determined according to the Kabat numbering system (see, e.g., Kabat E A & Wu T T (1971) Ann NY Acad Sci 190: 382-391 and Kabat E A et al., (1991) Sequences of Proteins of Immunological Interest, Fifth Edition, U.S. Department of Health and Human Services, NIH Publication No. 91-3242). Using the Kabat numbering system, CDRs within an antibody heavy chain molecule are typically present at amino acid positions 31 to 35, which optionally may include one or two additional amino acids, following 35 (referred to in the Kabat numbering scheme as 35A and 35B) (CDR1), amino acid positions 50 to 65 (CDR2), and amino acid positions 95 to 102 (CDR3). Using the Kabat numbering system, CDRs within an antibody light chain molecule are typically present at amino acid positions 24 to 34 (CDR1), amino acid positions 50 to 56 (CDR2), and amino acid positions 89 to 97 (CDR3). In a specific embodiment, the CDRs of the antibodies described herein have been determined according to the Kabat numbering scheme. In certain aspects, the CDRs of an antibody may be determined according to the Chothia numbering scheme, which refers to the location of immunoglobulin structural loops (see, e.g., Chothia C & Lesk A M, (1987), J Mol Biol 196: 901-917; Al-Lazikani B et al, (1997) J Mol Biol 273: 927-948; Chothia C et al., (1992) J Mol Biol 227: 799-817; Tramontano A et al, (1990) J Mol Biol 215(1): 175-82; and U.S. Pat. No. 7,709,226). Typically, when using the Kabat numbering convention, the Chothia CDR-H1 loop is present at heavy chain amino acids 26 to 32, 33, or 34, the Chothia CDR-H2 loop is present at heavy chain amino acids 52 to 56, and the Chothia CDR-H3 loop is present at heavy chain amino acids 95 to 102, while the Chothia CDR-L1 loop is present at light chain amino acids 24 to 34, the Chothia CDR-L2 loop is present at light chain amino acids 50 to 56, and the Chothia CDR-L3 loop is present at light chain amino acids 89 to 97. The end of the Chothia CDR-HI loop when numbered using the Kabat numbering convention varies between H32 and H34 depending on the length of the loop (this is because the Kabat numbering scheme places the insertions at H35A and H35B; if neither 35A nor 35B is present, the loop ends at 32; if only 35A is present, the loop ends at 33; if both 35A and 35B are present, the loop ends at 34). In a specific embodiment, the CDRs of the antibodies described herein have been determined according to the Chothia numbering scheme.

[0325] As used herein, the terms “constant region” and “constant domain” are interchangeable and have a meaning common in the art. The constant region is an antibody portion, e.g., a carboxyl terminal portion of a light and/or heavy chain which is not directly involved in binding of an antibody to antigen but which may exhibit various effector functions, such as interaction with the Fc receptor. The constant region of an immunoglobulin molecule generally has a more conserved amino acid sequence relative to an immunoglobulin variable domain.

[0326] “Binding affinity” generally refers to the strength of the sum total of non-covalent interactions between a single binding site of a molecule (e.g., an antibody) and its binding partner (e.g., an antigen). Unless indicated otherwise, as used herein, “binding affinity” refers to intrinsic binding affinity which reflects a 1:1 interaction between members of a binding pair (e.g., antibody and antigen). The affinity of a molecule X for its partner Y may generally be represented by the dissociation constant (KD or Kd). Affinity may be measured and/or expressed in a number of ways known in the art, including, but not limited to, equilibrium dissociation constant (KD), and equilibrium association constant (KA or Ka). The KD is calculated from the quotient of koff/kon, whereas KA is calculated from the quotient of kon/koff. kon refers to the association rate constant of, e.g., an antibody to an antigen, and koff refers to the dissociation of, e.g., an antibody to an antigen. The kon and koff may be determined by techniques known to one of ordinary skill in the art, such as BIACORE® or KinExA.

[0327] As used herein, a “conservative amino acid substitution” is one in which the amino acid residue is replaced with an amino acid residue having a similar side chain. Families of amino acid residues having similar side chains have been defined in the art. These families include amino acids with basic side chains (e.g., lysine, arginine, histidine), acidic side chains (e.g., aspartic acid, glutamic acid), uncharged polar side chains (e.g., glycine, asparagine, glutamine, serine, threonine, tyrosine, cysteine, tryptophan), nonpolar side chains (e.g., alanine, valine, leucine, isoleucine, proline, phenylalanine, methionine), beta-branched side chains (e.g., threonine, valine, isoleucine) and aromatic side chains (e.g., tyrosine, phenylalanine, tryptophan, histidine). In some embodiments, one or more amino acid residues within a CDR(s) or within a framework region(s) of an antibody or antigen-binding molecule thereof may be replaced with an amino acid residue with a similar side chain.

[0328] As, used herein, the term “heterologous” means from any source other than naturally occurring sequences.

[0329] As used herein, an “epitope” is a term in the art and refers to a localized region of an antigen to which an antibody may specifically bind. An epitope may be, for example, contiguous amino acids of a polypeptide (linear or contiguous epitope) or an epitope can, for example, come together from two or more non-contiguous regions of a polypeptide or polypeptides (conformational, non-linear, discontinuous, or non-contiguous epitope). In some embodiments, the epitope to which an antibody binds may be determined by, e.g., NMR spectroscopy, X-ray diffraction crystallography studies, ELISA assays, hydrogen/deuterium exchange coupled with mass spectrometry (e.g., liquid chromatography electrospray mass spectrometry), array-based oligo-peptide scanning assays, and/or mutagenesis mapping (e.g., site-directed mutagenesis mapping). For X-ray crystallography, crystallization may be accomplished using any of the known methods in the art (e.g., Giege R et al., (1994) Acta Crystallogr D Biol Crystallogr 50 (Pt 4): 339-350; McPherson A (1990) Eur J Biochem 189: 1-23; Chayen NE (1997) Structure 5: 1269-1274; McPherson A (1976) J Biol Chem 251: 6300-6303). Antibody: antigen crystals may be studied using well known X-ray diffraction techniques and may be refined using computer software such as X-PLOR (Yale University, 1992, distributed by Molecular Simulations, Inc.; see e.g. Meth Enzymol (1985) volumes 114 & 115, eds Wyckoff H W et al.; U.S. Patent Publication No. 2004/0014194), and BUSTER (Bricogne G (1993) Acta Crystallogr D Biol Crystallogr 49 (Pt 1): 37-60; Bricogne G (1997) Meth Enzymol 276A: 361-423, ed Carter C W; Roversi P et al., (2000) Acta Crystallogr D Biol Crystallogr 56 (Pt 10): 1316-1323).

[0330] As used herein, an antigen binding molecule, an antibody, or an antigen binding molecule thereof “cross-competes” with a reference antibody or an antigen binding molecule thereof if the interaction between an antigen and the first binding molecule, an antibody, or an antigen binding molecule thereof blocks, limits, inhibits, or otherwise reduces the ability of the reference binding molecule, reference antibody, or an antigen binding molecule thereof to interact with the antigen. Cross competition may be complete, e.g., binding of the binding molecule to the antigen completely blocks the ability of the reference binding molecule to bind the antigen, or it may be partial, e.g., binding of the binding molecule to the antigen reduces the ability of the reference binding molecule to bind the antigen. In some embodiments, an antigen binding molecule that cross-competes with a reference antigen binding molecule binds the same or an overlapping epitope as the reference antigen binding molecule. In other embodiments, the antigen binding molecule that cross-competes with a reference antigen binding molecule binds a different epitope as the reference antigen binding molecule. Numerous types of competitive binding assays may be used to determine if one antigen binding molecule competes with another, for example: solid phase direct or indirect radioimmunoassay (RIA); solid phase direct or indirect enzyme immunoassay (EIA); sandwich competition assay (Stahli et al., 1983, Methods in Enzymology 9:242-253); solid phase direct biotin-avidin EIA (Kirkland et al., 1986, J. Immunol. 137:3614-3619); solid phase direct labeled assay, solid phase direct labeled sandwich assay (Harlow and Lane, 1988, Antibodies, A Laboratory Manual, Cold Spring Harbor Press); solid phase direct label RIA using 1-125 label (Morel et al., 1988, Molec. Immunol. 25:7-15); solid phase direct biotin-avidin EIA (Cheung, et al., 1990, Virology 176:546-552); and direct labeled RIA (Moldenhauer et al., 1990, Scand. J. Immunol. 32:77-82).

[0331] As used herein, the terms “immunospecifically binds,” “immunospecifically recognizes,” “specifically binds,” and “specifically recognizes” are analogous terms in the context of antibodies and refer to molecules that bind to an antigen (e.g., epitope or immune complex) as such binding is understood by one skilled in the art. For example, a molecule that specifically binds to an antigen may bind to other peptides or polypeptides, generally with lower affinity as determined by, e.g., immunoassays, BIACORE®, KinExA 3000 instrument (Sapidyne Instruments, Boise, ID), or other assays known in the art. In a specific embodiment, molecules that specifically bind to an antigen bind to the antigen with a KA that is at least 2 logs, 2.5 logs, 3 logs, 4 logs or greater than the KA when the molecules bind to another antigen.

[0332] An “antigen” refers to any molecule that provokes an immune response or is capable of being bound by an antibody or an antigen binding molecule. The immune response may involve either antibody production, or the activation of specific immunologically-competent cells, or both. A person of skill in the art would readily understand that any macromolecule, including virtually all proteins or peptides, may serve as an antigen. An antigen may be endogenously expressed, i.e. expressed by genomic DNA, or may be recombinantly expressed. An antigen may be specific to a certain tissue, such as a cancer cell, or it may be broadly expressed. In addition, fragments of larger molecules may act as antigens. In some embodiments, antigens are tumor antigens.

[0333] The term “autologous” refers to any material derived from the same individual to which it is later to be re-introduced. For example, the engineered autologous cell therapy (eACT™) method described herein involves collection of lymphocytes from a patient, which are then engineered to express, e.g., a CAR construct, and then administered back to the same patient.

[0334] The term “allogeneic” refers to any material derived from one individual which is then introduced to another individual of the same species, e.g., allogeneic T cell transplantation.

[0335] A “cancer” refers to a broad group of various diseases characterized by the uncontrolled growth of abnormal cells in the body. Unregulated cell division and growth results in the formation of malignant tumors that invade neighboring tissues and may also metastasize to distant parts of the body through the lymphatic system or bloodstream. A “cancer” or “cancer tissue” may include a tumor. Examples of cancers that may be treated by the methods disclosed herein include, but are not limited to, cancers of the immune system including lymphoma, leukemia, myeloma, and other leukocyte malignancies. In some embodiments, the methods disclosed herein may be used to reduce the tumor size of a tumor derived from, for example, bone cancer, pancreatic cancer, skin cancer, cancer of the head or neck, cutaneous or intraocular malignant melanoma, uterine cancer, ovarian cancer, rectal cancer, cancer of the anal region, stomach cancer, testicular cancer, uterine cancer, multiple myeloma, Hodgkin's Disease, non-Hodgkin's lymphoma (NHL), primary mediastinal large B cell lymphoma (PMBC), diffuse large B cell lymphoma (DLBCL), follicular lymphoma (FL), transformed follicular lymphoma, splenic marginal zone lymphoma (SMZL), cancer of the esophagus, cancer of the small intestine, cancer of the endocrine system, cancer of the thyroid gland, cancer of the parathyroid gland, cancer of the adrenal gland, cancer of the urethra, cancer of the penis, chronic or acute leukemia, acute myeloid leukemia, chronic myeloid leukemia, acute lymphoblastic leukemia (ALL) (including non T cell ALL), chronic lymphocytic leukemia (CLL), solid tumors of childhood, lymphocytic lymphoma, cancer of the bladder, cancer of the kidney or ureter, neoplasm of the central nervous system (CNS), primary CNS lymphoma, tumor angiogenesis, spinal axis tumor, brain stem glioma, pituitary adenoma, epidermoid cancer, squamous cell cancer, T cell lymphoma, environmentally induced cancers including those induced by asbestos, other B cell malignancies, and combinations of said cancers. In some embodiments, the methods disclosed herein may be used to reduce the tumor size of a tumor derived from, for example, sarcomas and carcinomas, fibrosarcoma, myxosarcoma, liposarcoma, chondrosarcoma, osteogenic sarcoma, Kaposi's sarcoma, sarcoma of soft tissue, and other sarcomas, synovioma, mesothelioma, Ewing's tumor, leiomyosarcoma, rhabdomyosarcoma, colon carcinoma, pancreatic cancer, breast cancer, ovarian cancer, prostate cancer, hepatocellular carcinomna, lung cancer, colorectal cancer, squamous cell carcinoma, basal cell carcinoma, adenocarcinoma (for example adenocarcinoma of the pancreas, colon, ovary, lung, breast, stomach, prostate, cervix, or esophagus), sweat gland carcinoma, sebaceous gland carcinoma, papillary carcinoma, papillary adenocarcinomas, medullary carcinoma, bronchogenic carcinoma, renal cell carcinoma, hepatoma, bile duct carcinoma, choriocarcinoma, Wilms' tumor, cervical cancer, testicular tumor, bladder carcinoma, carcinoma of the fallopian tubes, carcinoma of the endometrium, carcinoma of the cervix, carcinoma of the vagina, carcinoma of the vulva, carcinoma of the renal pelvis, CNS tumors (such as a glioma, astrocytoma, medulloblastoma, craniopharyogioma, ependymoma, pinealoma, hemangioblastoma, acoustic neuroma, oligodendroglioma, menangioma, melanoma, neuroblastoma and retinoblastoma). The particular cancer may be responsive to chemo- or radiation therapy or the cancer may be refractory. A refractory cancer refers to a cancer that is not amenable to surgical intervention and the cancer is either initially unresponsive to chemo- or radiation therapy or the cancer becomes unresponsive over time.

[0336] An “anti-tumor effect” as used herein, refers to a biological effect that may present as a decrease in tumor volume, a decrease in the number of tumor cells, a decrease in tumor cell proliferation, a decrease in the number of metastases, an increase in overall or progression-free survival, an increase in life expectancy, or amelioration of various physiological symptoms associated with the tumor. An anti-tumor effect may also refer to the prevention of the occurrence of a tumor, e.g., a vaccine.

[0337] A “cytokine,” as used herein, refers to a non-antibody protein that is released by one cell in response to contact with a specific antigen, wherein the cytokine interacts with a second cell to mediate a response in the second cell. “Cytokine” as used herein is meant to refer to proteins released by one cell population that act on another cell as intercellular mediators. A cytokine may be endogenously expressed by a cell or administered to a subject. Cytokines may be released by immune cells, including macrophages, B cells, T cells, neutrophils, dendritic cells, eosinophils and mast cells to propagate an immune response. Cytokines may induce various responses in the recipient cell. Cytokines may include homeostatic cytokines, chemokines, pro-inflammatory cytokines, effectors, and acute-phase proteins. For example, homeostatic cytokines, including interleukin (IL) 7 and IL-15, promote immune cell survival and proliferation, and pro-inflammatory cytokines may promote an inflammatory response. Examples of homeostatic cytokines include, but are not limited to, IL-2, IL-4, IL-5, IL-7, IL-10, IL-12p40, IL-12p70, IL-15, and interferon (IFN) gamma. Examples of pro-inflammatory cytokines include, but are not limited to, IL-1a, IL-1b, IL-6, IL-13, IL-17a, IL-23, IL-27, tumor necrosis factor (TNF)-alpha, TNF-beta, fibroblast growth factor (FGF) 2, granulocyte macrophage colony-stimulating factor (GM-CSF), soluble intercellular adhesion molecule 1 (sICAM-1), soluble vascular adhesion molecule 1 (sVCAM-1), vascular endothelial growth factor (VEGF), VEGF-C, VEGF-D, and placental growth factor (PLGF). Examples of effectors include, but are not limited to, granzyme A, granzyme B, soluble Fas ligand (sFasL), TGF-beta, IL-35, and perforin. Examples of acute phase-proteins include, but are not limited to, C-reactive protein (CRP) and serum amyloid A (SAA).

[0338] The term “lymphocyte” as used herein includes natural killer (NK) cells, T cells, or B cells. NK cells are a type of cytotoxic (cell toxic) lymphocyte that represent a major component of the innate immune system. NK cells reject tumors and cells infected by viruses. It works through the process of apoptosis or programmed cell death. They were termed “natural killers” because they do not require activation in order to kill cells. T cells play a major role in cell-mediated-immunity (no antibody involvement). T cell receptors (TCR) differentiate T cells from other lymphocyte types. The thymus, a specialized organ of the immune system, is the primary site for T cell maturation. There are numerous types of T cells, including: helper T cells (e.g., CD4+ cells), cytotoxic T cells (also known as TC, cytotoxic T lymphocytes, CTL, T-killer cells, cytolytic T cells, CD8+ T cells or killer T cells), memory T cells ((i) stem memory cells (TSCM), like naive cells, are CD45RO−, CCR7+, CD45RA+, CD62L+(L-selectin), CD27+, CD28+ and IL-7Ra+, but also express large amounts of CD95, IL-2R, CXCR3, and LFA-1, and show numerous functional attributes distinctive of memory cells); (ii) central memory cells (TCM) express L-selectin and CCR7, they secrete IL-2, but not IFNγ or IL-4, and (iii) effector memory cells (TEM), however, do not express L-selectin or CCR7 but produce effector cytokines like IFNγ and IL-4), regulatory T cells (Tregs, suppressor T cells, or CD4+CD25+ or CD4+FoxP3+ regulatory T cells), natural killer T cells (NKT) and gamma delta T cells. B-cells, on the other hand, play a principal role in humoral immunity (with antibody involvement). B-cells make antibodies, are capable of acting as antigen-presenting cells (APCs) and turn into memory B-cells and plasma cells, both short-lived and long-lived, after activation by antigen interaction. In mammals, immature B-cells are formed in the bone marrow.

[0339] The term “genetically engineered” or “engineered” refers to a method of modifying the genome of a cell, including, but not limited to, deleting a coding or non-coding region or a portion thereof or inserting a coding region or a portion thereof. In some embodiments, the cell that is modified is a lymphocyte, e.g., a T cell, which may either be obtained from a patient or a donor. The cell may be modified to express an exogenous construct, such as, e.g., a chimeric antigen receptor (CAR) or a T cell receptor (TCR), which is incorporated into the cell's genome.

[0340] An “immune response” refers to the action of a cell of the immune system (for example, T lymphocytes, B lymphocytes, natural killer (NK) cells, macrophages, eosinophils, mast cells, dendritic cells and neutrophils) and soluble macromolecules produced by any of these cells or the liver (including Abs, cytokines, and complement) that results in selective targeting, binding to, damage to, destruction of, and/or elimination from a vertebrate's body of invading pathogens, cells or tissues infected with pathogens, cancerous or other abnormal cells, or, in cases of autoimmunity or pathological inflammation, normal human cells or tissues.

[0341] A “costimulatory signal,” as used herein, refers to a signal, which in combination with a primary signal, such as TCR/CD3 ligation, leads to a T cell response, such as, but not limited to, proliferation and/or upregulation or down regulation of key molecules.

[0342] A “costimulatory ligand,” as used herein, includes a molecule on an antigen presenting cell that specifically binds a cognate co-stimulatory molecule on a T cell. Binding of the costimulatory ligand provides a signal that mediates a T cell response, including, but not limited to, proliferation, activation, differentiation, and the like. A costimulatory ligand induces a signal that is in addition to the primary signal provided by a stimulatory molecule, for instance, by binding of a T cell receptor (TCR)/CD3 complex with a major histocompatibility complex (MHC) molecule loaded with peptide. A co-stimulatory ligand may include, but is not limited to, 3/TR6, 4-IBB ligand, agonist or antibody that binds Toll-like receptor, B7-1 (CD80), B7-2 (CD86), CD30 ligand, CD40, CD7, CD70, CD83, herpes virus entry mediator (HVEM), human leukocyte antigen G (HLA-G), ILT4, immunoglobulin-like transcript (ILT) 3, inducible costimulatory ligand (ICOS-L), intercellular adhesion molecule (ICAM), ligand that specifically binds with B7-H3, lymphotoxin beta receptor, MHC class I chain-related protein A (MICA), MHC class I chain-related protein B (MICB), OX40 ligand, PD-L2, or programmed death (PD) LI. A co-stimulatory ligand includes, without limitation, an antibody that specifically binds with a co-stimulatory molecule present on a T cell, such as, but not limited to, 4-1BB, B7-H3, CD2, CD27, CD28, CD30, CD40, CD7, ICOS, ligand that specifically binds with CD83, lymphocyte function-associated antigen-1 (LFA-1), natural killer cell receptor C (NKG2C), OX40, PD-1, or tumor necrosis factor superfamily member 14 (TNFSF14 or LIGHT).

[0343] A “costimulatory molecule” is a cognate binding partner on a T cell that specifically binds with a costimulatory ligand, thereby mediating a costimulatory response by the T cell, such as, but not limited to, proliferation. Costimulatory molecules include, but are not limited to, 4-1BB/CD137, B7-H3, BAFFR, BLAME (SLAMF8), BTLA, CD 33, CD 45, CD100 (SEMA4D), CD103, CD134, CD137, CD154, CD16, CD160 (BY55), CD 18, CD19, CD19a, CD2, CD22, CD247, CD27, CD276 (B7-H3), CD28, CD29, CD3 (alpha; beta; delta; epsilon; gamma; zeta), CD30, CD37, CD4, CD4, CD40, CD49a, CD49D, CD49f, CD5, CD64, CD69, CD7, CD80, CD83 ligand, CD84, CD86, CD8alpha, CD8beta, CD9, CD96 (Tactile), CD1-1a, CD1-1b, CD1-1c, CD1-1D, CDS, CEACAM1, CRT AM, DAP-10, DNAM1 (CD226), Fc gamma receptor, GADS, GITR, HVEM (LIGHTR), IA4, ICAM-1, ICAM-1, ICOS, Ig alpha (CD79a), IL2R beta, IL2R gamma, IL7R alpha, integrin, ITGA4, ITGA4, ITGA6, IT GAD, ITGAE, ITGAL, ITGAM, ITGAX, ITGB2, ITGB7, ITGB1, KIRDS2, LAT, LFA-1, LFA-1, LIGHT, LIGHT (tumor necrosis factor superfamily member 14; TNFSF14), LTBR, Ly9 (CD229), lymphocyte function-associated antigen-1 (LFA-1 (CD11a/CD18), MHC class I molecule, NKG2C, NKG2D, NKp30, NKp44, NKp46, NKp80 (KLRF1), OX40, PAG/Cbp, PD-1, PSGL1, SELPLG (CD162), signaling lymphocytic activation molecule, SLAM (SLAMF1; CD150; IPO-3), SLAMF4 (CD244; 2B4), SLAMF6 (NTB-A; Lyl08), SLAMF7, SLP-76, TNF, TNFr, TNFR2, Toll ligand receptor, TRANCE/RANKL, VLA1, or VLA-6, or fragments, truncations, or combinations thereof.

[0344] As used herein, a “vaccine” refers to a composition for generating immunity for the prophylaxis and/or treatment of diseases. Accordingly, vaccines are medicaments which comprise antigens and are intended to be used in humans or animals for generating specific defense and protective substances upon administration to the human or animal.

[0345] As used herein, a “neoantigen” refers to a class of tumor antigens which arises from tumor-specific mutations in an expressed protein.

[0346] As used herein, a “fusion protein” is a protein with at least two domains that are encoded by separate genes that have been joined to transcribe for a single peptide.

### 2. DNA Template, Precusor RNA & Circular RNA

[0347] According to the present invention, transcription of a DNA template provided herein (e.g., comprising a 3′ enhanced intron element, 3′ enhanced exon element, a core functional element, a 5′ enhanced exon element, and a 5′ enhanced intron element) results in formation of a precursor linear RNA polynucleotide capable of circularizing. In some embodiments, this DNA template comprises a vector, PCR product, plasmid, minicircle DNA, cosmid, artificial chromosome, complementary DNA (cDNA), extrachromosomal DNA (ecDNA), or a fragment therein. In certain embodiments, the minicircle DNA may be linearized or non-linearized. In certain embodiments, the plasmid may be linearized or non-linearized. In some embodiments, the DNA template may be single-stranded. In other embodiments, the DNA template may be double-stranded. In some embodiments, the DNA template comprises in whole or in part from a viral, bacterial or eukaryotic vector.

[0348] The present invention, as provided herein, comprises a DNA template that shares the same sequence as the precursor linear RNA polynucleotide prior to splicing of the precursor linear RNA polynucleotide (e.g., a 3′ enhanced intron element, a 3′ enhanced exon element, a core functional element, and a 5′ enhanced exon element, a 5′ enhanced intron element). In some embodiments, said linear precursor RNA polynucleotide undergoes splicing leading to the removal of the 3′ enhanced intron element and 5′ enhanced intron element during the process of circularization. In some embodiments, the resulting circular RNA polynucleotide lacks a 3′ enhanced intron fragment and a 5′ enhanced intron fragment, but maintains a 3′ enhanced exon fragment, a core functional element, and a 5′ enhanced exon element.

[0349] In some embodiments, the precursor linear RNA polynucleotide circularizes when incubated in the presence of one or more guanosine nucleotides or nucleoside (e.g., GTP) and a divalent cation (e.g., Mg²⁺). In some embodiments, the 3′ enhanced exon element, 5′ enhanced exon element, and/or core functional element in whole or in part promotes the circularization of the precursor linear RNA polynucleotide to form the circular RNA polynucleotide provided herein.

[0350] In certain embodiments circular RNA provided herein is produced inside a cell. In some embodiments, precursor RNA is transcribed using a DNA template (e.g., in some embodiments, using a vector provided herein) in the cytoplasm by a bacteriophage RNA polymerase, or in the nucleus by host RNA polymerase II and then circularized.

[0351] In certain embodiments, the circular RNA provided herein is injected into an animal (e.g., a human), such that a polypeptide encoded by the circular RNA molecule is expressed inside the animal.

[0352] In some embodiments, the DNA (e.g., vector), linear RNA (e.g., precursor RNA), and/or circular RNA polynucleotide provided herein is between 300 and 10000, 400 and 9000, 500 and 8000, 600 and 7000, 700 and 6000, 800 and 5000, 900 and 5000, 1000 and 5000, 1100 and 5000, 1200 and 5000, 1300 and 5000, 1400 and 5000, and/or 1500 and 5000 nucleotides in length. In some embodiments, the polynucleotide is at least 300 nt, 400 nt, 500 nt, 600 nt, 700 nt, 800 nt, 900 nt, 1000 nt, 1100 nt, 1200 nt, 1300 nt, 1400 nt, 1500 nt, 2000 nt, 2500 nt, 3000 nt, 3500 nt, 4000 nt, 4500 nt, or 5000 nt in length. In some embodiments, the polynucleotide is no more than 3000 nt, 3500 nt, 4000 nt, 4500 nt, 5000 nt, 6000 nt, 7000 nt, 8000 nt, 9000 nt, or 10000 nt in length. In some embodiments, the length of a DNA, linear RNA, and/or circular RNA polynucleotide provided herein is about 300 nt, 400 nt, 500 nt, 600 nt, 700 nt, 800 nt, 900 nt, 1000 nt, 1100 nt, 1200 nt, 1300 nt, 1400 nt, 1500 nt, 2000 nt, 2500 nt, 3000 nt, 3500 nt, 4000 nt, 4500 nt, 5000 nt, 6000 nt, 7000 nt, 8000 nt, 9000 nt, or 10000 nt.

[0353] In some embodiments, the circular RNA provided herein has higher functional stability than mRNA comprising the same expression sequence. In some embodiments, the circular RNA provided herein has higher functional stability than mRNA comprising the same expression sequence, 5moU modifications, an optimized UTR, a cap, and/or a polyA tail.

[0354] In some embodiments, the circular RNA polynucleotide provided herein has a functional half-life of at least 5 hours, 10 hours, 15 hours, 20 hours. 30 hours, 40 hours, 50 hours, 60 hours, 70 hours or 80 hours. In some embodiments, the circular RNA polynucleotide provided herein has a functional half-life of 5-80, 10-70, 15-60, and/or 20-50 hours. In some embodiments, the circular RNA polynucleotide provided herein has a functional half-life greater than (e.g., at least 1.5-fold greater than, at least 2-fold greater than) that of an equivalent linear RNA polynucleotide encoding the same protein. In some embodiments, functional half-life can be assessed through the detection of functional protein synthesis.

[0355] In some embodiments, the circular RNA polynucleotide provided herein has a half-life of at least 5 hours, 10 hours, 15 hours, 20 hours. 30 hours, 40 hours, 50 hours, 60 hours, 70 hours or 80 hours. In some embodiments, the circular RNA polynucleotide provided herein has a half-life of 5-80, 10-70, 15-60, and/or 20-50 hours. In some embodiments, the circular RNA polynucleotide provided herein has a half-life greater than (e.g., at least 1.5-fold greater than, at least 2-fold greater than) that of an equivalent linear RNA polynucleotide encoding the same protein. In some embodiments, the circular RNA polynucleotide, or pharmaceutical composition thereof, has a functional half-life in a human cell greater than or equal to that of a pre-determined threshold value. In some embodiments the functional half-life is determined by a functional protein assay. For example in some embodiments, the functional half-life is determined by an in vitro luciferase assay, wherein the activity of Gaussia luciferase (GLuc) is measured in the media of human cells (e.g. HepG2) expressing the circular RNA polynucleotide every 1, 2, 6, 12, or 24 hours over 1, 2, 3, 4, 5, 6, 7, or 14 days. In other embodiments, the functional half-life is determined by an in vivo assay, wherein levels of a protein encoded by the expression sequence of the circular RNA polynucleotide are measured in patient serum or tissue samples every 1, 2, 6, 12, or 24 hours over 1, 2, 3, 4, 5, 6, 7, or 14 days. In some embodiments, the pre-determined threshold value is the functional half-life of a reference linear RNA polynucleotide comprising the same expression sequence as the circular RNA polynucleotide.

[0356] In some embodiments, the circular RNA provided herein may have a higher magnitude of expression than equivalent linear mRNA, e.g., a higher magnitude of expression 24 hours after administration of RNA to cells. In some embodiments, the circular RNA provided herein has a higher magnitude of expression than mRNA comprising the same expression sequence, 5moU modifications, an optimized UTR, a cap, and/or a polyA tail.

[0357] In some embodiments, the circular RNA provided herein may be less immunogenic than an equivalent mRNA when exposed to an immune system of an organism or a certain type of immune cell. In some embodiments, the circular RNA provided herein is associated with modulated production of cytokines when exposed to an immune system of an organism or a certain type of immune cell. For example, in some embodiments, the circular RNA provided herein is associated with reduced production of IFN-β1, RIG-I, IL-2, IL-6, IFNγ, and/or TNFα when exposed to an immune system of an organism or a certain type of immune cell as compared to mRNA comprising the same expression sequence. In some embodiments, the circular RNA provided herein is associated with less IFN-β1, RIG-I, IL-2, IL-6, IFNγ, and/or TNFα transcript induction when exposed to an immune system of an organism or a certain type of immune cell as compared to mRNA comprising the same expression sequence. In some embodiments, the circular RNA provided herein is less immunogenic than mRNA comprising the same expression sequence. In some embodiments, the circular RNA provided herein is less immunogenic than mRNA comprising the same expression sequence, 5moU modifications, an optimized UTR, a cap, and/or a polyA tail.

[0358] In certain embodiments, the circular RNA provided herein can be transfected into a cell as is, or can be transfected in DNA vector form and transcribed in the cell. Transcription of circular RNA from a transfected DNA vector can be via added polymerases or polymerases encoded by nucleic acids transfected into the cell, or preferably via endogenous polymerases.

[0359] A. Enhanced Intron Elements & Enhanced Exon Elements

[0360] As present in the invention herein, the enhanced intron elements and enhanced exon elements may comprise spacers, duplex regions, affinity sequences, intron fragments, exon fragments and various untranslated elements. These sequences within the enhanced intron elements or enhanced exon elements are arranged to optimize circularization or protein expression.

[0361] In certain embodiments, the DNA template, precursor linear RNA polynucleotide and circular RNA provided herein comprise a first (5′) and/or a second (3′) spacer. In some embodiments, the DNA template or precursor linear RNA polynucleotide comprises one or more spacers in the enhanced intron elements. In some embodiments, the DNA template, precursor linear RNA polynucleotide comprises one or more spacers in the enhanced exon elements. In certain embodiments, the DNA template or linear RNA polynucleotide comprises a spacer in the 3′ enhanced intron fragment and a spacer in the 5′ enhanced intron fragment. In certain embodiments, DNA template, precursor linear RNA polynucleotide, or circular RNA comprises a spacer in the 3′ enhanced exon fragment and another spacer in the 5′ enhanced exon fragment to aid with circularization or protein expression due to symmetry created in the overall sequence.

[0362] In some embodiments, including a spacer between the 3′ group I intron fragment and the core functional element may conserve secondary structures in those regions by preventing them from interacting, thus increasing splicing efficiency. In some embodiments, the first (between 3′ group I intron fragment and core functional element) and second (between the two expression sequences and core functional element) spacers comprise additional base pairing regions that are predicted to base pair with each other and not to the first and second duplex regions. In other embodiments, the first (between 3′ group I intron fragment and core functional element) and second (between the one of the core functional element and 5′ group I intron fragment) spacers comprise additional base pairing regions that are predicted to base pair with each other and not to the first and second duplex regions. In some embodiments, such spacer base pairing brings the group I intron fragments in close proximity to each other, further increasing splicing efficiency. Additionally, in some embodiments, the combination of base pairing between the first and second duplex regions, and separately, base pairing between the first and second spacers, promotes the formation of a splicing bubble containing the group I intron fragments flanked by adjacent regions of base pairing. Typical spacers are contiguous sequences with one or more of the following qualities: 1) predicted to avoid interfering with proximal structures, for example, the IRES, expression sequence, aptamer, or intron; 2) is at least 7 nt long and no longer than 100 nt; 3) is located after and adjacent to the 3′ intron fragment and/or before and adjacent to the 5′ intron fragment; and 4) contains one or more of the following: a) an unstructured region at least 5 nt long, b) a region of base pairing at least 5 nt long to a distal sequence, including another spacer, and c) a structured region at least 7 nt long limited in scope to the sequence of the spacer. Spacers may have several regions, including an unstructured region, a base pairing region, a hairpin/structured region, and combinations thereof. In an embodiment, the spacer has a structured region with high GC content. In an embodiment, a region within a spacer base pairs with another region within the same spacer. In an embodiment, a region within a spacer base pairs with a region within another spacer. In an embodiment, a spacer comprises one or more hairpin structures. In an embodiment, a spacer comprises one or more hairpin structures with a stem of 4 to 12 nucleotides and a loop of 2 to 10 nucleotides. In an embodiment, there is an additional spacer between the 3′ group I intron fragment and the core functional element. In an embodiment, this additional spacer prevents the structured regions of the IRES or aptamer of a TIE from interfering with the folding of the 3′ group I intron fragment or reduces the extent to which this occurs. In some embodiments, the 5′ spacer sequence is at least 7, 8, 9, 10, 11, 12, 13, 14, 15, 16, 17, 18, 19, 20, 25 or 30 nucleotides in length. In some embodiments, the 5′ spacer sequence is no more than 100, 90, 80, 70, 60, 50, 45, 40, 35 or 30 nucleotides in length. In some embodiments the 5′ spacer sequence is between 5 and 50, 10 and 50, 20 and 50, 20 and 40, and/or 25 and 35 nucleotides in length. In certain embodiments, the 5′ spacer sequence is 10, 11, 12, 13, 14, 15, 16, 17, 18, 19, 20, 21, 22, 23, 24, 25, 26, 27, 28, 29, 30, 31, 32, 33, 34, 35, 36, 37, 38, 39, 40, 41, 42, 43, 44, 45, 46, 47, 48, 49 or 50 nucleotides in length. In one embodiment, the 5′ spacer sequence is a polyA sequence. In another embodiment, the 5′ spacer sequence is a polyAC sequence. In one embodiment, a spacer comprises about 10%, 20%, 30%, 40%, 50%, 60%, 70%, 80%, 90%, or 100% polyAC content. In one embodiment, a spacer comprises about 10%, 20%, 30%, 40%, 50%, 60%, 70%, 80%, 90%, or 100% polypyrimidine (C/T or C/U) content.

[0363] In some embodiments, the DNA template and precursor linear RNA polynucleotides and circular RNA polynucleotide provided herein comprise a first (5′) duplex region and a second (3′) duplex region. In certain embodiments, the DNA template and precursor linear RNA polynucleotide comprises a 5′ external duplex region located within the 3′ enhanced intron fragment and a 3′ external duplex region located within the 5′ enhanced intron fragment. In some embodiments, the DNA template, precursor linear RNA polynucleotide and circular RNA polynucleotide comprise a 5′ internal duplex region located within the 3′ enhanced exon fragment and a 3′ internal duplex region located within the 5′ enhanced exon fragment. In some embodiments, the DNA polynucleotide and precursor linear RNA polynucleotide comprises a 5′ external duplex region, 5′ internal duplex region, a 3′ internal duplex region, and a 3′ external duplex region.

[0364] In certain embodiments, the first and second duplex regions may form perfect or imperfect duplexes. Thus, in certain embodiments at least 75%, 80%, 85%, 90%, 91%, 92%, 93%, 94%, 95%, 96%, 97%, 98%, 99% or 100% of the first and second duplex regions may be base paired with one another. In some embodiments, the duplex regions are predicted to have less than 50% (e.g., less than 45%, less than 40%, less than 35%, less than 30%, less than 25%) base pairing with unintended sequences in the RNA (e.g., non-duplex region sequences). In some embodiments, including such duplex regions on the ends of the precursor RNA strand, and adjacent or very close to the group I intron fragment, bring the group I intron fragments in close proximity to each other, increasing splicing efficiency. In some embodiments, the duplex regions are 3 to 100 nucleotides in length (e.g., 3-75 nucleotides in length, 3-50 nucleotides in length, 20-50 nucleotides in length, 35-50 nucleotides in length, 5-25 nucleotides in length, 9-19 nucleotides in length). In some embodiments, the duplex regions are about 3, 4, 5, 6, 7, 8, 9, 10, 11, 12, 13, 14, 15, 16, 17, 18, 19, 20, 21, 22, 23, 24, 25, 26, 27, 28, 29, 30, 31, 32, 33, 34, 35, 36, 37, 38, 39, 40, 41, 42, 43, 44, 45, 46, 47, 48, 49 or 50 nucleotides in length. In some embodiments, the duplex regions have a length of about 9 to about 50 nucleotides. In one embodiment, the duplex regions have a length of about 9 to about 19 nucleotides. In some embodiments, the duplex regions have a length of about 20 to about 40 nucleotides. In certain embodiments, the duplex regions have a length of about 30 nucleotides.

[0365] In other embodiments, the DNA template, precursor linear RNA polynucleotide, or circular RNA polynucleotide does not comprise of any duplex regions to optimize translation or circularization.

[0366] As provided herein, the DNA template or precursor linear RNA polynucleotide may comprise an affinity tag. In some embodiments, the affinity tag is located in the 3′ enhanced intron element. In some embodiments, the affinity tag is located in the 5′ enhanced intron element. In some embodiments, both (3′ and 5′) enhanced intron elements each comprise an affinity tag. In one embodiment, an affinity tag of the 3′ enhanced intron element is the length as an affinity tag in the 5′ enhanced intron element. In some embodiments, an affinity tag of the 3′ enhanced intron element is the same sequence as an affinity tag in the 5′ enhanced intron element. In some embodiments, the affinity sequence is placed to optimize oligo-dT purification.

[0367] In some embodiments, the one or more affinity tags present in a precursor linear RNA polynucleotide are removed upon circularization. See, for example, FIG. 97A and FIG. 97B. In some embodiments, affinity tags are added to remaining linear RNA after circularization of RNA is performed. In some such embodiments, the affinity tags are added enzymatically to linear RNA. The presence of one or more affinity tags in linear RNA and their absence from circular RNA can facilitate purification of circular RNA. In some embodiments, such purification is performed using a negative selection or affinity-purification method. In some embodiments, such purification is performed using a binding agent that preferentially or specifically binds to the affinity tag.

[0368] In some embodiments, an affinity tag comprises a polyA region. In some embodiments the polyA region is at least 15, 30, or 60 nucleotides long. In some embodiments, the affinity tag comprising a polyA region is present in two places in a precursor linear RNA. In some embodiments, one or both polyA regions is 15-50 nucleotides long. In some embodiments, one or both polyA regions is 20-25 nucleotides long. The polyA sequence(s) is removed upon circularization. Thus, an oligonucleotide hybridizing with the polyA sequence, such as a deoxythymidine oligonucleotide (oligo(dT)) conjugated to a solid surface (e.g., a resin), can be used to separate circular RNA from its precursor RNA.

[0369] In some embodiments, an affinity tag comprises a sequence that is absent from the circular RNA product. In some such embodiments, the sequence that is absent from the circular RNA product is a dedicated binding site (DBS). In some embodiments, the DBS is an unstructured sequence, i.e., a sequence that does not form a defined structural element, such as a hairpin loop, contiguous dsRNA region, or triple helix. In some embodiments, the DBS sequence forms a random coil. In some embodiments, the DBS comprises at least 25% GC content, at least 50% GC content, at least 75% GC content, or at least 100% GC content. In some embodiments, the DBS comprises at least 25% AC content, at least 50% AC content, at least 75% AC content, or 100% AC content. In some embodiments, the DBS is at least 15, 30, or 60 nucleotides long. In some embodiments, the affinity tag comprising a DBS is present in two places in a precursor linear RNA. In some embodiments, the DBS sequences are each independently 15-50 nucleotides long. In some embodiments, the DBS sequences are each independently 20-25 nucleotides long.

[0370] In some embodiments, the DBS sequence(s) is removed upon circularization. Thus, binding agents comprising oligonucleotides comprising a sequence that is complementary to the DBS can be used to facilitate purification of circular RNA. For example, the binding agent may comprise an oligonucleotide complementary to a DBS conjugated to a solid surface (e.g., a resin).

[0371] In some embodiments, an affinity sequence or other type of affinity handle, such as biotin, is added to linear RNA by ligation. In some embodiments, an oligonucleotide comprising an affinity sequence is ligated to the linear RNA. In some embodiments, an oligonucleotide conjugated to an affinity handle is ligated to the linear RNA. In some embodiments, a solution comprising the linear RNA ligated to the affinity sequence or handle and the circular RNA that does not comprise an affinity sequence or handle are contacted with a binding agent comprising a solid support conjugated to an oligonucleotide complementary to the affinity sequence or to a binding partner of the affinity handle, such that the linear RNA binds to the binding agent, and the circular RNA is eluted or separated from the solid support.

[0372] Any purification method for circular RNA described herein may comprise one or more buffer exchange steps. In some embodiments, buffer exchange is performed after in vitro transcription (IVT) and before additional purification steps. In some such embodiments, the IVT reaction solution is buffer exchanged into a buffer comprising Tris. In some embodiments, the IVT reaction solution is buffer exchanged into a buffer comprising greater than 1 mM or greater than 10 mM one or more monovalent salts, such as NaCl or KCl, and optionally comprising EDTA. In some embodiments, buffer exchange is performed after purification of circular RNA is complete. In some embodiments, buffer exchange is performed after IVT and after purification of circular RNA. In some embodiments, the buffer exchange that is performed after purification of circular RNA comprises exchange of the circular RNA into water or storage buffer. In some embodiments, the storage buffer comprises 1 mM sodium citrate, pH 6.5.

[0373] In certain embodiments, the 3′ enhanced intron element comprises a leading untranslated sequence. In some embodiments, the leading untranslated sequence is a the 5′ end of the 3′ enhanced intron fragment. In some embodiments, the leading untranslated sequence comprises of the last nucleotide of a transcription start site (TSS). In some embodiments, the TSS is chosen from a viral, bacterial, or eukaryotic DNA template. In one embodiment, the leading untranslated sequence comprise the last nucleotide of a TSS and 0 to 100 additional nucleotides. In some embodiments, the TSS is a terminal spacer. In one embodiment, the leading untranslated sequence contains a guanosine at the 5′ end upon translation of an RNA T7 polymerase.

[0374] In certain embodiments, the 5′ enhanced intron element comprises a trailing untranslated sequence. In some embodiments, the 5′ trailing untranslated sequence is located at the 3′ end of the 5′ enhanced intron element. In some embodiments, the trailing untranslated sequence is a partial restriction digest sequence. In one embodiment, the trailing untranslated sequence is in whole or in part a restriction digest site used to linearize the DNA template. In some embodiments, the restriction digest site is in whole or in part from a natural viral, bacterial or eukaryotic DNA template. In some embodiments, the trailing untranslated sequence is a terminal restriction site fragment.

[0375] a. Enhanced Intron Fragments

[0376] According to the present invention, the 3′ enhanced intron element and 5′ enhanced intron element each comprise an intron fragment. In certain embodiments, a 3′ intron fragment is a contiguous sequence at least 75% homologous (e.g., at least 80%, 85%, 90%, 91%, 92%, 93%, 94%, 95%, 96%, 97%, 98%, 99% or 100% homologous) to a 3′ proximal fragment of a natural group I intron including the 3′ splice site dinucleotide. Typically, a 5′ intron fragment is a contiguous sequence at least 75% homologous (e.g., at least 80%, 85%, 90%, 91%, 92%, 93%, 94%, 95%, 96%, 97%, 98%, 99% or 100% homologous) to a 5′ proximal fragment of a natural group I intron including the 5′ splice site dinucleotide. In some embodiments, the 3′ intron fragment includes the first nucleotide of a 3′ group I splice site dinucleotide. In some embodiments, the 5′ intron fragment includes the first nucleotide of a 5′ group I splice site dinucleotide. In other embodiments, the 3′ intron fragment includes the first and second nucleotides of a 3′ group I intron fragment splice site dinucleotide; and the 5′ intron fragment includes the first and second nucleotides of a 3′ group I intron fragment dinucleotide.

[0377] b. Enhanced Exon Fragments

[0378] In certain embodiments, as provided herein, the DNA template, linear precursor RNA polynucleotide, and circular RNA polynucleotide each comprise an enhanced exon fragment. In some embodiments, following a 5′ to 3′ order, the 3′ enhanced exon element is located upstream to core functional element. In some embodiments, following a 5′ to 3′ order, the 5′ enhanced intron element is located downstream to the core functional element.

[0379] According to the present invention, the 3′ enhanced exon element and 5′ enhanced exon element each comprise an exon fragment. In some embodiments, the 3′ enhanced exon element comprises a 3′ exon fragment. In some embodiments, the 5′ enhanced exon element comprises a 5′ exon fragment. In certain embodiments, as provided herein, the 3′ exon fragment and 5′ exon fragment each comprises a group I intron fragment and 1 to 100 nucleotides of an exon sequence. In certain embodiments, a 3′ intron fragment is a contiguous sequence at least 75% homologous (e.g., at least 80%, 85%, 90%, 91%, 92%, 93%, 94%, 95%, 96%, 97%, 98%, 99% or 100% homologous) to a 3′ proximal fragment of a natural group I intron including the 3′ splice site dinucleotide. Typically, a 5′ group I intron fragment is a contiguous sequence at least 75% homologous (e.g., at least 80%, 85%, 90%, 91%, 92%, 93%, 94%, 95%, 96%, 97%, 98%, 99% or 100% homologous) to a 5′ proximal fragment of a natural group I intron including the 5′ splice site dinucleotide. In some embodiments, the 3′ exon fragment comprises a second nucleotide of a 3′ group I intron splice site dinucleotide and 1 to 100 nucleotides of an exon sequence. In some embodiments, the 5′ exon fragment comprises the first nucleotide of a 5′ group I intron splice site dinucleotide and 1 to 100 nucleotides of an exon sequence. In some embodiments, the exon sequence comprises in part or in whole from a naturally occurring exon sequence from a virus, bacterium or eukaryotic DNA vector. In other embodiments, the exon sequence further comprises a synthetic, genetically modified (e.g., containing modified nucleotide), or other engineered exon sequence.

[0380] In one embodiment, where the 3′ intron fragment comprises both nucleotides of a 3′ group I splice site dinucleotide and the 5′ intron fragment comprises both nucleotides of a 5′ group I splice site dinucleotide, the exon fragments located within the 5′ enhanced exon element and 3′ enhanced exon element does not comprise of a group I splice site dinucleotide.

[0381] c. Examplar Permutation of the Enhanced Intron Elements & Enhanced Exon Elements

[0382] For means of example and not intended to be limiting, in some embodiment, a 3′ enhanced intron element comprises in the following 5′ to 3′ order: a leading untranslated sequence, a 5′ affinity tag, an optional 5′ external duplex region, a 5′ external spacer, and a 3′ intron fragment. In same embodiments, the 3′ enhanced exon element comprises in the following 5′ to 3′ order: a 3′ exon fragment, an optional 5′ internal duplex region, an optional 5′ internal duplex region, and a 5′ internal spacer. In the same embodiments, the 5′ enhanced exon element comprises in the following 5′ to 3′ order: a 3′ internal spacer, an optional 3′ internal duplex region, and a 5′ exon fragment. In still the same embodiments, the 3′ enhanced intron element comprises in the following 5′ to 3′ order: a 5′ intron fragment, a 3′ external spacer, an optional 3′ external duplex region, a 3′ affinity tag, and a trailing untranslated sequence.

[0383] B. Core Functional Element

[0384] In some embodiments, the DNA template, linear precursor RNA polynucleotide, and circular RNA polynucleotide comprise a core functional element. In some embodiments, the core functional element comprises a coding or noncoding element. In certain embodiments, the core functional element may contain both a coding and noncoding element. In some embodiments, the core functional element further comprises translation initiation element (TIE) upstream to the coding or noncoding element. In some embodiments, the core functional element comprises a termination element. In some embodiments, the termination element is located downstream to the TIE and coding element. In some embodiments, the termination element is located downstream to the coding element but upstream to the TIE. In certain embodiments, where the coding element comprises a noncoding region, a core functional element lacks a TIE and/or a termination element.

[0385] a. Coding or Noncoding Element

[0386] In some embodiments, the polynucleotides herein comprise coding or noncoding element or a combination of both. In some embodiments, the coding element comprises an expression sequence. In some embodiments, the coding element encodes at least one therapeutic protein.

[0387] In some embodiments, the circular RNA encodes two or more polypeptides. In some embodiments, the circular RNA is a bicistronic RNA. The sequences encoding the two or more polypeptides can be separated by a ribosomal skipping element or a nucleotide sequence encoding a protease cleavage site. In certain embodiments, the ribosomai skipping element encodes thosea-asigna virus 2A peptide (T2A), porcine teschovirus-1 2 A peptide (P2A), foot-and-mouth disease virus 2 A peptide (F2A), equine rhinitis A vims 2A peptide (E2A), cytoplasmic polyhedrosis vims 2A peptide (BmCPV 2A), or flacherie vims of B. mori 2A peptide (BmIFV 2A). b. TRANSLATION INITIATION ELEMENT (TIE)

[0388] As provided herein in some embodiments, the core functional element comprises at least one translation initiation element (TIE). TIEs are designed to allow translation efficiency of an encoded protein. Thus, optimal core functional elements comprising only of noncoding elements lack any TIEs. In some embodiments, core functional elements comprising one or more coding element will further comprise one or more TIEs.

[0389] In some embodiments, a TIE comprises an untranslated region (UTR). In certain embodiments, the TIE provided herein comprise an internal ribosome entry site (IRES). Inclusion of an IRES permits the translation of one or more open reading frames from a circular RNA (e.g., open reading frames that form the expression sequences). The IRES element attracts a eukaryotic ribosomal translation initiation complex and promotes translation initiation. See, e.g., Kaufman et al., Nuc. Acids Res. (1991) 19:4485-4490; Gurtu et al., Biochem. Biophys. Res. Comm. (1996) 229:295-298; Rees et al., BioTechniques (1996) 20: 102-110; Kobayashi et al., BioTechniques (1996) 21:399-402; and Mosser et al., BioTechniques 1997 22 150-161.

[0390] For driving protein expression, the circular RNA comprises an IRES operably linked to a protein coding sequence. Exemplary IRES sequences are provided in Table_A_IRES. In some embodiments, the circular RNA disclosed herein comprises an IRES sequence at least 80%, 85%, 90%, 91%, 92%, 93%, 94%, 95%, 96%, 97%, 98%, or 99% identical to an IRES sequence in Table_A_IRES. In some embodiments, the circular RNA disclosed herein comprises an IRES sequence in Table_A_IRES. Modifications of IRES and accessory sequences are disclosed herein to increase or reduce IRES activities, for example, by truncating the 5′ and/or 3′ ends of the IRES, adding a spacer 5′ to the IRES, modifying the 6 nucleotides 5′ to the translation initiation site (Kozak sequence), modification of alternative translation initiation sites, and creating chimeric/hybrid IRES sequences. In some embodiments, the IRES sequence in the circular RNA disclosed herein comprises one or more of these modifications relative to a native IRES (e.g., a native IRES disclosed in Table_A_IRES).

[0391] A multitude of IRES sequences are available and include sequences derived from a wide variety of viruses, such as from leader sequences of picornaviruses such as the encephalomyocarditis virus (EMCV) UTR (Jang et al. J. Virol. (1989) 63: 1651-1660), the polio leader sequence, the hepatitis A virus leader, the hepatitis C virus IRES, human rhinovirus type 2 IRES (Dobrikova et al., Proc. Natl. Acad. Sci. (2003) 100(25): 15125-15130), an IRES element from the foot and mouth disease virus (Ramesh et al., Nucl. Acid Res. (1996) 24:2697-2700), a giardiavirus IRES (Garlapati et al., J. Biol. Chem. (2004) 279(5):3389-3397), and the like.

[0392] i. Natural Ties: Viral, & Eukaryotic/Cellular Internal Ribosome Entry Site (IRES)

[0393] A multitude of IRES sequences are available and include sequences derived from a wide variety of viruses, such as from leader sequences of picornaviruses such as the encephalomyocarditis virus (EMCV) UTR (Jang et al., J. Virol. (1989) 63: 1651-1660), the polio leader sequence, the hepatitis A virus leader, the hepatitis C virus IRES, human rhinovirus type 2 IRES (Dobrikova et al., Proc. Natl. Acad. Sci. (2003) 100(25): 15125-15130), an IRES element from the foot and mouth disease virus (Ramesh et al., Nucl. Acid Res. (1996) 24:2697-2700), a giardiavirus IRES (Garlapati et al., J. Biol. Chem. (2004) 279(5):3389-3397), and the like. Different IRES sequences have varying ability to drive protein expression, and the ability of any particular identified or predicted IRES sequence to drive protein expression from linear mRNA or circular RNA constructs is unknown and unpredictable. In certain embodiments, potential IRES sequences can be bioinformatically identified based on sequence positions in viral sequences. However, the activity of such sequences has been previously uncharacterized. As demonstrated herein, such IRES sequences may have differing protein expression capability depending on cell type, for example in T cells, liver cells, or muscle cells. In some embodiments, the novel IRES sequences described herein may have at least 2, 3, 4, 5, 6, 7, 8, 9, 10, 20, 50, or 100 fold increased expression in a particular cell type compared to previously described EMCV IRES sequences.

[0394] For driving protein expression, the circular RNA comprises an IRES operably linked to a protein coding sequence. Exemplary IRES sequences are provided in Table_A_IRES below. In some embodiments, the circular RNA disclosed herein comprises an IRES sequence at least 80%, 85%, 90%, 91%, 92%, 93%, 94%, 95%, 96%, 97%, 98%, or 99% identical to an IRES sequence in Table_A_IRES. In some embodiments, the circular RNA disclosed herein comprises an IRES sequence in Table_A_IRES. Modifications of IRES and accessory sequences are disclosed herein to increase or reduce IRES activities, for example, by truncating the 5′ and/or 3′ ends of the IRES, adding a spacer 5′ to the IRES, modifying the 6 nucleotides 5′ to the translation initiation site (Kozak sequence), modification of alternative translation initiation sites, and creating chimeric/hybrid IRES sequences. In some embodiments, the IRES sequence in the circular RNA disclosed herein comprises one or more of these modifications relative to a native IRES (e.g., a native IRES disclosed in Table_A_IRES).

[0395] In some embodiments, the IRES is an Aalivirus, Ailurivirus, Ampivirus, Anativirus, Aphthovirus, Aquamavirus, Avihepatovirus, Avisivirus, Boosepivirus, Bopivirus, Caecilivirus, Cardiovirus, Cosavirus, Crahelivirus, Crohivirus, Danipivirus, Dicipivirus, Diresapivirus, Enterovirus, Erbovirus, Felipivirus, Fipivirus, Gallivirus, Gruhelivirus, Grusopivirus, Harkavirus, Hemipivirus, Hepatovirus, Hunnivirus, Kobuvirus, Kunsagivirus, Limnipivirus, Livupivirus, Ludopivirus, Malagasivirus, Marsupivirus, Megrivirus, Mischivirus, Mosavirus, Mupivirus, Myrropivirus, Orivirus, Oscivirus, Parabovirus, Parechovirus, Pasivirus, Passerivirus, Pemapivirus, Poecivirus, Potamipivirus, Pygoscepivirus, Rabovirus, Rafivirus, Rajidapivirus, Rohelivirus, Rosavirus, Sakobuvirus, Salivirus, Sapelovirus, Senecavirus, Shanbavirus, Sicinivirus, Symapivirus, Teschovirus, Torchivirus, Tottorivirus, Tremovirus, Tropivirus, Hepacivirus, Pegivirus, Pestivirus, Flavivirus IRES.

[0396] In some embodiments, the IRES is an IRES sequence of Taura syndrome virus, Triatoma virus, Theiler's encephalomyelitis virus, Simian Virus 40, Solenopsis invicta virus 1, Rhopalosiphum padi virus, Reticuloendotheliosis virus, Human poliovirus 1, Plautia stali intestine virus, Kashmir bee virus, Human rhinovirus 2, Homalodisca coagulata virus-1, Human Immunodeficiency Virus type 1, Himetobi P virus, Hepatitis C virus, Hepatitis A virus, Hepatitis GB virus, Foot and mouth disease virus, Human enterovirus 71, Equine rhinitis virus, Ectropis obliqua picorna-like virus, Encephalomyocarditis virus, Drosophila C Virus, Human coxsackievirus B3, Crucifer tobamovirus, Cricket paralysis virus, Bovine viral diarrhea virus 1, Black Queen Cell Virus, Aphid lethal paralysis virus, Avian encephalomyelitis virus, Acute bee paralysis virus, Hibiscus chlorotic ringspot virus, Classical swine fever virus, Human FGF2, Human SFTPA1, Human AML1/RUNX1, Drosophila antennapedia, Human AQP4, Human AT1R, Human BAG-1, Human BCL2, Human BiP, Human c-IAPI, Human c-myc, Human eIF4G, Mouse NDST4L, Human LEF1, Mouse HIF1 alpha, Human n.myc, Mouse Gtx, Human p27kip1, Human PDGF2/c-sis, Human p53, Human Pim-1, Mouse Rbm3, Drosophila reaper, Canine Scamper, Drosophila Ubx, Human UNR, Mouse UtrA, Human VEGF-A, Human XIAP, Drosophila hairless, S. cerevisiae TFIID, S. cerevisiae YAP1, tobacco etch virus, turnip crinkle virus, EMCV-A, EMCV-B, EMCV-Bf, EMCV-Cf, EMCV pEC9, Picobirnavirus, HCV QC64, Human Cosavirus E/D, Human Cosavirus F, Human Cosavirus JMY, Rhinovirus NAT001, HRV14, HRV89, HRVC-02, HRV-A21, Salivirus A SH1, Salivirus FHB, Salivirus NG-J1, Human Parechovirus 1, Crohivirus B, Yc-3, Rosavirus M-7, Shanbavirus A, Pasivirus A, Pasivirus A 2, Echovirus E14, Human Parechovirus 5, Aichi Virus, Hepatitis A Virus HA16, Phopivirus, CVA10, Enterovirus C, Enterovirus D, Enterovirus J, Human Pegivirus 2, GBV-C GT110, GBV-C K1737, GBV-C Iowa, Pegivirus A 1220, Pasivirus A 3, Sapelovirus, Rosavirus B, Bakunsa Virus, Tremovirus A, Swine Pasivirus 1, PLV-CHN, Pasivirus A, Sicinivirus, Hepacivirus K, Hepacivirus A, BVDV1, Border Disease Virus, BVDV2, CSFV-PK15C, SF573 Dicistrovirus, Hubei Picorna-like Virus, CRPV, Salivirus A BN5, Salivirus A BN2, Salivirus A 02394, Salivirus A GUT, Salivirus A CH, Salivirus A SZ1, Salivirus FHB, CVB3, CVB1, Echovirus 7, CVB5, EVA71, CVA3, CVA12, EV24 or an aptamer to eIF4G.

[0397] In some embodiments, the IRES comprises in whole or in part from a eukaryotic or cellular IRES. In certain embodiments, the IRES is from a human gene, where the human gene is ABCF1, ABCG1, ACAD10, ACOT7, ACSS3, ACTG2, ADCYAP1, ADK, AGTR1, AHCYL2, AHIl, AKAP8L, AKR1A1, ALDH3A1, ALDOA, ALG13, AMMECRIL, ANGPTL4, ANK3, AOC3, AP4B1, AP4E1, APAF1, APBB1, APC, APH1A, APOBEC3D, APOM, APP, AQP4, ARHGAP36, ARL13B, ARMC8, ARMCX6, ARPC1A, ARPC2, ARRDC3, ASAP1, ASB3, ASB5, ASCL1, ASMTL, ATF2, ATF3, ATG4A, ATP5B, ATP6V0A1, ATXN3, AURKA, AURKA, AURKA, AURKA, B3GALNT1, B3GNTL1, B4GALT3, BAAT, BAG1, BAIAP2, BAIAP2L2, BAZ2A, BBX, BCAR1, BCL2, BCS1L, BET1, BID, BIRC2, BPGM, BPIFA2, BRINP2, BSG, BTN3A2, C12orf43, C14orf93, C17orf62, Clorf226, C21orf62, C2orf15, C4BPB, C4orf22, C9orf84, CACNA1A, CALCOCO2, CAPN11, CASP12, CASP8AP2, CAV1, CBX5, CCDC120, CCDC17, CCDC186, CCDC51, CCN1, CCND1, CCNT1, CD2BP2, CD9, CDC25C, CDC42, CDC7, CDCA7L, CDIP1, CDK1, CDK11A, CDKN1B, CEACAM7, CEP295NL, CFLAR, CHCHD7, CHIA, CHIC1, CHMP2A, CHRNA2, CLCN3, CLEC12A, CLEC7A, CLECLI, CLRN1, CMSS1, CNIH1, CNR1, CNTN5, COG4, COMMD1, COMMD5, CPEB1, CPS1, CRACR2B, CRBN, CREM, CRYBG1, CSDE1, CSF2RA, CSNK2A1, CSTF3, CTCFL, CTH, CTNNA3, CTNNB1, CTNNB1, CTNND1, CTSL, CUTA, CXCR5, CYB5R3, CYP24A1, CYP3A5, DAG1, DAP3, DAP5, DAXX, DCAF4, DCAF7, DCLRElA, DCP1A, DCTN1, DCTN2, DDX19B, DDX46, DEFB123, DGKA, DGKD, DHRS4, DHX15, DI03, DLG1, DLL4, DMD UTR, DMD ex5, DMKN, DNAH6, DNAL4, DUSP13, DUSP19, DYNC1I2, DYNLRB2, DYRKIA, ECI2, ECT2, EIF1AD, EIF2B4, EIF4G1, EIF4G2, EIF4G3, ELANE, ELOVL6, ELP5, EMCN, ENOl, EPB41, ERMN, ERVV-1, ESRRG, ETFB, ETFBKMT, ETV1, ETV4, EXD1, EXT1, EZH2, FAM111B, FAM157A, FAM213A, FBXO25, FBXO9, FBXW7, FCMR, FGF1, FGF1, FGF1A, FGF2, FGF2, FGF-9, FHL5, FMR1, FN1, FOXP1, FTH1, FUBP1, G3BP1, GABBR1, GALC, GART, GAS7, gastrin, GATA1, GATA4, GFM2, GHR, GJB2, GLIl, GLRA2, GMNN, GPAT3, GPATCH3, GPR137, GPR34, GPR55, GPR89A, GPRASP1, GRAP2, GSDMB, GSTO2, GTF2B, GTF2H4, GUCYlB2, HAX1, HCST, HIGD1A, HIGD1B, HIPK1, HISTIHIC, HIST1H3H, HK1, HLA-DRB4, HMBS, HMGA1, HNRNPC, HOPX, HOXA2, HOXA3, HPCAL1, HR, HSP90AB1, HSPA1A, HSPA4L, HSPA5, HYPK, IFFO1, IFT74, IFT81, IGF1, IGF1R, IGF1R, IGF2, IL11, IL17RE, IL1RL1, IL1RN, IL32, IL6, ILF2, ILVBL, INSR, INTS13, IP6K1, ITGA4, ITGAE, KCNE4, KERA, KIAA0355, KIAA0895L, KIAA1324, KIAA1522, KIAA1683, KIF2C, KIZ, KLHL31, KLK7, KRR1, KRT14, KRT17, KRT33A, KRT6A, KRTAP10-2, KRTAP13-3, KRTAP13-4, KRTAP5-11, KRTCAP2, LACRT, LAMB1, LAMB3, LANCL1, LBX2, LCAT, LDHA, LDHAL6A, LEF1, LINC-PINT, LMO3, LRRC4C, LRRC7, LRTOMT, LSM5, LTB4R, LYRM1, LYRM2, MAGEAI1, MAGEA8, MAGEBI, MAGEB16, MAGEB3, MAPT, MARS, MC1R, MCCC1, METTL12, METTL7A, MGC16025, MGC16025, MIA2, MIA2, MITF, MKLN1, MNT, MORF4L2, MPD6, MRFAPI, MRPL21, MRPS12, MSI2, MSLN, MSN, MT2A, MTFR1L, MTMR2, MTRR, MTUS1, MYB, MYC, MYCL, MYCN, MYL10, MYL3, MYLK, MYO1A, MYT2, MZB1, NAP1L1, NAV1, NBAS, NCF2, NDRG1, NDST2, NDUFA7, NDUFB11, NDUFC1, NDUFS1, NEDD4L, NFAT5, NFE2L2, NFE2L2, NFIA, NHEJ1, NHP2, NIT1, NKRF, NME1-NME2, NPAT, NR3C1, NRBF2, NRF1, NTRK2, NUDCD1, NXF2, NXT2, ODC1, ODF2, OPTN, OR10R2, OR11L1, OR2M2, OR2M3, OR2M5, OR2T10, OR4C15, OR4F17, OR4F5, OR5H1, OR5K1, OR6C3, OR6C75, OR6N1, OR7G2, p53, P2RY4, PAN2, PAQR6, PARP4, PARP9, PC, PCBP4, PCDHGC3, PCLAF, PDGFB, PDZRN4, PELO, PEMT, PEX2, PFKM, PGBD4, PGLYRP3, PHLDA2, PHTF1, PI4 KB, PIGC, PIM1, PKD2L1, PKM, PLCB4, PLD3, PLEKHA1, PLEKHB1, PLS3, PML, PNMA5, PNN, POC1A, POC1B, POLD2, POLD4, POU5F1, PPIG, PQBP1, PRAME, PRPF4, PRR11, PRRT1, PRSS8, PSMA2, PSMA3, PSMA4, PSMD11, PSMD4, PSMD6, PSME3, PSMG3, PTBP3, PTCH1, PTHLH, PTPRD, PUS7L, PVRIG, QPRT, RAB27A, RAB7B, RABGGTB, RAETIE, RALGDS, RALYL, RARB, RCVRN, REG3G, RFC5, RGL4, RGS19, RGS3, RHD, RINL, RIPOR2, RITA1, RMDN2, RNASE1, RNASE4, RNF4, RPA2, RPL17, RPL21, RPL26L1, RPL28, RPL29, RPL41, RPL9, RPS11, RPS13, RPS14, RRBP1, RSU1, RTP2, RUNX1, RUNX1T1, RUNX1T1, RUNX2, RUSC1, RXRG, S100A13, S100A4, SAT1, SCHIP1, SCMH1, SEC14L1, SEMA4A, SERPINA1, SERPINB4, SERTAD3, SFTPD, SH3D19, SHC1, SHMT1, SHPRH, SIM1, SIRT5, SLC11A2, SLC12A4, SLC16A1, SLC25A3, SLC26A9, SLC5A11, SLC6A12, SLC6A19, SLC7A1, SLFN11, SLIRP, SMAD5, SMARCADI, SMN1, SNCA, SNRNP200, SNRPB2, SNX12, SOD1, SOX13, SOX5, SP8, SPARCL1, SPATA12, SPATA31C2, SPN, SPOP, SQSTM1, SRBD1, SRC, SREBF1, SRPK2, SSB, SSB, SSBP1, ST3GAL6, STAB1, STAMBP, STAU1, STAU1, STAU1, STAU1, STAU1, STK16, STK24, STK38, STMN1, STX7, SULT2B1, SYK, SYNPR, TAF1C, TAGLN, TANK, TAS2R40, TBC1D15, TBXAS1, TCF4, TDGF1, TDP2, TDRD3, TDRD5, TESK2, THAP6, THBD, THTPA, TIAM2, TKFC, TKTL1, TLR10, TM9SF2, TMC6, TMCO2, TMED10, TMEM116, TMEM126A, TMEM159, TMEM208, TMEM230, TMEM67, TMPRSS13, TMUB2, TNFSF4, TNIP3, TP53, TP53, TP73, TRAF1, TRAK1, TRIM31, TRIM6, TRMT1, TRMT2B, TRPM7, TRPM8, TSPEAR, TTC39B, TTLL11, TUBB6, TXLNB, TXNIP, TXNL1, TXNRD1, TYROBP, U2AF1, UBA1, UBE2D3, UBE2I, UBE2L3, UBE2V1, UBE2V2, UMPS, UNG, UPP2, USMG5, USP18, UTP14A, UTRN, UTS2, VDR, VEGFA, VEGFA, VEPH1, VIPAS39, VPS29, VSIG10L, WDHD1, WDR12, WDR4, WDR45, WDYHV1, WRAP53, XIAP, XPNPEP3, YAP1, YWHAZ, YY1AP1, ZBTB32, ZNF146, ZNF250, ZNF385A, ZNF408, ZNF410, ZNF423, ZNF43, ZNF502, ZNF512, ZNF513, ZNF580, ZNF609, ZNF707, or ZNRD1.

[0398] ii. Synthetic Ties: Aptamer Complexes, Modified Nucleotides, IRES Variants & Other Engineered Ties

[0399] As contemplated herein, in certain embodiments, a translation initiation element (TIE) comprises a synthetic TIE. In some embodiments, a synthetic TIE comprises aptamer complexes, synthetic IRES or other engineered TIES capable of initiating translation of a linear RNA or circular RNA polynucleotide.

[0400] In some embodiments, one or more aptamer sequences is capable of binding to a component of a eukaryotic initiation factor to either enhance or initiate translation. In some embodiments, aptamer may be used to enhance translation in vivo and in vitro by promoting specific eukaryotic initiation factors (eIF) (e.g., aptamer in WO2019081383A1 is capable of binding to eukaryotic initiation factor 4F (eIF4F). In some embodiments, the aptamer or a complex of aptamers may be capable of binding to EIF4G, EIF4E, EIF4A, EIF4B, EIF3, EIF2, EIF5, EIF1, EIF1A, 40S ribosome, PCBP1 (polyC binding protein), PCBP2, PCBP3, PCBP4, PABP1 (polyA binding protein), PTB, Argonaute protein family, HNRNPK (heterogeneous nuclear ribonucleoprotein K), or La protein.

[0401] c. Termination Sequence

[0402] In certain embodiments, the core functional element comprises a termination sequence. In some embodiments, the termination sequence comprises a stop codon. In one embodiment, the termination sequence comprises a stop cassette. In some embodiments, the stop cassette comprises at least 2 stop codons. In some embodiments, the stop cassette comprises at least 2 frames of stop codons. In the same embodiment, the frames of the stop codons in a stop cassette each comprise 1, 2 or more stop codons. In some embodiments, the stop cassette comprises a LoxP or a RoxStopRox, or frt-flanked stop cassette. In the same embodiment, the stop cassette comprises a lox-stop-lox stop cassette.

[0403] C. Variants

[0404] In certain embodiments, a circular RNA polynucleotide provided herein comprises modified RNA nucleotides and/or modified nucleosides. In some embodiments, the modified nucleoside is m⁵C (5-methylcytidine). In another embodiment, the modified nucleoside is m⁵U (5-methyluridine). In another embodiment, the modified nucleoside is m⁶A (N⁶-methyladenosine). In another embodiment, the modified nucleoside is s²U (2-thiouridine). In another embodiment, the modified nucleoside is Ψ (pseudouridine). In another embodiment, the modified nucleoside is Um (2′-O-methyluridine). In other embodiments, the modified nucleoside is m¹A (1-methyladenosine); m²A (2-methyladenosine); Am (2′-O-methyladenosine); ms²m⁶A (2-methylthio-N⁶-methyladenosine); i⁶A (N⁶-isopentenyladenosine); ms²i6A (2-methylthio-N⁶ isopentenyladenosine); io⁶A (N⁶-(cis-hydroxyisopentenyl)adenosine); ms²io⁶A (2-methylthio-N⁶-(cis-hydroxyisopentenyl)adenosine); g⁶A (N⁶-glycinylcarbamoyladenosine); t⁶A (N⁶-threonylcarbamoyladenosine); ms²t⁶A (2-methylthio-N⁶-threonyl carbamoyladenosine); m⁶t⁶A (N⁶-methyl-N⁶-threonylcarbamoyladenosine); hn⁶A (N⁶-hydroxynorvalylcarbamoyladenosine); ms²hn⁶A (2-methylthio-N⁶-hydroxynorvalyl carbamoyladenosine); Ar(p) (2′-O-ribosyladenosine (phosphate)); I (inosine); m¹I (1-methylinosine); m¹Im (1,2′-O-dimethylinosine); m³C (3-methylcytidine); Cm (2′-O-methylcytidine); s²C (2-thiocytidine); ac⁴C (N⁴-acetylcytidine); fC (5-formylcytidine); m⁵Cm (5,2′-O-dimethylcytidine); ac⁴Cm (N⁴-acetyl-2′-O-methylcytidine); k²C (lysidine); m¹G (1-methylguanosine); m²G (N²-methylguanosine); m⁷G (7-methylguanosine); Gm (2′-O-methylguanosine); m² 2G (N²,N²-dimethylguanosine); m²Gm (N²,2′-O-dimethylguanosine); m² ₂Gm (N²,N²,2′-O-trimethylguanosine); Gr(p) (2′-O-ribosylguanosine(phosphate)); yW (wybutosine); o₂yW (peroxywybutosine); OHyW (hydroxywybutosine); OHyW* (undermodified hydroxywybutosine); imG (wyosine); mimG (methylwyosine); Q (queuosine); oQ (epoxyqueuosine); galQ (galactosyl-queuosine); manQ (mannosyl-queuosine); preQ₀ (7-cyano-7-deazaguanosine); preQ₁ (7-aminomethyl-7-deazaguanosine); G+(archaeosine); D (dihydrouridine); m⁵Um (5,2′-O-dimethyluridine); s⁴U (4-thiouridine); m⁵s²U (5-methyl-2-thiouridine); s²Um (2-thio-2′-O-methyluridine); acp³U (3-(3-amino-3-carboxypropyl)uridine); ho⁵U (5-hydroxyuridine); mo⁵U (5-methoxyuridine); cmo⁵U (uridine 5-oxyacetic acid); mcmo⁵U (uridine 5-oxyacetic acid methyl ester); chm⁵U (5-(carboxyhydroxymethyl)uridine)); mchm⁵U (5-(carboxyhydroxymethyl)uridine methyl ester); mcm⁵U (5-methoxycarbonylmethyluridine); mcm⁵Um (5-methoxycarbonylmethyl-2′-O-methyluridine); mcm⁵s²U (5-methoxycarbonylmethyl-2-thiouridine); nm⁵S²U (5-aminomethyl-2-thiouridine); mnm⁵U (5-methylaminomethyluridine); mnm⁵s²U (5-methylaminomethyl-2-thiouridine); mnm⁵se²U (5-methylaminomethyl-2-selenouridine); nCm⁵U (5-carbamoylmethyluridine); nCm⁵Um (5-carbamoylmethyl-2′-O-methyluridine); cmnm⁵U (5-carboxymethylaminomethyluridine); cmnm⁵Um (5-carboxymethylaminomethyl-2′-O-methyluridine); cmnm⁵s²U (5-carboxymethylaminomethyl-2-thiouridine); m⁶ ₂A (N⁶,N⁶-dimethyladenosine); Im (2′-O-methylinosine); m⁴C (N⁴-methylcytidine); m⁴Cm (N⁴,2′-O-dimethylcytidine); hm⁵C (5-hydroxymethylcytidine); m³U (3-methyluridine); cm⁵U (5-carboxymethyluridine); m⁶Am (N⁶,2′-O-dimethyladenosine); m⁶ ₂Am (N⁶,N⁶,O-2′-trimethyladenosine); m^{2,7}G (N²,7-dimethylguanosine); m^{2,2,7}G (N²,N²,7-trimethylguanosine); m³Um (3,2′-O-dimethyluridine); m⁵D (5-methyldihydrouridine); f⁵Cm (5-formyl-2′-O-methylcytidine); m¹Gm (1,2′-O-dimethylguanosine); m¹Am (1,2′-O-dimethyladenosine); Tm ⁵U (5-taurinomethyluridine); τm⁵s²U (5-taurinomethyl-2-thiouridine)); imG-14 (4-demethylwyosine); imG2 (isowyosine); or ac⁶A (N⁶-acetyladenosine).

[0405] In some embodiments, the modified nucleoside may include a compound selected from the group of: pyridin-4-one ribonucleoside, 5-aza-uridine, 2-thio-5-aza-uridine, 2-thiouridine, 4-thio-pseudouridine, 2-thio-pseudouridine, 5-hydroxyuridine, 3-methyluridine, 5-carboxymethyl-uridine, 1-carboxymethyl-pseudouridine, 5-propynyl-uridine, 1-propynyl-pseudouridine, 5-taurinomethyluridine, 1-taurinomethyl-pseudouridine, 5-taurinomethyl-2-thio-uridine, 1-taurinomethyl-4-thio-uridine, 5-methyl-uridine, 1-methyl-pseudouridine, 4-thio-1-methyl-pseudouridine, 2-thio-1-methyl-pseudouridine, 1-methyl-1-deaza-pseudouridine, 2-thio-1-methyl-1-deaza-pseudouridine, dihydrouridine, dihydropseudouridine, 2-thio-dihydrouridine, 2-thio-dihydropseudouridine, 2-methoxyuridine, 2-methoxy-4-thio-uridine, 4-methoxy-pseudouridine, 4-m ethoxy-2-thio-pseudouridine, 5-aza-cytidine, pseudoisocytidine, 3-methyl-cytidine, N4-acetylcytidine, 5-formylcytidine, N4-methylcytidine, 5-hydroxymethylcytidine, 1-methyl-pseudoisocytidine, pyrrolo-cytidine, pyrrolo-pseudoisocytidine, 2-thio-cytidine, 2-thio-5-methyl-cytidine, 4-thio-pseudoisocytidine, 4-thio-1-methyl-pseudoisocytidine, 4-thio-1-methyl-1-deaza-pseudoisocytidine, 1-methyl-1-deaza-pseudoisocytidine, zebularine, 5-aza-zebularine, 5-methyl-zebularine, 5-aza-2-thio-zebularine, 2-thio-zebularine, 2-methoxy-cytidine, 2-methoxy-5-methyl-cytidine, 4-methoxy-pseudoisocytidine, 4-methoxy-1-methyl-pseudoisocytidine, 2-aminopurine, 2, 6-diaminopurine, 7-deaza-adenine, 7-deaza-8-aza-adenine, 7-deaza-2-aminopurine, 7-deaza-8-aza-2-aminopurine, 7-deaza-2,6-diaminopurine, 7-deaza-8-aza-2,6-diaminopurine, 1-methyladenosine, N6-methyladenosine, N6-isopentenyladenosine, N6-(cis-hydroxyisopentenyl)adenosine, 2-methylthio-N6-(cis-hydroxyisopentenyl) adenosine, N6-glycinylcarbamoyladenosine, N6-threonylcarbamoyladenosine, 2-methylthio-N6-threonyl carbamoyladenosine, N6,N6-dimethyladenosine, 7-methyladenine, 2-methylthio-adenine, 2-methoxy-adenine, inosine, 1-methyl-inosine, wyosine, wybutosine, 7-deaza-guanosine, 7-deaza-8-aza-guanosine, 6-thio-guanosine, 6-thio-7-deaza-guanosine, 6-thio-7-deaza-8-aza-guanosine, 7-methyl-guanosine, 6-thio-7-methyl-guanosine, 7-methylinosine, 6-methoxy-guanosine, 1-methylguanosine, N2-methylguanosine, N2,N2-dimethylguanosine, 8-oxo-guanosine, 7-methyl-8-oxo-guanosine, 1-methyl-6-thio-guanosine, N2-methyl-6-thio-guanosine, and N2,N2-dimethyl-6-thio-guanosine. In another embodiment, the modifications are independently selected from the group consisting of 5-methylcytosine, pseudouridine and 1-methylpseudouridine.

[0406] In some embodiments, the modified ribonucleosides include 5-methylcytidine, 5-methoxyuridine, 1-methyl-pseudouridine, N6-methyladenosine, and/or pseudouridine. In some embodiments, such modified nucleosides provide additional stability and resistance to immune activation.

[0407] In particular embodiments, polynucleotides may be codon-optimized. A codon optimized sequence may be one in which codons in a polynucleotide encoding a polypeptide have been substituted in order to increase the expression, stability and/or activity of the polypeptide. Factors that influence codon optimization include, but are not limited to one or more of: (i) variation of codon biases between two or more organisms or genes or synthetically constructed bias tables, (ii) variation in the degree of codon bias within an organism, gene, or set of genes, (iii) systematic variation of codons including context, (iv) variation of codons according to their decoding tRNAs, (v) variation of codons according to GC %, either overall or in one position of the triplet, (vi) variation in degree of similarity to a reference sequence for example a naturally occurring sequence, (vii) variation in the codon frequency cutoff, (viii) structural properties of mRNAs transcribed from the DNA sequence, (ix) prior knowledge about the function of the DNA sequences upon which design of the codon substitution set is to be based, and/or (x) systematic variation of codon sets for each amino acid. In some embodiments, a codon optimized polynucleotide may minimize ribozyme collisions and/or limit structural interference between the expression sequence and the core functional element.

### 3. Payloads

[0408] In some embodiments, the expression sequence encodes a therapeutic protein. In some embodiments, the therapeutic protein is selected from the proteins listed in the following table.

| | | | Target | |
|---|---|---|---|---|
| | | SEQ | cell/ | |
| Payload | Sequence | ID NO | organ | Preferred delivery formulation |
| CD19 CAR | Any of sequences 309-314 | | T cells | [chemical structure] |
| | | | | (50 mol %) |
| | | | | DSPC (10 mol %) |
| | | | | Beta-sitosterol (28.5% mol %) |
| | | | | Cholesterol (10 mol %) |
| | | | | PEG DMG (1.5 mol %) |
| BCMA CAR | MALPVTALLLPLALLL HAARPDIVLTQSPASLA VSLGERATINCRASESV SVIGAHLIHWYQQKPG QPPKLLIYLASNLETGV PARFSGSGSGTDFTLTIS SLQAEDAAIYYCLQSRI FPRTFGQGTKLEIKGST SGSGKPGSGEGSTKGQ VQLVQSGSELKKPGAS VKVSCKASGYTFTDYSI NWVRQAPGQGLEWMG WINTETREPAYAYDFR GRFVFSLDTSVSTAYLQ | 3668 | T cells | [chemical structure] (50 mol %) DSPC (10 mol %) Beta-sitosterol (28.5% mol %) Cholesterol (10 mol %) PEG DMG (1.5 mol %) |
| | ISSLKAEDTAVYYCAR | | | |
| | DYSYAMDYWGQGTLV | | | |
| | TVSSAAATTTPAPRPPT | | | |
| | PAPTIASQPLSLRPEACR | | | |
| | PAAGGAVHTRGLDFAC | | | |
| | DIYIWAPLAGTCGVLLL | | | |
| | SLVITLYCKRGRKKLLY | | | |
| | IFKQPFMRPVQTTQEED | | | |
| | GCSCRFPEEEEGGCELR | | | |
| | VKFSRSADAPAYQQGQ | | | |
| | NQLYNELNLGRREEYD | | | |
| | VLDKRRGRDPEMGGKP | | | |
| | RRKNPQEGLYNELQKD | | | |
| | KMAEAYSEIGMKGERR | | | |
| | RGKGHDGLYQGLSTAT | | | |
| | KDTYDALHMQALPPR | | | |
| MAGE- A4 TCR | TCR alpha chain: KNQVEQSPQSLIILEGK NCTLQCNYTVSPFSNLR WYKQDTGRGPVSLTIM TFSENTKSNGRYTATLD ADTKQSSLHITASQLSD SASYICVVNHSGGSYIP TFGRGTSLIVHPYIQKP DPAVYQLRDSKSSDKS VCLFTDFDSQTNVSQSK DSDVYITDKTVLDMRS MDFKSNSAVAWSNKS DFACANAFNNSIIPEDT FFPSPESS | 3669 and 3670 | T cells | [chemical structure] (50 mol %) DSPC (10 mol %) Beta-sitosterol (28.5% mol %) Cholesterol (10 mol %) PEG DMG (1.5 mol %) |
| | TCR beta chain: | | | |
| | DVKVTQSSRYLVKRTG | | | |
| | EKVFLECVQDMDHEN | | | |
| | MFWYRQDPGLGLRLIY | | | |
| | FSYDVKMKEKGDIPEG | | | |
| | YSVSREKKERFSLILES | | | |
| | ASTNQTSMYLCASSFL | | | |
| | MTSGDPYEQYFGPGTR | | | |
| | LTVTEDLKNVFPPEVA | | | |
| | VFEPSEAEISHTQKATL | | | |
| | VCLATGFYPDHVELSW | | | |
| | WVNGKEVHSGVSTDPQ | | | |
| | PLKEQPALNDSRYCLSS | | | |
| | RLRVSATFWQNPRNHF | | | |
| | RCQVQFYGLSENDEWT | | | |
| | QDRAKPVTQIVSAEAW | | | |
| | GRAD | | | |
| NY- ESO TCR | TCRalpha extracellular sequence MQEVTQIPAALSVPEGE NLVLNCSFTDSAIYNLQ WFRQDPGKGLTSLLLIQ SSQREQTSGRLNASLDK SSGRSTLYIAASQPGDS ATYLCAVRPTSGGSYIP TFGRGTSLIVHPY TCRbeta extracellular sequence MGVTQTPKFQVLKTGQ SMTLQCAQDMNHEYM SWYRQDPGMGLRLIHY | 3671 and 3672 | T cells | [chemical structure] (50 mol %) DSPC (10 mol %) Beta-sitosterol (28.5% mol %) Cholesterol (10 mol %) PEG DMG (1.5 mol %) |
| | SVGAGITDQGEVPNGY | | | |
| | NVSRSTTEDFPLRLLSA | | | |
| | APSQTSVYFCASSYVG | | | |
| | NTGELFFGEGSRLTVL | | | |
| EPO | APPRLICDSR VLERYLL | 3673 | Kidney | |
| | EAKEAENITTGCAEHCS | | or bone | |
| | LNENITVPDTKVNFYA | | marrow | |
| | WKRMEVGQQAVEVW | | | |
| | QGLALLSEAVLRGQAL | | | |
| | LVNSSQPWEPLQLHVD | | | |
| | KAVSGLRSLTTLLRALG | | | |
| | AQKEAISPPDAASAAPL | | | |
| | RTITADTFRKLFRVYSN | | | |
| | FLRGKLKLYTGEACRT | | | |
| | GDR | | | |
| PAH | MSTAVLENPGLGRKLS DFGQETSYIEDNCNQN GAISLIFSLKEEVGALA KVLRLFEENDVNLTHIE SRPSRLKKDEYEFFTHL DKRSLPALTNIIKILRHD IGATVHELSRDKKKDT VPWFPRTIQELDRFANQ ILSYGAELDADHPGFKD PVYRARRKQFADIAYN YRHGQPIPRVEYMEEE KKTWGTVFKTLKSLYK THACYEYNHIFPLLEKY CGFHEDNIPQLEDVSQF LQTCTGFRLRPVAGLLS SRDFLGGLAFRVFHCT QYIRHGSKPMYTPEPDI CHELLGHVPLFSDRSFA | 3674 | Hepatic cells | [chemical structure] (50 mol %) DSPC (10 mol %) Cholesterol (38.5% mol %) PEG-DMG (1.5%) OR MC3 (50 mol %) DSPC (10 mol %) Cholesterol (38.5% mol %) PEG-DMG (1.5%) |
| | QFSQEIGLASLGAPDEY | | | |
| | IEKLATIYWFTVEFGLC | | | |
| | KQGDSIKAYGAGLLSSF | | | |
| | GELQYCLSEKPKLLPLE | | | |
| | LEKTAIQNYTVTEFQPL | | | |
| | YYVAESFNDAKEKVRN | | | |
| | FAATIPRPFSVRYDPYT | | | |
| | QRIEVLDNTQQLKILAD | | | |
| | SINSEIGILCSALQKIK | | | |
| CPS1 | LSVKAQTAHIVLEDGT KMKGYSFGHPSSVAGE VVFNTGLGGYPEAITDP AYKGQILTMANPIIGNG GAPDTTALDELGLSKY LESNGIKVSGLLVLDYS KDYNHWLATKSLGQW LQEEKVPAIYGVDTRM LTKIIRDKGTMLGKIEF EGQPVDFVDPNKQNLI AEVSTKDVKVYGKGNP TKVVAVDCGIKNNVIR LLVKRGAEVHLVPWN HDFTKMEYDGILIAGGP GNPALAEPLIQNVRKIL ESDRKEPLFGISTGNLIT GLAAGAKTYKMSMAN RGQNQPVLNITNKQAFI | 3675 | Hepatic cells | [chemical structure] (50 mol %) DSPC (10 mol %) Cholesterol (38.5% mol %) PEG-DMG (1.5%) OR MC3 (50 mol %) DSPC (10 mol %) Cholesterol (38.5% mol %) PEG-DMG (1.5%) |
| | TAQNHGYALDNTLPAG | | | |
| | WKPLFVNVNDQTNEGI | | | |
| | MHESKPFFAVQFHPEV | | | |
| | TPGPIDTEYLFDSFFSLI | | | |
| | KKGKATTITSVLPKPAL | | | |
| | VASRVEVSKVLILGSGG | | | |
| | LSIGQAGEFDYSGSQAV | | | |
| | KAMKEENVKTVLMNP | | | |
| | NIASVQTNEVGLKQAD | | | |
| | TVYFLPITPQFVTEVIKA | | | |
| | EQPDGLILGMGGQTAL | | | |
| | NCGVELFKRGVLKEYG | | | |
| | VKVLGTSVESIMATED | | | |
| | ROLFSDKLNEINEKIAPS | | | |
| | FAVESIEDALKAADTIG | | | |
| | YPVMIRSAYALGGLGS | | | |
| | GICPNRETLMDLSTKAF | | | |
| | AMTNQILVEKSVTGWK | | | |
| | EIEYEVVRDADDNCVT | | | |
| | VCNMENVDAMGVHTG | | | |
| | DSVVVAPAQTLSNAEF | | | |
| | QMLRRTSINVVRHLGIV | | | |
| | GECNIQFALHPTSMEYC | | | |
| | IIEVNARLSRSSALASK | | | |
| | ATGYPLAFIAAKIALGIP | | | |
| | LPEIKNVVSGKTSACFE | | | |
| | PSLDYMVTKIPRWDLD | | | |
| | RFHGTSSRIGSSMKSVG | | | |
| | EVMAIGRTFEESFQKAL | | | |
| | RMCHPSIEGFTPRLPMN | | | |
| | KEWPSNLDLRKELSEPS | | | |
| | STRIYAIAKAIDDNMSL | | | |
| | DEIEKLTYIDKWFLYK | | | |
| | MRDILNMEKTLKGLNS | | | |
| | ESMTEETLKRAKEIGFS | | | |
| | DKQISKCLGLTEAQTRE | | | |
| | LRLKKNIHPWVKQIDTL | | | |
| | AAEYPSVTNYLYVTYN | | | |
| | GQEHDVNFDDHGMMV | | | |
| | LGCGPYHIGSSVEFDW | | | |
| | CAVSSIRTLRQLGKKTV | | | |
| | VVNCNPETVSTDFDEC | | | |
| | DKLYFEELSLERILDIYH | | | |
| | QEACGGCIISVGGQIPN | | | |
| | NLAVPLYKNGVKIMGT | | | |
| | SPLQIDRAEDRSIFSAVL | | | |
| | DELKVAQAPWKAVNT | | | |
| | LNEALEFAKSVDYPCLL | | | |
| | RPSYVLSGSAMNVVFS | | | |
| | EDEMKKFLEEATRVSQ | | | |
| | EHPVVLTKFVEGAREV | | | |
| | EMDAVGKDGRVISHAI | | | |
| | SEHVEDAGVHSGDATL | | | |
| | MLPTQTISQGAIEKVKD | | | |
| | ATRKIAKAFAISGPFNV | | | |
| | QFLVKGNDVLVIECNL | | | |
| | RASRSFPFVSKTLGVDF | | | |
| | IDVATKVMIGENVDEK | | | |
| | HLPTLDHPIIPADYVAIK | | | |
| | APMFSWPRLRDADPILR | | | |
| | CEMASTGEVACFGEGI | | | |
| | HTAFLKAMLSTGFKIPQ | | | |
| | KGILIGIQQSFRPRFLGV | | | |
| | AEQLHNEGFKLFATEA | | | |
| | TSDWLNANNVPATPVA | | | |
| | WPSQEGQNPSLSSIRKLI | | | |
| | RDGSIDLVINLPNNNTK | | | |
| | FVHDNYVIRRTAVDSGI | | | |
| | PLLTNFQVTKLFAEAV | | | |
| | QKSRKVDSKSLFHYRQ | | | |
| | YSAGKAA | | | |
| Cas9 | MKRNYILGLDIGITSVG YGIIDYETRDVIDAGVR LFKEANVENNEGRRSK RGARRLKRRRRHRIQR VKKLLFDYNLLTDHSE LSGINPYEARVKGLSQK LSEEEFSAALLHLAKRR GVHNVNEVEEDTGNEL STKEQISRNSKALEEKY VAELQLERLKKDGEVR GSINRFKTSDYVKEAK QLLKVQKAYHQLDQSF IDTYIDLLETRRTYYEG PGEGSPFGWKDIKEWY | 3676 | Immune cells | [chemical structure] (50 mol %) DSPC (10 mol %) Beta-sitosterol (28.5% mol %) Cholesterol (10 mol %) PEG DMG (1.5 mol %) |
| | EMLMGHCTYFPEELRS | | | |
| | VKYAYNADLYNALND | | | |
| | LNNL VITRDENEKLEYY | | | |
| | EKFQIIENVFKQKKKPT | | | |
| | LKQIAKEILVNEEDIKG | | | |
| | YRVTSTGKPEFTNLKV | | | |
| | YHDIKDITARKEIIENAE | | | |
| | LLDQIAKILTIYQSSEDI | | | |
| | QEELTNLNSELTQEEIE | | | |
| | QISNLKGYTGTHNLSLK | | | |
| | AINLILDELWHTNDNQI | | | |
| | AIFNRLKLVPKKVDLSQ | | | |
| | QKEIPTTL VDDFILSPVV | | | |
| | KRSFIQSIKVINAIIKKY | | | |
| | GLPNDIIIELAREKNSKD | | | |
| | AQKMINEMQKRNRQT | | | |
| | NERIEEIIRTTGKENAKY | | | |
| | LIEKIKLHDMQEGKCLY | | | |
| | SLEAIPLEDLLNNPFNY | | | |
| | EVDHIIPRSVSFDNSFNN | | | |
| | KVLVKQEENSKKGNRT | | | |
| | PFQYLSSSDSKISYETFK | | | |
| | KHILNLAKGKGRISKTK | | | |
| | KEYLLEERDINRFSVQK | | | |
| | DFINRNLVDTRYATRG | | | |
| | LMNLLRSYFRVNNLDV | | | |
| | KVKSINGGFTSFLRRK | | | |
| | WKFKKERNKGYKHHA | | | |
| | EDALIIANADFIFKEWK | | | |
| | KLDKAKKVMENQMFE | | | |
| | EKQAESMPEIETEQEYK | | | |
| | EIFITPHQIKHIKDFKDY | | | |
| | KYSHRVDKKPNRELIN | | | |
| | DTLYSTRKDDKGNTLI | | | |
| | VNNLNGLYDKDNDKL | | | |
| | KKLINKSPEKLLMYHH | | | |
| | DPQTYQKLKLIMEQYG | | | |
| | DEKNPLYKYYEETGNY | | | |
| | LTKYSKKDNGPVIKKIK | | | |
| | YYGNKLNAHLDITDDY | | | |
| | PNSRNKVVKLSLKPYR | | | |
| | FDVYLDNGVYKFVTVK | | | |
| | NLDVIKKENYYEVNSK | | | |
| | CYEEAKKLKKISNQAEF | | | |
| | IASFYNNDLIKINGELY | | | |
| | RVIGVNNDLLNRIEVN | | | |
| | MIDITYREYLENMNDK | | | |
| | RPPRIIKTIASKTQSIKK | | | |
| | YSTDILGNLYEVKSKK | | | |
| | HPQIIKKG | | | |
| ADAM TS13 | AAGGILHLELLVAVGP DVFQAHQEDTERYVLT NLNIGAELLRDPSLGAQ FRVHLVKMVILTEPEG APNITANLTSSLLSVCG WSQTINPEDDTDPGHA DLVLYITRFDLELPDGN RQVRGVTQLGGACSPT WSCLITEDTGFDLGVTI AHEIGHSFGLEHDGAPG SGCGPSGHVMASDGAA SLLSAGRARCVWDPPR PRAGLAWSPCSRRQLL PQPGSAGHPPDAQPGL YYSANEQCRVAFGPKA PLLDGTECGVEKWCSK VACTFAREHLDMCQAL GRCRSLVELTPIAAVHG | 3677 | Hepatic cells | [chemical structure] (50 mol %) DSPC (10 mol %) Cholesterol (38.5% mol %) PEG-DMG (1.5%) OR MC3 (50 mol %) DSPC (10 mol %) Cholesterol (38.5% mol %) PEG-DMG (1.5%) |
| | SCHTDPLDQSSCSRLLV | | | |
| | RWSSWGPRSPCSRSCG | | | |
| | GGVVTRRRQCNNPRPA | | | |
| | FGGRACVGADLQAEM | | | |
| | CNTQACEKTQLEFMSQ | | | |
| | QCARTDGQPLRSSPGG | | | |
| | ASFYHWGAAVPHSQG | | | |
| | DALCRHMCRAIGESFIM | | | |
| | KRGDSFLDGTRCMPSG | | | |
| | PREDGTLSLCVSGSCRT | | | |
| | FGCDGRMDSQQVWDR | | | |
| | CQVCGGDNSTCSPRKG | | | |
| | SFTAGRAREYVTFLTVT | | | |
| | PNLTSVYIANHRPLFTH | | | |
| | LAVRIGGRYVVAGKMS | | | |
| | ISPNTTYPSLLEDGRVE | | | |
| | YRVALTEDRLPRLEEIRI | | | |
| | WGPLQEDADIQVYRRY | | | |
| | GEEYGNLTRPDITFTYF | | | |
| | QPKPRQAWVWAAVRG | | | |
| | PCSVSCGAGLRWVNYS | | | |
| | CLDQARKELVETVQCQ | | | |
| | GSQQPPAWPEACVLEP | | | |
| | CPPYWAVGDFGPCSAS | | | |
| | CGGGLRERPVRCVEAQ | | | |
| | GSLLKTLPPARCRAGA | | | |
| | QQPAVALETCNPQPCP | | | |
| | ARWEVSEPSSCTSAGG | | | |
| | AGLALENETCVPGADG | | | |
| | LEAPVTEGPGSVDEKLP | | | |
| | APEPCVGMSCPPGWGH | | | |
| | LDATSAGEKAPSPWGSI | | | |
| | RTGAQAAHVWTPAAG | | | |
| | SCSVSCGRGLMELRFLC | | | |
| | MDSALRVPVQEELCGL | | | |
| | ASKPGSRREVCQAVPC | | | |
| | PARWQYKLAACSVSCG | | | |
| | RGVVRRILYCARAHGE | | | |
| | DDGEEILLDTQCQGLPR | | | |
| | PEPQEACSLEPCPPRWK | | | |
| | VMSLGPCSASCGLGTA | | | |
| | RRSVACVQLDQGQDVE | | | |
| | VDEAACAALVRPEASV | | | |
| | PCLIADCTYRWHVGTW | | | |
| | MECSVSCGDGIQRRRD | | | |
| | TCLGPQAQAPVPADFC | | | |
| | QHLPKPVTVRGCWAGP | | | |
| | CVGQGTPSLVPHEEAA | | | |
| | APGRTTATPAGASLEW | | | |
| | SQARGLLFSPAPQPRRL | | | |
| | LPGPQENSVQSSACGR | | | |
| | QHLEPTGTIDMRGPGQ | | | |
| | ADCAVAIGRPLGEVVT | | | |
| | LRVLESSLNCSAGDML | | | |
| | LLWGRLTWRKMCRKL | | | |
| | LDMTFSSKTNTLVVRQ | | | |
| | RCGRPGGGVLLRYGSQ | | | |
| | LAPETFYRECDMQLFG | | | |
| | PWGEIVSPSLSPATSNA | | | |
| | GGCRLFINVAPHARIAI | | | |
| | HALATNMGAGTEGAN | | | |
| | ASYILIRDTHSLRTTAFH | | | |
| | GQQVLYWESESSQAEM | | | |
| | EFSEGFLKAQASLRGQ | | | |
| | YWTLQSWVPEMQDPQ | | | |
| | SWKGKEGT | | | |
| FOXP3 | MPNPRPGKPSAPSLALG PSPGASPSWRAAPKAS DLLGARGPGGTFQGRD LRGGAHASSSSLNPMPP SQLQLPTLPLVMVAPSG ARLGPLPHLQALLQDR PHFMHQLSTVDAHART PVLQVHPLESPAMISLT PPTTATGVFSLKARPGL PPGINVASLEWVSREPA LLCTFPNPSAPRKDSTL SAVPQSSYPLLANGVC KWPGCEKVFEEPEDFL KHCQADHLLDEKGRA | 3678 | Immune cells | [chemical structure] (50 mol %) DSPC (10 mol %) Beta-sitosterol (28.5% mol %) Cholesterol (10 mol %) PEG DMG (1.5 mol %) |
| | QCLLQREMVQSLEQQL | | | |
| | VLEKEKLSAMQAHLAG | | | |
| | KMALTKASSVASSDKG | | | |
| | SCCIVAAGSQGPVVPA | | | |
| | WSGPREAPDSLFAVRR | | | |
| | HLWGSHGNSTFPEFLH | | | |
| | NMDYFKFHNMRPPFTY | | | |
| | ATLIRWAILEAPEKQRT | | | |
| | LNEIYHWFTRMFAFFR | | | |
| | NHPATWKNAIRHNLSL | | | |
| | HKCFVRVESEKGAVWT | | | |
| | VDELEFRKKRSQRPSRC | | | |
| | SNPTPGP | | | |
| IL-10 | SPGQGTQSENSCTHFPG NLPNMLRDLRDAFSRV KTFFQMKDQLDNLLLK ESLLEDFKGYLGCQALS EMIQFYLEEVMPQAEN QDPDIKAHVNSLGENL KTLRLRLRRCHRFLPCE NKSKAVEQVKNAFNKL QEKGIYKAMSEFDIFIN YIEAYMTMKIRN | 3679 | Immune cells | [chemical structure] (50 mol %) DSPC (10 mol %) Beta-sitosterol (28.5% mol %) |
| | | | | Cholesterol (10 mol %) |
| | | | | PEG DMG (1.5 mol %) |
| IL-2 | APTSSSTKKTQLQLEHL LLDLQMILNGINNYKNP KLTRMLTFKFYMPKKA TELKHLQCLEEELKPLE EVLNLAQSKNFHLRPR DLISNINVIVLELKGSET TFMCEYADETATIVEFL NRWITFCQSIISTLT | 3680 | Immune cells | [chemical structure] (50 mol %) |
| | | | | DSPC (10 mol %) |
| | | | | Beta-sitosterol (28.5% mol %) |
| | | | | Cholesterol (10 mol %) |
| | | | | PEG DMG (1.5 mol %) |

[0409] In some embodiments, the expression sequence encodes a therapeutic protein. In some embodiments, the expression sequence encodes a cytokine, e.g., IL-12p70, IL-15, IL-2, IL-18, IL-21, IFN-α, IFN-β, IL-10, TGF-beta, IL-4, or IL-35, or a functional fragment thereof. In some embodiments, the expression sequence encodes an immune checkpoint inhibitor. In some embodiments, the expression sequence encodes an agonist (e.g., a TNFR family member such as CD137L, OX40L, ICOSL, LIGHT, or CD70). In some embodiments, the expression sequence encodes a chimeric antigen receptor. In some embodiments, the expression sequence encodes an inhibitory receptor agonist (e.g., PDL1, PDL2, Galectin-9, VISTA, B7H4, or MHCII) or inhibitory receptor (e.g., PD1, CTLA4, TIGIT, LAG3, or TIM3). In some embodiments, the expression sequence encodes an inhibitory receptor antagonist. In some embodiments, the expression sequence encodes one or more TCR chains (alpha and beta chains or gamma and delta chains). In some embodiments, the expression sequence encodes a secreted T cell or immune cell engager (e.g., a bispecific antibody such as BiTE, targeting, e.g., CD3, CD137, or CD28 and a tumor-expressed protein e.g., CD19, CD20, or BCMA etc.). In some embodiments, the expression sequence encodes a transcription factor (e.g., FOXP3, HELIOS, TOX1, or TOX2). In some embodiments, the expression sequence encodes an immunosuppressive enzyme (e.g., IDO or CD39/CD73). In some embodiments, the expression sequence encodes a GvHD (e.g., anti-HLA-A2 CAR-Tregs).

[0410] In some embodiments, a polynucleotide encodes a protein that is made up of subunits that are encoded by more than one gene. For example, the protein may be a heterodimer, wherein each chain or subunit of the protein is encoded by a separate gene. It is possible that more than one circRNA molecule is delivered in the transfer vehicle and each circRNA encodes a separate subunit of the protein. Alternatively, a single circRNA may be engineered to encode more than one subunit. In certain embodiments, separate circRNA molecules encoding the individual subunits may be administered in separate transfer vehicles.

[0411] A. Antigen-Recognition Receptors

[0412] a. Chimeric Antigen Receptors (Cars)

[0413] Chimeric antigen receptors (CARs or CAR-Ts) are genetically-engineered receptors. These engineered receptors may be inserted into and expressed by immune cells, including T cells via circular RNA as described herein. With a CAR, a single receptor may be programmed to both recognize a specific antigen and, when bound to that antigen, activate the immune cell to attack and destroy the cell bearing that antigen. When these antigens exist on tumor cells, an immune cell that expresses the CAR may target and kill the tumor cell. In some embodiments, the CAR encoded by the polynucleotide comprises (i) an antigen-binding molecule that specifically binds to a target antigen, (ii) a hinge domain, a transmembrane domain, and an intracellular domain, and (iii) an activating domain.

[0414] In some embodiments, an orientation of the CARs in accordance with the disclosure comprises an antigen binding domain (such as an scFv) in tandem with a costimulatory domain and an activating domain. The costimulatory domain may comprise one or more of an extracellular portion, a transmembrane portion, and an intracellular portion. In other embodiments, multiple costimulatory domains may be utilized in tandem.

[0415] The present invention contemplates the use of such CARs as disclosed, for example, in International Application No. PCT/US2020/034418, in U.S. Provisional Application No. 62/851,548, filed May 22, 2019; U.S. Provisional Patent Application No. 62/857,121, filed Jun. 4, 2019; International Patent Application No. PCT/US2019/035531, filed Jun. 5, 2019, U.S. Provisional Patent Application No. 62/943,796, filed Dec. 4, 2019; U.S. Provisional Patent Application No. 62/943,779, filed Dec. 4, 2019; and U.S. Provisional Patent Application No. 62/972,194, filed Feb. 10, 2020, the teachings of which are incorporated herein by reference in their entirety.

[0416] i. Antigen Binding Domain

[0417] CARs may be engineered to bind to an antigen (such as a cell-surface antigen) by incorporating an antigen binding molecule that interacts with that targeted antigen. In some embodiments, the antigen binding molecule is an antibody fragment thereof, e.g., one or more single chain antibody fragment (scFv). An scFv is a single chain antibody fragment having the variable regions of the heavy and light chains of an antibody linked together. See U.S. Pat. Nos. 7,741,465, and 6,319,494 as well as Eshhar et al., Cancer Immunol Immunotherapy (1997) 45: 131-136. An scFv retains the parent antibody's ability to specifically interact with target antigen. scFvs are useful in chimeric antigen receptors because they may be engineered to be expressed as part of a single chain along with the other CAR components. Id. See also Krause et al., J. Exp. Med., Volume 188, No. 4, 1998 (619-626); Finney et al., Journal of Immunology, 1998, 161: 2791-2797. It will be appreciated that the antigen binding molecule is typically contained within the extracellular portion of the CAR such that it is capable of recognizing and binding to the antigen of interest. Bispecific and multispecific CARs are contemplated within the scope of the invention, with specificity to more than one target of interest.

[0418] In some embodiments, the antigen binding molecule comprises a single chain, wherein the heavy chain variable region and the light chain variable region are connected by a linker. In some embodiments, the VH is located at the N terminus of the linker and the VL is located at the C terminus of the linker. In other embodiments, the VL is located at the N terminus of the linker and the VH is located at the C terminus of the linker. In some embodiments, the linker comprises at least about 5, at least about 8, at least about 10, at least about 13, at least about 15, at least about 18, at least about 20, at least about 25, at least about 30, at least about 35, at least about 40, at least about 45, at least about 50, at least about 60, at least about 70, at least about 80, at least about 90, or at least about 100 amino acids.

[0419] In some embodiments, the antigen binding molecule comprises a nanobody. In some embodiments, the antigen binding molecule comprises a DARPin. In some embodiments, the antigen binding molecule comprises an anticalin or other synthetic protein capable of specific binding to target protein.

[0420] In some embodiments, the CAR comprises an antigen binding domain specific for an antigen selected from the group CD19, CD123, CD22, CD30, CD171, CS-1, C-type lectin-like molecule-1, CD33, epidermal growth factor receptor variant III (EGFRvIII), ganglioside G2 (GD2), ganglioside GD3, TNF receptor family member B cell maturation (BCMA), Tn antigen ((Tn Ag) or (GaINAca-Ser/Thr)), prostate-specific membrane antigen (PSMA), Receptor tyrosine kinase-like orphan receptor 1 (ROR1), Fms-Like Tyrosine Kinase 3 (FLT3), Tumor-associated glycoprotein 72 (TAG72), CD38, CD44v6, Carcinoembryonic antigen (CEA), Epithelial cell adhesion molecule (EPCAM), B7H3 (CD276), KIT (CD117), Interleukin-13 receptor subunit alpha-2, mesothelin, Interleukin 11 receptor alpha (IL-11Ra), prostate stem cell antigen (PSCA), Protease Serine 21, vascular endothelial growth factor receptor 2 (VEGFR2), Lewis(Y) antigen, CD24, Platelet-derived growth factor receptor beta (PDGFR-beta), Stage-specific embryonic antigen-4 (SSEA-4), CD20, Folate receptor alpha, HER2, HER3, Mucin 1, cell surface associated (MUC1), epidermal growth factor receptor (EGFR), neural cell adhesion molecule (NCAM), Prostase, prostatic acid phosphatase (PAP), elongation factor 2 mutated (ELF2M), Ephrin B2, fibroblast activation protein alpha (FAP), insulin-like growth factor 1 receptor (IGF-I receptor), carbonic anhydrase IX (CAIX), Proteasome (Prosome, Macropain) Subunit, Beta Type, 9 (LMP2), glycoprotein 100 (gp100), oncogene fusion protein consisting of breakpoint cluster region (BCR) and Abelson murine leukemia viral oncogene homolog 1 (Abl) (bcr-abl), tyrosinase, ephrin type-A receptor 2 (EphA2), Fucosyl GM1, sialyl Lewis adhesion molecule (sLe), ganglioside GM3, transglutaminase 5 (TGS5), high molecular weight-melanoma-associated antigen (HMWMAA), o-acetyl-GD2 ganglioside (OAcGD2), Folate receptor beta, tumor endothelial marker 1 (TEM1/CD248), tumor endothelial marker 7-related (TEM7R), claudin 6 (CLDN6), thyroid stimulating hormone receptor (TSHR), G protein-coupled receptor class C group 5, member D (GPRC5D), chromosome X open reading frame 61 (CXORF61), CD97, CD179a, anaplastic lymphoma kinase (ALK), Polysialic acid, placenta-specific 1 (PLAC1), hexasaccharide portion of globoH glycoceramide (GloboH), mammary gland differentiation antigen (NY-BR-1), uroplakin 2 (UPK2), Hepatitis A virus cellular receptor 1 (HAVCR1), adrenoceptor beta 3 (ADRB3), pannexin 3 (PANX3), G protein-coupled receptor 20 (GPR20), lymphocyte antigen 6 complex, locus K 9 (LY6K), Olfactory receptor 51E2 (OR51E2), TCR Gamma Alternate Reading Frame Protein (TARP), Wilms tumor protein (WT1), Cancer/testis antigen 1 (NY-ESO-1), Cancer/testis antigen 2 (LAGE-1a), MAGE family members (including MAGE-A1, MAGE-A3 and MAGE-A4), ETS translocation-variant gene 6, located on chromosome 12p (ETV6-AML), sperm protein 17 (SPA17), X Antigen Family, Member 1A (XAGE1), angiopoietin-binding cell surface receptor 2 (Tie 2), melanoma cancer testis antigen-1 (MAD-CT-1), melanoma cancer testis antigen-2 (MAD-CT-2), Fos-related antigen 1, tumor protein p53 (p53), p53 mutant, prostein, surviving, telomerase, prostate carcinoma tumor antigen-1, melanoma antigen recognized by T cells 1, Rat sarcoma (Ras) mutant, human Telomerase reverse transcriptase (hTERT), sarcoma translocation breakpoints, melanoma inhibitor of apoptosis (ML-IAP), ERG (transmembrane protease, serine 2 (TMPRSS2) ETS fusion gene), N-Acetyl glucosaminyl-transferase V (NA17), paired box protein Pax-3 (PAX3), Androgen receptor, Cyclin B1, v-myc avian myelocytomatosis viral oncogene neuroblastoma derived homolog (MYCN), Ras Homolog Family Member C (RhoC), Tyrosinase-related protein 2 (TRP-2), Cytochrome P450 1B1 (CYP1B1), CCCTC-Binding Factor (Zinc Finger Protein)-Like, Squamous Cell Carcinoma Antigen Recognized By T Cells 3 (SART3), Paired box protein Pax-5 (PAX5), proacrosin binding protein sp32 (OY-TES1), lymphocyte-specific protein tyrosine kinase (LCK), A kinase anchor protein 4 (AKAP-4), synovial sarcoma, X breakpoint 2 (SSX2), Receptor for Advanced Glycation Endproducts (RAGE-1), renal ubiquitous 1 (RU1), renal ubiquitous 2 (RU2), legumain, human papilloma virus E6 (HPV E6), human papilloma virus E7 (HPV E7), intestinal carboxyl esterase, heat shock protein 70-2 mutated (mut hsp70-2), CD79a, CD79b, CD72, Leukocyte-associated immunoglobulin-like receptor 1 (LAIR1), Fc fragment of IgA receptor (FCAR or CD89), Leukocyte immunoglobulin-like receptor subfamily A member 2 (LILRA2), CD300 molecule-like family member f (CD300LF), C-type lectin domain family 12 member A (CLECI2A), bone marrow stromal cell antigen 2 (BST2), EGF-like module-containing mucin-like hormone receptor-like 2 (EMR2), lymphocyte antigen 75 (LY75), Glypican-3 (GPC3), Fc receptor-like 5 (FCRL5), MUC16, 5T4, 8H9, ανβθ integrin, ανβ6 integrin, alphafetoprotein (AFP), B7-H6, ca-125, CA9, CD44, CD44v7/8, CD52, E-cadherin, EMA (epithelial membrane antigen), epithelial glycoprotein-2 (EGP-2), epithelial glycoprotein-40 (EGP-40), ErbB4, epithelial tumor antigen (ETA), folate binding protein (FBP), kinase insert domain receptor (KDR), k-light chain, L1 cell adhesion molecule, MUC18, NKG2D, oncofetal antigen (h5T4), tumor/testis-antigen 1B, GAGE, GAGE-1, BAGE, SCP-1, CTZ9, SAGE, CAGE, CT10, MART-1, immunoglobulin lambda-like polypeptide 1 (IGLL1), Hepatitis B Surface Antigen Binding Protein (HBsAg), viral capsid antigen (VCA), early antigen (EA), EBV nuclear antigen (EBNA), HHV-6 p41 early antigen, HHV-6B U94 latent antigen, HHV-6B p98 late antigen, cytomegalovirus (CMV) antigen, large T antigen, small T antigen, adenovirus antigen, respiratory syncytial virus (RSV) antigen, haemagglutinin (HA), neuraminidase (NA), parainfluenza type 1 antigen, parainfluenza type 2 antigen, parainfluenza type 3 antigen, parainfluenza type 4 antigen, Human Metapneumovirus (HMPV) antigen, hepatitis C virus (HCV) core antigen, HIV p24 antigen, human T-cell lympotrophic virus (HTLV-1) antigen, Merkel cell polyoma virus small T antigen, Merkel cell polyoma virus large T antigen, Kaposi sarcoma-associated herpesvirus (KSHV) lytic nuclear antigen and KSHV latent nuclear antigen. In some embodiments, an antigen binding domain comprises SEQ ID NO: 3547 and/or 3548.

### BCMA

[0421] B cell mature antigen (BCMA), also known as CD269, is a member of the tumor necrosis factor receptor superfamily, namely TNFRSF17 (Thompson et al., J. Exp. Medicine, 192 (1): 129-135, 2000). Human BCMA is almost exclusively expressed in plasma cells and multiple myeloma cells (see e.g. Novak et al., Blood, 103 (2): 689-694, 2004; Neri et al., Clinical Cancer Research, 73 (19): 5903-5909; Felix et al., Mol. Oncology, 9 (7): 1348-58, 2015). BCMA can bind B-cell activating factor (BAFF) and a proliferation including ligand (APRIL) (e.g. Mackay et al., 2003 and Kalled et al., Immunological Review, 204: 43-54, 2005). BCMA can be a suitable tumor antigen target for immunotherapeutic agents against multiple myeloma. Antibodies of high affinity can block the binding between BCMA and its native ligands BAFF and APRIL.

TABLE 1
Protein sequences of human BCMA

| Position(s) | Description | Length | Amino acid sequence |
|---|---|---|---|
| 1-54 | Extracellular | 54 | MLQMAGQCSQNEYFDSLLH |
| | domain | | ACIPCQLRCSSNTPPLTCQ |
| | | | RYCNASVTNSVKGTNA |
| | | | (SEQ ID NO: 3681) |
| 55-77 | Transmembrane | 23 | ILWTCLGLSLIISLAVFVL |
| | domain | | MFLL |
| | | | (SEQ ID NO: 3682) |
| 78-184 | Cytoplasmic | 107 | RKINSEPLKDEFKNTGSGL |
| | domain | | LGMANIDLEKSRTGDEIIL |
| | | | PRGLEYTVEECTCEDCIKS |
| | | | KPKVDSDHCFPLPAMEEGA |
| | | | TILVTTKTNDYCKSLPAAL |
| | | | SATEIEKSISAR |
| | | | (SEQ ID NO: 3683) |

[0422] In some embodiments, an anti-BCMA binding moiety specifically binds to an epitope on BCMA derived from an amino acid sequence selected from SEQ ID NOs: 3684-3689.

TABLE 2
BCMA epitope peptide sequences

| Positions | Amino acid sequence | Length |
|---|---|---|
| 1-10 | MLQMAGQCSQ (SEQ ID NO: 3684) | 10 |
| 8-21 | CSQNEYFDSLLHAC (SEQ ID NO: 3685) | 14 |
| 11-23 | NEYFDSLLHACIP (SEQ ID NO: 3686) | 13 |
| 20-30 | ACIPCQLRCSS (SEQ ID NO: 3687) | 11 |
| 24-42 | CQLRCSSNTPPLTCQRYCN | 19 |
| | (SEQ ID NO: 3688) | |
| 36-43 | LTCQRYCNAS (SEQ ID NO: 3689) | 10 |

[0423] In some embodiments, the CAR comprises an antigen binding domain specific for TNF receptor family member B cell maturation (BCMA). In some embodiments, the BCMA antigen-binding domain selectively binds BCMA. In some embodiments, the BCMA antigen-binding domain binds to BCMA on a target cell.

[0424] In some embodiments, a BCMA CAR disclosed herein comprises an amino acid sequence having at least about 85% o, 86% o, 87% o, 88% o, 89% o, 90%, 91%, 92% o, 93%>94%>95%>96%, 97%>9800, 9900, or 10000 sequence identity to an amino acid sequence selected from the group consisting of SEQ ID NO: 3690-3695. In some embodiments, the BCMA CAR comprises an amino acid sequence selected from the group consisting of SEQ ID NO: 3690-3695.

(SEQ ID NO: 3690)
MALPVTALLLPLALLLHAARPQVKLEESGGGLVQAGRSLRLSCAASEHTFSSHV
MGWFRQAPGKERESVAVIGWRDISTSYADSVKGRFTISRDNAKKTLYLQMNSLKPEDT
AVYYCAARRIDAADFDSWGQGTQVTVSSGGGGSEVQLVESGGGLVQAGGSLRLSCAA
SGRTFTMGWFRQAPGKEREFVAAISLSPTLAYYAESVKGRFTISRDNAKNTVVLQMNSL
KPEDTALYYCAADRKSVMSIRPDYWGQGTQVTVSSTSTTTPAPRPPTPAPTIASQPLSLR
PEACRPAAGGAVHTRGLDFACDIYIWAPLAGTCGVLLLSLVITLYCKRGRKKLLYIFKQP
FMRPVQTTQEEDGCSCRFPEEEEGGCELRVKFSRSADAPAYQQGQNQLYNELNLGRRE
EYDVLDKRRGRDPEMGGKPRRKNPQEGLYNELQKDKMAEAYSEIGMKGERRRGKGH
DGLYQGLSTATKDTYDALHMQALPPR
(SEQ ID NO: 3691)
MALPVTALLLPLALLLHAARPQVKLEESGGGLVQAGRSLRLSCAASEHTFSSHV
MGWFRQAPGKERESVAVIGWRDISTSYADSVKGRFTISRDNAKKTLYLQMNSLKPEDT
AVYYCAARRIDAADFDSWGQGTQVTVSSGGGGSGGGGSGGGGSEVQLVESGGGLVQA
GGSLRLSCAASGRTFTMGWFRQAPGKEREFVAAISLSPTLAYYAESVKGRFTISRDNAK
NTVVLQMNSLKPEDTALYYCAADRKSVMSIRPDYWGQGTQVTVSSTSTTTPAPRPPTPA
PTIASQPLSLRPEACRPAAGGAVHTRGLDFACDIYIWAPLAGTCGVLLLSLVITLYCKRG
RKKLLYIFKQPFMRPVQTTQEEDGCSCRFPEEEEGGCELRVKFSRSADAPAYQQGQNQL
YNELNLGRREEYDVLDKRRGRDPEMGGKPRRKNPQEGLYNELQKDKMAEAYSEIGMK
GERRRGKGHDGLYQGLSTATKDTYDALHMQALPPR
(SEQ ID NO: 3692)
>MALPVTALLLPLALLLHAARPQVKLEESGGGLVQAGRSLRLSCAASEHTFSSH
VMGWFRQAPGKERESVAVIGWRDISTSYADSVKGRFTISRDNAKKTLYLQMNSLKPED
TAVYYCAARRIDAADFDSWGQGTQVTVSSGGGGSGGGGSGGGGSGGGGSGGGGSEVQ
LVESGGGLVQAGGSLRLSCAASGRTFTMGWFRQAPGKEREFVAAISLSPTLAYYAESVK
GRFTISRDNAKNTVVLQMNSLKPEDTALYYCAADRKSVMSIRPDYWGQGTQVTVSSTS
TTTPAPRPPTPAPTIASQPLSLRPEACRPAAGGAVHTRGLDFACDIYIWAPLAGTCGVLLL
SLVITLYCKRGRKKLLYIFKQPFMRPVQTTQEEDGCSCRFPEEEEGGCELRVKFSRSADA
PAYQQGQNQLYNELNLGRREEYDVLDKRRGRDPEMGGKPRRKNPQEGLYNELQKDK
[sequence omitted]
(SEQ ID NO: 3693)
MALPVTALLLPLALLLHAARPEVQLVESGGGLVQAGGSLRLSCAASGRTFTMG
WFRQAPGKEREFVAAISLSPTLAYYAESVKGRFTISRDNAKNTVVLQMNSLKPEDTALY
YCAADRKSVMSIRPDYWGQGTQVTVSSGGGGSGGGGSQVKLEESGGGLVQAGRSLRL
SCAASEHTFSSHVMGWFRQAPGKERESVAVIGWRDISTSYADSVKGRFTISRDNAKKTL
YLQMNSLKPEDTAVYYCAARRIDAADFDSWGQGTQVTVSSTSTTTPAPRPPTPAPTIAS
QPLSLRPEACRPAAGGAVHTRGLDFACDIYIWAPLAGTCGVLLLSLVITLYCKRGRKKL
LYIFKQPFMRPVQTTQEEDGCCRFPEEEEGGCELRVKFSRSADAPAYQQGQNQLYNEL
NLGRREEYDVLDKRRGRDPEMGGKPRRKNPQEGLYNELQKDKMAEAYSEIGMKGERR
RGKGHDGLYQGLSTATKDTYDALHMQALPPR
(SEQ ID NO: 3694)
MALPVTALLLPLALLLHAARPEVQLVESGGGLVQAGGSLRLSCAASGRTFTMG
WFRQAPGKEREFVAAISLSPTLAYYAESVKGRFTISRDNAKNTVVLQMNSLKPEDTALY
YCAADRKSVMSIRPDYWGQGTQVTVSSGGGGSGGGGSGGGGSQVKLEESGGGLVQAG
RSLRLSCAASEHTFSSHVMGWFRQAPGKERESVAVIGWRDISTSYADSVKGRFTISRDN
AKKTLYLQMNSLKPEDTAVYYCAARRIDAADFDSWGQGTQVTVSSTSTTTPAPRPPTPA
PTIASQPLSLRPEACRPAAGGAVHTRGLDFACDIYIWAPLAGTCGVLLLSLVITLYCKRG
RKKLLYIFKQPFMRPVQTTQEEDGCSCRFPEEEEGGCELRVKFSRSADAPAYQQGQNQL
YNELNLGRREEYDVLDKRRGRDPEMGGKPRRKNPQEGLYNELQKDKMAEAYSEIGMK
GERRRGKGHDGLYQGLSTATKDTYDALHMQALPPR
(SEQ ID NO: 3695)
MALPVTALLLPLALLLHAARPEVQLVESGGGLVQAGGSLRLSCAASGRTFTMG
WFRQAPGKEREFVAAISLSPTLAYYAESVKGRFTISRDNAKNTVVLQMNSLKPEDTALY
YCAADRKSVMSIRPDYWGQGTQVTVSSGGGGSGGGGSGGGGSGGGGSQVKLEESGGG
LVQAGRSLRLSCAASEHTFSSHVMGWFRQAPGKERESVAVIGWRDISTSYADSVKGRFT
ISRDNAKKTLYLQMNSLKPEDTAVYYCAARRIDAADFDSWGQGTQVTVSSTSTTTPAPR
PPTPAPTIASQPLSLRPEACRPAAGGAVHTRGLDFACDIYIWAPLAGTCGVLLLSLVITLY
CKRGRKKLLYIFKQPFMRPVQTTQEEDGCSCRFPEEEEGGCELRVKFSRSADAPAYQQG
QNQLYNELNLGRREEYDVLDKRRGRDPEMGGKPRRKNPQEGLYNELQKDKMAEAYSE
IGMKGERRRGKGHDGLYQGLSTATKDTYDALHMQALPPR

[0425] In some embodiments, a BCMA CAR disclosed herein comprises an amino acid sequence having at least about 85% o, 86%, 87% o, 88% o, 89% o, 90%, 91%, 92% o, 93%, 94%, 95%, 96%, 97%, 9800, 9900, or 1000% sequence identity to an amino acid sequence selected from the group consisting of SEQ ID NO: 338-417. In some embodiments, a BCMA CAR comprises an amino acid sequence selected from the group consisting of SEQ ID NOs: 3696-3775.

TABLE 3
Exemplary BCMA sequences

| SEQ ID NO: | Amino acid sequence |
|---|---|
| 3696 | QVQLVESGGGLVQPGGSLRLSCEASGFTLDYYAIGWFRQAPGKERE |
| | GVICISRSDGSTYYADSVKGRFTISRDNAKKTVYLQMISLKPEDTAAY |
| | YCAAGADCSGYLRDYEFRGQGTQVTVSS |
| 3697 | QVKLEESGGRLVQPRGSLRLSCAGSGRTFSTYGMAWFRQAPGKERE |
| | FVASKASMNYSGRTYYADSVKGRFTIARDNAKNMVFLQMNNLKPE |
| | DTAVYYCAAGTGCSTYGCFDAQIIDYWGKGTLVTVSS |
| 3698 | EVQLVESGGGLVQAGGSLRLSCAASGRTFTMGWFRQAPGKEREFVA |
| | AISLSPTLAYYAESVKGRFTISRDNAKNTVVLQMNSLKPEDTALYYC |
| | AADRKSVMSIRPDYWGQGTQVTVSS |
| 3699 | AVQLVDSGGGLVQPGGSLRLSCVASGGIFVINAMGWYRQAPGKQRE |
| | LVASIRGLGRTNYDDSVKGRFTISRDNANNTVYLQMNSLEPEDTAV |
| | YYCTVYVTLLGGVNRDYWGQGTQVTVSS |
| 3700 | EVQLVESGGGLVQAGGSLRLSCAASGRTFSSIVMGWFRQAPGKERE |
| | FVGAIMWNDGITYLQDSVKGRFTIFRDNAKNTVYLQMNSLKLEDTA |
| | VYYCAASKGRYSEYEYWGQGTQVTVSS |
| 3701 | EVQLVESGGGVVQAGGSLTVSCTASGFTFDRAVIVWFRQAPGKGRE |
| | GVSFIKPSDGTIYYIDSLKGRFTISSDIAKNTVYLQMKSLESEDSAVYY |
| | CAASPEDWYTDWIDWSIYRWQHWGQGTQVTVSS |
| 3702 | EVQLVESGGGMVQAGDSLRLSCVQSTYTVNSDVMGWFRQAPGKER |
| | EFVGAIMWNDGITYLQDSVKGRFTIFRDNAKNTVYLQMNSLKLEDT |
| | AVYYCAASKGRYSEYEYWGQGTQVTVSS |
| 3703 | AVQLVESGGGLVQAGDSLRLSCTASGATLINDHMAWFRQAPGKGR |
| | EFVAAIDWSGRTTNYADPVEGRFTISRNNAKNTVYLEMNSLKLEDT |
| | AVYYCAVLRAWISYDNDYWGQGTQVTVSS |
| 3704 | QVQLVESGGGLVQAGGSLRLSCAASGGTLSKNTVAWFRQAPGKER |
| | GFVASITWDGRTTYYADSVKGRFTISRDNAKNTVYLQMNSLKPEDT |
| | AVYVCADLGKWPAGPADYWGQGTQVTVSS |
| 3705 | QVKLEESGGGLVQAGRSLRLSCAASEHTFSSHVMGWFRQAPGKERE |
| | SVAVIGWRDISTSYADSVKGRFTISRDNAKKTLYLQMNSLKPEDTAV |
| | YYCAARRIDAADFDSWGQGTQVTVSS |
| 3706 | AVQLVESGGGLVQAGDSLRLTCTASGRAFSTYFMAWFRQAPGKERE |
| | FVAGIAWSGGSTAYADSVKGRFTISRDNAKNTVYLQMNSLKSEDTA |
| | VYYCASRGIEVEEFGAWGQGTQVTVSS |
| 3707 | QVQLVESGGGLVQPGGSLRLSCEASGFTLDYYAIGWFRQAPGKERE |
| | GVICISRSDGSTYYADSVKGRFTISRDNAKKTVYLQMISLKPEDTAAY |
| | YCAAGADCSGYLRDYEFRGQGTQVTVSS |
| 3708 | QVKLEESGGGLVQAGRSLRLSCAASEHTFSSHVMGWFRQAPGKERE |
| | SVAVIGWRDISTSYADSVKGRFTISRDNAKKTLYLQMNSLKPEDTAV |
| | YYCAARRIDAADFDSWGQGTQVTVSS |
| 3709 | EVQLVESGGGLVQAGGSLRLSCAASGRTFTMGWFRQAPGKEREFVA |
| | AISLSPTLAYYAESVKGRFTISRDNAKNTVVLQMNSLKPEDTALYYC |
| | AADRKSVMSIRPDYWGQGTQVTVSS |
| 3710 | EVQLVESGGGLVPPGGSLRLSCTASGSTVSINVMAWYRQVSGKQRE |
| | LVAAVTRDGRKSCGDSVKGRFTISRDGAKNAVYLQMNSLKPEDTAV |
| | YLCGADGWGATTLDYTYGMDYWGKGTQVTVSS |
| 3711 | AVQLVESGGGLVQAGGSLRLSCAASGRTFTMGWFRQAPGKERGFV |
| | ASITWDGRSAYYAESVKGRFTISRDNAKNTVVLQMNSLKPEDTALY |
| | YCAADRKSVMSIRPDYWGQGTQVTVSS |
| 3712 | QVQLVESGGGLVQPGGSLRLACEAPGSGNSINAMGWYRQTPGKRRE |
| | LVATITRGGSTNYGPSVKGRFTITRDNVKNTVHLQMNSLKPDDTAV |
| | YYCNAERLDGSGYGYEYDYWGQGTQVTVSS |
| 3713 | QVKLEESGGGLVQAGGSLRLSCAASGGTLSKNTVAWVRQAPGKER |
| | GFVTSITCDGRTTYYANSVNGRFPINRNNAENLVVLQMNSLKPDDTA |
| | LYYCAAYRKSIMSIQPDYWGQGTQVTVSS |
| 3714 | DVQLVESGGGLVQAGGSLRLSCAASGRTFSSIVMGWFRQAPGKERE |
| | FVGAIMWNDGLTYLQGSVKGRFTISRDNAKNTVVLQMNSLKPEDTA |
| | LYYCAADRKSVMSIRPDYWGQGTQVTVSS |
| 3715 | QVQLVESGGGLVQAGGSLRLSCAASGRTFTMGWFRQAPGKEREFV |
| | AAISLSPTLAYYAESVKGRFTISRDNAKNTVVLQMNSLKPEDTAVYY |
| | CAARRIDAADFDSWGQGTQVTVSS |
| 3716 | QVQLVESGGGLVQAGGSLRLSCAASGGTLSKNTVAWFRQAPGKER |
| | GFVASITWDGRTTYYADSVKGRFTISRDNAKNTVYLQMNSLKPEDT |
| | AVYVCADLGKWPAGPADYWGQGTQVTVSS |
| 3717 | QVQLVESGGGLVQPGGSLTLSCAASGSIDSINTMDWFRQAPGKEREF |
| | VAAISLSPTLAYYAESVKGRFTISRDNAKNTVVLQMNSLKPEDTALY |
| | YCAADRKSVMSIRPDYWGQGTQVTVSS |
| 3718 | DVQLVESGGGLVQAGGSLRLSCAASGGTLSKNTVAWVRQAPGKER |
| | GFVTSITCDGRTTYYANSVKGRFPISRDNAENTVYLQMNSLKPEDTA |
| | GYVCADLGKWPAGSADYWGQGTHVTVSS |
| 3719 | QVKLEESGGGLVQPGGSLRLSCTASEFTFSDYWMHWVRQAPGKGLE |
| | WVASIDTSGQTTYYADSLKGRFTISRDNAKSTLYLQMNSLKSEDTGV |
| | YFCAKRYRGGTWYGMANWGKGTQVTVSS |
| 3720 | QVQLVESGGGLVQAGGSLRLSCAASGRTLSSNTMAWFRQAPGKERE |
| | FVASTTWNGRSTYYADSVKGRFTISRDNAKNTMYLQMNSLKPEDTA |
| | VYVCADLGKWPAGPADYWGQGTQVTVSS |
| 3721 | QVQLVESGGGLVQAGGSLRLSCAASGRTFTMGWFRQAPGKQRELV |
| | ADISGGRTNYADSVKGRFTISRDNAKNTVYLQMNSLKPEDTAVYYC |
| | AADRKSVMSIRPDYWGQGTQVTVSS |
| 3722 | QVQLVESGGGLVQAGASLRLSCAASGRTFTVAAISLSPTLAYYAESV |
| | KGRFTISRDNAKNTVVLQMNSLKPEDTALYYCAADRKSVMSIRPDY |
| | WGQGTQVTVSS |
| 3723 | DVQLVESGGGLEQAGGSLRLSCAASGGTLSKNTVAWFRQAPGKERG |
| | FVASITWDGRTTYYADSVKGRFTISRDNAKNTVYLQMNSLKPEDTA |
| | VYYCASTASCHLFGLGSGAFVSWGRGTQVTVSS |
| 3724 | AVQLVESGGGLVQAGGSLRLSCAASGRTFTMGWFHQAPGKEREFV |
| | AAISLSPTLAYYAESVKGRFTISRDNAKNTVVLQMNSLKPEDTALYY |
| | CAASKDRYSEYEYWGQGTQVTVSS |
| 3725 | QVKLEESGGGLVQAGGSLRLSCAASGRTFTMGWFRQAPGKEREFVA |
| | AISLSPTLAYYAESVKGRFTISRDNAKNTVVLQMNSLKPEDTALYYC |
| | AKKNGGPVDYWGKGTQVTVSS |
| 3726 | DVQLVESGGGLVQPGGSLRLSCAASGRTFSSIVMGWFRQAPGKEREF |
| | VGAIMWNDGITYLQDSVKGRFTIFRDNAKNTVYLQMNSLKLEDTAV |
| | YYCAASKGRYSEYEYWGQGTQVTVSS |
| 3727 | QVKLEESGGRLVQAGGSLKLSWAASGRTFTMGWFRQAPGKEREFV |
| | TAINLSPTLTYYAESVKGRFPISRNNAQNTVVLQMNSLKPEDTALYY |
| | CAAERKSVMAIPPDYWGQGTQVTVSS |
| 3728 | QVKLEESGGRLVQAGGSLKLSWAASGRTFTMGWFRQAPGKEREFV |
| | TAINLSPTLTYYAESVKGRFPISRNNAQNTVVLQMNSLKPEDTALYY |
| | CAAERKSVMAIPPDYWGQGTQVTVSS |
| 3729 | EVQLVESGGGLVQAGGSLRLSCAASGRTFTMGGFRR VPRDEREFVA |
| | SITLIPTFPYYAYSVKGRFALFRDNPNNTVILLMISLKPEDPDLYYCAS |
| | YRKYLMSILPDYWGQGTQGTVSS |
| 3730 | QVKLEESGGGLVQAGGSLRLSCAASGRTFTMGWFRQAPGKEREFVA |
| | AISLSPTLAYYAESVKGRFTISRDNAKNTVDLQMNSLKPEDTAVYFC |
| | AANRNSQRVIAALSWIGMNYWGEWTQVTVSS |
| 3731 | QVQLVESGGGLVQAGGSLRLSCAASGRTFTMGWFRQAPGKEREFV |
| | AAISLSPTLAYYAESVKGRFTISRDNAKKTLYLRMNSLKPEDTAVYY |
| | CAARRIDAADFDSWGQGTQVTVSS |
| 3732 | QVKLEESGGGLVQAGGSLRLSCAASGRTFTMGWFRRAPGKERESVA |
| | VIGWRDINASYADSVKGRFAISRDNAKKTLYLQMNSLKPEDTAVYY |
| | CAARRIDATDFDSWGQGTQVTVSS |
| 3733 | QVKLEESGGGLVQTGGSLRLSCAASEHTFSNHVMGWFRQAPGKERE |
| | SVAVIGWRDISTSYADSVKGRFTISRDNAKKTLYLQMNSLKPEDTAV |
| | YYCAARRIDAADFDSRGQGTQVTVSS |
| 3734 | AVQLVDSGGGLVQAGGSLRISCAVSGRTSSNYILAWFRQAPGKERDF |
| | VAHISRSGGKSGYGDSVKGRFTISRDNAENTVRVYLQMNSLKPGDT |
| | AVYYCNRPLWYGSPTLIDYWGQGTQVTVSS |
| 3735 | QVQLVESGGGLVQAGGSLRLSCAASGRTFTMGWFRQAPGKEREFV |
| | AAISLSPTLAYYAESVKGRFTISRDNAKNTVVLQMNSLKPEDTALYY |
| | CAADRKSVMSIRPDYWGQGTQVTVSS |
| 3736 | AVQLVDSGGGLVQAGGSLRLSCAASGRTFTMGWFRQAPGKEREFV |
| | AAISLSPTLAYYAEPVKGRFTISRDNAKNTVVLQMNSLKPEDTALYY |
| | CAADRKSVMSIRPDYWGQGTQVTVSS |
| 3737 | DVQLVESGGGSVQTGGSLRLSCTASGRTLNNFVMGWFRQAPGKERE |
| | FVAAISLSPTLAYYVESVKGRFTISRDNAKNTVVLQMNSLKPEDTAL |
| | YYCAADRKSVMSIRPDYWGQGTQVTVSS |
| 3738 | APGKEREGVICISRSDGSTYYADSVKGRFTISRDNAKKTVYLQMISLK |
| | PEDTAAYYCAAGADCSGYLRDYEFRGQGTQVTVSSGGGGSQVQLV |
| | ESGGGLVQPGGSLRLSCEASGFTLDYYAIGWFRQAPGKEREGVICISR |
| | SDGSTYYADSVKGRFTISRDNAKKTVYLQMISLKPEDTAAYYCAAG |
| | ADCSGYLRDYEFRGQGTQVTVSS |
| 3739 | QVQLVESGGGLVQPGGSLRLSCEASGFTLDYYAIGWFRQAPGKERE |
| | GVICISRSDGSTYYADSVKGRFTISRDNAKKTVYLQMISLKPEDTAAY |
| | YCAAGADCSGYLRDYEFRGQGTQVTVSSGGGGSQVQLVESGGGLV |
| | QPGGSLRLSCEASGFTLDYYAIGWFRQAPGKEREGVICISRSDGSTYY |
| | ADSVKGRFTISRDNAKKTVYLQMISLKPEDTAAYYCAAGADCSGYL |
| | RDYEFRGQGTQVTVSSGGGGSQVQLVESGGGLVQPGGSLRLSCEAS |
| | GFTLDYYAIGWFRQAPGKEREGVICISRSDGSTYYADSVKGRFTISRD |
| | NAKKTVYLQMISLKPEDTAAYYCAAGADCSGYLRDYEFRGQGTQV |
| | TVSS |
| 3740 | QVKLEESGGGLVQAGRSLRLSCAASEHTFSSHVMGWFRQAPGKERE |
| | SVAVIGWRDISTSYADSVKGRFTISRDNAKKTLYLQMNSLKPEDTAV |
| | YYCAARRIDAADFDSWGQGTQVTVSSGGGGSEVQLVESGGGLVQA |
| | GGSLRLSCAASGRTFTMGWFRQAPGKEREFVAAISLSPTLAYYAESV |
| | KGRFTISRDNAKNTVVLQMNSLKPEDTALYYCAADRKSVMSIRPDY |
| | WGQGTQVTVSS |
| 3741 | QVKLEESGGGLVQAGRSLRLSCAASEHTFSSHVMGWFRQAPGKERE |
| | SVAVIGWRDISTSYADSVKGRFTISRDNAKKTLYLQMNSLKPEDTAV |
| | YYCAARRIDAADFDSWGQGTQVTVSSGGGGSGGGGSGGGGSEVQL |
| | VESGGGLVQAGGSLRLSCAASGRTFTMGWFRQAPGKEREFVAAISL |
| | SPTLAYYAESVKGRFTISRDNAKNTVVLQMNSLKPEDTALYYCAAD |
| | RKSVMSIRPDYWGQGTQVTVSS |
| 3742 | QVKLEESGGGLVQAGRSLRLSCAASEHTFSSHVMGWFRQAPGKERE |
| | SVAVIGWRDISTSYADSVKGRFTISRDNAKKTLYLQMNSLKPEDTAV |
| | YYCAARRIDAADFDSWGQGTQVTVSSGGGGSGGGGSGGGGSGGGG |
| | SGGGGSEVQLVESGGGLVQAGGSLRLSCAASGRTFTMGWFRQAPG |
| | KEREFVAAISLSPTLAYYAESVKGRFTISRDNAKNTVVLQMNSLKPE |
| | DTALYYCAADRKSVMSIRPDYWGQGTQVTVSS |
| 3743 | EVQLVESGGGLVQAGGSLRLSCAASGRTFTMGWFRQAPGKEREFVA |
| | AISLSPTLAYYAESVKGRFTISRDNAKNTVVLQMNSLKPEDTALYYC |
| | AADRKSVMSIRPDYWGQGTQVTVSSGGGGSGGGGSQVKLEESGGG |
| | LVQAGRSLRLSCAASEHTFSSHVMGWFRQAPGKERESVAVIGWRDI |
| | STSYADSVKGRFTISRDNAKKTLYLQMNSLKPEDTAVYYCAARRID |
| | AADFDSWGQGTQVTVSS |
| 3744 | EVQLVESGGGLVQAGGSLRLSCAASGRTFTMGWFRQAPGKEREFVA |
| | AISLSPTLAYYAESVKGRFTISRDNAKNTVVLQMNSLKPEDTALYYC |
| | AADRKSVMSIRPDYWGQGTQVTVSSGGGGSGGGGSGGGGSQVKLE |
| | ESGGGLVQAGRSLRLSCAASEHTFSSHVMGWFRQAPGKERESVAVI |
| | GWRDISTSYADSVKGRFTISRDNAKKTLYLQMNSLKPEDTAVYYCA |
| | ARRIDAADFDSWGQGTQVTVSS |
| 3745 | EVQLVESGGGLVQAGGSLRLSCAASGRTFTMGWFRQAPGKEREFVA |
| | AISLSPTLAYYAESVKGRFTISRDNAKNTVVLQMNSLKPEDTALYYC |
| | AADRKSVMSIRPDYWGQGTQVTVSSGGGGSGGGGSGGGGSGGGGS |
| | QVKLEESGGGLVQAGRSLRLSCAASEHTFSSHVMGWFRQAPGKERE |
| | SVAVIGWRDISTSYADSVKGRFTISRDNAKKTLYLQMNSLKPEDTAV |
| | YYCAARRIDAADFDSWGQGTQVTVSS |
| 3746 | QVKLEESGGGLVQAGRSLRLSCAASEHTFSSHVMGWFRQAPGKERE |
| | SVAVIGWRDISTSYADSVKGRFTISRDNAKKTLYLQMNSLKPEDTAV |
| | YYCAARRIDAADFDSWGQGTQVTVSSGGGGSAVQLVESGGGLVQA |
| | GDSLRLTCTASGRAFSTYFMAWFRQAPGKEREFVAGIAWSGGSTAY |
| | ADSVKGRFTISRDNAKNTVYLQMNSLKSEDTAVYYCASRGIEVEEFG |
| | AWGQGTQVTVSS |
| 3747 | QVKLEESGGGLVQAGRSLRLSCAASEHTFSSHVMGWFRQAPGKERE |
| | SVAVIGWRDISTSYADSVKGRFTISRDNAKKTLYLQMNSLKPEDTAV |
| | YYCAARRIDAADFDSWGQGTQVTVSSGGGGSGGGGSGGGGSAVQL |
| | VESGGGLVQAGDSLRLTCTASGRAFSTYFMAWFRQAPGKEREFVAG |
| | IAWSGGSTAYADSVKGRFTISRDNAKNTVYLQMNSLKSEDTAVYYC |
| | ASRGIEVEEFGAWGQGTQVTVSS |
| 3748 | QVKLEESGGGLVQAGRSLRLSCAASEHTFSSHVMGWFRQAPGKERE |
| | SVAVIGWRDISTSYADSVKGRFTISRDNAKKTLYLQMNSLKPEDTAV |
| | YYCAARRIDAADFDSWGQGTQVTVSSGGGGSGGGGSGGGGSGGGG |
| | SGGGGSAVQLVESGGGLVQAGDSLRLTCTASGRAFSTYFMAWFRQ |
| | APGKEREFVAGIAWSGGSTAYADSVKGRFTISRDNAKNTVYLQMNS |
| | LKSEDTAVYYCASRGIEVEEFGAWGQGTQVTVSS |
| 3749 | AVQLVESGGGLVQAGDSLRLTCTASGRAFSTYFMAWFRQAPGKERE |
| | FVAGIAWSGGSTAYADSVKGRFTISRDNAKNTVYLQMNSLKSEDTA |
| | VYYCASRGIEVEEFGAWGQGTQVTVSSGGGGSGGGGSQVKLEESGG |
| | GLVQAGRSLRLSCAASEHTFSSHVMGWFRQAPGKERESVAVIGWRD |
| | ISTSYADSVKGRFTISRDNAKKTLYLQMNSLKPEDTAVYYCAARRID |
| | AADFDSWGQGTQVTVSS |
| 3750 | AVQLVESGGGLVQAGDSLRLTCTASGRAFSTYFMAWFRQAPGKERE |
| | FVAGIAWSGGSTAYADSVKGRFTISRDNAKNTVYLQMNSLKSEDTA |
| | VYYCASRGIEVEEFGAWGQGTQVTVSSGGGGSGGGGSGGGGSQVK |
| | LEESGGGLVQAGRSLRLSCAASEHTFSSHVMGWFRQAPGKERESVA |
| | VIGWRDISTSYADSVKGRFTISRDNAKKTLYLQMNSLKPEDTAVYYC |
| | AARRIDAADFDSWGQGTQVTVSS |
| 3751 | APGKEREFVAGIAWSGGSTAYADSVKGRFTISRDNAKNTVYLQMNS |
| | LKSEDTAVYYCASRGIEVEEFGAWGQGTQVTVSSGGGGSGGGGSGG |
| | GGSGGGGSQVKLEESGGGLVQAGRSLRLSCAASEHTFSSHVMGWFR |
| | QAPGKERESVAVIGWRDISTSYADSVKGRFTISRDNAKKTLYLQMNS |
| | LKPEDTAVYYCAARRIDAADFDSWGQGTQVTVSS |
| 3752 | EVQLVESGGGMVQAGDSLRLSCVQSTYTVNSDVMGWFRQAPGKER |
| | EFVGAIMWNDGITYLQDSVKGRFTIFRDNAKNTVYLQMNSLKLEDT |
| | AVYYCAASKGRYSEYEYWGQGTQVTVSSGGGGSQVKLEESGGRLV |
| | QPRGSLRLSCAGSGRTFSTYGMAWFRQAPGKEREFVASKASMNYSG |
| | RTYYADSVKGRFTIARDNAKNMVFLQMNNLKPEDTAVYYCAAGTG |
| | CSTYGCFDAQIIDYWGKGTLVTVSS |
| 3753 | EVQLVESGGGMVQAGDSLRLSCVQSTYTVNSDVMGWFRQAPGKER |
| | EFVGAIMWNDGITYLQDSVKGRFTIFRDNAKNTVYLQMNSLKLEDT |
| | AVYYCAASKGRYSEYEYWGQGTQVTVSSGGGGSGGGGSGGGGSQ |
| | VKLEESGGRLVQPRGSLRLSCAGSGRTFSTYGMAWFRQAPGKEREF |
| | VASKASMNYSGRTYYADSVKGRFTIARDNAKNMVFLQMNNLKPED |
| | TAVYYCAAGTGCSTYGCFDAQIIDYWGKGTLVTVSS |
| 3754 | EVQLVESGGGMVQAGDSLRLSCVQSTYTVNSDVMGWFRQAPGKER |
| | EFVGAIMWNDGITYLQDSVKGRFTIFRDNAKNTVYLQMNSLKLEDT |
| | AVYYCAASKGRYSEYEYWGQGTQVTVSSGGGGSGGGGSGGGGSG |
| | GGGSGGGGSQVKLEESGGRLVQPRGSLRLSCAGSGRTFSTYGMAWF |
| | RQAPGKEREFVASKASMNYSGRTYYADSVKGRFTIARDNAKNMVF |
| | LQMNNLKPEDTAVYYCAAGTGCSTYGCFDAQIIDYWGKGTLVTVSS |
| 3755 | EVQLVESGGGMVQAGDSLRLSCVQSTYTVNSDVMGWFRQAPGKER |
| | EFVGAIMWNDGITYLQDSVKGRFTIFRDNAKNTVYLQMNSLKLEDT |
| | AVYYCAASKGRYSEYEYWGQGTQVTVSSGGGGSGGGGSQVKLEES |
| | GGRLVQPRGSLRLSCAGSGRTFSTYGMAWFRQAPGKEREFVASKAS |
| | MNYSGRTYYADSVKGRFTIARDNAKNMVFLQMNNLKPEDTAVYYC |
| | AAGTGCSTYGCFDAQIIDYWGKGTLVTVSS |
| 3756 | EVQLVESGGGMVQAGDSLRLSCVQSTYTVNSDVMGWFRQAPGKER |
| | EFVGAIMWNDGITYLQDSVKGRFTIFRDNAKNTVYLQMNSLKLEDT |
| | AVYYCAASKGRYSEYEYWGQGTQVTVSSGGGGSGGGGSGGGGSQ |
| | VKLEESGGRLVQPRGSLRLSCAGSGRTFSTYGMAWFRQAPGKEREF |
| | VASKASMNYSGRTYYADSVKGRFTIARDNAKNMVFLQMNNLKPED |
| | TAVYYCAAGTGCSTYGCFDAQIIDYWGKGTLVTVSS |
| 3757 | EVQLVESGGGMVQAGDSLRLSCVQSTYTVNSDVMGWFRQAPGKER |
| | EFVGAIMWNDGITYLQDSVKGRFTIFRDNAKNTVYLQMNSLKLEDT |
| | AVYYCAASKGRYSEYEYWGQGTQVTVSSGGGGSGGGGSGGGGSG |
| | GGGSQVKLEESGGRLVQPRGSLRLSCAGSGRTFSTYGMAWFRQAPG |
| | KEREFVASKASMNYSGRTYYADSVKGRFTIARDNAKNMVFLQMNN |
| | LKPEDTAVYYCAAGTGCSTYGCFDAQIIDYWGKGTLVTVSS |
| 3758 | QVKLEESGGRLVQPRGSLRLSCAGSGRTFSTYGMAWFRQAPGKERE |
| | FVASKASMNYSGRTYYADSVKGRFTIARDNAKNMVFLQMNNLKPE |
| | DTAVYYCAAGTGCSTYGCFDAQIIDYWGKGTLVTVSSGGGGSQVKL |
| | EESGGGLVQAGGSLRLSCAASGGTLSKNTVAWVRQAPGKERGFVTS |
| | ITCDGRTTYYANSVNGRFPINRNNAENLVVLQMNSLKPDDTALYYC |
| | AAYRKSIMSIQPDYWGQGTQVTVSS |
| 3759 | QVKLEESGGRLVQPRGSLRLSCAGSGRTFSTYGMAWFRQAPGKERE |
| | FVASKASMNYSGRTYYADSVKGRFTIARDNAKNMVFLQMNNLKPE |
| | DTAVYYCAAGTGCSTYGCFDAQIIDYWGKGTLVTVSSGGGGSGGG |
| | GSGGGGSQVKLEESGGGLVQAGGSLRLSCAASGGTLSKNTVAWVR |
| | QAPGKERGFVTSITCDGRTTYYANSVNGRFPINRNNAENLVVLQMN |
| | SLKPDDTALYYCAAYRKSIMSIQPDYWGQGTQVTVSS |
| 3760 | QVKLEESGGRLVQPRGSLRLSCAGSGRTFSTYGMAWFRQAPGKERE |
| | FVASKASMNYSGRTYYADSVKGRFTIARDNAKNMVFLQMNNLKPE |
| | DTAVYYCAAGTGCSTYGCFDAQIIDYWGKGTLVTVSSGGGGSGGG |
| | GSGGGGSGGGGSGGGGSQVKLEESGGGLVQAGGSLRLSCAASGGTL |
| | SKNTVAWVRQAPGKERGFVTSITCDGRTTYYANSVNGRFPINRNNA |
| | ENLVVLQMNSLKPDDTALYYCAAYRKSIMSIQPDYWGQGTQVTVSS |
| 3761 | QVKLEESGGRLVQPRGSLRLSCAGSGRTFSTYGMAWFRQAPGKERE |
| | FVASKASMNYSGRTYYADSVKGRFTIARDNAKNMVFLQMNNLKPE |
| | DTAVYYCAAGTGCSTYGCFDAQIIDYWGKGTLVTVSSGGGGSGGG |
| | GSQVKLEESGGGLVQAGGSLRLSCAASGGTLSKNTVAWVRQAPGK |
| | ERGFVTSITCDGRTTYYANSVNGRFPINRNNAENLVVLQMNSLKPDD |
| | TALYYCAAYRKSIMSIQPDYWGQGTQVTVSS |
| 3762 | QVKLEESGGRLVQPRGSLRLSCAGSGRTFSTYGMAWFRQAPGKERE |
| | FVASKASMNYSGRTYYADSVKGRFTIARDNAKNMVFLQMNNLKPE |
| | DTAVYYCAAGTGCSTYGCFDAQIIDYWGKGTLVTVSSGGGGSGGG |
| | GSGGGGSQVKLEESGGGLVQAGGSLRLSCAASGGTLSKNTVAWVR |
| | QAPGKERGFVTSITCDGRTTYYANSVNGRFPINRNNAENLVVLQMN |
| | SLKPDDTALYYCAAYRKSIMSIQPDYWGQGTQVTVSS |
| 3763 | QVKLEESGGRLVQPRGSLRLSCAGSGRTFSTYGMAWFRQAPGKERE |
| | FVASKASMNYSGRTYYADSVKGRFTIARDNAKNMVFLQMNNLKPE |
| | DTAVYYCAAGTGCSTYGCFDAQIIDYWGKGTLVTVSSGGGGSGGG |
| | GSGGGGGGGGSQVKLEESGGGLVQAGGSLRLSCAASGGTLSKNTV |
| | AWVRQAPGKERGFVTSITCDGRTTYYANSVNGRFPINRNNAENLVV |
| | LQMNSLKPDDTALYYCAAYRKSIMSIQPDYWGQGTQVTVSS |
| 3764 | QVKLEESGGGLVQAGGSLRLSCAASGGTLSKNTVAWVRQAPGKER |
| | GFVTSITCDGRTTYYANSVNGRFPINRNNAENLVVLQMNSLKPDDTA |
| | LYYCAAYRKSIMSIQPDYWGQGTQVTVSSGGGGSQVQLVESGGGLV |
| | QAGGSLRLSCAASGGTLSKNTVAWFRQAPGKERGFVASITWDGRTT |
| | YYADSVKGRFTISRDNAKNTVYLQMNSLKPEDTAVYVCADLGKWP |
| | AGPADYWGQGTQVTVSS |
| 3765 | QVKLEESGGGLVQAGGSLRLSCAASGGTLSKNTVAWVRQAPGKER |
| | GFVTSITCDGRTTYYANSVNGRFPINRNNAENLVVLQMNSLKPDDTA |
| | LYYCAAYRKSIMSIQPDYWGQGTQVTVSSGGGGSGGGGSGGGGSQ |
| | VQLVESGGGLVQAGGSLRLSCAASGGTLSKNTVAWFRQAPGKERGF |
| | VASITWDGRTTYYADSVKGRFTISRDNAKNTVYLQMNSLKPEDTAV |
| | YVCADLGKWPAGPADYWGQGTQVTVSS |
| 3766 | QVKLEESGGGLVQAGGSLRLSCAASGGTLSKNTVAWVRQAPGKER |
| | GFVTSITCDGRTTYYANSVNGRFPINRNNAENLVVLQMNSLKPDDTA |
| | LYYCAAYRKSIMSIQPDYWGQGTQVTVSSGGGGSGGGGSGGGGSG |
| | GGGSGGGGSQVQLVESGGGLVQAGGSLRLSCAASGGTLSKNTVAW |
| | FRQAPGKERGFVASITWDGRTTYYADSVKGRFTISRDNAKNTVYLQ |
| | MNSLKPEDTAVYVCADLGKWPAGPADYWGQGTQVTVSS |
| 3767 | QVKLEESGGGLVQAGGSLRLSCAASGGTLSKNTVAWVRQAPGKER |
| | GFVTSITCDGRTTYYANSVNGRFPINRNNAENLVVLQMNSLKPDDTA |
| | LYYCAAYRKSIMSIQPDYWGQGTQVTVSSGGGGSGGGGSQVQLVES |
| | GGGLVQAGGSLRLSCAASGGTLSKNTVAWFRQAPGKERGFVASITW |
| | DGRTTYYADSVKGRFTISRDNAKNTVYLQMNSLKPEDTAVYVCADL |
| | GKWPAGPADYWGQGTQVTVSS |
| 3768 | QVKLEESGGGLVQAGGSLRLSCAASGGTLSKNTVAWVRQAPGKER |
| | GFVTSITCDGRTTYYANSVNGRFPINRNNAENLVVLQMNSLKPDDTA |
| | LYYCAAYRKSIMSIQPDYWGQGTQVTVSSGGGGSGGGGSGGGGSQ |
| | VQLVESGGGLVQAGGSLRLSCAASGGTLSKNTVAWFRQAPGKERGF |
| | VASITWDGRTTYYADSVKGRFTISRDNAKNTVYLQMNSLKPEDTAV |
| | YVCADLGKWPAGPADYWGQGTQVTVSS |
| 3769 | QVKLEESGGGLVQAGGSLRLSCAASGGTLSKNTVAWVRQAPGKER |
| | GFVTSITCDGRTTYYANSVNGRFPINRNNAENLVVLQMNSLKPDDTA |
| | LYYCAAYRKSIMSIQPDYWGQGTQVTVSSGGGGSGGGGSGGGGSG |
| | GGGSQVQLVESGGGLVQAGGSLRLSCAASGGTLSKNTVAWFRQAP |
| | GKERGFVASITWDGRTTYYADSVKGRFTISRDNAKNTVYLQMNSLK |
| | PEDTAVYVCADLGKWPAGPADYWGQGTQVTVSS |
| 3770 | QVQLVESGGGLVQAGGSLRLSCAASGGTLSKNTVAWFRQAPGKER |
| | GFVASITWDGRTTYYADSVKGRFTISRDNAKNTVYLQMNSLKPEDT |
| | AVYVCADLGKWPAGPADYWGQGTQVTVSSGGGGSDVQLVESGGG |
| | LVQAGGSLRLSCAASGGTLSKNTVAWVRQAPGKERGFVTSITCDGR |
| | TTYYANSVKGRFPISRDNAENTVYLQMNSLKPEDTAGYVCADLGK |
| | WPAGSADYWGQGTHVTVSS |
| 3771 | QVQLVESGGGLVQAGGSLRLSCAASGGTLSKNTVAWFRQAPGKER |
| | GFVASITWDGRTTYYADSVKGRFTISRDNAKNTVYLQMNSLKPEDT |
| | AVYVCADLGKWPAGPADYWGQGTQVTVSSGGGGSGGGGSGGGGS |
| | DVQLVESGGGLVQAGGSLRLSCAASGGTLSKNTVAWVRQAPGKER |
| | GFVTSITCDGRTTYYANSVKGRFPISRDNAENTVYLQMNSLKPEDTA |
| | GYVCADLGKWPAGSADYWGQGTHVTVSS |
| 3772 | QVQLVESGGGLVQAGGSLRLSCAASGGTLSKNTVAWFRQAPGKER |
| | GFVASITWDGRTTYYADSVKGRFTISRDNAKNTVYLQMNSLKPEDT |
| | AVYVCADLGKWPAGPADYWGQGTQVTVSSGGGGSGGGGSGGGGS |
| | GGGGSGGGGSDVQLVESGGGLVQAGGSLRLSCAASGGTLSKNTVA |
| | WVRQAPGKERGFVTSITCDGRTTYYANSVKGRFPISRDNAENTVYL |
| | QMNSLKPEDTAGYVCADLGKWPAGSADYWGQGTHVTVSS |
| 3773 | QVQLVESGGGLVQAGGSLRLSCAASGGTLSKNTVAWFRQAPGKER |
| | GFVASITWDGRTTYYADSVKGRFTISRDNAKNTVYLQMNSLKPEDT |
| | AVYVCADLGKWPAGPADYWGQGTQVTVSSGGGGSGGGGSDVQLV |
| | ESGGGLVQAGGSLRLSCAASGGTLSKNTVAWVRQAPGKERGFVTSI |
| | TCDGRTTYYANSVKGRFPISRDNAENTVYLQMNSLKPEDTAGYVCA |
| | DLGKWPAGSADYWGQGTHVTVSS |
| 3774 | QVQLVESGGGLVQAGGSLRLSCAASGGTLSKNTVAWFRQAPGKER |
| | GFVASITWDGRTTYYADSVKGRFTISRDNAKNTVYLQMNSLKPEDT |
| | AVYVCADLGKWPAGPADYWGQGTQVTVSSGGGGSGGGGSGGGGS |
| | DVQLVESGGGLVQAGGSLRLSCAASGGTLSKNTVAWVRQAPGKER |
| | GFVTSITCDGRTTYYANSVKGRFPISRDNAENTVYLQMNSLKPEDTA |
| | GYVCADLGKWPAGSADYWGQGTHVTVSS |
| 3775 | QVQLVESGGGLVQAGGSLRLSCAASGGTLSKNTVAWFRQAPGKER |
| | GFVASITWDGRTTYYADSVKGRFTISRDNAKNTVYLQMNSLKPEDT |
| | AVYVCADLGKWPAGPADYWGQGTQVTVSSGGGGSGGGGSGGGGS |
| | GGGGSDVQLVESGGGLVQAGGSLRLSCAASGGTLSKNTVAWVRQA |
| | PGKERGFVTSITCDGRTTYYANSVKGRFPISRDNAENTVYLQMNSLK |
| | PEDTAGYVCADLGKWPAGSADYWGQGTHVTVSS |

[0426] ii. Hinge/Spacer Domain

[0427] In some embodiments, a CAR of the instant disclosure comprises a hinge or spacer domain. In some embodiments, the hinge/spacer domain may comprise a truncated hinge/spacer domain (THD) the THD domain is a truncated version of a complete hinge/spacer domain (“CHD”). In some embodiments, an extracellular domain is from or derived from (e.g., comprises all or a fragment of) ErbB2, glycophorin A (GpA), CD2, CD3 delta, CD3 epsilon, CD3 gamma, CD4, CD7, CD8a, CD8[T CD11a (IT GAL), CD11b (IT GAM), CD11c (ITGAX), CD11d (IT GAD), CD18 (ITGB2), CD19 (B34), CD27 (TNFRSF7), CD28, CD28T, CD29 (ITGB1), CD30 (TNFRSF8), CD40 (TNFRSF5), CD48 (SLAMF2), CD49a (ITGA1), CD49d (ITGA4), CD49f (ITGA6), CD66a (CEACAM1), CD66b (CEACAM8), CD66c (CEACAM6), CD66d (CEACAM3), CD66e (CEACAM5), CD69 (CLEC2), CD79A (B-cell antigen receptor complex-associated alpha chain), CD79B (B-cell antigen receptor complex-associated beta chain), CD84 (SLAMIF5), CD96 (Tactile), CD 100 (SEMA4D), CD 103 (ITGAE), CD 134 (OX40), CD 137 (4-1BB), CD150 (SLAMF1), CD158A (KIR2DL1), CD158B1 (KIR2DL2), CD158B2 (KIR2DL3), CD158C (KIR3DP1), CD158D (KIRDL4), CD158F1 (KIR2DL5A), CD158F2 (KIR2DL5B), CD158K (KIR3DL2), CD160 (BY55), CD162 (SELPLG), CD226 (DNAM1), CD229 (SLAMF3), CD244 (SLAMF4), CD247 (CD3-zeta), CD258 (LIGHT), CD268 (BAFFR), CD270 (TNFSF14), CD272 (BTLA), CD276 (B7-H3), CD279 (PD-1), CD314 (NKG2D), CD319 (SLAMF7), CD335 (NK-p46), CD336 (NK-p44), CD337 (NK-p30), CD352 (SLAMF6), CD353 (SLAMF8), CD355 (CRT AM), CD357 (TNFRSF18), inducible T cell co-stimulator (ICOS), LFA-1 (CD11a/CD18), NKG2C, DAP-10, ICAM-1, NKp80 (KLRF1), IL-2R beta, IL-2R gamma, IL-7R alpha, LFA-1, SLAMF9, LAT, GADS (GrpL), SLP-76 (LCP2), PAG1/CBP, a CD83 ligand, Fc gamma receptor, MHC class 1 molecule, MHC class 2 molecule, a TNF receptor protein, an immunoglobulin protein, a cytokine receptor, an integrin, activating NK cell receptors, a Toll ligand receptor, and fragments or combinations thereof. A hinge or spacer domain may be derived either from a natural or from a synthetic source.

[0428] In some embodiments, a hinge or spacer domain is positioned between an antigen binding molecule (e.g., an scFv) and a transmembrane domain. In this orientation, the hinge/spacer domain provides distance between the antigen binding molecule and the surface of a cell membrane on which the CAR is expressed. In some embodiments, a hinge or spacer domain is from or derived from an immunoglobulin. In some embodiments, a hinge or spacer domain is selected from the hinge/spacer regions of IgG1, IgG2, IgG3, IgG4, IgA, IgD, IgE, IgM, or a fragment thereof. In some embodiments, a hinge or spacer domain comprises, is from, or is derived from the hinge/spacer region of CD8 alpha. In some embodiments, a hinge or spacer domain comprises, is from, or is derived from the hinge/spacer region of CD28. In some embodiments, a hinge or spacer domain comprises a fragment of the hinge/spacer region of CD8 alpha or a fragment of the hinge/spacer region of CD28, wherein the fragment is anything less than the whole hinge/spacer region. In some embodiments, the fragment of the CD8 alpha hinge/spacer region or the fragment of the CD28 hinge/spacer region comprises an amino acid sequence that excludes at least 1, at least 2, at least 3, at least 4, at least 5, at least 6, at least 7, at least 8, at least 9, at least 10, at least 11, at least 12, at least 13, at least 14, at least 15, at least 16, at least 17, at least 18, at least 19, or at least 20 amino acids at the N-terminus or C-Terminus, or both, of the CD8 alpha hinge/spacer region, or of the CD28 hinge/spacer region.

[0429] iii. Transmembrane Domain

[0430] The CAR of the present disclosure may further comprise a transmembrane domain and/or an intracellular signaling domain. The transmembrane domain may be designed to be fused to the extracellular domain of the CAR. It may similarly be fused to the intracellular domain of the CAR. In some embodiments, the transmembrane domain that naturally is associated with one of the domains in a CAR is used. In some instances, the transmembrane domain may be selected or modified (e.g., by an amino acid substitution) to avoid binding of such domains to the transmembrane domains of the same or different surface membrane proteins to minimize interactions with other members of the receptor complex. The transmembrane domain may be derived either from a natural or from a synthetic source. Where the source is natural, the domain may be derived from any membrane-bound or transmembrane protein.

[0431] Transmembrane regions may be derived from (i.e. comprise) a receptor tyrosine kinase (e.g., ErbB2), glycophorin A (GpA), 4-1BB/CD137, activating NK cell receptors, an immunoglobulin protein, B7-H3, BAFFR, BFAME (SEAMF8), BTEA, CD100 (SEMA4D), CD103, CD160 (BY55), CD18, CD19, CD19a, CD2, CD247, CD27, CD276 (B7-H3), CD28, CD29, CD3 delta, CD3 epsilon, CD3 gamma, CD30, CD4, CD40, CD49a, CD49D, CD49f, CD69, CD7, CD84, CD8alpha, CD8beta, CD96 (Tactile), CD11a, CD11b, CD11c, CD11d, CDS, CEACAM1, CRT AM, cytokine receptor, DAP-10, DNAM1 (CD226), Fc gamma receptor, GADS, GITR, HVEM (EIGHTR), IA4, ICAM-1, ICAM-1, Ig alpha (CD79a), IE-2R beta, IE-2R gamma, IE-7R alpha, inducible T cell costimulator (ICOS), integrins, ITGA4, ITGA4, ITGA6, IT GAD, ITGAE, ITGAE, IT GAM, ITGAX, ITGB2, ITGB7, ITGB1, KIRDS2, EAT, LFA-1, LFA-1, a ligand that specifically binds with CD83, LIGHT, LIGHT, LTBR, Ly9 (CD229), lymphocyte function-associated antigen-1 (LFA-1; CD1-1a/CD18), MHC class 1 molecule, NKG2C, NKG2D, NKp30, NKp44, NKp46, NKp80 (KLRF1), OX-40, PAG/Cbp, programmed death-1 (PD-1), PSGL1, SELPLG (CD162), Signaling Lymphocytic Activation Molecules (SLAM proteins), SLAM (SLAMF1; CD150; IPO-3), SLAMF4 (CD244; 2B4), SLAMF6 (NTB-A; Lyl08), SLAMF7, SLP-76, TNF receptor proteins, TNFR2, TNFSFi4, a Toll ligand receptor, TRANCE/RANKL, VLA1, or VLA-6, or a fragment, truncation, or a combination thereof.

[0432] In some embodiments, suitable intracellular signaling domain include, but are not limited to, activating Macrophage/Myeloid cell receptors CSFR1, MYD88, CD14, TIE2, TLR4, CR3, CD64, TREM2, DAP10, DAP12, CD169, DECTIN1, CD206, CD47, CD163, CD36, MARCO, TIM4, MERTK, F4/80, CD91, CiQR, LOX-1, CD68, SRA, BAI-1, ABCA7, CD36, CD31, Lactoferrin, or a fragment, truncation, or combination thereof.

[0433] In some embodiments, a receptor tyrosine kinase may be derived from (e.g., comprise) Insulin receptor (InsR), Insulin-like growth factor I receptor (IGF1R), Insulin receptor-related receptor (IRR), platelet derived growth factor receptor alpha (PDGFRa), platelet derived growth factor receptor beta (PDGFRfi). KIT proto-oncogene receptor tyrosine kinase (Kit), colony stimulating factor 1 receptor (CSFR), fms related tyrosine kinase 3 (FLT3), fms related tyrosine kinase 1 (VEGFR-1), kinase insert domain receptor (VEGFR-2), fms related tyrosine kinase 4 (VEGFR-3), fibroblast growth factor receptor 1 (FGFR1), fibroblast growth factor receptor 2 (FGFR2), fibroblast growth factor receptor 3 (FGFR3), fibroblast growth factor receptor 4 (FGFR4), protein tyrosine kinase 7 (CCK4), neurotrophic receptor tyrosine kinase 1 (trkA), neurotrophic receptor tyrosine kinase 2 (trkB), neurotrophic receptor tyrosine kinase 3 (trkC), receptor tyrosine kinase like orphan receptor 1 (ROR1), receptor tyrosine kinase like orphan receptor 2 (ROR2), muscle associated receptor tyrosine kinase (MuSK), MET proto-oncogene, receptor tyrosine kinase (MET), macrophage stimulating 1 receptor (Ron), AXL receptor tyrosine kinase (Axl), TYR03 protein tyrosine kinase (Tyro3), MER proto-oncogene, tyrosine kinase (Mer), tyrosine kinase with immunoglobulin like and EGF like domains 1 (TIE1), TEK receptor tyrosine kinase (TIE2), EPH receptor A1 (EphA1), EPH receptor A2 (EphA2), (EPH receptor A3) EphA3, EPH receptor A4 (EphA4), EPH receptor A5 (EphA5), EPH receptor A6 (EphA6), EPH receptor A7 (EphA7), EPH receptor A8 (EphA8), EPH receptor A10 (EphAlO), EPH receptor B1 (EphB1), EPH receptor B2 (EphB2), EPH receptor B3 (EphB3), EPH receptor B4 (EphB4), EPH receptor B6 (EphB6), ret proto oncogene (Ret), receptor-like tyrosine kinase (RYK), discoidin domain receptor tyrosine kinase 1 (DDR1), discoidin domain receptor tyrosine kinase 2 (DDR2), c-ros oncogene 1, receptor tyrosine kinase (ROS), apoptosis associated tyrosine kinase (Lmr1), lemur tyrosine kinase 2 (Lmr2), lemur tyrosine kinase 3 (Lmr3), leukocyte receptor tyrosine kinase (LTK), ALK receptor tyrosine kinase (ALK), or serine/threonine/tyrosine kinase 1 (STYK1).

[0434] iv. Costimulatory Domain

[0435] In certain embodiments, the CAR comprises a costimulatory domain. In some embodiments, the costimulatory domain comprises 4-1BB (CD137), CD28, or both, and/or an intracellular T cell signaling domain. In a preferred embodiment, the costimulatory domain is human CD28, human 4-1BB, or both, and the intracellular T cell signaling domain is human CD3 zeta (ζ). 4-1BB, CD28, CD3 zeta may comprise less than the whole 4-1BB, CD28 or CD3 zeta, respectively. Chimeric antigen receptors may incorporate costimulatory (signaling) domains to increase their potency. See U.S. Pat. Nos. 7,741,465, and 6,319,494, as well as Krause et al. and Finney et al. (supra), Song et al., Blood 119:696-706 (2012); Kalos et al., Sci Transl. Med. 3:95 (2011); Porter et al., N. Engl. J. Med. 365:725-33 (2011), and Gross et al., Amur. Rev. Pharmacol. Toxicol. 56:59-83 (2016).

[0436] In some embodiments, a costimulatory domain comprises the amino acid sequence of SEQ ID NO: 3544 or 3546.

[0437] v. Intracellular Signalling Domain

[0438] The intracellular (signaling) domain of the engineered T cells disclosed herein may provide signaling to an activating domain, which then activates at least one of the normal effector functions of the immune cell. Effector function of a T cell, for example, may be cytolytic activity or helper activity including the secretion of cytokines.

[0439] In some embodiments, suitable intracellular signaling domain include (e.g., comprise), but are not limited to 4-1BB/CD137, activating NK cell receptors, an Immunoglobulin protein, B7-H3, BAFFR, BLAME (SLAMF8), BTLA, CD100 (SEMA4D), CD103, CD160 (BY55), CD18, CD19, CD 19a, CD2, CD247, CD27, CD276 (B7-H3), CD28, CD29, CD3 delta, CD3 epsilon, CD3 gamma, CD30, CD4, CD40, CD49a, CD49D, CD49f, CD69, CD7, CD84, CD8alpha, CD8beta, CD96 (Tactile), CD11a, CD11b, CD11c, CD11d, CDS, CEACAM1, CRT AM, cytokine receptor, DAP-10, DNAM1 (CD226), Fc gamma receptor, GADS, GITR, HVEM (LIGHTR), IA4, ICAM-1, Ig alpha (CD79a), IL-2R beta, IL-2R gamma, IL-7R alpha, inducible T cell costimulator (ICOS), integrins, ITGA4, ITGA6, ITGAD, ITGAE, ITGAL, ITGAM, ITGAX, ITGB2, ITGB7, ITGB1, KIRDS2, LAT, LFA-1, ligand that specifically binds with CD83, LIGHT, LTBR, Ly9 (CD229), Lyl08, lymphocyte function-associated antigen-1 (LFA-1; CD1-1a/CD18), MHC class 1 molecule, NKG2C, NKG2D, NKp30, NKp44, NKp46, NKp80 (KLRF1), OX-40, PAG/Cbp, programmed death-1 (PD-1), PSGL1, SELPLG (CD162), Signaling Lymphocytic Activation Molecules (SLAM proteins), SLAM (SLAMF1; CD150; IPO-3), SLAMF4 (CD244; 2B4), SLAMF6 (NTB-A), SLAMF7, SLP-76, TNF receptor proteins, TNFR2, TNFSF14, a Toll ligand receptor, TRANCE/RANKL, VLA1, or VLA-6, or a fragment, truncation, or a combination thereof.

[0440] CD3 is an element of the T cell receptor on native T cells, and has been shown to be an important intracellular activating element in CARs. In some embodiments, the CD3 is CD3 zeta. In some embodiments, the activating domain comprises an amino acid sequence at least about 60%, at least about 65%, at least about 70%, at least about 75%, at least about 80%, at least about 85%, at least about 90%, at least about 95%, at least about 96%, at least about 97%, at least about 98%, at least about 99%, or about 100% identical to the polypeptide sequence of SEQ ID NO: 3545.

[0441] b. T-Cell Receptors (TCR)

[0442] TCRs are described using the International Immunogenetics (IMGT) TCR nomenclature, and links to the IMGT public database of TCR sequences. Native alpha-beta heterodimeric TCRs have an alpha chain and a beta chain. Broadly, each chain may comprise variable, joining and constant regions, and the beta chain also usually contains a short diversity region between the variable and joining regions, but this diversity region is often considered as part of the joining region. Each variable region may comprise three CDRs (Complementarity Determining Regions) embedded in a framework sequence, one being the hypervariable region named CDR3. There are several types of alpha chain variable (Vα) regions and several types of beta chain variable (Vβ) regions distinguished by their framework, CDR1 and CDR2 sequences, and by a partly defined CDR3 sequence. The Vα types are referred to in IMGT nomenclature by a unique TRAV number. Thus “TRAV21” defines a TCR Vα region having unique framework and CDR1 and CDR2 sequences, and a CDR3 sequence which is partly defined by an amino acid sequence which is preserved from TCR to TCR but which also includes an amino acid sequence which varies from TCR to TCR. In the same way, “TRBV5-1” defines a TCR V3 region having unique framework and CDR1 and CDR2 sequences, but with only a partly defined CDR3 sequence.

[0443] The joining regions of the TCR are similarly defined by the unique IMGT TRAJ and TRBJ nomenclature, and the constant regions by the IMGT TRAC and TRBC nomenclature.

[0444] The beta chain diversity region is referred to in IMGT nomenclature by the abbreviation TRBD, and, as mentioned, the concatenated TRBD/TRBJ regions are often considered together as the joining region.

[0445] The unique sequences defined by the IMGT nomenclature are widely known and accessible to those working in the TCR field. For example, they can be found in the IMGT public database. The “T cell Receptor Factsbook”, (2001) LeFranc and LeFranc, Academic Press, ISBN 0-12-441352-8 also discloses sequences defined by the IMGT nomenclature, but because of its publication date and consequent time-lag, the information therein sometimes needs to be confirmed by reference to the IMGT database.

[0446] Native TCRs exist in heterodimeric αβ or γδ forms. However, recombinant TCRs consisting of αα or ββ homodimers have previously been shown to bind to peptide MHC molecules. Therefore, the TCR of the invention may be a heterodimeric αβ TCR or may be an αα or RR homodimeric TCR.

[0447] For use in adoptive therapy, an αβ heterodimeric TCR may, for example, be transfected as full length chains having both cytoplasmic and transmembrane domains. In certain embodiments TCRs of the invention may have an introduced disulfide bond between residues of the respective constant domains, as described, for example, in WO 2006/000830.

[0448] TCRs of the invention, particularly alpha-beta heterodimeric TCRs, may comprise an alpha chain TRAC constant domain sequence and/or a beta chain TRBC1 or TRBC2 constant domain sequence. The alpha and beta chain constant domain sequences may be modified by truncation or substitution to delete the native disulfide bond between Cys4 of exon 2 of TRAC and Cys2 of exon 2 of TRBC1 or TRBC2. The alpha and/or beta chain constant domain sequence(s) may also be modified by substitution of cysteine residues for Thr 48 of TRAC and Ser 57 of TRBC1 or TRBC2, the said cysteines forming a disulfide bond between the alpha and beta constant domains of the TCR.

[0449] Binding affinity (inversely proportional to the equilibrium constant K_{D}) and binding half-life (expressed as T½) can be determined by any appropriate method. It will be appreciated that doubling the affinity of a TCR results in halving the K_{D}. T½ is calculated as ln 2 divided by the off-rate (koff). So doubling of T½ results in a halving in koff K_{D} and koff values for TCRs are usually measured for soluble forms of the TCR, i.e. those forms which are truncated to remove cytoplasmic and transmembrane domain residues. Therefore it is to be understood that a given TCR has an improved binding affinity for, and/or a binding half-life for the parental TCR if a soluble form of that TCR has the said characteristics. Preferably the binding affinity or binding half-life of a given TCR is measured several times, for example 3 or more times, using the same assay protocol, and an average of the results is taken.

[0450] Since the TCRs of the invention have utility in adoptive therapy, the invention includes a non-naturally occurring and/or purified and/or or engineered cell, especially a T-cell, presenting a TCR of the invention. There are a number of methods suitable for the transfection of T cells with nucleic acid (such as DNA, cDNA or RNA) encoding the TCRs of the invention (see for example Robbins et al., (2008) J Immunol. 180: 6116-6131). T cells expressing the TCRs of the invention will be suitable for use in adoptive therapy-based treatment of cancers such as those of the pancreas and liver. As will be known to those skilled in the art, there are a number of suitable methods by which adoptive therapy can be carried out (see for example Rosenberg et al., (2008) Nat Rev Cancer 8(4): 299-308).

[0451] As is well-known in the art TCRs of the invention may be subject to post-translational modifications when expressed by transfected cells. Glycosylation is one such modification, which may comprise the covalent attachment of oligosaccharide moieties to defined amino acids in the TCR chain. For example, asparagine residues, or serine/threonine residues are well-known locations for oligosaccharide attachment. The glycosylation status of a particular protein depends on a number of factors, including protein sequence, protein conformation and the availability of certain enzymes. Furthermore, glycosylation status (i.e oligosaccharide type, covalent linkage and total number of attachments) can influence protein function. Therefore, when producing recombinant proteins, controlling glycosylation is often desirable. Glycosylation of transfected TCRs may be controlled by mutations of the transfected gene (Kuball J et al. (2009), J Exp Med 206(2):463-475). Such mutations are also encompassed in this invention.

[0452] A TCR may be specific for an antigen in the group MAGE-A1, MAGE-A2, MAGE-A3, MAGE-A4, MAGE-A5, MAGE-A6, MAGE-A7, MAGE-A8, MAGE-A9, MAGE-A10, MAGE-All, MAGE-A12, MAGE-A13, GAGE-1, GAGE-2, GAGE-3, GAGE-4, GAGE-5, GAGE-6, GAGE-7, GAGE-8, BAGE-1, RAGE-1, LB33/MUM-1, PRAME, NAG, MAGE-Xp2 (MAGE-B2), MAGE-Xp3 (MAGE-B3), MAGE-Xp4 (AGE-B4), tyrosinase, brain glycogen phosphorylase, Melan-A, MAGE-C1, MAGE-C2, NY-ESO-1, LAGE-1, SSX-1, SSX-2 (HOM-MEL-40), SSX-1, SSX-4, SSX-5, SCP-1, CT-7, alpha-actinin-4, Bcr-Abl fusion protein, Casp-8, beta-catenin, cdc27, cdk4, cdkn2a, coa-1, dek-can fusion protein, EF2, ETV6-AML1 fusion protein, LDLR-fucosyltransferaseAS fusion protein, HLA-A2, HLA-All, hsp70-2, KIAAO205, Mart2, Mum-2, and 3, neo-PAP, myosin class I, OS-9, pml-RARa fusion protein, PTPRK, K-ras, N-ras, Triosephosphate isomeras, GnTV, Herv-K-mel, Lage-1, Mage-C2, NA-88, Lage-2, SP17, and TRP2-Int2, (MART-I), gp100 (Pmel 17), TRP-1, TRP-2, MAGE-1, MAGE-3, p15(58), CEA, NY-ESO (LAGE), SCP-1, Hom/Mel-40, p53, H-Ras, HER-2/neu, BCR-ABL, E2A-PRL, H4-RET, IGH-IGK, MYL-RAR, Epstein Barr virus antigens, EBNA, human papillomavirus (HPV) antigens E6 and E7, TSP-180, MAGE-4, MAGE-5, MAGE-6, p185erbB2, p180erbB-3, c-met, nm-23H1, PSA, TAG-72-4, CA 19-9, CA 72-4, CAM 17.1, NuMa, K-ras, beta-catenin, CDK4, Mum-1, p16, TAGE, PSMA, PSCA, CT7, telomerase, 43-9F, 5T4, 791Tgp72, α-fetoprotein, 13HCG, BCA225, BTAA, CA 125, CA 15-3 (CA 27.29\BCAA), CA 195, CA 242, CA-50, CAM43, CD68\KP1, CO-029, FGF-5, G250, Ga733 (EpCAM), HTgp-175, M344, MA-50, MG7-Ag, MOV18, NB\170K, NY-CO-1, RCAS1, SDCCAG16, TA-90 (Mac-2 binding protein\cyclophilin C-associated protein), TAAL6, TAG72, TLP, and TPS.

[0453] c. B-Cell Receptors (BCR)

[0454] B-cell receptors (BCRs) or B-cell antigen receptors are immunoglobulin molecules that form a type I transmembrane protein on the surface of a B cell. A BCR is capable of transmitting activatory signal into a B cell following recognition of a specific antigen. Prior to binding of a B cell to an antigen, the BCR will remain in an unstimulated or “resting” stage. Binding of an antigen to a BCR leads to signaling that initiates a humoral immune response.

[0455] A BCR is expressed by mature B cells. These B cells work with immunoglobulins (Igs) in recognizing and tagging pathogens. The typical BCR comprises a membrane-bound immunoglobulin (e.g., mIgA, mIgD, mIgE, mIgG, and mIgM), along with associated and Iga/Igp (CD79a/CD79b) heterodimers (α/β). These membrane-bound immunoglobulins are tetramers consisting of two identical heavy and two light chains. Within the BCR, the membrane bound immunoglobulins is capable of responding to antigen binding by signal transmission across the plasma membrane leading to B cell activation and consequently clonal expansion and specific antibody production (Friess M et al. (2018), Front. Immunol. 2947(9)). The Igα/Igβ heterodimers is responsible for transducing signals to the cell interior.

[0456] A Igα/Igβ heterodimer signaling relies on the presence of immunoreceptor tyrosine-based activation motifs (ITAMs) located on each of the cytosolic tails of the heterodimers. ITAMs comprise two tyrosine residues separated by 9-12 amino acids (e.g., tyrosine, leucine, and/or valine). Upon binding of an antigen, the tyrosine of the BCR's ITAMs become phosphorylated by Src-family tyrosine kinases Blk, Fyn, or Lyn (Janeway C et al., Immunobiology: The Immune System in Health and Disease (Garland Science, 5th ed. 2001)).

[0457] d. Other Chimeric Proteins

[0458] In addition to the chimeric proteins provided above, the circular RNA polynucleotide may encode for a various number of other chimeric proteins available in the art. The chimeric proteins may include recombinant fusion proteins, chimeric mutant protein, or other fusion proteins.

[0459] B. Immune Modulatory Ligands

[0460] In some embodiments, the circular RNA polynucleotide encodes for an immune modulatory ligand. In certain embodiments, the immune modulatory ligand may be immunostimulatory; while in other embodiments, the immune modulatory ligand may be immunosuppressive.

[0461] a. Cytokines: Interferon, Chemokines, Interleukins, Growth Factor & Others

[0462] In some embodiments, the circular RNA polynucleotide encodes for a cytokine. In some embodiments, the cytokine comprises a chemokine, interferon, interleukin, lymphokine, and tumor necrosis factor. Chemokines are chemotactic cytokine produced by a variety of cell types in acute and chronic inflammation that mobilizes and activates white blood cells. An interferon comprises a family of secreted α-helical cytokines induced in response to specific extracellular molecules through stimulation of TLRs (Borden, Molecular Basis of Cancer (Fourth Edition) 2015). Interleukins are cytokines expressed by leukocytes.

[0463] Descriptions and/or amino acid sequences of IL-2, IL-7, IL-10, IL-12, IL-15, IL-18, IL-270, IFNγ, and/or TGFβ1 are provided herein and at the www.uniprot.org database at accession numbers: P60568 (IL-2), P29459 (IL-12A), P29460 (IL-12B), P13232 (IL-7), P22301 (IL-10), P40933 (IL-15), Q14116 (IL-18), Q14213 (IL-270), P01579 (IFNγ), and/or P01137 (TGFβ1).

[0464] C. Transcription Factors

[0465] Regulatory T cells (Treg) are important in maintaining homeostasis, controlling the magnitude and duration of the inflammatory response, and in preventing autoimmune and allergic responses.

[0466] In general, Tregs are thought to be mainly involved in suppressing immune responses, functioning in part as a “self-check” for the immune system to prevent excessive reactions. In particular, Tregs are involved in maintaining tolerance to self-antigens, harmless agents such as pollen or food, and abrogating autoimmune disease.

[0467] Tregs are found throughout the body including, without limitation, the gut, skin, lung, and liver. Additionally, Treg cells may also be found in certain compartments of the body that are not directly exposed to the external environment such as the spleen, lymph nodes, and even adipose tissue. Each of these Treg cell populations is known or suspected to have one or more unique features and additional information may be found in Lehtimaki and Lahesmaa, Regulatory T cells control immune responses through their non-redundant tissue specific features, 2013, FRONTIERS IN IMMUNOL., 4(294): 1-10, the disclosure of which is hereby incorporated in its entirety.

[0468] Typically, Tregs are known to require TGF-β and IL-2 for proper activation and development. Tregs, expressing abundant amounts of the IL-2 receptor (IL-2R), are reliant on IL-2 produced by activated T cells. Tregs are known to produce both IL-10 and TGF-β, both potent immune suppressive cytokines. Additionally, Tregs are known to inhibit the ability of antigen presenting cells (APCs) to stimulate T cells. One proposed mechanism for APC inhibition is via CTLA-4, which is expressed by Foxp3+ Tregs. It is thought that CTLA-4 may bind to B7 molecules on APCs and either block these molecules or remove them by causing internalization resulting in reduced availability of B7 and an inability to provide adequate co-stimulation for immune responses. Additional discussion regarding the origin, differentiation and function of Tregs may be found in Dhamne et al., Peripheral and thymic Foxp3+ regulatory T cells in search of origin, distinction, and function, 2013, Frontiers in Immunol., 4 (253): 1-11, the disclosure of which is hereby incorporated in its entirety.

[0469] D. Checkpoint Inhibitors & Agonists

[0470] As provided herein, in certain embodiments, the coding element of the circular RNA encodes for one or more checkpoint inhibitors or agonists.

[0471] In some embodiments, the immune checkpoint inhibitor is an inhibitor of Programmed Death-Ligand 1 (PD-L1, also known as B7-H1, CD274), Programmed Death 1 (PD-1), CTLA-4, PD-L2 (B7-DC, CD273), LAG3, TIM3, 2B4, A2aR, B7H1, B7H3, B7H4, BTLA, CD2, CD27, CD28, CD30, CD40, CD70, CD80, CD86, CD137, CD160, CD226, CD276, DR3, GAL9, GITR, HAVCR2, HVEM, IDO1, IDO2, ICOS (inducible T cell costimulator), KIR, LAIR1, LIGHT, MARCO (macrophage receptor with collageneous structure), PS (phosphatidylserine), OX-40, SLAM, TIGHT, VISTA, VTCN1, or any combinations thereof. In some embodiments, the immune checkpoint inhibitor is an inhibitor of IDO1, CTLA4, PD-1, LAG3, PD-L1, TIM3, or combinations thereof. In some embodiments, the immune checkpoint inhibitor is an inhibitor of PD-L1. In some embodiments, the immune checkpoint inhibitor is an inhibitor of PD-1. In some embodiments, the immune checkpoint inhibitor is an inhibitor of CTLA-4. In some embodiments, the immune checkpoint inhibitor is an inhibitor of LAG3. In some embodiments, the immune checkpoint inhibitor is an inhibitor of TIM3. In some embodiments, the immune checkpoint inhibitor is an inhibitor of IDO1.

[0472] As described herein, at least in one aspect, the invention encompasses the use of immune checkpoint antagonists. Such immune checkpoint antagonists include antagonists of immune checkpoint molecules such as Cytotoxic T-Lymphocyte Antigen 4 (CTLA-4), Programmed Cell Death Protein 1 (PD-1), Programmed Death-Ligand 1 (PDL-1), Lymphocyte-activation gene 3 (LAG-3), and T-cell immunoglobulin and mucin domain 3 (TIM-3). An antagonist of CTLA-4, PD-1, PDL-1, LAG-3, or TIM-3 interferes with CTLA-4, PD-1, PDL-1, LAG-3, or TIM-3 function, respectively. Such antagonists of CTLA-4, PD-1, PDL-1, LAG-3, and TIM-3 can include antibodies which specifically bind to CTLA-4, PD-1, PDL-1, LAG-3, and TIM-3, respectively and inhibit and/or block biological activity and function.

[0473] E. Others

[0474] In some embodiments, the payload encoded within one or more of the coding elements is a hormone, FC fusion protein, anticoagulant, blood clotting factor, protein associated with deficiencies and genetic disease, a chaperone protein, an antimicrobial protein, an enzyme (e.g., metabolic enzyme), a structural protein (e.g., a channel or nuclear pore protein), protein variant, small molecule, antibody, nanobody, an engineered non-body antibody, or a combination thereof.

### 4. Additional Accessory Elements (Sequence Elements)

[0475] As described in this invention, the circular RNA polynucleotide, linear RNA polynucleotide, and/or DNA template may further comprise of accessory elements. In certain embodiments, these accessory elements may be included within the sequences of the circular RNA, linear RNA polynucleotide and/or DNA template for enhancing circularization, translation or both. Accessory elements are sequences, in certain embodiments that are located with specificity between or within the enhanced intron elements, enhanced exon elements, or core functional element of the respective polynucleotide. As an example, but not intended to be limiting, an accessory element includes, a IRES transacting factor region, a miRNA binding site, a restriction site, an RNA editing region, a structural or sequence element, a granule site, a zip code element, an RNA trafficking element or another specialized sequence as found in the art that enhances promotes circularization and/or translation of the protein encoded within the circular RNA polynucleotide.

[0476] A. IRES Transacting Factors

[0477] In certain embodiments, the accessory element comprises an IRES transacting factor (ITAF) region. In some embodiments, the IRES transacting factor region modulates the initiation of translation through binding to PCBP1-PCBP4 (polyC binding protein), PABP1 (polyA binding protein), PTB (polyprimidine tract binding), Argonaute protein family, HNRNPK (Heterogeneous nuclear ribonucleoprotein K protein), or La protein. In some embodiments, the IRES transacting factor region comprises a polyA, polyC, polyAC, or polyprimidine track.

[0478] In some embodiments, the ITAF region is located within the core functional element. In some embodiments, the ITAF region is located within the TIE.

[0479] B. miRNA Binding Sites

[0480] In certain embodiments, the accessory element comprises a miRNA binding site. In some embodiments the miRNA binding site is located within the 5′ enhanced intron element, 5′ enhanced exon element, core functional element, 3′ enhanced exon element, and/or 3′ enhanced intron element.

[0481] In some embodiments, wherein the miRNA binding site is located within the spacer within the enhanced intron element or enhanced exon element. In certain embodiments, the miRNA binding site comprises the entire spacer regions.

[0482] In some embodiments, the 5′ enhanced intron element and 3′ enhanced intron elements each comprise identical miRNA binding sites. In another embodiment, the miRNA binding site of the 5′ enhanced intron element comprises a different, in length or nucleotides, miRNA binding site than the 3′ enhanced intron element. In one embodiment, the 5′ enhanced exon element and 3′ enhanced exon element comprise identical miRNA binding sites. In other embodiments, the 5′ enhanced exon element and 3′ enhanced exon element comprises different, in length or nucleotides, miRNA binding sites.

[0483] In some embodiments, the miRNA binding sites are located adjacent to each other within the circular RNA polynucleotide, linear RNA polynucleotide precursor, and/or DNA template. In certain embodiments, the first nucleotide of one of the miRNA binding sites follows the first nucleotide last nucleotide of the second miRNA binding site.

[0484] In some embodiments, the miRNA binding site is located within a translation initiation element (TIE) of a core functional element. In one embodiment, the miRNA binding site is located before, trailing or within an internal ribosome entry site (IRES). In another embodiment, the miRNA binding site is located before, trailing, or within an aptamer complex.

[0485] Incorporation of miRNA sequences within a circular RNA molecule can permit tissue-specific expression of a coding sequence within a core functional element. For example, in a circular RNA intended to express a protein in immune cells, miRNA binding sequences resulting in expression suppression in tissues such as the liver or kidney may be desired. Such miRNA binding sequences may be selected based on the cell or tissue expression of miRNAs.

[0486] The unique sequences defined by the miRNA nomenclature are widely known and accessible to those working in the microRNA field. For example, they can be found in the miRDB public database.

### 5. Production of Polynucleotides

[0487] The DNA templates provided herein can be made using standard techniques of molecular biology. For example, the various elements of the vectors provided herein can be obtained using recombinant methods, such as by screening cDNA and genomic libraries from cells, or by deriving the polynucleotides from a DNA template known to include the same.

[0488] The various elements of the DNA template provided herein can also be produced synthetically, rather than cloned, based on the known sequences. The complete sequence can be assembled from overlapping oligonucleotides prepared by standard methods and assembled into the complete sequence. See, e.g., Edge, Nature (1981) 292:756; Nambair et al., Science (1984) 223: 1299; and Jay et al., J. Biol. Chem. (1984) 259:631 1.

[0489] Thus, particular nucleotide sequences can be obtained from DNA template harboring the desired sequences or synthesized completely, or in part, using various oligonucleotide synthesis techniques known in the art, such as site-directed mutagenesis and polymerase chain reaction (PCR) techniques where appropriate. One method of obtaining nucleotide sequences encoding the desired DNA template elements is by annealing complementary sets of overlapping synthetic oligonucleotides produced in a conventional, automated polynucleotide synthesizer, followed by ligation with an appropriate DNA ligase and amplification of the ligated nucleotide sequence via PCR. See, e.g., Jayaraman et al., Proc. Natl. Acad. Sci. USA (1991) 88:4084-4088. Additionally, oligonucleotide-directed synthesis (Jones et al., Nature (1986) 54:75-82), oligonucleotide directed mutagenesis of preexisting nucleotide regions (Riechmann et al., Nature (1988) 332:323-327 and Verhoeyen et al., Science (1988) 239: 1534-1536), and enzymatic filling-in of gapped oligonucleotides using T4 DNA polymerase (Queen et al., Proc. Natl. Acad. Sci. USA (1989) 86: 10029-10033) can be used.

[0490] The precursor RNA provided herein can be generated by incubating a DNA template provided herein under conditions permissive of transcription of the precursor RNA encoded by the DNA template. For example, in some embodiments a precursor RNA is synthesized by incubating a DNA template provided herein that comprises an RNA polymerase promoter upstream of its 5′ duplex sequence and/or expression sequences with a compatible RNA polymerase enzyme under conditions permissive of in vitro transcription. In some embodiments, the DNA template is incubated inside of a cell by a bacteriophage RNA polymerase or in the nucleus of a cell by host RNA polymerase II.

[0491] In certain embodiments, provided herein is a method of generating precursor RNA by performing in vitro transcription using a DNA template provided herein as a template (e.g., a vector provided herein with an RNA polymerase promoter positioned upstream of the 5′ duplex region).

[0492] In certain embodiments, the resulting precursor RNA can be used to generate circular RNA (e.g., a circular RNA polynucleotide provided herein) by incubating it in the presence of magnesium ions and guanosine nucleotide or nucleoside at a temperature at which RNA circularization occurs (e.g., between 20° C. and 60° C.).

[0493] Thus, in certain embodiments provided herein is a method of making circular RNA. In certain embodiments, the method comprises synthesizing precursor RNA by transcription (e.g., run-off transcription) using a vector provided herein (e.g., a 5′ enhanced intron element, a 5′ enhanced exon element, a core functional element, a 3′ enhanced exon element, and a 3′ enhanced intron element) as a template, and incubating the resulting precursor RNA in the presence of divalent cations (e.g., magnesium ions) and GTP such that it circularizes to form circular RNA. In some embodiments, the precursor RNA disclosed herein is capable of circularizing in the absence of magnesium ions and GTP and/or without the step of incubation with magnesium ions and GTP. It has been discovered that circular RNA has reduced immunogenicity relative to a corresponding mRNA, at least partially because the mRNA contains an immunogenic 5′ cap. When transcribing a DNA vector from certain promoters (e.g., a T7 promoter) to produce a precursor RNA, it is understood that the 5′ end of the precursor RNA is G. To reduce the immunogenicity of a circular RNA composition that contains a low level of contaminant linear mRNA, an excess of GMP relative to GTP can be provided during transcription such that most transcripts contain a 5′ GMP, which cannot be capped. Therefore, in some embodiments, transcription is carried out in the presence of an excess of GMP. In some embodiments, transcription is carried out where the ratio of GMP concentration to GTP concentration is within the range of about 3:1 to about 15:1, for example, about 3:1 to about 10:1, about 3:1 to about 5:1, about 3:1, about 4:1, or about 5:1.

[0494] In some embodiments, a composition comprising circular RNA has been purified. Circular RNA may be purified by any known method commonly used in the art, such as column chromatography, gel filtration chromatography, and size exclusion chromatography. In some embodiments, purification comprises one or more of the following steps: phosphatase treatment, HPLC size exclusion purification, and RNase R digestion. In some embodiments, purification comprises the following steps in order: RNase R digestion, phosphatase treatment, and HPLC size exclusion purification. In some embodiments, purification comprises reverse phase HPLC. In some embodiments, a purified composition contains less double stranded RNA, DNA splints, triphosphorylated RNA, phosphatase proteins, protein ligases, capping enzymes and/or nicked RNA than unpurified RNA. In some embodiments, purification of circular RNA comprises an affinity-purification or negative selection method described herein. In some embodiments, purification of circular RNA comprises separation of linear RNA from circular RNA using oligonucleotides that are complementary to a sequence in the linear RNA but are not complementary to a sequence in the circular RNA. In some embodiments, a purified composition is less immunogenic than an unpurified composition. In some embodiments, immune cells exposed to a purified composition produce less TNFα, RIG-I, IL-2, IL-6, IFNγ, and/or a type 1 interferon, e.g., IFN-β1, than immune cells exposed to an unpurified composition.

### 6. Overview of Transfer Vehicle & Other Delivery Mechanisms

[0495] A. Ionizable Lipids

[0496] In certain embodiments disclosed herein are ionizable lipids that may be used as a component of a transfer vehicle to facilitate or enhance the delivery and release of circular RNA to one or more target cells (e.g., by permeating or fusing with the lipid membranes of such target cells). In certain embodiments, an ionizable lipid comprises one or more cleavable functional groups (e.g., a disulfide) that allow, for example, a hydrophilic functional head-group to dissociate from a lipophilic functional tail-group of the compound (e.g., upon exposure to oxidative, reducing or acidic conditions), thereby facilitating a phase transition in the lipid bilayer of the one or more target cells.

[0497] In some embodiments, an ionizable lipid is a lipid as described in international patent application PCT/US2018/058555.

[0498] In some of embodiments, a cationic lipid has the following formula:

[chemical structure]

wherein:
[0499] R₁ and R₂ are either the same or different and independently optionally substituted C₁₀-C₂₄ alkyl, optionally substituted C₁₀-C₂₄ alkenyl, optionally substituted C₁₀-C₂₄ alkynyl, or optionally substituted C₁₀-C₂₄ acyl;
[0500] R₃ and R₄ are either the same or different and independently optionally substituted C₁-C₆ alkyl, optionally substituted C₂-C₆ alkenyl, or optionally substituted C₂-C₆ alkynyl or R₃ and R₄ may join to form an optionally substituted heterocyclic ring of 4 to 6 carbon atoms and 1 or 2 heteroatoms chosen from nitrogen and oxygen;
[0501] R₅ is either absent or present and when present is hydrogen or C₁-C₆ alkyl; m, n, and p are either the same or different and independently either 0 or 1 with the proviso that m, n, and p are not simultaneously 0; q is 0, 1, 2, 3, or 4; and
[0502] Y and Z are either the same or different and independently O, S, or NH.

[0503] In one embodiment, R₁ and R₂ are each linoleyl, and the amino lipid is a dilinoleyl amino lipid.

[0504] In one embodiment, the amino lipid is a dilinoleyl amino lipid.

[0505] In various other embodiments, a cationic lipid has the following structure:

[chemical structure]

or a pharmaceutically acceptable salt, tautomer, prodrug or stereoisomer thereof, wherein:
[0506] R₁ and R₂ are each independently selected from the group consisting of H and C₁-C₃ alkyls; and
[0507] R₃ and R₄ are each independently an alkyl group having from about 10 to about 20 carbon atoms, wherein at least one of R₃ and R₄ comprises at least two sites of unsaturation.

[0508] In some embodiments, R₃ and R₄ are each independently selected from dodecadienyl, tetradecadienyl, hexadecadienyl, linoleyl, and icosadienyl. In an embodiment, R₃ and R₄ and are both linoleyl. In some embodiments, R₃ and/or R₄ may comprise at least three sites of unsaturation (e.g., R₃ and/or R₄ may be, for example, dodecatrienyl, tetradectrienyl, hexadecatrienyl, linolenyl, and icosatrienyl).

[0509] In some embodiments, a cationic lipid has the following structure:

[chemical structure]

or a pharmaceutically acceptable salt, tautomer, prodrug or stereoisomer thereof, wherein:
[0510] R₁ and R₂ are each independently selected from H and C₁-C₃ alkyls;
[0511] R₃ and R₄ are each independently an alkyl group having from about 10 to about 20 carbon atoms, wherein at least one of R₃ and R₄ comprises at least two sites of unsaturation.

[0512] In one embodiment, R₃ and R₄ are the same, for example, in some embodiments R₃ and R₄ are both linoleyl (C₁₈-alkyl). In another embodiment, R₃ and R₄ are different, for example, in some embodiments, R₃ is tetradectrienyl (C₁₄-alkyl) and R₄ is linoleyl (C₁₈-alkyl). In a preferred embodiment, the cationic lipid(s) of the present invention are symmetrical, i.e., R₃ and R₄ are the same. In another preferred embodiment, both R₃ and R₄ comprise at least two sites of unsaturation. In some embodiments, R₃ and R₄ are each independently selected from dodecadienyl, tetradecadienyl, hexadecadienyl, linoleyl, and icosadienyl. In an embodiment, R₃ and R₄ are both linoleyl. In some embodiments, R₃ and/or R₄ comprise at least three sites of unsaturation and are each independently selected from dodecatrienyl, tetradectrienyl, hexadecatrienyl, linolenyl, and icosatrienyl.

[0513] In various embodiments, a cationic lipid has the formula:

[chemical structure]

or a pharmaceutically acceptable salt, tautomer, prodrug or stereoisomer thereof, wherein:
[0514] Xₐₐ is a D- or L-amino acid residue having the formula —NR^{N}—CR¹R²—C(C═O)—, or a peptide or a peptide of amino acid residues having the formula —{NR^{N}—CR¹R²—C(C═O)}ₙ—, wherein n is an integer from 2 to 20;
[0515] R¹ is independently, for each occurrence, a non-hydrogen or a substituted or unsubstituted side chain of an amino acid;
[0516] R² and R^{N} are independently, for each occurrence, hydrogen, an organic group consisting of carbon, oxygen, nitrogen, sulfur, and hydrogen atoms, or any combination of the foregoing, and having from 1 to 20 carbon atoms, C₍₁₋₅₎alkyl, cycloalkyl, cycloalkylalkyl, C₍₁₋₅₎alkenyl, C₍₁₋₅₎alkynyl, C₍₁₋₅₎alkanoyl, C₍₁₋₅₎alkanoyloxy, C₍₁₋₅₎alkoxy, C₍₁₋₅₎alkoxy-C₍₁₋₅₎alkyl, C₍₁₋₅₎alkoxy-C₍₁₋₅₎alkoxy, C₍₁₋₅₎alkyl-amino-C₍₁₋₅₎alkyl-, C₍₁₋₅₎dialkyl-amino-C₍₁₋₅₎alkyl-, nitro-C₍₁₋₅₎alkyl, cyano-C₍₁₋₅₎alkyl, aryl-C₍₁₋₅₎alkyl, 4-biphenyl-C₍₁₋₅₎alkyl, carboxyl, or hydroxyl;
[0517] Z is —NH—, —O—, —S—, —CH₂S—, —CH₂S(O)—, or an organic linker consisting of 1-40 atoms selected from hydrogen, carbon, oxygen, nitrogen, and sulfur atoms (preferably, Z is —NH— or —O—);
[0518] R^{x} and R^{y} are, independently, (i) a lipophilic tail derived from a lipid (which can be naturally occurring or synthetic), e.g., a phospholipid, a glycolipid, a triacylglycerol, a glycerophospholipid, a sphingolipid, a ceramide, a sphingomyelin, a cerebroside, or a ganglioside, wherein the tail optionally includes a steroid; (ii) an amino acid terminal group selected from hydrogen, hydroxyl, amino, and an organic protecting group; or (iii) a substituted or unsubstituted C₍₃₋₂₂₎alkyl, C₍₆₋₁₂₎cycloalkyl, C₍₆₋₁₂₎cycloalkyl-C₍₃₋₂₂₎alkyl, C₍₃₋₂₂₎alkenyl, C₍₃₋₂₂₎alkynyl, C₍₃₋₂₂₎alkoxy, or C₍₆₋₁₂₎-alkoxy C₍₃₋₂₂₎alkyl;
[0519] In some embodiments, one of R^{x} and R^{y} is a lipophilic tail as defined above and the other is an amino acid terminal group. In some embodiments, both R^{x} and R^{y} are lipophilic tails.

[0520] In some embodiments, at least one of R^{x} and R^{y} is interrupted by one or more biodegradable groups (e.g., —OC(O)—, —C(O)O—, —SC(O)—, —C(O)S—, —OC(S)—, —C(S)O—, —S—S—, —C(O)(NR⁵)—, —N(RS)C(O)—, —C(S)(NR⁵)—, —N(RS)C(O)—, —N(RS)C(O)N(RS)—, —OC(O)O—, —OSi(R⁵)₂O—, —C(O)(CR³R⁴)C(O)O—, —OC(O)(CR³R⁴)C(O)—, or

[chemical structure]

[0521] In some embodiments, R¹¹ is a C₂-C₈alkyl or alkenyl.

[0522] In some embodiments, each occurrence of R⁵ is, independently, H or alkyl.

[0523] In some embodiments, each occurrence of R³ and R⁴ are, independently H, halogen, OH, alkyl, alkoxy, —NH₂, alkylamino, or dialkylamino; or R₃ and R₄, together with the carbon atom to which they are directly attached, form a cycloalkyl group. In some particular embodiments, each occurrence of R³ and R⁴ are, independently H or C₁-C₄alkyl.

[0524] In some embodiments, R^{x} and R^{y} each, independently, have one or more carbon-carbon double bonds.

[0525] In some embodiments, the cationic lipid is one of the following:

[chemical structure]

or a pharmaceutically acceptable salt, tautomer, prodrug or stereoisomer thereof, wherein:
[0526] R₁ and R₂ are each independently alkyl, alkenyl, or alkynyl, each of which can optionally substituted;
[0527] R₃ and R₄ are each independently a C₁-C₆ alkyl, or R₃ and R₄ are taken together to form an optionally substituted heterocyclic ring.

[0528] A representative useful dilinoleyl amino lipid has the formula:

[chemical structure]

wherein n is 0, 1, 2, 3, or 4.

[0529] In one embodiment, a cationic lipid is DLin-K-DMA. In one embodiment, a cationic lipid is DLin-KC2-DMA (DLin-K-DMA above, wherein n is 2).

[0530] In one embodiment, a cationic lipid has the following structure:

[chemical structure]

or a pharmaceutically acceptable salt, tautomer, prodrug or stereoisomer thereof, wherein:
[0531] R₁ and R₂ are each independently for each occurrence optionally substituted C₁₀-C₃₀ alkyl, optionally substituted C₁₀-C₃₀ alkenyl, optionally substituted C₁₀-C₃₀ alkynyl or optionally substituted C₁₀-C₃₀ acyl;
[0532] R₃ is H, optionally substituted C₂-C₁₀ alkyl, optionally substituted C₂-C₁₀ alkenyl, optionally substituted C₂-C₁₀ alkylyl, alkylhetrocycle, alkylpbosphate, alkylphosphorothioate, alkylphosphorodithioate, alkylphosphonate, alkylamine, hydroxyalkyl, ω-aminoalkyl, ω-(substituted)aminoalkyl, ω-phosphoalkyl, ω-thiophosphoalkyl, optionally substituted polyethylene glycol (PEG, mw 100-40K), optionally substituted mPEG (mw 120-40K), heteroaryl, or heterocycle, or a linker ligand, for example, in some embodiments, R₃ is (CH3)₂N(CH2)ₙ—, wherein n is 1, 2, 3 or 4;
   [0533] E is O, S, N(Q), C(O), OC(O), C(O)O, N(Q)C(O), C(O)N(Q), (Q)N(CO)O, O(CO)N(Q), S(O), NS(O)₂N(Q), S(O)₂, N(Q)S(O)₂, SS, O═N, aryl, heteroaryl, cyclic or heterocycle, for example —C(O)O, wherein - is a point of connection to R₃; and
   [0534] Q is H, alkyl, ω-aminoalkyl, ω-(substituted)aminoalkyl, co-phosphoalkyl or ω-thiophosphoalkyl.

[0535] In one specific embodiment, the cationic lipid of Embodiments 1, 2, 3, 4 or 5 has the following structure:

[chemical structure]

or a pharmaceutically acceptable salt, tautomer, prodrug or stereoisomer thereof, wherein:
[0536] E is O, S, N(Q), C(O), N(Q)C(O), C(O)N(Q), (Q)N(CO)O, O(CO)N(Q), S(O), NS(O)₂N(Q), S(O)₂, N(Q)S(O)₂, SS, O═N, aryl, heteroaryl, cyclic or heterocycle;
[0537] Q is H, alkyl, ω-aminoalkyl, ω-(substituted)aminoalkyl, ω-phosphoalkyl or ω-thiophosphoalkyl;
[0538] R₁ and R₂ and Rₓ are each independently for each occurrence H, optionally substituted C₁-C₁₀ alkyl, optionally substituted C₁₀-C₃₀ alkyl, optionally substituted C₁₀-C₃₀ alkenyl, optionally substituted C₁₀-C₃₀ alkynyl, optionally substituted C₁₀-C₃₀ acyl, or linker-ligand, provided that at least one of R₁, R₂ and Rₓ is not H;
[0539] R₃ is H, optionally substituted C₁-C₁₀ alkyl, optionally substituted C₂-C₁₀ alkenyl, optionally substituted C₂-C₁₀ alkynyl, alkylhetrocycle, alkylphosphate, alkylphosphorothioate, alkylphosphorodithioate, alkylphosphonate, alkylamine, hydroxyalkyl, ω-aminoalkyl, ω-(substituted)aminoalkyl, ω-phosphoalkyl, ω-thiophosphoalkyl, optionally substituted polyethylene glycol (PEG, mw 100-40K), optionally substituted mPEG (mw 120-40K), heteroaryl, or heterocycle, or linker-ligand; and
[0540] n is 0, 1, 2, or 3.

[0541] In one embodiment, the cationic lipid of Embodiments 1, 2, 3, 4 or 5 has the structure of Formula I:

[chemical structure]

or a pharmaceutically acceptable salt, tautomer, prodrug or stereoisomer thereof, wherein:
[0542] one of L¹ or L² is —O(C═O)—, —(C═O)O—, —C(═O)—, —O—, —S(O)ₓ—, —S—S—, —C(═O)S—, SC(═O)—, —NR^{a}C(═O)—, —C(═O)NR^{a}—, NR^{a}C(═O)NR^{a}—, —OC(═O)NR^{a}— or —NR^{a}C(═O)O—, and the other of L¹ or L² is —O(C═O)—, —(C═O)O—, —C(═O)—, —O—, —S(O)ₓ—, —S—S—, —C(═O)S—, SC(═O)—, —NR^{a}C(═O)—, —C(═O)NR^{a}—, NR^{a}C(═O)NR^{a}—, —OC(═O)NR^{a}— or
   —NR^{a}C(═O)O— or a direct bond;
[0543] R^{a} is H or C₁-C₁₂ alkyl;
[0544] R^{1a} and R^{1b} are, at each occurrence, independently either (a) H or C₁-C₁₂ alkyl, or (b) R^{1a} is H or C₁-C₁₂ alkyl, and R^{1b} together with the carbon atom to which it is bound is taken together with an adjacent R^{1b} and the carbon atom to which it is bound to form a carbon-carbon double bond;
[0545] R^{2a} and R^{2b} are, at each occurrence, independently either (a) H or C₁-C₁₂ alkyl, or (b) R^{2a} is H or C₁-C₁₂ alkyl, and R^{2b} together with the carbon atom to which it is bound is taken together with an adjacent R^{2b} and the carbon atom to which it is bound to form a carbon-carbon double bond;
[0546] R^{3a} and R^{3b} are, at each occurrence, independently either (a) H or C₁-C₁₂ alkyl, or (b) R^{3a} is H or C₁-C₁₂ alkyl, and R^{3b} together with the carbon atom to which it is bound is taken together with an adjacent R^{3b} and the carbon atom to which it is bound to form a carbon-carbon double bond;
[0547] R^{4a} and R^{4b} are, at each occurrence, independently either (a) H or C₁-C₁₂ alkyl, or (b) R^{4a} is H or C₁-C₁₂ alkyl, and R^{4b} together with the carbon atom to which it is bound is taken together with an adjacent R^{4b} and the carbon atom to which it is bound to form a carbon-carbon double bond;
[0548] R⁵ and R⁶ are each independently methyl or cycloalkyl;
[0549] R⁷ is, at each occurrence, independently H or C₁-C₁₂ alkyl;
[0550] R⁸ and R⁹ are each independently unsubstituted C₁-C₁₂ alkyl; or R⁸ and R⁹, together with the nitrogen atom to which they are attached, form a 5, 6 or 7-membered heterocyclic ring comprising one nitrogen atom;
[0551] a and d are each independently an integer from 0 to 24;
[0552] b and c are each independently an integer from 1 to 24;
[0553] e is 1 or 2; and
[0554] x is 0, 1 or 2.

[0555] In some embodiments of Formula I, L¹ and L² are independently —O(C═ O)— or —(C═O)O—.

[0556] In certain embodiments of Formula I, at least one of R^{1a}, R^{2a}, R^{3a} or R^{4a} is C₁-C₁₂ alkyl, or at least one of L¹ or L² is —O(C═O)— or —(C═O)O—. In other embodiments, R^{1a} and R^{1b} are not isopropyl when a is 6 or n-butyl when a is 8.

[0557] In still further embodiments of Formula I, at least one of R^{1a}, R^{2a}, R^{3a} or R^{4a} is C₁-C₁₂ alkyl, or at least one of L¹ or L2 is —O(C═O)— or —(C═O)O—; and

[0558] R^{1a} and R^{1b} are not isopropyl when a is 6 or n-butyl when a is 8.

[0559] In other embodiments of Formula I, R⁸ and R⁹ are each independently unsubstituted C₁-C₁₂ alkyl; or R⁸ and R⁹, together with the nitrogen atom to which they are attached, form a 5, 6 or 7-membered heterocyclic ring comprising one nitrogen atom;

[0560] In certain embodiments of Formula I, any one of L¹ or L² may be —O(C═O)— or a carbon-carbon double bond. L¹ and L²may each be —O(C═O)— or may each be a carbon-carbon double bond.

[0561] In some embodiments of Formula I, one of L¹ or L² is —O(C═O)—. In other embodiments, both L¹ and L² are —O(C═O)—.

[0562] In some embodiments of Formula I, one of L¹ or L² is —(C═O)O—. In other embodiments, both L¹ and L² are —(C═O)O—.

[0563] In some other embodiments of Formula I, one of L or L² is a carbon-carbon double bond. In other embodiments, both L¹ and L² are a carbon-carbon double bond.

[0564] In still other embodiments of Formula I, one of L¹ or L² is —O(C═O)— and the other of L or L2 is —(C═O)O—. In more embodiments, one of L¹ or L² is —O(C═O)— and the other of L¹ or L² is a carbon-carbon double bond. In yet more embodiments, one of L¹ or L² is —(C═O)O— and the other of L¹ or L² is a carbon-carbon double bond.

[0565] It is understood that “carbon-carbon” double bond, as used throughout the specification, refers to one of the following structures:

[chemical structure]

wherein R^{a} and R^{b} are, at each occurrence, independently H or a substituent. For example, in some embodiments Ra and Rb are, at each occurrence, independently H, C₁-C₁₂ alkyl or cycloalkyl, for example H or C₁-C₁₂ alkyl.

[0566] In other embodiments, the lipid compounds of Formula I have the following Formula (Ia):

[chemical structure]

[0567] In other embodiments, the lipid compounds of Formula I have the following Formula (Ib):

[chemical structure]

[0568] In yet other embodiments, the lipid compounds of Formula I have the following Formula (Ic):

[chemical structure]

[0569] In certain embodiments of the lipid compound of Formula I, a, b, c and d are each independently an integer from 2 to 12 or an integer from 4 to 12. In other embodiments, a, b, c and d are each independently an integer from 8 to 12 or 5 to 9. In some certain embodiments, a is 0. In some embodiments, a is 1. In other embodiments, a is 2. In more embodiments, a is 3. In yet other embodiments, a is 4. In some embodiments, a is 5. In other embodiments, a is 6. In more embodiments, a is 7. In yet other embodiments, a is 8. In some embodiments, a is 9. In other embodiments, a is 10. In more embodiments, a is 11. In yet other embodiments, a is 12. In some embodiments, a is 13. In other embodiments, a is 14. In more embodiments, a is 15. In yet other embodiments, a is 16.

[0570] In some other embodiments of Formula I, b is 1. In other embodiments, b is 2. In more embodiments, b is 3. In yet other embodiments, b is 4. In some embodiments, b is 5. In other embodiments, b is 6. In more embodiments, b is 7. In yet other embodiments, b is 8. In some embodiments, b is 9. In other embodiments, b is 10. In more embodiments, b is 11. In yet other embodiments, b is 12. In some embodiments, b is 13. In other embodiments, b is 14. In more embodiments, b is 15. In yet other embodiments, b is 16.

[0571] In some more embodiments of Formula I, c is 1. In other embodiments, c is 2. In more embodiments, c is 3. In yet other embodiments, c is 4. In some embodiments, c is 5. In other embodiments, c is 6. In more embodiments, c is 7. In yet other embodiments, c is 8. In some embodiments, c is 9. In other embodiments, c is 10. In more embodiments, c is 11. In yet other embodiments, c is 12. In some embodiments, c is 13. In other embodiments, c is 14. In more embodiments, c is 15. In yet other embodiments, c is 16.

[0572] In some certain other embodiments of Formula I, d is 0. In some embodiments, d is 1. In other embodiments, d is 2. In more embodiments, d is 3. In yet other embodiments, d is 4. In some embodiments, d is 5. In other embodiments, d is 6. In more embodiments, d is 7. In yet other embodiments, d is 8. In some embodiments, d is 9. In other embodiments, d is 10. In more embodiments, d is 11. In yet other embodiments, d is 12. In some embodiments, d is 13. In other embodiments, d is 14. In more embodiments, d is 15. In yet other embodiments, d is 16.

[0573] In some other various embodiments of Formula I, a and d are the same. In some other embodiments, b and c are the same. In some other specific embodiments, a and d are the same and b and c are the same.

[0574] The sum of a and b and the sum of c and d in Formula I are factors which may be varied to obtain a lipid of formula I having the desired properties. In one embodiment, a and b are chosen such that their sum is an integer ranging from 14 to 24. In other embodiments, c and d are chosen such that their sum is an integer ranging from 14 to 24. In further embodiment, the sum of a and b and the sum of c and d are the same. For example, in some embodiments the sum of a and b and the sum of c and d are both the same integer which may range from 14 to 24. In still more embodiments, a. b, c and d are selected such the sum of a and b and the sum of c and d is 12 or greater.

[0575] In some embodiments of Formula I, e is 1. In other embodiments, e is 2.

[0576] The substituents at R^{1a}, R^{2a}, R^{3a} and R^{4a} of Formula I are not particularly limited. In certain embodiments R^{1a}, R^{2a}, R^{3a} and R^{4a} are H at each occurrence. In certain other embodiments at least one of R^{1a}, R^{2a}, R^{3a} and R^{4a} is C₁-C₁₂ alkyl. In certain other embodiments at least one of R^{1a}, R^{2a}, R^{3a} and R^{4a} is C₁-C₈ alkyl. In certain other embodiments at least one of R^{1a}, R^{2a}, R^{3a} and R^{4a} is C₁-C₆ alkyl. In some of the foregoing embodiments, the C₁-C₈ alkyl is methyl, ethyl, n-propyl, iso-propyl, n-butyl, iso-butyl, tert-butyl, n-hexyl or n-octyl.

[0577] In certain embodiments of Formula I, R^{1a}, R^{1b}, R^{4a} and R^{4b} are C₁-C₁₂ alkyl at each occurrence.

[0578] In further embodiments of Formula I, at least one of R^{1b}, R^{2b}, R^{3b} and R^{4b} is H or R^{1b}, R^{2b}, R^{3b} and R^{4b} are H at each occurrence.

[0579] In certain embodiments of Formula I, R^{1b} together with the carbon atom to which it is bound is taken together with an adjacent R^{1b} and the carbon atom to which it is bound to form a carbon-carbon double bond. In other embodiments of the foregoing R^{4b} together with the carbon atom to which it is bound is taken together with an adjacent R₄^{b} and the carbon atom to which it is bound to form a carbon-carbon double bond.

[0580] The substituents at R⁵ and R⁶ of Formula I are not particularly limited in the foregoing embodiments. In certain embodiments one or both of R⁵ or R₆ is methyl. In certain other embodiments one or both of R⁵ or R⁶ is cycloalkyl for example cyclohexyl. In these embodiments the cycloalkyl may be substituted or not substituted. In certain other embodiments the cycloalkyl is substituted with C₁-C₁₂ alkyl, for example tert-butyl.

[0581] The substituents at R⁷ are not particularly limited in the foregoing embodiments of Formula I. In certain embodiments at least one R⁷ is H. In some other embodiments, R⁷ is H at each occurrence. In certain other embodiments R⁷ is C₁-C₁₂ alkyl.

[0582] In certain other of the foregoing embodiments of Formula I, one of R⁸ or R⁹ is methyl. In other embodiments, both R⁸ and R⁹ are methyl.

[0583] In some different embodiments of Formula I, R⁸ and R⁹, together with the nitrogen atom to which they are attached, form a 5, 6 or 7-membered heterocyclic ring. In some embodiments of the foregoing, R⁸ and R⁹, together with the nitrogen atom to which they are attached, form a 5-membered heterocyclic ring, for example a pyrrolidinyl ring.

[0584] In some embodiments of Embodiment 3, the first and second cationic lipids are each, independently selected from a lipid of Formula I.

[0585] In various different embodiments, the lipid of Formula I has one of the structures set forth in Table 1 below.

TABLE 1
Representative Lipids of Formula I

| No. | Structure | pKa |
|---|---|---|
| I-1 | [chemical structure] | — |
| I-2 | [chemical structure] | 5.64 |
| I-3 | [chemical structure] | 7.15 |
| I-4 | [chemical structure] | 6.43 |
| I-5 | [chemical structure] | 6.28 |
| I-6 | [chemical structure] | 6.12 |
| I-7 | [chemical structure] | — |
| I-8 | [chemical structure] | — |
| I-9 | [chemical structure] | — |
| I-10 | [chemical structure] | — |
| I-11 | [chemical structure] | 6.36 |
| I-12 | [chemical structure] | — |
| I-13 | [chemical structure] | 6.51 |
| I-14 | [chemical structure] | — |
| I-15 | [chemical structure] | 6.30 |
| I-16 | [chemical structure] | 6.63 |
| I-17 | [chemical structure] | — |
| I-18 | [chemical structure] | — |
| I-19 | [chemical structure] | 6.72 |
| I-20 | [chemical structure] | 6.44 |
| I-21 | [chemical structure] | 6.28 |
| I-22 | [chemical structure] | 6.53 |
| I-23 | [chemical structure] | 6.24 |
| I-24 | [chemical structure] | 6.28 |
| I-25 | [chemical structure] | 6.20 |
| I-33 | [chemical structure] | 6.27 |
| I-34 | [chemical structure] | — |
| I-35 | [chemical structure] | 6.21 |
| I-36 | [chemical structure] | — |
| I-37 | [chemical structure] | — |
| I-38 | [chemical structure] | 6.24 |
| I-39 | [chemical structure] | 5.82 |
| I-40 | [chemical structure] | 6.38 |
| I-41 | [chemical structure] | 5.91 |

[0586] In some embodiments, the cationic lipid of Embodiments 1, 2, 3, 4 or 5 has a structure of Formula IL:

[chemical structure]

or a pharmaceutically acceptable salt, tautomer, prodrug or stereoisomer thereof, wherein:
[0587] one of L₁ or L² is —O(C═O)—, —(C═O)O—, —C(═O)—, —O—, —S(O)ₓ—, —S—S—, —C(═O)S—, SC(═O)—, —NR^{a}C(═O)—, —C(═O)NR^{a}—, NR^{a}C(═O)NR^{a}—, —OC(═O)NR^{a}— or —NR^{a}C(═O)O—, and the other of L¹ or L² is —O(C═O)—, —(C═O)O—, —C(═O)—, —O—, —S(O)ₓ—, —S—S—, —C(═O)S, SC(═O)—, NR^{a}C(═O)—, —C(═O)NR^{a}—, NR^{a}C(═O)NR^{a}—, —OC(═O)NR^{a}— or
   —NR^{a}C(═O)O— or a direct bond;
[0588] G¹ is C₁-C₂ alkylene, —(C═O)—, —O(C═O)—, —SC(═O)—, —NR^{a}C(═O)— or a direct bond;
[0589] G² is —C(═O)—, —(C═O)O—, —C(═O)S—, —C(═O)NR^{a}— or a direct bond;
[0590] G³ is C₁-C₆ alkylene;
[0591] R^{a} is H or C₁-C₁₂ alkyl;
[0592] R^{1a} and R^{1b} are, at each occurrence, independently either: (a) H or C₁-C₁₂ alkyl; or (b) R^{1a} is H or C₁-C₁₂ alkyl, and R^{1b} together with the carbon atom to which it is bound is taken together with an adjacent R^{1b} and the carbon atom to which it is bound to form a carbon-carbon double bond;
[0593] R^{2a} and R^{2b} are, at each occurrence, independently either: (a) H or C₁-C₁₂ alkyl; or (b) R^{2a} is H or C₁-C₂ alkyl, and R^{2b} together with the carbon atom to which it is bound is taken together with an adjacent R^{2b} and the carbon atom to which it is bound to form a carbon-carbon double bond;
[0594] R^{3a} and R^{3b} are, at each occurrence, independently either (a): H or C₁-C₂ alkyl; or (b) R^{3a} is H or C₁-C₁₂ alkyl, and R^{3b} together with the carbon atom to which it is bound is taken together with an adjacent R^{3b} and the carbon atom to which it is bound to form a carbon-carbon double bond;
[0595] R^{4a} and R^{4b} are, at each occurrence, independently either: (a) H or C₁-C₁₂ alkyl; or (b) R^{4a} is H or C₁-C₁₂ alkyl, and R^{4b} together with the carbon atom to which it is bound is taken together with an adjacent R^{4b} and the carbon atom to which it is bound to form a carbon-carbon double bond;
[0596] R⁵ and R⁶ are each independently H or methyl;
[0597] R⁷ is C₄-C₂₀ alkyl;
[0598] R⁸ and R⁹ are each independently C₁-C₁₂ alkyl; or R⁸ and R⁹, together with the nitrogen atom to which they are attached, form a 5, 6 or 7-membered heterocyclic ring;
[0599] a, b, c and d are ach independently an integer from 1 to 24 and
[0600] x is 0, 1 or 2.

[0601] In some embodiments of Formula (II), L¹ and L² are each independently —O(C═O)—, —(C═O)O— or a direct bond. In other embodiments, G¹ and G² are each independently —(C═O)— or a direct bond. In some different embodiments, L¹ and L² are each independently —O(C═O)—, —(C═O)O— or a direct bond; and G¹ and G² are each independently —(C═O)— or a direct bond.

[0602] In some different embodiments of Formula (II), L¹ and L² are each independently —C(═O)—, —O—, —S(O)ₓ—, —S—S—, —C(═O)S—, —SC(═O)—, —NR^{a}—, —NR^{a}C(═O)—, —C(═O)NR^{a}—, —NR^{a}C(═O)NR^{a}, —OC(═O)NR^{a}—, —NR^{a}C(═O)O—, —NR^{a}S(O)ₓNR^{a}—, —NR^{a}S (O)ₓ— or —S(O)ₓNR^{a}—.

[0603] In other of the foregoing embodiments of Formula (II), the lipid compound has one of the following Formulae (IIA) or (IIB):

[chemical structure]

[0604] In some embodiments of Formula (II), the lipid compound has Formula (IIA). In other embodiments, the lipid compound has Formula (IIB).

[0605] In any of the foregoing embodiments of Formula (II), one of L¹ or L² is —O(C═O)—. For example, in some embodiments each of L¹ and L² are —O(C═O)—.

[0606] In some different embodiments of Formula (II), one of L¹ or L² is —(C═O)O—. For example, in some embodiments each of L¹ and L² is —(C═O)O—.

[0607] In different embodiments of Formula (II), one of L¹ or L² is a direct bond. As used herein, a “direct bond” means the group (e.g., L¹ or L²) is absent. For example, in some embodiments each of L¹ and L² is a direct bond.

[0608] In other different embodiments of Formula (II), for at least one occurrence of R^{1a} and R^{1b}, R^{1a} is H or C₁-C₁₂ alkyl, and R^{1b} together with the carbon atom to which it is bound is taken together with an adjacent R^{1b} and the carbon atom to which it is bound to form a carbon-carbon double bond.

[0609] In still other different embodiments of Formula (II), for at least one occurrence of R^{4a} and R^{4b}, R^{4a} is H or C₁-C₁₂ alkyl, and R^{4b} together with the carbon atom to which it is bound is taken together with an adjacent R^{4b} and the carbon atom to which it is bound to form a carbon-carbon double bond.

[0610] In more embodiments of Formula (II), for at least one occurrence of R^{2a} and R^{2b}, R^{2a} is H or C₁-C₁₂ alkyl, and R^{2b} together with the carbon atom to which it is bound is taken together with an adjacent R^{2b} and the carbon atom to which it is bound to form a carbon-carbon double bond.

[0611] In other different embodiments of Formula (II), for at least one occurrence of R^{3a} and R^{3b}, R^{3a} is H or C₁-C₁₂ alkyl, and R^{3b} together with the carbon atom to which it is bound is taken together with an adjacent R^{3b} and the carbon atom to which it is bound to form a carbon-carbon double bond.

[0612] In various other embodiments of Formula (II), the lipid compound has one of the following Formulae (IIC) or (IID):

[chemical structure]

wherein e, f, g and h are each independently an integer from 1 to 12. ^{P}

[0613] In some embodiments of Formula (II), the lipid compound has Formula (IIC). In other embodiments, the lipid compound has Formula (IID).

[0614] In various embodiments of Formulae (IIC) or (IID), e, f, g and h are each independently an integer from 4 to 10.

[0615] In certain embodiments of Formula (II), a, b, c and d are each independently an integer from 2 to 12 or an integer from 4 to 12. In other embodiments, a, b, c and d are each independently an integer from 8 to 12 or 5 to 9. In some certain embodiments, a is 0. In some embodiments, a is 1. In other embodiments, a is 2. In more embodiments, a is 3. In yet other embodiments, a is 4. In some embodiments, a is 5. In other embodiments, a is 6. In more embodiments, a is 7. In yet other embodiments, a is 8. In some embodiments, a is 9. In other embodiments, a is 10. In more embodiments, a is 11. In yet other embodiments, a is 12. In some embodiments, a is 13. In other embodiments, a is 14. In more embodiments, a is 15. In yet other embodiments, a is 16.

[0616] In some embodiments of Formula (II), b is 1. In other embodiments, b is 2. In more embodiments, b is 3. In yet other embodiments, b is 4. In some embodiments, b is 5. In other embodiments, b is 6. In more embodiments, b is 7. In yet other embodiments, b is 8. In some embodiments, b is 9. In other embodiments, b is 10. In more embodiments, b is 11. In yet other embodiments, b is 12. In some embodiments, b is 13. In other embodiments, b is 14. In more embodiments, b is 15. In yet other embodiments, b is 16.

[0617] In some embodiments of Formula (II), c is 1. In other embodiments, c is 2. In more embodiments, c is 3. In yet other embodiments, c is 4. In some embodiments, c is 5. In other embodiments, c is 6. In more embodiments, c is 7. In yet other embodiments, c is 8. In some embodiments, c is 9. In other embodiments, c is 10. In more embodiments, c is 11. In yet other embodiments, c is 12. In some embodiments, c is 13. In other embodiments, c is 14. In more embodiments, c is 15. In yet other embodiments, c is 16.

[0618] In some certain embodiments of Formula (II), d is 0. In some embodiments, d is 1. In other embodiments, d is 2. In more embodiments, d is 3. In yet other embodiments, d is 4. In some embodiments, d is 5. In other embodiments, d is 6. In more embodiments, d is 7. In yet other embodiments, d is 8. In some embodiments, d is 9. In other embodiments, d is 10. In more embodiments, d is 11. In yet other embodiments, d is 12. In some embodiments, d is 13. In other embodiments, d is 14. In more embodiments, d is 15. In yet other embodiments, d is 16.

[0619] In some embodiments of Formula (II), e is 1. In other embodiments, e is 2. In more embodiments, e is 3. In yet other embodiments, e is 4. In some embodiments, e is 5. In other embodiments, e is 6. In more embodiments, e is 7. In yet other embodiments, e is 8. In some embodiments, e is 9. In other embodiments, e is 10. In more embodiments, e is 11. In yet other embodiments, e is 12.

[0620] In some embodiments of Formula (II), f is 1. In other embodiments, f is 2. In more embodiments, f is 3. In yet other embodiments, f is 4. In some embodiments, f is 5. In other embodiments, f is 6. In more embodiments, f is 7. In yet other embodiments, f is 8. In some embodiments, f is 9. In other embodiments, f is 10. In more embodiments, f is 11. In yet other embodiments, f is 12.

[0621] In some embodiments of Formula (II), g is 1. In other embodiments, g is 2. In more embodiments, g is 3. In yet other embodiments, g is 4. In some embodiments, g is 5. In other embodiments, g is 6. In more embodiments, g is 7. In yet other embodiments, g is 8. In some embodiments, g is 9. In other embodiments, g is 10. In more embodiments, g is 11. In yet other embodiments, g is 12.

[0622] In some embodiments of Formula (II), h is 1. In other embodiments, e is 2. In more embodiments, h is 3. In yet other embodiments, h is 4. In some embodiments, e is 5. In other embodiments, h is 6. In more embodiments, h is 7. In yet other embodiments, h is 8. In some embodiments, h is 9. In other embodiments, h is 10. In more embodiments, h is 11. In yet other embodiments, h is 12.

[0623] In some other various embodiments of Formula (II), a and d are the same. In some other embodiments, b and c are the same. In some other specific embodiments and a and d are the same and b and c are the same.

[0624] The sum of a and b and the sum of c and d of Formula (II) are factors which may be varied to obtain a lipid having the desired properties. In one embodiment, a and b are chosen such that their sum is an integer ranging from 14 to 24. In other embodiments, c and d are chosen such that their sum is an integer ranging from 14 to 24. In further embodiment, the sum of a and b and the sum of c and d are the same. For example, in some embodiments the sum of a and b and the sum of c and d are both the same integer which may range from 14 to 24. In still more embodiments, a. b, c and d are selected such that the sum of a and b and the sum of c and d is 12 or greater.

[0625] The substituents at R^{1a}, R^{2a}, R^{3a} and R^{4a} of Formula (II) are not particularly limited. In some embodiments, at least one of R^{1a}, R^{2a}, R^{3a} and R^{4a} is H. In certain embodiments R^{1a}, R^{2a}, R^{3a} and R^{4a} are H at each occurrence. In certain other embodiments at least one of R^{1a}, R^{2a}, R^{3a} and R^{4a} is C₁-C₁₂ alkyl. In certain other embodiments at least one of R^{1a}, R^{2a}, R^{3a} and R^{4a} is C₁-C₈ alkyl. In certain other embodiments at least one of R^{1a}, R^{2a}, R^{3a} and R^{4a} is C₁-C₆ alkyl. In some of the foregoing embodiments, the C₁-C₈ alkyl is methyl, ethyl, n-propyl, iso-propyl, n-butyl, iso-butyl, tert-butyl, n-hexyl or n-octyl.

[0626] In certain embodiments of Formula (II), R^{1a}, R^{1b}, R^{4a} and R^{4b} are C₁-C₁₂ alkyl at each occurrence.

[0627] In further embodiments of Formula (II), at least one of R^{1b}, R^{2b}, R^{3b} and R^{4b} is H or R^{1b}, R^{2b}, R^{3b} and R^{4b} are H at each occurrence.

[0628] In certain embodiments of Formula (II), R^{1b} together with the carbon atom to which it is bound is taken together with an adjacent R^{1b} and the carbon atom to which it is bound to form a carbon-carbon double bond. In other embodiments of the foregoing R₄^{b} together with the carbon atom to which it is bound is taken together with an adjacent R₄^{b} and the carbon atom to which it is bound to form a carbon-carbon double bond.

[0629] The substituents at R⁵ and R⁶ of Formula (II) are not particularly limited in the foregoing embodiments. In certain embodiments one of R⁵ or R⁶ is methyl. In other embodiments each of R⁵ or R⁶ is methyl.

[0630] The substituents at R⁷ of Formula (II) are not particularly limited in the foregoing embodiments. In certain embodiments R⁷ is C₆-C₁₆ alkyl. In some other embodiments, R^{T} is C₆-C₉ alkyl. In some of these embodiments, R⁷ is substituted with —(C═)OR, —O(C═O)R^{b}, —C(═O)R^{b}, —OR^{b}, —S(O)ₓR^{b}, —S—SR^{b}, —C(═O)SR^{b}, —SC(═O)Rb, —NR^{a}R^{b}, —NR^{a}C(═O)R^{b}, —C(═O)NR^{a}R^{b}, —NR^{a}C(═O)NR^{a}R^{b}, —OC(═O)NR^{a}R^{b}, —NR^{a}C(═O)OR^{b}, —NR^{a}S(O)ₓNR^{a}R^{b}, —NR^{a}S(O)ₓR^{b} or —S(O)ₓNR^{a}R^{b}, wherein: R^{a} is H or C₁-C₁₂ alkyl; R^{b} is C₁-C₁₅ alkyl; and x is 0, 1 or 2. For example, in some embodiments R₇ is substituted with —(C═O)OR^{b} or —O(C═O)R^{b}.

[0631] In some of the foregoing embodiments of Formula (II), R^{b} is branched C₁-C₁₆ alkyl. For example, in some embodiments R^{b} has one of the following structures:

[chemical structure]

[0632] In certain other of the foregoing embodiments of Formula (II), one of R⁸ or R⁹ is methyl. In other embodiments, both R⁸ and R⁹ are methyl.

[0633] In some different embodiments of Formula (II), R⁸ and R⁹, together with the nitrogen atom to which they are attached, form a 5, 6 or 7-membered heterocyclic ring. In some embodiments of the foregoing, R⁸ and R⁹, together with the nitrogen atom to which they are attached, form a 5-membered heterocyclic ring, for example a pyrrolidinyl ring. In some different embodiments of the foregoing, R⁸ and R⁹, together with the nitrogen atom to which they are attached, form a 6-membered heterocyclic ring, for example a piperazinyl ring.

[0634] In certain embodiments of Embodiment 3, the first and second cationic lipids are each, independently selected from a lipid of Formula II.

[0635] In still other embodiments of the foregoing lipids of Formula (II), G³ is C₂-C₄ alkylene, for example C₃ alkylene. In various different embodiments, the lipid compound has one of the structures set forth in Table 2 below

TABLE 2
Representative Lipids of Formula (II)

| No. | Structure | pKa |
|---|---|---|
| II-1 | [chemical structure] | 5.64 |
| II-2 | [chemical structure] | — |
| II-3 | [chemical structure] | — |
| II-4 | [chemical structure] | — |
| II-5 | [chemical structure] | 6.27 |
| II-6 | [chemical structure] | 6.14 |
| II-7 | [chemical structure] | 5.93 |
| II-8 | [chemical structure] | 5.35 |
| II-9 | [chemical structure] | 6.27 |
| II-10 | [chemical structure] | 6.16 |
| II-11 | [chemical structure] | 6.13 |
| II-12 | [chemical structure] | 6.21 |
| II-13 | [chemical structure] | 6.22 |
| II-14 | [chemical structure] | 6.33 |
| II-15 | [chemical structure] | 6.32 |
| II-16 | [chemical structure] | 6.37 |
| II-17 | [chemical structure] | 6.27 |
| II-18 | [chemical structure] | — |
| II-19 | [chemical structure] | — |
| II-20 | [chemical structure] | — |
| II-21 | [chemical structure] | — |
| II-22 | [chemical structure] | — |
| II-23 | [chemical structure] | — |
| II-24 | [chemical structure] | 6.14 |
| II-25 | [chemical structure] | — |
| II-26 | [chemical structure] | — |
| II-27 | [chemical structure] | — |
| II-28 | [chemical structure] | — |
| II-29 | [chemical structure] | — |
| II-30 | [chemical structure] | — |
| II-31 | [chemical structure] | — |
| II-32 | [chemical structure] | — |
| II-33 | [chemical structure] | — |
| II-34 | [chemical structure] | — |
| II-35 | [chemical structure] | 5.97 |
| II-36 | [chemical structure] | 6.13 |
| II-37 | [chemical structure] | 5.61 |
| II-38 | [chemical structure] | 6.45 |
| II-39 | [chemical structure] | 6.45 |
| II-40 | [chemical structure] | 6.57 |
| II-41 | [chemical structure] | — |
| II-42 | [chemical structure] | — |
| II-43 | [chemical structure] | — |
| II-44 | [chemical structure] | — |
| II-45 | [chemical structure] | — |
| II-46 | [chemical structure] | — |

[0636] In some other embodiments, the cationic lipid of Embodiments 1, 2, 3, 4 or 5 has a structure of Formula III:

[chemical structure]

or a pharmaceutically acceptable salt, prodrug or stereoisomer thereof, wherein:
[0637] one of L¹ or L² is —O(C═O)—, —(C═O)O—, —C(═O)—, —O—, —S(O)ₓ—, —S—S—, —C(═O)S—, SC(═O)—, —NR^{a}C(═O)—, —C(═O)NR^{a}—, NR^{a}C(═O)NR^{a}—, —OC(═O)NR^{a}— or —NR^{a}C(═O)O—, and the other of L¹ or L² is —O(C═O)—, —(C═O)O—, —C(═O)—, —O—, —S(O)ₓ—, —S—S—, —C(═O)S—, SC(═O)—, —NR^{a}C(═O)—, —C(═O)NR^{a}—, NR^{a}C(═O)NR^{a}—, —OC(═O)NR^{a}— or
   —NR^{a}C(═O)O— or a direct bond;
[0638] G¹ and G² are each independently unsubstituted C₁-C₁₂ alkylene or C₁-C₁₂ alkenylene;
[0639] G³ is C₁-C₂₄ alkylene, C₁-C₂₄ alkenylene, C₃-C₈ cycloalkylene, C₃-C₈ cycloalkenylene;
[0640] R^{a} is H or C₁-C₁₂ alkyl;
[0641] R¹ and R² are each independently C₆-C₂₄ alkyl or C₆-C₂₄ alkenyl;
[0642] R³ is H, OR⁵, CN, —C(═O)OR⁴, —OC(═O)R⁴ or —NR⁵C(═O)R⁴;
[0643] R⁴ is C₁-C₁₂ alkyl;
[0644] R⁵ is H or C₁-C₆ alkyl; and
[0645] x is 0, 1 or 2.

[0646] In some of the foregoing embodiments of Formula (III), the lipid has one of the following Formulae (IIIA) or (IIIB):

[chemical structure]

wherein:
[0647] A is a 3 to 8-membered cycloalkyl or cycloalkylene ring;
[0648] R⁶ is, at each occurrence, independently H, OH or C₁-C₂₄ alkyl;
[0649] n is an integer ranging from 1 to 15.

[0650] In some of the foregoing embodiments of Formula (III), the lipid has Formula (IIIA), and in other embodiments, the lipid has Formula (IIIB).

[0651] In other embodiments of Formula (III), the lipid has one of the following Formulae (IIIC) or (IIID):

[chemical structure]

wherein y and z are each independently integers ranging from 1 to 12.

[0652] In any of the foregoing embodiments of Formula (III), one of L¹ or L² is —O(C═O)—. For example, in some embodiments each of L¹ and L² are —O(C═O)—. In some different embodiments of any of the foregoing, L¹ and L² are each independently —(C═O)O— or —O(C═O)—. For example, in some embodiments each of L¹ and L² is —(C═O)O—.

[0653] In some different embodiments of Formula (III), the lipid has one of the following Formulae (IIIE) or (IIIF):

[chemical structure]

[0654] In some of the foregoing embodiments of Formula (III), the lipid has one of the following Formulae (IIIG), (IIIH), (IIII), or (IIIJ):

[chemical structure]

[0655] In some of the foregoing embodiments of Formula (III), n is an integer ranging from 2 to 12, for example from 2 to 8 or from 2 to 4. For example, in some embodiments, n is 3, 4, 5 or 6. In some embodiments, n is 3. In some embodiments, n is 4. In some embodiments, n is 5. In some embodiments, n is 6.

[0656] In some other of the foregoing embodiments of Formula (III), y and z are each independently an integer ranging from 2 to 10. For example, in some embodiments, y and z are each independently an integer ranging from 4 to 9 or from 4 to 6.

[0657] In some of the foregoing embodiments of Formula (III), R⁶ is H. In other of the foregoing embodiments, R⁶ is C₁-C₂₄ alkyl. In other embodiments, R⁶ is OH.

[0658] In some embodiments of Formula (III), G³ is unsubstituted. In other embodiments, G3 is substituted. In various different embodiments, G³ is linear C₁-C₂₄ alkylene or linear C₁-C₂₄ alkenylene.

[0659] In some other foregoing embodiments of Formula (III), R¹ or R, or both, is C₆-C₂₄ alkenyl. For example, in some embodiments, R¹ and R² each, independently have the following structure:

[chemical structure]

wherein:
[0660] R^{7a} and R^{7b} are, at each occurrence, independently H or C₁-C₁₂ alkyl; and
[0661] a is an integer from 2 to 12,
[0662] wherein R^{7a}, R^{7b} and a are each selected such that R¹ and R² each independently comprise from 6 to 20 carbon atoms. For example, in some embodiments a is an integer ranging from 5 to 9 or from 8 to 12.

[0663] In some of the foregoing embodiments of Formula (III), at least one occurrence of R^{7a} is H. For example, in some embodiments, R^{7a} is H at each occurrence. In other different embodiments of the foregoing, at least one occurrence of R^{7b} is C₁-C₈ alkyl. For example, in some embodiments, C₁-C₈ alkyl is methyl, ethyl, n-propyl, iso-propyl, n-butyl, iso-butyl, tert-butyl, n-hexyl or n-octyl.

[0664] In different embodiments of Formula (III), R¹ or R², or both, has one of the following structures:

[chemical structure]

[0665] In some of the foregoing embodiments of Formula (III), R³ is OH, CN, —C(═O)OR⁴, —OC(═O)R₄ or —NHC(═O)R⁴. In some embodiments, R⁴ is methyl or ethyl.

[0666] In some specific embodiments of Embodiment 3, the first and second cationic lipids are each, independently selected from a lipid of Formula III.

[0667] In various different embodiments, a cationic lipid of any one of the disclosed embodiments (e.g., the cationic lipid, the first cationic lipid, the second cationic lipid) of Formula (III) has one of the structures set forth in Table 3 below.

TABLE 3
Representative Compounds of Formula (III)

| No. | Structure | pKa |
|---|---|---|
| III-1 | [chemical structure] | 5.89 |
| III-2 | [chemical structure] | 6.05 |
| III-3 | [chemical structure] | 6.09 |
| III-4 | [chemical structure] | 5.60 |
| III-5 | [chemical structure] | 5.59 |
| III-6 | [chemical structure] | 5.42 |
| III-7 | [chemical structure] | 6.11 |
| III-8 | [chemical structure] | 5.84 |
| III-9 | [chemical structure] | — |
| III-10 | [chemical structure] | — |
| III-11 | [chemical structure] | — |
| III-12 | [chemical structure] | — |
| III-13 | [chemical structure] | — |
| III-14 | [chemical structure] | — |
| III-15 | [chemical structure] | 6.14 |
| III-16 | [chemical structure] | 6.31 |
| III-17 | [chemical structure] | 6.28 |
| III-18 | [chemical structure] | — |
| III-19 | [chemical structure] | — |
| III-20 | [chemical structure] | 6.36 |
| III-21 | [chemical structure] | — |
| III-22 | [chemical structure] | 6.10 |
| III-23 | [chemical structure] | 5.98 |
| III-24 | [chemical structure] | — |
| III-25 | [chemical structure] | 6.22 |
| III-26 | [chemical structure] | 5.84 |
| III-27 | [chemical structure] | 5.77 |
| III-28 | [chemical structure] | — |
| III-29 | [chemical structure] | — |
| III-30 | [chemical structure] | 6.09 |
| III-31 | [chemical structure] | — |
| III-32 | [chemical structure] | — |
| III-33 | [chemical structure] | — |
| III-34 | [chemical structure] | — |
| III-35 | [chemical structure] | — |
| III-36 | [chemical structure] | — |
| III-37 | [chemical structure] | — |
| III-38 | [chemical structure] | — |
| III-39 | [chemical structure] | — |
| III-40 | [chemical structure] | — |
| III-41 | [chemical structure] | — |
| III-42 | [chemical structure] | — |
| III-43 | [chemical structure] | — |
| III-44 | [chemical structure] | — |
| III-45 | [chemical structure] | — |
| III-46 | [chemical structure] | — |
| III-47 | [chemical structure] | — |
| III-48 | [chemical structure] | — |
| III-49 | [chemical structure] | — |

[0668] In one embodiment, the cationic lipid of any one of Embodiments 1, 2, 3,4 or 5 has a structure of Formula (IV):

[chemical structure]

or a pharmaceutically acceptable salt, prodrug or stereoisomer thereof, wherein:
[0669] one of G¹ or G² is, at each occurrence, —O(C═O)—, —(C═O)O—, —C(═O)—, —O—, —S(O)_{y}—, —S—S—, —C(═O)S—, SC(═O)—, —N(R^{a})C(═O)—, —C(═O)N(R^{a})—, —N(R^{a})C(═O)N(R^{a})—, —OC(═O)N(R^{a})— or —N(R^{a})C(═O)O—, and the other of G¹ or G² is, at each occurrence, —O(C═O)—, —(C═O)O—, —C(═O)—, —O—, —S(O)_{y}—, —S—S—, —C(═O)S—, —SC(═O)—, —N(R^{a})C(═O)—, —C(═O)N(R^{a})—, —N(R^{a})C(═O)N(R^{a})—, —OC(═O)N(R^{a})— or —N(R^{a})C(═O)O— or a direct bond;
[0670] L is, at each occurrence, ˜O(C═O)—, wherein ˜ represents a covalent bond to X;
[0671] X is CR^{a};
[0672] Z is alkyl, cycloalkyl or a monovalent moiety comprising at least one polar functional group when n is 1; or Z is alkylene, cycloalkylene or a polyvalent moiety comprising at least one polar functional group when n is greater than 1;
[0673] R^{a} is, at each occurrence, independently H, C₁-C₁₂ alkyl, C₁-C₁₂ hydroxylalkyl, C₁-C₁₂ aminoalkyl, C₁-C₁₂ alkylaminylalkyl, C₁-C₁₂ alkoxyalkyl, C₁-C₁₂ alkoxycarbonyl, C₁-C₁₂ alkylcarbonyloxy, C₁-C₁₂ alkylcarbonyloxyalkyl or C₁-C₁₂ alkylcarbonyl;
[0674] R is, at each occurrence, independently either: (a) H or C₁-C₁₂ alkyl; or (b) R together with the carbon atom to which it is bound is taken together with an adjacent R and the carbon atom to which it is bound to form a carbon-carbon double bond;
[0675] R¹ and R² have, at each occurrence, the following structure, respectively:

[chemical structure]

[0676] a¹ and a² are, at each occurrence, independently an integer from 3 to 12;
[0677] b¹ and b² are, at each occurrence, independently 0 or 1;
[0678] c¹ and c² are, at each occurrence, independently an integer from 5 to 10;
[0679] d¹ and d² are, at each occurrence, independently an integer from 5 to 10;
[0680] y is, at each occurrence, independently an integer from 0 to 2; and
[0681] n is an integer from 1 to 6,
[0682] wherein each alkyl, alkylene, hydroxylalkyl, aminoalkyl, alkylaminylalkyl, alkoxyalkyl, alkoxycarbonyl, alkylcarbonyloxy, alkylcarbonyloxyalkyl and alkylcarbonyl is optionally substituted with one or more substituent.

[0683] In some embodiments of Formula (IV), G¹ and G² are each independently

### —O(C═O)— or —(C═O)O—.

[0684] In other embodiments of Formula (IV), X is CH.

[0685] In different embodiments of Formula (IV), the sum of a¹+b¹+c¹ or the sum of a²+b²+c² is an integer from 12 to 26.

[0686] In still other embodiments of Formula (IV), a¹ and a² are independently an integer from 3 to 10. For example, in some embodiments a¹ and a² are independently an integer from 4 to 9.

[0687] In various embodiments of Formula (IV), b¹ and b² are 0. In different embodiments, b¹ and b² are 1.

[0688] In more embodiments of Formula (IV), c¹, c², d¹ and d² are independently an integer from 6 to 8.

[0689] In other embodiments of Formula (IV), c and c² are, at each occurrence, independently an integer from 6 to 10, and d¹ and d² are, at each occurrence, independently an integer from 6 to 10.

[0690] In other embodiments of Formula (IV), c¹ and c² are, at each occurrence, independently an integer from 5 to 9, and d¹ and d² are, at each occurrence, independently an integer from 5 to 9.

[0691] In more embodiments of Formula (IV), Z is alkyl, cycloalkyl or a monovalent moiety comprising at least one polar functional group when n is 1. In other embodiments, Z is alkyl.

[0692] In various embodiments of the foregoing Formula (IV), R is, at each occurrence, independently either: (a) H or methyl; or (b) R together with the carbon atom to which it is bound is taken together with an adjacent R and the carbon atom to which it is bound to form a carbon-carbon double bond. In certain embodiments, each R is H. In other embodiments at least one R together with the carbon atom to which it is bound is taken together with an adjacent R and the carbon atom to which it is bound to form a carbon-carbon double bond.

[0693] In other embodiments of the compound of Formula (IV), R¹ and R² independently have one of the following structures:

[chemical structure]

[0694] In certain embodiments of Formula (IV), the compound has one of the following structures:

[chemical structure]

[chemical structure]

[chemical structure]

[chemical structure]

[0695] In still different embodiments the cationic lipid of Embodiments 1, 2, 3, 4 or 5 has the structure of Formula (V):

[chemical structure]

or a pharmaceutically acceptable salt, prodrug or stereoisomer thereof, wherein:
[0696] one of G¹ or G² is, at each occurrence, —O(C═O)—, —(C═O)O—, —C(═O)—, —O—, —S(O)_{y}—, —S—S—, —C(═O)S—, SC(═O)—, —N(R^{a})C(═O)—, —C(═O)N(R^{a})—, —N(R^{a})C(═O)N(R^{a})—, —OC(═O)N(R^{a})— or —N(R^{a})C(═O)O—, and the other of G¹ or G² is, at each occurrence, —O(C═O)—, —(C═O)O—, —C(═O)—, —O—, —S(O)—, —S—S—, —C(═O)S—, —SC(═O)—, —N(R^{a})C(═O)—, —C(═O)N(R^{a})—, —N(R^{a})C(═O)N(R^{a})—, —OC(═O)N(R^{a})— or —N(R^{a})C(═O)O— or a direct bond;
[0697] L is, at each occurrence, ˜O(C═O)—, wherein ˜ represents a covalent bond to X;
[0698] X is CR^{a};
[0699] Z is alkyl, cycloalkyl or a monovalent moiety comprising at least one polar functional group when n is 1; or Z is alkylene, cycloalkylene or a polyvalent moiety comprising at least one polar functional group when n is greater than 1;
[0700] R^{a} is, at each occurrence, independently H, C₁-C₁₂ alkyl, C₁-C₁₂ hydroxylalkyl, C₁-C₁₂ aminoalkyl, C₁-C₁₂ alkylaminylalkyl, C₁-C₁₂ alkoxyalkyl, C₁-C₁₂alkoxycarbonyl, C₁-C₁₂ alkylcarbonyloxy, C₁-C₁₂ alkylcarbonyloxyalkyl or C₁-C₁₂ alkylcarbonyl;
[0701] R is, at each occurrence, independently either: (a) H or C₁-C₁₂ alkyl; or (b) R together with the carbon atom to which it is bound is taken together with an adjacent R and the carbon atom to which it is bound to form a carbon-carbon double bond;
[0702] R¹ and R² have, at each occurrence, the following structure, respectively:

[chemical structure]

[0703] R′ is, at each occurrence, independently H or C₁-C₁₂ alkyl;
[0704] a¹ and a² are, at each occurrence, independently an integer from 3 to 12;
[0705] b¹ and b² are, at each occurrence, independently 0 or 1;
[0706] c¹ and c² are, at each occurrence, independently an integer from 2 to 12;
[0707] d¹ and d² are, at each occurrence, independently an integer from 2 to 12;
[0708] y is, at each occurrence, independently an integer from 0 to 2; and
[0709] n is an integer from 1 to 6,
[0710] wherein a¹, a², c¹, c², d¹ and d² are selected such that the sum of a¹+c¹+d¹ is an integer from 18 to 30, and the sum of a²+c²+d² is an integer from 18 to 30, and wherein each alkyl, alkylene, hydroxylalkyl, aminoalkyl, alkylaminylalkyl, alkoxyalkyl, alkoxycarbonyl, alkylcarbonyloxy, alkylcarbonyloxyalkyl and alkylcarbonyl is optionally substituted with one or more substituent.

[0711] In certain embodiments of Formula (V), G¹ and G² are each independently —O(C═O)— or —(C═O)O—.

[0712] In other embodiments of Formula (V), X is CH.

[0713] In some embodiments of Formula (V), the sum of a¹+c¹+d¹ is an integer from 20 to 30, and the sum of a²+c²+d² is an integer from 18 to 30. In other embodiments, the sum of a¹+c¹+d¹ is an integer from 20 to 30, and the sum of a²+c²+d² is an integer from 20 to 30. In more embodiments of Formula (V), the sum of a¹+b¹+c¹ or the sum of a²+b²+c² is an integer from 12 to 26. In other embodiments, a¹, a², c¹, c², d¹ and d² are selected such that the sum of a¹+c¹+d¹ is an integer from 18 to 28, and the sum of a²+c²+d² is an integer from 18 to 28, In still other embodiments of Formula (V), a¹ and a² are independently an integer from 3 to 10, for example an integer from 4 to 9.

[0714] In yet other embodiments of Formula (V), b¹ and b² are 0. In different embodiments b¹ and b² are 1.

[0715] In certain other embodiments of Formula (V), c¹, c², d¹ and d² are independently an integer from 6 to 8.

[0716] In different other embodiments of Formula (V), Z is alkyl or a monovalent moiety comprising at least one polar functional group when n is 1; or Z is alkylene or a polyvalent moiety comprising at least one polar functional group when n is greater than 1

[0717] In more embodiments of Formula (V), Z is alkyl, cycloalkyl or a monovalent moiety comprising at least one polar functional group when n is 1. In other embodiments, Z is alkyl.

[0718] In other different embodiments of Formula (V), R is, at each occurrence, independently either: (a) H or methyl; or (b) R together with the carbon atom to which it is bound is taken together with an adjacent R and the carbon atom to which it is bound to form a carbon-carbon double bond. For example in some embodiments each R is H. In other embodiments at least one R together with the carbon atom to which it is bound is taken together with an adjacent R and the carbon atom to which it is bound to form a carbon-carbon double bond.

[0719] In more embodiments, each R′ is H.

[0720] In certain embodiments of Formula (V), the sum of a¹+c¹+d¹ is an integer from 20 to 25, and the sum of a²+c²+d² is an integer from 20 to 25.

[0721] In other embodiments of Formula (V), R¹ and R² independently have one of the following structures:

[chemical structure]

[0722] In more embodiments of Formula (V), the compound has one of the following structures:

[chemical structure]

[chemical structure]

[chemical structure]

[chemical structure]

[0723] In any of the foregoing embodiments of Formula (IV) or (V), n is 1. In other of the foregoing embodiments of Formula (IV) or (V), n is greater than 1.

[0724] In more of any of the foregoing embodiments of Formula (IV) or (V), Z is a mono- or polyvalent moiety comprising at least one polar functional group. In some embodiments, Z is a monovalent moiety comprising at least one polar functional group. In other embodiments, Z is a polyvalent moiety comprising at least one polar functional group.

[0725] In more of any of the foregoing embodiments of Formula (IV) or (V), the polar functional group is a hydroxyl, alkoxy, ester, cyano, amide, amino, alkylaminyl, heterocyclyl or heteroaryl functional group.

[0726] In any of the foregoing embodiments of Formula (IV) or (V), Z is hydroxyl, hydroxylalkyl, alkoxyalkyl, amino, aminoalkyl, alkylaminyl, alkylaminylalkyl, heterocyclyl or heterocyclylalkyl.

[0727] In some other embodiments of Formula (IV) or (V), Z has the following structure:

[chemical structure]

wherein:
[0728] R⁵ and R⁶ are independently H or C₁-C₆ alkyl;
[0729] R⁷ and R⁸ are independently H or C₁-C₆ alkyl or R⁷ and R⁸, together with the nitrogen atom to which they are attached, join to form a 3-7 membered heterocyclic ring; and
[0730] x is an integer from 0 to 6.

[0731] In still different embodiments of Formula (IV) or (V), Z has the following structure:

[chemical structure]

wherein:
[0732] R⁵ and R⁶ are independently H or C₁-C₆ alkyl;
[0733] R⁷ and R⁸ are independently H or C₁-C₆ alkyl or R⁷ and R⁸, together with the nitrogen atom to which they are attached, join to form a 3-7 membered heterocyclic ring; and
[0734] x is an integer from 0 to 6.

[0735] In still different embodiments of formula (IV) or (V), Z has the following structure:

[chemical structure]

wherein:
[0736] R⁵ and R⁶ are independently H or C₁-C₆ alkyl;
[0737] R⁷ and R⁸ are independently H or C₁-C₆ alkyl or R₇ and R⁸, together with the nitrogen atom to which they are attached, join to form a 3-7 membered heterocyclic ring; and
[0738] x is an integer from 0 to 6.

[0739] In some other embodiments of Formula (IV) or (V), Z is hydroxylalkyl, cyanoalkyl or an alkyl substituted with one or more ester or amide groups.

[0740] For example, in any of the foregoing embodiments of Formula (IV) or (V), Z has one of the following structures:

[chemical structure]

[0741] In other embodiments of Formula (IV) or (V), Z-L has one of the following structures:

[chemical structure]

[chemical structure]

[chemical structure]

[chemical structure]

[chemical structure]

[0742] In other embodiments, Z-L has one of the following structures:

[chemical structure]

[0743] In still other embodiments, X is CH and Z-L has one of the following structures:

[chemical structure]

[0744] In various different embodiments, a cationic lipid of any one Embodiments 1, 2, 3, 4 or 5 has one of the structures set forth in Table 4 below.

TABLE 4
Representative Compounds of Formula (IV) or (V)

| No. | Structure |
|---|---|
| IV-1 | [chemical structure] |
| IV-2 | [chemical structure] |
| IV-3 | [chemical structure] |

[0745] In one embodiment, the cationic lipid is a compound having the following structure (VI):

[chemical structure]

or a pharmaceutically acceptable salt, tautomer, prodrug or stereoisomer thereof, wherein:
[0746] L¹ and L² are each independently —O(C═O)—, —(C═O)O—, —C(═O)—, —O—, —S(O)ₓ—, —S—S—, —C(═O)S—, —SC(═O)—, —NR^{a}C(═O)—, —C(═O)NR^{a}—, —NR^{a}C(═O)NR^{a}—, —OC(═O)NR^{a}—, —NR^{a}C(═O)O— or a direct bond;
[0747] G¹ is C₁-C₂ alkylene, —(C═O)—, —O(C═O)—, —SC(═O)—, —NR^{a}C(═O)— or a direct bond;
[0748] G² is —C(═O)—, —(C═O)O—, —C(═O)S—, —C(═O)NR^{a}— or a direct bond;
[0749] G³ is C₁-C₆ alkylene;
[0750] R^{a} is H or C₁-C₁₂ alkyl;
[0751] R^{1a} and R^{1b} are, at each occurrence, independently either: (a) H or C₁-C₁₂ alkyl; or (b) R^{1a} is H or C₁-C₁₂ alkyl, and R^{1b} together with the carbon atom to which it is bound is taken together with an adjacent R^{1b} and the carbon atom to which it is bound to form a carbon-carbon double bond;
[0752] R^{2a} and R^{2b} are, at each occurrence, independently either: (a) H or C₁-C₁₂ alkyl; or (b) R^{2a} is H or C₁-C₁₂ alkyl, and R^{2b} together with the carbon atom to which it is bound is taken together with an adjacent R^{2b} and the carbon atom to which it is bound to form a carbon-carbon double bond;
[0753] R^{3a} and R^{3b} are, at each occurrence, independently either (a): H or C₁-C₁₂ alkyl; or (b) R^{3a} is H or C₁-C₁₂ alkyl, and R^{3b} together with the carbon atom to which it is bound is taken together with an adjacent R^{3b} and the carbon atom to which it is bound to form a carbon-carbon double bond;
[0754] R^{4a} and R^{4b} are, at each occurrence, independently either: (a) H or C₁-C₁₂ alkyl; or (b) R^{4a} is H or C₁-C₁₂ alkyl, and R^{4b} together with the carbon atom to which it is bound is taken together with an adjacent R^{4b} and the carbon atom to which it is bound to form a carbon-carbon double bond;
[0755] R⁵ and R⁶ are each independently H or methyl;
[0756] R⁷ is H or C₁-C₂₀ alkyl;
[0757] R₈ is OH, —N(R⁹)(C═O)R¹⁰, —(C═O)NR⁹R¹⁰, —NR⁹R¹⁰, —(C═O)OR¹¹ or —O(C═O)R¹¹, provided that G³ is C₄-C₆ alkylene when R⁸ is —NR⁹R¹⁰,
[0758] R⁹ and R¹⁰ are each independently H or C₁-C₁₂ alkyl;
[0759] R¹¹ is aralkyl;
[0760] a, b, c and d are each independently an integer from 1 to 24; and
[0761] x is 0, 1 or 2,
   wherein each alkyl, alkylene and aralkyl is optionally substituted.

[0762] In some embodiments of structure (VI), L¹ and L² are each independently —O(C═O)—, —(C═O)O— or a direct bond. In other embodiments, G¹ and G² are each independently —(C═O)— or a direct bond. In some different embodiments, L1 and L² are each independently —O(C═O)—, —(C═O)O— or a direct bond; and G¹ and G² are each independently —(C═O)— or a direct bond.

[0763] In some different embodiments of structure (VI), L¹ and L² are each independently —C(═O)—, —O—, —S(O)ₓ—, —S—S—, —C(═O)S—, —SC(═O)—, —NR^{a}—, —NR^{a}C(═O)—, —C(═O)NR^{a}—, —NR^{a}C(═O)NR^{a}, —OC(═O)NR^{a}—, —NR^{a}C(═O)O—, —NR^{a}S(O)ₓNR^{a}—, —NR^{a}S(O)ₓ— or —S(O)ₓNR^{a}—.

[0764] In other of the foregoing embodiments of structure (VI), the compound has one of the following structures (VIA) or (VIB).

[chemical structure]

[0765] In some embodiments, the compound has structure (VIA). In other embodiments, the compound has structure (VIB).

[0766] In any of the foregoing embodiments of structure (VI), one of L¹ or L² is —O(C═O)—. For example, in some embodiments each of L¹ and L² are —O(C═O)—.

[0767] In some different embodiments of any of the foregoing, one of L¹ or L² is —(C═O)O—. For example, in some embodiments each of L¹ and L² is —(C═O)O—.

[0768] In different embodiments of structure (VI), one of L¹ or L² is a direct bond. As used herein, a “direct bond” means the group (e.g., L¹ or L²) is absent. For example, in some embodiments each of L¹ and L² is a direct bond.

[0769] In other different embodiments of the foregoing, for at least one occurrence of R^{1a} and R^{1b}, R^{1a} is H or C₁-C₁₂ alkyl, and R^{1b} together with the carbon atom to which it is bound is taken together with an adjacent R^{1b} and the carbon atom to which it is bound to form a carbon-carbon double bond.

[0770] In still other different embodiments of structure (VI), for at least one occurrence of R^{4a} and R^{4b}, R^{4a} is H or C₁-C₁₂ alkyl, and R^{4b} together with the carbon atom to which it is bound is taken together with an adjacent R^{4b} and the carbon atom to which it is bound to form a carbon-carbon double bond.

[0771] In more embodiments of structure (VI), for at least one occurrence of R^{2a} and R^{2b}, R^{2a} is H or C₁-C₁₂ alkyl, and R^{2b} together with the carbon atom to which it is bound is taken together with an adjacent R^{2b} and the carbon atom to which it is bound to form a carbon-carbon double bond.

[0772] In other different embodiments of any of the foregoing, for at least one occurrence of R^{3a} and R^{3b}, R^{3a} is H or C₁-C₁₂ alkyl, and R^{3b} together with the carbon atom to which it is bound is taken together with an adjacent R^{3b} and the carbon atom to which it is bound to form a carbon-carbon double bond.

[0773] It is understood that “carbon-carbon” double bond refers to one of the following structures:

[chemical structure]

wherein R^{c} and R^{d} are, at each occurrence, independently H or a substituent. For example, in some embodiments R^{c} and R^{d} are, at each occurrence, independently H, C₁-C₁₂ alkyl or cycloalkyl, for example H or C₁-C₁₂ alkyl.

[0774] In various other embodiments, the compound has one of the following structures (VIC) or (VID):

[chemical structure]

wherein e, f, g and h are each independently an integer from 1 to 12.

[0775] In some embodiments, the compound has structure (VIC). In other embodiments, the compound has structure (VID).

[0776] In various embodiments of the compounds of structures (VIC) or (VID), e, f, g and h are each independently an integer from 4 to 10.

[0777] In other different embodiments,

[chemical structure]

or both, independently has one of the following structures:

[chemical structure]

[0778] In certain embodiments of the foregoing, a, b, c and d are each independently an integer from 2 to 12 or an integer from 4 to 12. In other embodiments, a, b, c and d are each independently an integer from 8 to 12 or 5 to 9. In some certain embodiments, a is 0. In some embodiments, a is 1. In other embodiments, a is 2. In more embodiments, a is 3. In yet other embodiments, a is 4. In some embodiments, a is 5. In other embodiments, a is 6. In more embodiments, a is 7. In yet other embodiments, a is 8. In some embodiments, a is 9. In other embodiments, a is 10. In more embodiments, a is 11. In yet other embodiments, a is 12. In some embodiments, a is 13. In other embodiments, a is 14. In more embodiments, a is 15. In yet other embodiments, a is 16.

[0779] In some embodiments of structure (VI), b is 1. In other embodiments, b is 2. In more embodiments, b is 3. In yet other embodiments, b is 4. In some embodiments, b is 5. In other embodiments, b is 6. In more embodiments, b is 7. In yet other embodiments, b is 8. In some embodiments, b is 9. In other embodiments, b is 10. In more embodiments, b is 11. In yet other embodiments, b is 12. In some embodiments, b is 13. In other embodiments, b is 14. In more embodiments, b is 15. In yet other embodiments, b is 16.

[0780] In some embodiments of structure (VI), c is 1. In other embodiments, c is 2. In more embodiments, c is 3. In yet other embodiments, c is 4. In some embodiments, c is 5. In other embodiments, c is 6. In more embodiments, c is 7. In yet other embodiments, c is 8. In some embodiments, c is 9. In other embodiments, c is 10. In more embodiments, c is 11. In yet other embodiments, c is 12. In some embodiments, c is 13. In other embodiments, c is 14. In more embodiments, c is 15. In yet other embodiments, c is 16.

[0781] In some certain embodiments of structure (VI), d is 0. In some embodiments, d is 1. In other embodiments, d is 2. In more embodiments, d is 3. In yet other embodiments, d is 4. In some embodiments, d is 5. In other embodiments, d is 6. In more embodiments, d is 7. In yet other embodiments, d is 8. In some embodiments, d is 9. In other embodiments, d is 10. In more embodiments, d is 11. In yet other embodiments, d is 12. In some embodiments, d is 13. In other embodiments, d is 14. In more embodiments, d is 15. In yet other embodiments, d is 16.

[0782] In some embodiments of structure (VI), e is 1. In other embodiments, e is 2. In more embodiments, e is 3. In yet other embodiments, e is 4. In some embodiments, e is 5. In other embodiments, e is 6. In more embodiments, e is 7. In yet other embodiments, e is 8. In some embodiments, e is 9. In other embodiments, e is 10. In more embodiments, e is 11. In yet other embodiments, e is 12.

[0783] In some embodiments of structure (VI), f is 1. In other embodiments, f is 2. In more embodiments, f is 3. In yet other embodiments, f is 4. In some embodiments, f is 5. In other embodiments, f is 6. In more embodiments, f is 7. In yet other embodiments, f is 8. In some embodiments, f is 9. In other embodiments, f is 10. In more embodiments, f is 11. In yet other embodiments, f is 12.

[0784] In some embodiments of structure (VI), g is 1. In other embodiments, g is 2. In more embodiments, g is 3. In yet other embodiments, g is 4. In some embodiments, g is 5. In other embodiments, g is 6. In more embodiments, g is 7. In yet other embodiments, g is 8. In some embodiments, g is 9. In other embodiments, g is 10. In more embodiments, g is 11. In yet other embodiments, g is 12.

[0785] In some embodiments of structure (VI), h is 1. In other embodiments, e is 2. In more embodiments, h is 3. In yet other embodiments, h is 4. In some embodiments, e is 5. In other embodiments, h is 6. In more embodiments, h is 7. In yet other embodiments, h is 8. In some embodiments, h is 9. In other embodiments, h is 10. In more embodiments, h is 11. In yet other embodiments, h is 12.

[0786] In some other various embodiments of structure (VI), a and d are the same. In some other embodiments, b and c are the same. In some other specific embodiments a and d are the same and b and c are the same.

[0787] The sum of a and b and the sum of c and d are factors which may be varied to obtain a lipid having the desired properties. In one embodiment, a and b are chosen such that their sum is an integer ranging from 14 to 24. In other embodiments, c and d are chosen such that their sum is an integer ranging from 14 to 24. In further embodiment, the sum of a and b and the sum of c and d are the same. For example, in some embodiments the sum of a and b and the sum of c and d are both the same integer which may range from 14 to 24. In still more embodiments, a. b, c and d are selected such that the sum of a and b and the sum of c and d is 12 or greater.

[0788] The substituents at R^{1a}, R^{2a}, R^{3a} and R^{4a} are not particularly limited. In some embodiments, at least one of R^{1a}, R^{2a}, R^{3a} and R^{4a} is H. In certain embodiments R^{1a}, R^{2a}, R^{3a} and R^{4a} are H at each occurrence. In certain other embodiments at least one of R^{1a}, R^{2a}, R^{3a} and R^{4a} is C₁-C₁₂ alkyl. In certain other embodiments at least one of R^{1a}, R^{2a}, R^{3a} and R^{4a} is C₁-C₈ alkyl. In certain other embodiments at least one of R^{1a}R^{2a}, R^{3a} and R^{4a} is C₁-C₆ alkyl. In some of the foregoing embodiments, the C₁-C₈ alkyl is methyl, ethyl, n-propyl, iso-propyl, n-butyl, iso-butyl, tert-butyl, n-hexyl or n-octyl.

[0789] In certain embodiments of the foregoing, R^{1a}, R^{1b}, R^{4a} and R^{4b} are C₁-C₁₂ alkyl at each occurrence.

[0790] In further embodiments of the foregoing, at least one of R^{1b}, R^{2b}, R^{3b} and R^{4b} is H or R^{1b}, R^{2b}, R^{3b} and R^{4b} are H at each occurrence.

[0791] In certain embodiments of the foregoing, R^{1b} together with the carbon atom to which it is bound is taken together with an adjacent R^{1b} and the carbon atom to which it is bound to form a carbon-carbon double bond. In other embodiments of the foregoing R^{4b} together with the carbon atom to which it is bound is taken together with an adjacent R^{4b} and the carbon atom to which it is bound to form a carbon-carbon double bond.

[0792] The substituents at R⁵ and R⁶ are not particularly limited in the foregoing embodiments. In certain embodiments one of R⁵ or R⁶ is methyl. In other embodiments each of R⁵ or R⁶ is methyl.

[0793] The substituents at R⁷ are not particularly limited in the foregoing embodiments. In certain embodiments R⁷ is C₆-C₁₆ alkyl. In some other embodiments, R⁷ is C₆-C₉ alkyl. In some of these embodiments, R⁷ is substituted with —(C═)OR^{b}, —O(C═O)R^{b}, —C(═O)R^{b}, —OR^{b}, —S(O)ₓR^{b}, —S—SR^{b}, —C(═O)SR^{b}, —SC(═O)R^{b}, —NR^{a}R^{b}, —NR^{a}C(═O)R^{b}, —C(═O)NR^{a}R^{b}, —NR^{a}C(═O)NR^{a}R^{b}, —OC(═O)NR^{a}R^{b}, —NR^{a}C(═O)OR^{b}, —NR^{a}S(O)ₓNR^{a}R^{b}, —NR^{a}S(O)ₓR^{b} or —S(O)ₓNR^{a}R^{b}, wherein: R^{a} is H or C₁-C₁₂ alkyl; R^{b} is C₁-C₁₅ alkyl; and x is 0, 1 or 2. For example, in some embodiments R⁷ is substituted with —(C═O)OR or —O(C═O)R^{b}.

[0794] In various of the foregoing embodiments of structure (VI), R^{b} is branched C₃-C₁₅ alkyl. For example, in some embodiments R^{b} has one of the following structures:

[chemical structure]

[0795] In certain embodiments, R⁸ is OH.

[0796] In other embodiments of structure (VI), RS is —N(R⁹)(C═O)R¹⁰. In some other embodiments, R⁸ is —(C═O)NR⁹R¹⁰. In still more embodiments, R⁸ is —NR⁹R¹⁰. In some of the foregoing embodiments, R⁹ and R¹⁰ are each independently H or C₁-C₈ alkyl, for example H or C₁-C₃ alkyl. In more specific of these embodiments, the C₁-C₈ alkyl or C₁-C₃ alkyl is unsubstituted or substituted with hydroxyl. In other of these embodiments, R⁹ and R¹⁰ are each methyl.

[0797] In yet more embodiments of structure (VI), R⁸ is —(C═O)OR¹¹. In some of these embodiments R¹¹ is benzyl.

[0798] In yet more specific embodiments of structure (VI), R⁸ has one of the following structures:

[chemical structure]

[0799] In still other embodiments of the foregoing compounds, G³ is C₂-C₅ alkylene, for example C₂-C₄ alkylene, C₃ alkylene or C₄ alkylene. In some of these embodiments, R⁸ is OH. In other embodiments, G² is absent and R⁷ is C₁-C₂ alkylene, such as methyl.

[0800] In various different embodiments, the compound has one of the structures set forth in Table 5 below.

TABLE 5
Representative cationic lipids of structure (VI)

| No. | Structure |
|---|---|
| VI-1 | [chemical structure] |
| VI-2 | [chemical structure] |
| VI-3 | [chemical structure] |
| VI-4 | [chemical structure] |
| VI-5 | [chemical structure] |
| VI-6 | [chemical structure] |
| VI-7 | [chemical structure] |
| VI-8 | [chemical structure] |
| VI-9 | [chemical structure] |
| VI-10 | [chemical structure] |
| VI-11 | [chemical structure] |
| VI-12 | [chemical structure] |
| VI-13 | [chemical structure] |
| VI-14 | [chemical structure] |
| VI-15 | [chemical structure] |
| VI-16 | [chemical structure] |
| VI-17 | [chemical structure] |
| VI-18 | [chemical structure] |
| VI-19 | [chemical structure] |
| VI-20 | [chemical structure] |
| VI-21 | [chemical structure] |
| VI-22 | [chemical structure] |
| VI-23 | [chemical structure] |
| VI-24 | [chemical structure] |
| VI-25 | [chemical structure] |
| VI-26 | [chemical structure] |
| VI-27 | [chemical structure] |
| VI-28 | [chemical structure] |
| VI-29 | [chemical structure] |
| VI-30 | [chemical structure] |
| VI-31 | [chemical structure] |
| VI-32 | [chemical structure] |
| VI-33 | [chemical structure] |
| VI-34 | [chemical structure] |
| VI-35 | [chemical structure] |
| VI-36 | [chemical structure] |
| VI-37 | [chemical structure] |

[0801] In one embodiment, the cationic lipid is a compound having the following structure (VII):

[chemical structure]

or a pharmaceutically acceptable salt, prodrug or stereoisomer thereof, wherein:
[0802] X and X′ are each independently N or CR;
[0803] Y and Y′ are each independently absent, —O(C═O)—, —(C═O)O— or NR, provided that:
   [0804] a)Y is absent when X is N;
   [0805] b) Y′ is absent when X′ is N;
   [0806] c) Y is —O(C═O)—, —(C═O)O— or NR when X is CR; and
   [0807] d) Y is —O(C═O)—, —(C═O)O— or NR when X is CR,
[0808] L¹ and L^{1′} are each independently —O(C═O)R¹, —(C═O)OR¹, —C(═O)R¹, —OR¹, —S(O)_{z}R¹, —S—SR¹, —C(═O)SR¹, —SC(═O)R¹, —NR^{a}C(═O)R¹, —C(═O)NR^{b}R^{c}, —NR^{a}C(═O)NR^{b}R^{c}, —OC(═O)NR^{b}R^{c} or —NR^{a}C(═O)OR¹;
[0809] L² and L^{2′} are each independently —O(C═O)R², —(C═O)OR², —C(═O)R², —OR², —S(O)_{z}R², —S—SR², —C(═O)SR², —SC(═O)R², —NR^{d}C(═O)R², —C(═O)NR^{e}R^{f}, —NR^{d}C(═O)NR^{e}R^{f}, —OC(═O)NR^{e}R^{f}; —NR^{d}C(═O)OR² or a direct bond to R²;
[0810] G¹, G^{1′}, G² and G^{2′} are each independently C₂-C₁₂ alkylene or C₂-C₁₂ alkenylene;
[0811] G³ is C₂-C₂₄ heteroalkylene or C₂-C₂₄ heteroalkenylene;
[0812] R^{a}, R^{b}, R^{d} and R^{c} are, at each occurrence, independently H, C₁-C₁₂ alkyl or C₂-C₁₂ alkenyl;
[0813] R^{c} and R^{f} are, at each occurrence, independently C₁-C₁₂ alkyl or C₂-C₁₂ alkenyl;
[0814] R is, at each occurrence, independently H or C₁-C₁₂ alkyl;
[0815] R¹ and R² are, at each occurrence, independently branched C₆-C₂₄ alkyl or branched C₆-C₂₄ alkenyl;
[0816] z is 0, 1 or 2, and
   wherein each alkyl, alkenyl, alkylene, alkenylene, heteroalkylene and heteroalkenylene is independently substituted or unsubstituted unless otherwise specified.

[0817] In other different embodiments of structure (VII):
[0818] X and X′ are each independently N or CR;
[0819] Y and Y′ are each independently absent or NR, provided that:
   [0820] a)Y is absent when X is N;
   [0821] b) Y′ is absent when X′ is N;
   [0822] c) Y is NR when X is CR; and
   [0823] d) Y′ is NR when X′ is CR,
[0824] L¹ and L^{1′} are each independently —O(C═O)R¹, —(C═O)OR¹, —C(═O)R¹, —OR¹, —S(O)_{z}R¹, —S—SR¹, —C(═O)SR¹, —SC(═O)R¹, —NR^{a}C(═O)R¹, —C(═O)NR^{b}R^{c}, —NR^{a}C(═O)NR^{b}R^{c}, —OC(═O)NR^{b}R^{c} or —NR^{a}C(═O)OR¹;
[0825] L² and L^{2′} are each independently —O(C═O)R², —(C═O)OR², —C(═O)R², —OR², —S(O)_{z}R², —S—SR², —C(═O)SR², —SC(═O)R², —NR^{d}C(═O)R², —C(═O)NR^{e}R^{f}, —NR^{d}C(═O)NR^{e}R^{f}, —OC(═O)NR^{e}R^{f}; —NR^{d}C(═O)OR² or a direct bond to R²;
[0826] G¹, G^{1′}, G² and G^{2′} are each independently C₂-C₁₂ alkylene or C₂-C₁₂ alkenylene;
[0827] G³ is C₂-C₂₄ alkyleneoxide or C₂-C₂₄ alkenyleneoxide;
[0828] R^{a}, R^{b}, Rd and Re are, at each occurrence, independently H, C₁-C₁₂ alkyl or C₂-C₁₂ alkenyl;
[0829] R^{c} and R^{f}are, at each occurrence, independently C₁-C₁₂ alkyl or C₂-C₁₂ alkenyl;
[0830] R is, at each occurrence, independently H or C₁-C₁₂ alkyl;
[0831] R¹ and R² are, at each occurrence, independently branched C₆-C₂₄ alkyl or branched C₆-C₂₄ alkenyl;
[0832] z is 0, 1 or 2, and
   wherein each alkyl, alkenyl, alkylene, alkenylene, alkyleneoxide and alkenyleneoxide is independently substituted or unsubstituted unless otherwise specified.

[0833] In some embodiments of structure (VII), G³ is C₂-C₂₄ alkyleneoxide or C₂-C₂₄ alkenyleneoxide. In certain embodiments, G³ is unsubstituted. In other embodiments, G³ is substituted, for example substituted with hydroxyl. In more specific embodiments G³ is C₂-C₁₂ alkyleneoxide, for example, in some embodiments G³ is C₃-C₇ alkyleneoxide or in other embodiments G³ is C₃-C₁₂ alkyleneoxide.

[0834] In other embodiments of structure (VII), G³ is C₂-C₂₄ alkyleneaminyl or C₂-C₂₄ alkenyleneaminyl, for example C₆-C₁₂ alkyleneaminyl. In some of these embodiments, G³ is unsubstituted. In other of these embodiments, G³ is substituted with C₁-C₆ alkyl.

[0835] In some embodiments of structure (VII), X and X′ are each N, and Y and Yare each absent. In other embodiments, X and X′ are each CR, and Y and Y′ are each NR. In some of these embodiments, R is H.

[0836] In certain embodiments of structure (VII), X and X′ are each CR, and Y and Y′ are each independently —O(C═O)— or —(C═O)O—.

[0837] In some of the foregoing embodiments of structure (VII), the compound has one of the following structures (VIIA), (VIIB), (VIIC), (VIID), (VIIE), (VIIF), (VIIG) or (VIIH):

[chemical structure]

wherein R^{d} is, at each occurrence, independently H or optionally substituted C₁-C₆ alkyl. For example, in some embodiments Rd is H. In other embodiments, Rd is C₁-C₆ alkyl, such as methyl. In other embodiments, R^{d} is substituted C₁-C₆ alkyl, such as C₁-C₆ alkyl substituted with —O(C═O)R, —(C═O)OR, —NRC(═O)R or —C(═O)N(R)₂, wherein R is, at each occurrence, independently H or C₁-C₁₂ alkyl.

[0838] In some of the foregoing embodiments of structure (VII), L¹ and L^{1′} are each independently —O(C═O)R¹, —(C═O)OR′ or —C(═O)NR^{b}R^{c}, and L² and L^{2′} are each independently —O(C═O)R², —(C═O)OR² or —C(═O)NR^{e}R^{f}. For example, in some embodiments L¹ and L^{1′} are each —(C═O)OR¹, and L² and L^{2′} are each —(C═O)OR². In other embodiments L¹ and L^{1′} are each —(C═O)OR¹, and L² and L^{2′} are each —C(═O)NR^{e}R^{f}. In other embodiments L¹ and L^{1′} are each —C(═O)NR^{b}R^{c}, and L² and L^{2′} are each —C(═O)NR^{e}R^{f}.

[0839] In some embodiments of the foregoing, G¹, G^{1′}, G² and G^{2′} are each independently C₂-C₈ alkylene, for example C₄-C₈ alkylene.

[0840] In some of the foregoing embodiments of structure (VII), R¹ or R², are each, at each occurrence, independently branched C₆-C₂₄ alkyl. For example, in some embodiments, R¹ and R² at each occurrence, independently have the following structure:

[chemical structure]

wherein:
[0841] R^{7a} and R^{7b} are, at each occurrence, independently H or C₁-C₁₂ alkyl; and
[0842] a is an integer from 2 to 12,
   wherein R^{7a}, R^{7b} and a are each selected such that R¹ and R² each independently comprise from 6 to 20 carbon atoms. For example, in some embodiments a is an integer ranging from 5 to 9 or from 8 to 12.

[0843] In some of the foregoing embodiments of structure (VII), at least one occurrence of R^{7a} is H. For example, in some embodiments, R^{7a} is H at each occurrence. In other different embodiments of the foregoing, at least one occurrence of R^{7b} is C₁-C₈alkyl. For example, in some embodiments, C₁-C₈ alkyl is methyl, ethyl, n-propyl, iso-propyl, n-butyl, iso-butyl, tert-butyl, n-hexyl or n-octyl.

[0844] In different embodiments of structure (VII), R¹ or R², or both, at each occurrence independently has one of the following structures:

[chemical structure]

[0845] In some of the foregoing embodiments of structure (VII), R^{b}, R^{c}, R^{e} and R^{f}, when present, are each independently C₃-C₁₂ alkyl. For example, in some embodiments R^{b}, R^{c}, R^{e} and R^{f}, when present, are n-hexyl and in other embodiments R^{b}, R^{c}, R^{e} and R^{f}, when present, are n-octyl.

[0846] In various different embodiments of structure (VII), the cationic lipid has one of the structures set forth in Table 6 below.

TABLE 6
Representative cationic lipids of structure (VII)

| No. | Structure |
|---|---|
| VII-1 | [chemical structure] |
| VII-2 | [chemical structure] |
| VII-3 | [chemical structure] |
| VII-4 | [chemical structure] |
| VII-5 | [chemical structure] |
| VII-6 | [chemical structure] |
| VII-7 | [chemical structure] |
| VII-8 | [chemical structure] |
| VII-9 | [chemical structure] |
| VII-10 | [chemical structure] |
| VII-11 | [chemical structure] |

[0847] In one embodiment, the cationic lipid is a compound having the following structure (VIII):

[chemical structure]

or a pharmaceutically acceptable salt, prodrug or stereoisomer thereof, wherein:
[0848] X is N, and Y is absent; or X is CR, and Y is NR;
[0849] L¹ is —O(C═O)R¹, —(C═O)OR¹, —C(═O)R¹, —OR¹, —S(O)ₓR¹, —S—SR¹, —C(═O)SR¹, —SC(═O)R¹, —NR^{a}C(═O)R¹, —C(═O)NR^{b}R^{c}, —NR^{a}C(═O)NR^{b}R^{c}, —OC(═O)NR^{b}R^{c} or —NR^{a}C(═O)OR¹;
[0850] L² is —O(C═O)R², —(C═O)OR², —C(═O)R², —OR², —S(O)ₓR², —S—SR², —C(═O)SR², —SC(═O)R², —NR^{d}C(═O)R², —C(═O)NR^{e}R^{f}, —NR^{d}C(═O)NR^{e}R^{f}, —OC(═O)NR^{e}R^{f}; —NR^{d}C(═O)OR² or a direct bond to R²;
[0851] L³ is —O(C═O)R³ or —(C═O)OR³
[0852] G¹ and G² are each independently C₂-C₁₂ alkylene or C₂-C₁₂ alkenylene;
[0853] G³ is C₁-C₂₄ alkylene, C₂-C₂₄ alkenylene, C₁-C₂₄ heteroalkylene or C₂-C₂₄ heteroalkenylene;
[0854] R^{a}, R^{b}, R^{d} and R^{e} are each independently H or C₁-C₁₂ alkyl or C₁-C₁₂ alkenyl;
[0855] R^{c} and R^{f} are each independently C₁-C₁₂ alkyl or C₂-C₁₂ alkenyl;
[0856] each R is independently H or C₁-C₁₂ alkyl;
[0857] R¹, R² and R³ are each independently C₁-C₂₄ alkyl or C₂-C₂₄ alkenyl; and
[0858] x is 0, 1 or 2, and

[0859] wherein each alkyl, alkenyl, alkylene, alkenylene, heteroalkylene and heteroalkenylene is independently substituted or unsubstituted unless otherwise specified.

[0860] In more embodiments of structure (I):
[0861] X is N, and Y is absent; or X is CR, and Y is NR;
[0862] L¹ is —O(C═O)R¹, —(C═O)OR¹, —C(═O)R¹, —OR¹, —S(O)ₓR¹, —S—SR¹, —C(═O)SR¹, —SC(═O)R¹, —NR^{a}C(═O)R¹, —C(═O)NR^{b}R^{c}, —NR^{a}C(═O)NR^{b}R^{c}, —OC(═O)NR^{b}R^{c} or —NR^{a}C(═O)OR¹;
[0863] L² is —O(C═O)R², —(C═O)OR², —C(═O)R², —OR², —S(O)ₓR², —S—SR², —C(═O)SR², —SC(═O)R², —NR^{d}C(═O)R², —C(═O)NR^{e}R^{f}, —NR^{d}C(═O)NR^{e}R^{f}, —OC(═O)NR^{e}R^{f}; —NR^{d}C(═O)OR² or a direct bond to R²;
[0864] L³ is —O(C═O)R³ or —(C═O)OR³;
[0865] G¹ and G² are each independently C₂-C₁₂ alkylene or C₂-C₁₂ alkenylene;
[0866] G³ is C₁-C₂₄ alkylene, C₂-C₂₄ alkenylene, C₁-C₂₄ heteroalkylene or C₂-C₂₄ heteroalkenylene when X is CR, and Y is NR; and G³ is C₁-C₂₄ heteroalkylene or C₂-C₂₄ heteroalkenylene when X is N, and Y is absent;
[0867] R^{a}, R^{b}, R^{d} and R^{e} are each independently H or C₁-C₁₂ alkyl or C₁-C₁₂ alkenyl;
[0868] R^{c} and R^{f} are each independently C₁-C₁₂ alkyl or C₂-C₁₂ alkenyl;
[0869] each R is independently H or C₁-C₁₂ alkyl;
[0870] R¹, R² and R³ are each independently C₁-C₂₄ alkyl or C₂-C₂₄ alkenyl; and
[0871] x is 0, 1 or 2, and

[0872] wherein each alkyl, alkenyl, alkylene, alkenylene, heteroalkylene and heteroalkenylene is independently substituted or unsubstituted unless otherwise specified.

[0873] In other embodiments of structure (I):
[0874] X is N and Y is absent, or X is CR and Y is NR;
[0875] L¹ is —O(C═O)R¹, —(C═O)OR¹, —C(═O)R¹, —OR¹, —S(O)ₓR¹, —S—SR¹, —C(═O)SR¹, —SC(═O)R¹, —NR^{a}C(═O)R¹, —C(═O)NR^{b}R^{c}, —NR^{a}C(═O)NR^{b}R^{c}, —OC(═O)NR^{b}R^{c} or —NR^{a}C(═O)OR¹;
[0876] L² is —O(C═O)R², —(C═O)OR², —C(═O)R², —OR², —S(O)ₓR², —S—SR², —C(═O)SR², —SC(═O)R², —NR^{d}C(═O)R², —C(═O)NR^{e}R^{f}, —NR^{d}C(═O)NR^{e}R^{f}, —OC(═O)NR^{e}R^{f}; —NR^{d}C(═O)OR² or a direct bond to R²;
[0877] L³ is —O(C═O)R³ or —(C═O)OR³;
[0878] G¹ and G² are each independently C₂-C₁₂ alkylene or C₂-C₁₂ alkenylene;
[0879] G³ is C₁-C₂₄ alkylene, C₂-C₂₄ alkenylene, C₁-C₂₄ heteroalkylene or C₂-C₂₄ heteroalkenylene;
[0880] R^{a}, R^{b}, R^{d} and R^{e} are each independently H or C₁-C₁₂ alkyl or C₁-C₁₂ alkenyl;
[0881] R^{c} and R^{f} are each independently C₁-C₁₂ alkyl or C₂-C₁₂ alkenyl;
[0882] each R is independently H or C₁-C₁₂ alkyl;
[0883] R¹, R² and R³ are each independently branched C₆-C₂₄ alkyl or branched C₆-C₂₄ alkenyl; and
[0884] x is 0, 1 or 2, and
   wherein each alkyl, alkenyl, alkylene, alkenylene, heteroalkylene and heteroalkenylene is independently substituted or unsubstituted unless otherwise specified.

[0885] In certain embodiments of structure (VIII), G³ is unsubstituted. In more specific embodiments G³ is C₂-C₁₂ alkylene, for example, in some embodiments G³ is C₃-C₇ alkylene or in other embodiments G³ is C₃-C₁₂ alkylene. In some embodiments, G³ is C₂ or C₃ alkylene.

[0886] In other embodiments of structure (VIII), G³ is C₁-C₁₂ heteroalkylene, for example C₁-C₁₂ aminylalkylene.

[0887] In certain embodiments of structure (VIII), X is N and Y is absent. In other embodiments, X is CR and Y is NR, for example in some of these embodiments R is H.

[0888] In some of the foregoing embodiments of structure (VIII), the compound has one of the following structures (VIIIA), (VIIIB), (VIIIC) or (VIIID):

[chemical structure]

[0889] In some of the foregoing embodiments of structure (VIII), L¹ is —O(C═O)R¹, —(C═O)OR¹ or —C(═O)NR^{b}R^{c}, and L² is —O(C═O)R², —(C═O)OR² or —C(═O)NR^{e}R^{f}. In other specific embodiments, L¹ is —(C═O)OR¹ and L² is —(C═O)OR². In any of the foregoing embodiments, L³ is —(C═O)OR³.

[0890] In some of the foregoing embodiments of structure (VIII), G¹ and G² are each independently C₂-C₁₂ alkylene, for example C₄-C₁₀ alkylene.

[0891] In some of the foregoing embodiments of structure (VIII), R¹, R² and R³ are each, independently branched C₆-C₂₄ alkyl. For example, in some embodiments, R¹, R² and R³ each, independently have the following structure:

[chemical structure]

wherein:
[0892] R^{7a} and R^{7b} are, at each occurrence, independently H or C₁-C₁₂ alkyl; and
[0893] a is an integer from 2 to 12,
   wherein R^{7a}, R^{7b} and a are each selected such that R¹ and R² each independently comprise from 6 to 20 carbon atoms. For example, in some embodiments a is an integer ranging from 5 to 9 or from 8 to 12.

[0894] In some of the foregoing embodiments of structure (VIII), at least one occurrence of R^{7a} is H. For example, in some embodiments, R^{7a} is H at each occurrence. In other different embodiments of the foregoing, at least one occurrence of R^{7b} is C₁-C₈ alkyl. For example, in some embodiments, C₁-C₈ alkyl is methyl, ethyl, n-propyl, iso-propyl, n-butyl, iso-butyl, tert-butyl, n-hexyl or n-octyl.

[0895] In some of the foregoing embodiments of structure (VIII), X is CR, Y is NR and R³ is C₁-C₁₂ alkyl, such as ethyl, propyl or butyl. In some of these embodiments, R¹ and R² are each independently branched C₆-C₂₄ alkyl.

[0896] In different embodiments of structure (VIII), R¹, R² and R³ each, independently have one of the following structures:

[chemical structure]

[chemical structure]

[0897] In certain embodiments of structure (VIII), R¹ and R² and R³ are each, independently, branched C₆-C₂₄ alkyl and R³ is C₁-C₂₄ alkyl or C₂-C₂₄ alkenyl.

[0898] In some of the foregoing embodiments of structure (VIII), R^{b}, R^{c}, R^{e} and R^{f} are each independently C₃-C₁₂ alkyl. For example, in some embodiments R^{b}, R^{c}, R^{e} and R^{f} are n-hexyl and in other embodiments R^{b}, R^{c}, R^{e} and R^{f} are n-octyl.

[0899] In various different embodiments of structure (VIII), the compound has one of the structures set forth in Table 7 below.

TABLE 7
Representative cationic lipids of structure (VIII)

| No. | Structure |
|---|---|
| VIII-1 | [chemical structure] |
| VIII-2 | [chemical structure] |
| VIII-3 | [chemical structure] |
| VIII-4 | [chemical structure] |
| VIII-5 | [chemical structure] |
| VIII-6 | [chemical structure] |
| VIII-7 | [chemical structure] |
| VIII-8 | [chemical structure] |
| VIII-9 | [chemical structure] |
| VIII-10 | [chemical structure] |
| VIII-11 | [chemical structure] |
| VIII-12 | [chemical structure] |

[0900] In one embodiment, the cationic lipid is a compound having the following structure (IX):

[chemical structure]

or a pharmaceutically acceptable salt, prodrug or stereoisomer thereof, wherein:
[0901] L¹ is —O(C═O)R¹, —(C═O)OR¹, —C(═O)R¹, —OR¹, —S(O)ₓR¹, —S—SR¹, —C(═O)SR¹, —SC(═O)R¹, —NR^{a}C(═O)R¹, —C(═O)NR^{b}R⁴, —NR^{a}C(═O)NR^{b}R^{c}, —OC(═O)NR^{b}R^{c} or —NR^{a}C(═O)OR¹;
[0902] L² is —O(C═O)R², —(C═O)OR², —C(═O)R², —OR², —S(O)ₓR², —S—SR², —C(═O)SR², —SC(═O)R², —NR^{d}C(═O)R², —C(═O)NR^{c}R^{f}, —NR^{d}C(═O)NR^{c}R^{f}, —OC(═O)NR^{e}R^{f}, —NR^{d}C(═O)OR² or a direct bond to R²;
[0903] G¹ and G² are each independently C₂-C₁₂ alkylene or C₂-C₁₂ alkenylene;
[0904] G³ is C₁-C₂₄ alkylene, C₂-C₂₄ alkenylene, C₃-C₅ cycloalkylene or C₃-C₈ cycloalkenylene;
[0905] R^{a}, R^{b}, R^{d} and R^{e} are each independently H or C₁-C₁₂ alkyl or C₁-C₂ alkenyl;
[0906] R^{c} and R^{f} are each independently C₁-C₁₂ alkyl or C₂-C₁₂ alkenyl;
[0907] R¹ and R² are each independently branched C₆-C₂₄ alkyl or branched C₆-C₂₄ alkenyl;
[0908] R³ is —N(R⁴)R⁵;
[0909] R⁴ is C₁-C₁₂ alkyl;
[0910] R⁵ is substituted C₁-C₁ alkyl; and
[0911] x is 0, 1 or 2, and
   wherein each alkyl, alkenyl, alkylene, alkenylene, cycloalkylene, cycloalkenylene, aryl and aralkyl is independently substituted or unsubstituted unless otherwise specified.

[0912] In certain embodiments of structure (XI), G³ is unsubstituted. In more specific embodiments G³ is C₂-C₁₂ alkylene, for example, in some embodiments G³ is C₃-C₇ alkylene or in other embodiments G³ is C₃-C₁₂ alkylene. In some embodiments, G³ is C₂ or C₃ alkylene.

[0913] In some of the foregoing embodiments of structure (IX), the compound has the following structure (IX A):

[chemical structure]

wherein y and z are each independently integers ranging from 2 to 12, for example an integer from 2 to 6, from 4 to 10, or for example 4 or 5. In certain embodiments, y and z are each the same and selected from 4, 5, 6, 7, 8 and 9.

[0914] In some of the foregoing embodiments of structure (IX), L¹ is —O(C═O)R¹, —(C═O)OR¹ or —C(═O)NR^{b}R^{c}, and L² is —O(C═O)R², —(C═O)OR² or —C(═O)NR^{e}R^{f}. For example, in some embodiments L¹ and L² are —(C═O)OR¹ and —(C═O)OR², respectively. In other embodiments L¹ is —(C═O)OR¹ and L² is —C(═O)NR^{e}R^{f}. In other embodiments L¹ is —C(═O)NR^{b}R^{c} and L² is —C(═O)NR^{e}R^{f}.

[0915] In other embodiments of the foregoing, the compound has one of the following structures (IXB), (IXC), (IXD) or (IXE):

[chemical structure]

[0916] In some of the foregoing embodiments, the compound has structure (IXB), in other embodiments, the compound has structure (IXC) and in still other embodiments the compound has the structure (IXD). In other embodiments, the compound has structure (IXE).

[0917] In some different embodiments of the foregoing, the compound has one of the following structures (IXF), (IXG), (IXH) or (IXJ):

[chemical structure]

wherein y and z are each independently integers ranging from 2 to 12, for example an integer from 2 to 6, for example 4.

[0918] In some of the foregoing embodiments of structure (IX), y and z are each independently an integer ranging from 2 to 10, 2 to 8, from 4 to 10 or from 4 to 7. For example, in some embodiments, y is 4, 5, 6, 7, 8, 9, 10, 11 or 12. In some embodiments, z is 4, 5, 6, 7, 8, 9, 10, 11 or 12. In some embodiments, y and z are the same, while in other embodiments y and z are different.

[0919] In some of the foregoing embodiments of structure (IX), R¹ or R², or both is branched C₆-C₂₄ alkyl. For example, in some embodiments, R¹ and R² each, independently have the following structure:

[chemical structure]

wherein:
[0920] R^{7a} and R^{7b} are, at each occurrence, independently H or C₁-C₁₂ alkyl; and
[0921] a is an integer from 2 to 12,
   wherein R^{a}, R^{7b} and a are each selected such that R¹ and R² each independently comprise from 6 to 20 carbon atoms. For example, in some embodiments a is an integer ranging from 5 to 9 or from 8 to 12.

[0922] In some of the foregoing embodiments of structure (IX), at least one occurrence of R^{7a} is H. For example, in some embodiments, R^{7a} is H at each occurrence. In other different embodiments of the foregoing, at least one occurrence of R^{7b} is C₁-C₈ alkyl. For example, in some embodiments, C₁-C₈ alkyl is methyl, ethyl, n-propyl, iso-propyl, n-butyl, iso-butyl, tert-butyl, n-hexyl or n-octyl.

[0923] In different embodiments of structure (IX), R¹ or R², or both, has one of the following structures:

[chemical structure]

[0924] In some of the foregoing embodiments of structure (IX), R^{b}, R^{c}, R^{c} and R^{f} are each independently C₃-C₁₂ alkyl. For example, in some embodiments R^{b}, R^{c}, R^{e} and R^{f} are n-hexyl and in other embodiments R^{b}, R^{c}, R^{e} and R^{f} are n-octyl.

[0925] In any of the foregoing embodiments of structure (IX), R⁴ is substituted or unsubstituted: methyl, ethyl, propyl, n-butyl, n-hexyl, n-octyl or n-nonyl. For example, in some embodiments R⁴ is unsubstituted. In other R⁴ is substituted with one or more substituents selected from the group consisting of —OR^{g}, —NR^{g}C(═O)R^{h}, —C(═O)NR^{g}R^{h}, —C(═O)R^{h}, —OC(═O)R^{h}, —C(═O)OR^{h} and —ORⁱOH, wherein:
[0926] R^{g} is, at each occurrence independently H or C₁-C₆ alkyl;
[0927] R^{h} is at each occurrence independently C₁-C₆ alkyl; and
[0928] Rⁱ is, at each occurrence independently C₁-C₆ alkylene.

[0929] In other of the foregoing embodiments of structure (IX), R⁵ is substituted: methyl ethyl, propyl, n-butyl n-hexyl n-octyl or n-nonyl. In some embodiments, R⁵ is substituted ethyl or substituted propyl. In other different embodiments, R⁵ is substituted with hydroxyl. In still more embodiments, R⁵ is substituted with one or more substituents selected from the group consisting of —OR^{g}, —NR^{g}C(═O)R^{h}, —C(═O)NR^{g}R^{h}, —C(═O)R^{h}, —OC(═O)R^{h}, —C(═O)OR^{h} and —ORⁱOH, wherein:
[0930] R^{g} is, at each occurrence independently H or C₁-C₆ alkyl;
[0931] R^{h} is at each occurrence independently C₁-C₆ alkyl; and
[0932] Rⁱ is, at each occurrence independently C₁-C₆ alkylene.

[0933] In other embodiments of structure (IX), R⁴ is unsubstituted methyl, and R⁵ is substituted: methyl, ethyl, propyl, n-butyl, n-hexyl, n-octyl or n-nonyl. In some of these embodiments, R⁵ is substituted with hydroxyl.

[0934] In some other specific embodiments of structure (IX), R³ has one of the following structures:

[chemical structure]

[0935] In various different embodiments of structure (IX), the cationic lipid has one of the structures set forth in Table 8 below.

TABLE 8
Representative cationic lipids of structure (IX)

| No. | Structure |
|---|---|
| IX-1 | [chemical structure] |
| IX-2 | [chemical structure] |
| IX-3 | [chemical structure] |
| IX-4 | [chemical structure] |
| IX-5 | [chemical structure] |
| IX-6 | [chemical structure] |
| IX-7 | [chemical structure] |
| IX-8 | [chemical structure] |
| IX-9 | [chemical structure] |
| IX-10 | [chemical structure] |
| IX-11 | [chemical structure] |
| IX-12 | [chemical structure] |
| IX-13 | [chemical structure] |
| IX-14 | [chemical structure] |
| IX-15 | [chemical structure] |
| IX-16 | [chemical structure] |
| IX-17 | [chemical structure] |
| IX-18 | [chemical structure] |

[0936] In one embodiment, the cationic lipid is a compound having the following structure (X):

[chemical structure]

or a pharmaceutically acceptable salt, tautomer, prodrug or stereoisomer thereof, wherein:
[0937] G¹ is —OH, —NR³R⁴, —(C═O)NR⁵ or —NR³(C═O)R⁵;
[0938] G² is —CH₂— or —(C═O)—;
[0939] R is, at each occurrence, independently H or OH;
[0940] R¹ and R² are each independently branched, saturated or unsaturated C₁₂-C₃₆ alkyl;
[0941] R³ and R⁴ are each independently H or straight or branched, saturated or unsaturated C₁-C₆ alkyl;
[0942] R⁵ is straight or branched, saturated or unsaturated C₁-C₆ alkyl; and
[0943] n is an integer from 2 to 6.

[0944] In some embodiments, R¹ and R² are each independently branched, saturated or unsaturated C₁₂-C₃₀ alkyl, C₁₂-C₂₀ alkyl, or C₁₅-C₂₀ alkyl. In some specific embodiments, R¹ and R² are each saturated. In certain embodiments, at least one of R¹ and R² is unsaturated.

[0945] In some of the foregoing embodiments of structure (X), R¹ and R² have the following structure:

[chemical structure]

[0946] In some of the foregoing embodiments of structure (X), the compound has the following structure (XA):

[chemical structure]

wherein:
[0947] R⁶ and R⁷ are, at each occurrence, independently H or straight or branched, saturated or unsaturated C₁-C₁₄ alkyl;
[0948] a and b are each independently an integer ranging from 1 to 15,
[0949] provided that R⁶ and a, and R⁷ and b, are each independently selected such that R¹ and R², respectively, are each independently branched, saturated or unsaturated C₁₂-C₃₆ alkyl.

[0950] In some of the foregoing embodiments, the compound has the following structure (XB):

[chemical structure]

wherein:
[0951] R⁸, R⁹, R¹⁰ and R¹¹ are each independently straight or branched, saturated or unsaturated C₄-C₁₂ alkyl, provided that R⁸ and R⁹, and R¹⁰ and R¹¹, are each independently selected such that R¹ and R², respectively, are each independently branched, saturated or unsaturated C₁₂-C₃₆ alkyl. In some embodiments of (XB), R⁸, R⁹, R¹⁰ and R¹¹ are each independently straight or branched, saturated or unsaturated C₆-C₁₀ alkyl. In certain embodiments of (XB), at least one of R⁸, R⁹, R¹⁰ and R¹¹ is unsaturated. In other certain specific embodiments of (XB), each of R⁸, R⁹, R¹⁰ and R¹¹ is saturated.

[0952] In some of the foregoing embodiments, the compound has structure (XA), and in other embodiments, the compound has structure (XB).

[0953] In some of the foregoing embodiments, G¹ is —OH, and in some embodiments G¹ is —NR³R⁴. For example, in some embodiments, G¹ is —NH₂, —NHCH₃ or —N(CH₃)₂. In certain embodiments, G¹ is —(C═O)NR⁵. In certain other embodiments, G¹ is —NR³(C═O)R⁵. For example, in some embodiments G¹ is —NH(C═O)CH₃ or —NH(C═O)CH₂CH₂CH₃.

[0954] In some of the foregoing embodiments of structure (X), G² is —CH₂—. In some different embodiments, G² is —(C═O)—.

[0955] In some of the foregoing embodiments of structure (X), n is an integer ranging from 2 to 6, for example, in some embodiments n is 2, 3, 4, 5 or 6. In some embodiments, n is 2. In some embodiments, n is 3. In some embodiments, n is 4.

[0956] In certain of the foregoing embodiments of structure (X), at least one of R¹, R², R³, R⁴ and R⁵ is unsubstituted. For example, in some embodiments, R¹, R², R³, R⁴ and R⁵ are each unsubstituted. In some embodiments, R³ is substituted. In other embodiments R⁴ is substituted. In still more embodiments, R⁵ is substituted. In certain specific embodiments, each of R³ and R⁴ are substituted. In some embodiments, a substituent on R³, R⁴ or R⁵ is hydroxyl. In certain embodiments, R³ and R⁴ are each substituted with hydroxyl.

[0957] In some of the foregoing embodiments of structure (X), at least one R is OH. In other embodiments, each R is H.

[0958] In various different embodiments of structure (X), the compound has one of the structures set forth in Table 9 below.

TABLE 9
Representative cationic lipids of structure (X)

| No. | Structure |
|---|---|
| X-1 | [chemical structure] |
| X-2 | [chemical structure] |
| X-3 | [chemical structure] |
| X-4 | [chemical structure] |
| X-5 | [chemical structure] |
| X-6 | [chemical structure] |
| X-7 | [chemical structure] |
| X-8 | [chemical structure] |
| X-9 | [chemical structure] |
| X-10 | [chemical structure] |
| X-11 | [chemical structure] |
| X-12 | [chemical structure] |
| X-13 | [chemical structure] |
| X-14 | [chemical structure] |
| X-15 | [chemical structure] |
| X-16 | [chemical structure] |
| X-17 | [chemical structure] |

[0959] In any of Embodiments 1, 2, 3, 4 or 5, the LNPs further comprise a neutral lipid. In various embodiments, the molar ratio of the cationic lipid to the neutral lipid ranges from about 2:1 to about 8:1. In certain embodiments, the neutral lipid is present in any of the foregoing LNPs in a concentration ranging from 5 to 10 mol percent, from 5 to 15 mol percent, 7 to 13 mol percent, or 9 to 11 mol percent. In certain specific embodiments, the neutral lipid is present in a concentration of about 9.5, 10 or 10.5 mol percent. In some embodiments, the molar ratio of cationic lipid to the neutral lipid ranges from about 4.1:1.0 to about 4.9:1.0, from about 4.5:1.0 to about 4.8:1.0, or from about 4.7:1.0 to 4.8:1.0. In some embodiments, the molar ratio of total cationic lipid to the neutral lipid ranges from about 4.1:1.0 to about 4.9:1.0, from about 4.5:1.0 to about 4.8:1.0, or from about 4.7:1.0 to 4.8:1.0.

[0960] Exemplary neutral lipids for use in any of Embodiments 1, 2, 3, 4 or 5 include, for example, distearoylphosphatidylcholine (DSPC), dioleoylphosphatidylcholine (DOPC), dipalmitoylphosphatidylcholine (DPPC), dioleoylphosphatidylglycerol (DOPG), dipalmitoylphosphatidylglycerol (DPPG), dioleoyl-phosphatidylethanolamine (DOPE), palmitoyloleoylphosphatidylcholine (POPC), palmitoyloleoyl-phosphatidylethanolamine (POPE) and dioleoyl-phosphatidylethanolamine 4-(N-maleimidomethyl)-cyclohexane-1carboxylate (DOPE-mal), dipalmitoyl phosphatidyl ethanolamine (DPPE), dimyristoylphosphoethanolamine (DMPE), distearoyl-phosphatidylethanolamine (DSPE), 16-O-monomethyl PE, 16-O-dimethyl PE, 18-1-trans PE, 1-stearioyl-2-oleoylphosphatidyethanol amine (SOPE), and 1,2-dielaidoyl-sn-glycero-3-phophoethanolamine (transDOPE). In one embodiment, the neutral lipid is 1,2-distearoyl-sn-glycero-3phosphocholine (DSPC). In some embodiments, the neutral lipid is selected from DSPC, DPPC, DMPC, DOPC, POPC, DOPE and SM. In some embodiments, the neutral lipid is DSPC.

[0961] In various embodiments of Embodiments 1, 2, 3, 4 or 5, any of the disclosed lipid nanoparticles comprise a steroid or steroid analogue. In certain embodiments, the steroid or steroid analogue is cholesterol. In some embodiments, the steroid is present in a concentration ranging from 39 to 49 molar percent, 40 to 46 molar percent, from 40 to 44 molar percent, from 40 to 42 molar percent, from 42 to 44 molar percent, or from 44 to 46 molar percent. In certain specific embodiments, the steroid is present in a concentration of 40, 41, 42, 43, 44, 45, or 46 molar percent.

[0962] In certain embodiments, the molar ratio of cationic lipid to the steroid ranges from 1.0:0.9 to 1.0:1.2, or from 1.0:1.0 to 1.0:1.2. In some of these embodiments, the molar ratio of cationic lipid to cholesterol ranges from about 5:1 to 1:1. In certain embodiments, the steroid is present in a concentration ranging from 32 to 40 mol percent of the steroid.

[0963] In certain embodiments, the molar ratio of total cationic to the steroid ranges from 1.0:0.9 to 1.0:1.2, or from 1.0:1.0 to 1.0:1.2. In some of these embodiments, the molar ratio of total cationic lipid to cholesterol ranges from about 5:1 to 1:1. In certain embodiments, the steroid is present in a concentration ranging from 32 to 40 mol percent of the steroid.

[0964] In some embodiments of Embodiments 1, 2, 3 4 or 5, the LNPs further comprise a polymer conjugated lipid. In various other embodiments of Embodiments 1, 2, 3 4 or 5, the polymer conjugated lipid is a pegylated lipid. For example, some embodiments include a pegylated diacylglycerol (PEG-DAG) such as 1-(monomethoxy-polyethyleneglycol)-2,3-dimyristoylglycerol (PEG-DMG), a pegylated phosphatidylethanoloamine (PEG-PE), a PEG succinate diacylglycerol (PEG-S-DAG) such as 4-O-(2′, 3′-di(tetradecanoyloxy)propyl-1-O—(ω-methoxy(polyethoxy)ethyl)butanedioate (PEG-S-DMG), a pegylated ceramide (PEG-cer), or a PEG dialkoxypropylcarbamate such as ω-methoxy(polyethoxy)ethyl-N-(2,3-di(tetradecanoxy)propyl)carbamate or 2,3-di(tetradecanoxy)propyl-N-(ω-methoxy(polyethoxy)ethyl)carbamate.

[0965] In various embodiments, the polymer conjugated lipid is present in a concentration ranging from 1.0 to 2.5 molar percent. In certain specific embodiments, the polymer conjugated lipid is present in a concentration of about 1.7 molar percent. In some embodiments, the polymer conjugated lipid is present in a concentration of about 1.5 molar percent.

[0966] In certain embodiments, the molar ratio of cationic lipid to the polymer conjugated lipid ranges from about 35:1 to about 25:1. In some embodiments, the molar ratio of cationic lipid to polymer conjugated lipid ranges from about 100:1 to about 20:1.

[0967] In certain embodiments, the molar ratio of total cationic lipid (i.e., the sum of the first and second cationic lipid) to the polymer conjugated lipid ranges from about 35:1 to about 25:1. In some embodiments, the molar ratio of total cationic lipid to polymer conjugated lipid ranges from about 100:1 to about 20:1.

[0968] In some embodiments of Embodiments 1, 2, 3 4 or 5, the pegylated lipid, when present, has the following Formula (XI):

[chemical structure]

[0969] or a pharmaceutically acceptable salt, tautomer or stereoisomer thereof, wherein:
[0970] R¹² and R¹³ are each independently a straight or branched, saturated or unsaturated alkyl chain containing from 10 to 30 carbon atoms, wherein the alkyl chain is optionally interrupted by one or more ester bonds; and
[0971] w has a mean value ranging from 30 to 60.

[0972] In some embodiments, R¹² and R¹³ are each independently straight, saturated alkyl chains containing from 12 to 16 carbon atoms. In other embodiments, the average w ranges from 42 to 55, for example, the average w is 42, 43, 44, 45, 46, 47, 48, 49, 50, 51, 52, 53, 54 or 55. In some specific embodiments, the average w is about 49.

[0973] In some embodiments, the pegylated lipid has the following Formula (XIa):

[chemical structure]

wherein the average w is about 49.

[0974] In some embodiments of Embodiments 1, 2, 3 4 or 5, the nucleic acid is selected from antisense and messenger RNA. For example, messenger RNA may be used to induce an immune response (e.g., as a vaccine), for example by translation of immunogenic proteins.

[0975] In other embodiments of Embodiments 1, 2, 3 4 or 5, the nucleic acid is mRNA, and the mRNA to lipid ratio in the LNP (i.e., N/P, were N represents the moles of cationic lipid and P represents the moles of phosphate present as part of the nucleic

[0976] In an embodiment, the transfer vehicle comprises a lipid or an ionizable lipid described in US patent publication number 20190314524.

[0977] Some embodiments of the present invention provide nucleic acid-lipid nanoparticle compositions comprising one or more of the novel cationic lipids described herein as structures listed in Table 10, that provide increased activity of the nucleic acid and improved tolerability of the compositions in vivo.

[0978] In one embodiment, an ionizable lipid has the following structure (XII):

[chemical structure]

or a pharmaceutically acceptable salt, tautomer, prodrug or stereoisomer thereof, wherein:
[0979] one of L¹ or L² is —O(C═O)—, —(C═O)O—, —C(═O)—, —O—, —S(O)ₓ—, —S—S—, —C(═O)S—, —SC(═O)—, —NR^{a}C(═O)—, —C(═O)NR^{a}—, —NR^{a}C(═)NR^{a}—, —OC(═O)NR^{a}— or —NR^{a}C(═O)O—, and the other of L¹ or L² is —O(C═O)—, —(C═O)O—, —C(═O)—, —O—, —S(O)—, —S—S—, —C(═O)S—, —SC(═O)—, —NR^{a}C(═O)—, —C(═O)NR^{a}—, —NR^{a}C(═O)NR^{a}—, —OC(═O)NR^{a}— or —NR^{a}C(═O)O— or a direct bond;
[0980] G¹ and G² are each independently unsubstituted C₁-C₁₂ alkylene or C₁-C₁₂ alkenylene;
[0981] G³ is C₁-C₂₄ alkylene, C₁-C₂₄ alkenylene, C₃-C₈ cycloalkylene, C₃-C₈ cycloalkenylene;
[0982] R^{a} is H or C₁-C₁₂ alkyl;
[0983] R¹ and R² are each independently C₆-C₂₄ alkyl or C₆-C₂₄ alkenyl;
[0984] R³ is H, OR⁵, CN, —C(═O)OR⁴, —OC(═O)R⁴ or —NR⁵C(═O)R⁴;
[0985] R⁴ is C₁-C₁₂ alkyl;
[0986] R⁵ is H or C₁-C₆ alkyl; and
[0987] x is 0, 1 or 2.

[0988] In some embodiments, an ionizable lipid has one of the following structures (XIIA) or (XIIB):

[chemical structure]

[chemical structure]

wherein:
[0989] A is a 3 to 8-membered cycloalkyl or cycloalkylene ring;
[0990] R⁶ is, at each occurrence, independently H, OH or C₁-C₂₄ alkyl; and
[0991] n is an integer ranging from 1 to 15.

[0992] In some embodiments, the ionizable lipid has structure (XIIA), and in other embodiments, the ionizable lipid has structure (XIIB).

[0993] In other embodiments, an ionizable lipid has one of the following structures (XIIC) or (XIID):

[chemical structure]

wherein y and z are each independently integers ranging from 1 to 12.

[0994] In some embodiments, one of L¹ or L² is —O(C═O)—. For example, in some embodiments each of L¹ and L² are —O(C═O)—. In some different embodiments of any of the foregoing, L¹ and L² are each independently —(C═O)O— or —O(C═O)—. For example, in some embodiments each of L¹ and L² is —(C═O)O—.

[0995] In some embodiments, an ionizable lipid has one of the following structures (XIIE) or (XIIF):

[chemical structure]

[0996] In some embodiments, an ionizable lipid has one of the following structures (XIIG), (XIIH), (XIII), or (XIIJ):

[chemical structure]

[0997] In some embodiments, n is an integer ranging from 2 to 12, for example from 2 to 8 or from 2 to 4. For example, in some embodiments, n is 3, 4, 5 or 6. In some embodiments, n is 3. In some embodiments, n is 4. In some embodiments, n is 5. In some embodiments, n is 6.

[0998] In some embodiments, y and z are each independently an integer ranging from 2 to 10. For example, in some embodiments, y and z are each independently an integer ranging from 4 to 9 or from 4 to 6.

[0999] In some embodiments, R⁶ is H. In other embodiments, R⁶ is C₁-C₂₄ alkyl. In other embodiments, R⁶ is OH.

[1000] In some embodiments, G³ is unsubstituted. In other embodiments, G³ is substituted. In various different embodiments, G³ is linear C₁-C₂₄ alkylene or linear C₁-C₂₄ alkenylene.

[1001] In some embodiments, R¹ or R², or both, is C₆-C₂₄ alkenyl. For example, in some embodiments, R¹ and R² each, independently have the following structure:

[chemical structure]

wherein:
[1002] R^{7a} and R^{7b} are, at each occurrence, independently H or C₁-C₁₂ alkyl; and
[1003] a is an integer from 2 to 12,

[1004] wherein R^{7a}, R^{7b} and a are each selected such that R¹ and R² each independently comprise from 6 to 20 carbon atoms.

[1005] In some embodiments, a is an integer ranging from 5 to 9 or from 8 to 12.

[1006] In some embodiments, at least one occurrence of R^{7a} is H. For example, in some embodiments, R^{7a} is H at each occurrence. In other different embodiments, at least one occurrence of R^{7b} is C₁-C₈ alkyl. For example, in some embodiments, C₁-C₈ alkyl is methyl, ethyl, n-propyl, iso-propyl, n-butyl, iso-butyl, tert-butyl, n-hexyl or n-octyl.

[1007] In different embodiments, R¹ or R², or both, has one of the following structures:

[chemical structure]

[1008] In some embodiments, R³ is —OH, —CN, —C(═O)OR⁴, —OC(═O)R⁴ or —NHC(═O)R⁴. In some embodiments, R⁴ is methyl or ethyl.

[1009] In some embodiments, an ionizable lipid is a compound of Formula (1):

[chemical structure]

wherein:
[1010] each n is independently 1, 2, 3, 4, 5, 6, 7, 8, 9, 10, 11, 12, 13, 14, or 15; and
[1011] L¹ and L³ are each independently —OC(O)—* or —C(O)O—*, wherein “*” indicates the attachment point to R₁ or R₃;
[1012] R₁ and R₃ are each independently a linear or branched C₉-C₂₀ alkyl or C₉-C₂₀ alkenyl, optionally substituted by one or more substituents selected from oxo, halo, hydroxy, cyano, alkyl, alkenyl, aldehyde, heterocyclylalkyl, hydroxyalkyl, dihydroxyalkyl, hydroxyalkylaminoalkyl, aminoalkyl, alkylaminoalkyl, dialkylaminoalkyl, (heterocyclyl)(alkyl)aminoalkyl, heterocyclyl, heteroaryl, alkylheteroaryl, alkynyl, alkoxy, amino, dialkylamino, aminoalkylcarbonylamino, aminocarbonylalkylamino, (aminocarbonylalkyl)(alkyl)amino, alkenylcarbonylamino, hydroxycarbonyl, alkyloxycarbonyl, aminocarbonyl, aminoalkylaminocarbonyl, alkylaminoalkylaminocarbonyl, dialkylaminoalkylaminocarbonyl, heterocyclylalkylaminocarbonyl, (alkylaminoalkyl)(alkyl)aminocarbonyl, alkylaminoalkylcarbonyl, dialkylaminoalkylcarbonyl, heterocyclylcarbonyl, alkenylcarbonyl, alkynylcarbonyl, alkylsulfoxide, alkylsulfoxidealkyl, alkylsulfonyl, and alkylsulfonealkyl.

[1013] In some embodiments, R₁ and R₃ are the same. In some embodiments, R₁ and R₃ are different.

[1014] In some embodiments, R₁ and R₃ are each independently a branched saturated C₉-C₂₀ alkyl. In some embodiments, one of R₁ and R₃ is a branched saturated C₉-C₂₀ alkyl, and the other is an unbranched saturated C₉-C₂₀ alkyl. In some embodiments, R₁ and R₃ are each independently selected from a group consisting of:

[chemical structure]

[chemical structure]

[1015] In various embodiments, R₂ is selected from a group consisting of:

[chemical structure]

[chemical structure]

[1016] In some embodiments, R₂ may be as described in International Pat. Pub. No. WO2019/152848 A1, which is incorporated herein by reference in its entirety.

[1017] In some embodiments, an ionizable lipid is a compound of Formula (1-1) or Formula (1-2):

[chemical structure]

wherein n, R₁, R₂, and R₃ are as defined in Formula (1).

[1018] Preparation methods for the above compounds and compositions are described herein below and/or known in the art.

[1019] It will be appreciated by those skilled in the art that in the process described herein the functional groups of intermediate compounds may need to be protected by suitable protecting groups. Such functional groups include, e.g., hydroxyl, amino, mercapto, and carboxylic acid. Suitable protecting groups for hydroxyl include, e.g., trialkylsilyl or diarylalkylsilyl (for example, t-butyldimethylsilyl, t-butyldiphenylsilyl or trimethylsilyl), tetrahydropyranyl, benzyl, and the like. Suitable protecting groups for amino, amidino, and guanidino include, e.g., t-butoxycarbonyl, benzyloxycarbonyl, and the like. Suitable protecting groups for mercapto include, e.g., —C(O)—R″ (where R″ is alkyl, aryl, or arylalkyl), p-methoxybenzyl, trityl, and the like. Suitable protecting groups for carboxylic acid include, e.g., alkyl, aryl, or arylalkyl esters. Protecting groups may be added or removed in accordance with standard techniques, which are known to one skilled in the art and as described herein. The use of protecting groups is described in detail in, e.g., Green, T. W. and P. G. M. Wutz, Protective Groups in Organic Synthesis (1999), 3rd Ed., Wiley. As one of skill in the art would appreciate, the protecting group may also be a polymer resin such as a Wang resin, Rink resin, or a 2-chlorotrityl-chloride resin.

[1020] It will also be appreciated by those skilled in the art, although such protected derivatives of compounds of this invention may not possess pharmacological activity as such, they may be administered to a mammal and thereafter metabolized in the body to form compounds of the invention which are pharmacologically active. Such derivatives may therefore be described as prodrugs. All prodrugs of compounds of this invention are included within the scope of the invention.

[1021] Furthermore, all compounds of the invention which exist in free base or acid form can be converted to their pharmaceutically acceptable salts by treatment with the appropriate inorganic or organic base or acid by methods known to one skilled in the art. Salts of the compounds of the invention can also be converted to their free base or acid form by standard techniques.

[1022] The following reaction scheme illustrates an exemplary method to make compounds of Formula (1):

[chemical structure]

[1023] A1 are purchased or prepared according to methods known in the art. Reaction of A1 with diol A2 under appropriate condensation conditions (e.g., DCC) yields ester/alcohol A3, which can then be oxidized (e.g., with PCC) to aldehyde A4. Reaction of A4 with amine A5 under reductive amination conditions yields a compound of Formula (1).

[1024] The following reaction scheme illustrates a second exemplary method to make compounds of Formula (1), wherein R₁ and R₃ are the same:

[chemical structure]

[1025] Modifications to the above reaction scheme, such as using protecting groups, may yield compounds wherein R₁ and R₃ are different. The use of protecting groups, as well as other modification methods, to the above reaction scheme will be readily apparent to one of ordinary skill in the art.

[1026] It is understood that one skilled in the art may be able to make these compounds by similar methods or by combining other methods known to one skilled in the art. It is also understood that one skilled in the art would be able to make other compounds of Formula (1) not specifically illustrated herein by using the appropriate starting materials and modifying the parameters of the synthesis. In general, starting materials may be obtained from sources such as Sigma Aldrich, Lancaster Synthesis, Inc., Maybridge, Matrix Scientific, TCI, and Fluorochem USA, etc. or synthesized according to sources known to those skilled in the art (see, e.g., Advanced Organic Chemistry: Reactions, Mechanisms, and Structure, 5th edition (Wiley, December 2000)) or prepared as described in this invention.

[1027] In some embodiments, an ionizable lipid is a compound of Formula (2):

[chemical structure]

wherein each n is independently 1, 2, 3, 4, 5, 6, 7, 8, 9, 10, 11, 12, 13, 14, or 15.

[1028] In some embodiments, as used in Formula (2), R₁ and R₂ are as defined in Formula (1).

[1029] In some embodiments, as used in Formula (2), R₁ and R₂ are each independently selected from a group consisting of:

[chemical structure]

[chemical structure]

[1030] In some embodiments, R₁ and/or R₂ as used in Formula (2) may be as described in International Pat. Pub. No. WO2015/095340 A1, which is incorporated herein by reference in its entirety. In some embodiments, R₁ as used in Formula (2) may be as described in International Pat. Pub. No. WO2019/152557 A1, which is incorporated herein by reference in its entirety.

[1031] In some embodiments, as used in Formula (2), R₃ is selected from a group consisting of.

[chemical structure]

[1032] In some embodiments, an ionizable lipid is a compound of Formula (3)

[chemical structure]

wherein X is selected from —O—, —S—, or —OC(O)—*, wherein * indicates the attachment point to R₁.

[1033] In some embodiments, an ionizable lipid is a compound of Formula (3-1):

[chemical structure]

[1034] In some embodiments, an ionizable lipid is a compound of Formula (3-2):

[chemical structure]

[1035] In some embodiments, an ionizable lipid is a compound of Formula (3-3):

[chemical structure]

[1036] In some embodiments, as used in Formula (3-1), (3-2), or (3-3), each R₁ is independently a branched saturated C₉-C₂₀ alkyl. In some embodiments, each R₁ is independently selected from a group consisting of:

[chemical structure]

[1037] In some embodiments, each R₁ in Formula (3-1), (3-2), or (3-3) are the same.

[1038] In some embodiments, as used in Formula (3-1), (3-2), or (3-3), R₂ is selected from a group consisting of:

[chemical structure]

[1039] In some embodiments, R₂ as used in Formula (3-1), (3-2), or (3-3) may be as described in International Pat. Pub. No. WO2019/152848A1, which is incorporated herein by reference in its entirety.

[1040] In some embodiments, an ionizable lipid is a compound of Formula (5):

[chemical structure]

wherein:
[1041] each n is independently 1, 2, 3, 4, 5, 6, 7, 8, 9, 10, 11, 12, 13, 14, or 15; and
[1042] R₂ is as defined in Formula (1).

[1043] In some embodiments, as used in Formula (5), R₄ and R₅ are defined as R₁ and R₃, respectively, in Formula (1). In some embodiments, as used in Formula (5), R₄ and R₅ may be as described in International Pat. Pub. No. WO2019/191780 A1, which is incorporated herein by reference in its entirety.

[1044] In some embodiments, an ionizable lipid is a compound of Formula (6):

[chemical structure]

wherein:
[1045] each n is independently an integer from 0-15;
[1046] L¹ and L³ are each independently —OC(O)—* or —C(O)O—*, wherein “*” indicates the attachment point to R₁ or R₃;
[1047] R₁ and R₂ are each independently a linear or branched C₉-C₂₀ alkyl or C₉-C₂₀ alkenyl, optionally substituted by one or more substituents selected from a group consisting of oxo, halo, hydroxy, cyano, alkyl, alkenyl, aldehyde, heterocyclylalkyl, hydroxyalkyl, dihydroxyalkyl, hydroxyalkylaminoalkyl, aminoalkyl, alkylaminoalkyl, dialkylaminoalkyl, (heterocyclyl)(alkyl)aminoalkyl, heterocyclyl, heteroaryl, alkylheteroaryl, alkynyl, alkoxy, amino, dialkylamino, aminoalkylcarbonylamino, aminocarbonylalkylamino, (aminocarbonylalkyl)(alkyl)amino, alkenylcarbonylamino, hydroxycarbonyl, alkyloxycarbonyl, aminocarbonyl, aminoalkylaminocarbonyl, alkylaminoalkylaminocarbonyl, dialkylaminoalkylaminocarbonyl, heterocyclylalkylaminocarbonyl, (alkylaminoalkyl)(alkyl)aminocarbonyl, alkylaminoalkylcarbonyl, dialkylaminoalkylcarbonyl, heterocyclylcarbonyl, alkenylcarbonyl, alkynylcarbonyl, alkylsulfoxide, alkylsulfoxidealkyl, alkylsulfonyl, and alkylsulfonealkyl;
[1048] R₃ is selected from a group consisting of:

[chemical structure]

[chemical structure]

[1049] R₄ is a linear or branched C₁-C₁₅ alkyl or C₁-C₁₅ alkenyl.

[1050] In some embodiments, R₁ and R₂ are each independently selected from a group consisting of:

[chemical structure]

[chemical structure]

[1051] In some embodiments, R₁ and R₂ are the same. In some embodiments, R₁ and R₂ are different.

[1052] In some embodiments, an ionizable lipid of the disclosure is selected from Table 10a. In some embodiments, the ionizable lipid is Lipid 26 in Table 10a. In some embodiments, the ionizable lipid is Lipid 27 in Table 10a. In some embodiments, the ionizable lipid is Lipid 53 in Table 10a. In some embodiments, the ionizable lipid is Lipid 54 in Table 10a. In some embodiments, the ionizable lipid is Lipid 45 in Table 10a. In some embodiments, the ionizable lipid is Lipid 46 in Table 10a. In some embodiments, the ionizable lipid is Lipid 137 in Table 10a. In some embodiments, the ionizable lipid is Lipid 138 in Table 10a. In some embodiments, the ionizable lipid is Lipid 139 in Table 10a. In some embodiments, the ionizable lipid is Lipid 128 in Table 10a. In some embodiments, the ionizable lipid is Lipid 130 in Table 10a.

[1053] In some embodiments, an ionizable lipid of the disclosure is selected from the group consisting of:

[chemical structure]

[chemical structure]

[1054] In some embodiments, an ionizable lipid of the disclosure is selected from the group consisting of:

[chemical structure]

[1055] In some embodiments, an ionizable lipid of the disclosure is selected from the group consisting of:

[chemical structure]

[1056] In some embodiments an ionizable lipid of the disclosure is selected from the group consisting of:

[chemical structure]

[chemical structure]

TABLE 10a

| Ionized | |
|---|---|
| lipid | |
| number | Structure |
| 1 | [chemical structure] |
| 2 | [chemical structure] |
| 3 | [chemical structure] |
| 4 | [chemical structure] |
| 5 | [chemical structure] |
| 6 | [chemical structure] |
| 7 | [chemical structure] |
| 8 | [chemical structure] |
| 9 | [chemical structure] |
| 10 | [chemical structure] |
| 11 | [chemical structure] |
| 12 | [chemical structure] |
| 13 | [chemical structure] |
| 14 | [chemical structure] |
| 15 | [chemical structure] |
| 16 | [chemical structure] |
| 17 | [chemical structure] |
| 18 | [chemical structure] |
| 19 | [chemical structure] |
| 20 | [chemical structure] |
| 21 | [chemical structure] |
| 22 | [chemical structure] |
| 23 | [chemical structure] |
| 24 | [chemical structure] |
| 25 | [chemical structure] |
| 26 | [chemical structure] |
| 27 | [chemical structure] |
| 28 | [chemical structure] |
| 29 | [chemical structure] |
| 30 | [chemical structure] |
| 31 | [chemical structure] |
| 32 | [chemical structure] |
| 33 | [chemical structure] |
| 34 | [chemical structure] |
| 35 | [chemical structure] |
| 36 | [chemical structure] |
| 37 | [chemical structure] |
| 38 | [chemical structure] |
| 39 | [chemical structure] |
| 40 | [chemical structure] |
| 41 | [chemical structure] |
| 42 | [chemical structure] |
| 43 | [chemical structure] |
| 44 | [chemical structure] |
| 45 | [chemical structure] |
| 46 | [chemical structure] |
| 47 | [chemical structure] |
| 48 | [chemical structure] |
| 49 | [chemical structure] |
| 50 | [chemical structure] |
| 51 | [chemical structure] |
| 52 | [chemical structure] |
| 53 | [chemical structure] |
| 54 | [chemical structure] |
| 55 | [chemical structure] |
| 56 | [chemical structure] |
| 57 | [chemical structure] |
| 58 | [chemical structure] |
| 59 | [chemical structure] |
| 60 | [chemical structure] |
| 61 | [chemical structure] |
| 62 | [chemical structure] |
| 63 | [chemical structure] |
| 64 | [chemical structure] |
| 65 | [chemical structure] |
| 66 | [chemical structure] |
| 67 | [chemical structure] |
| 68 | [chemical structure] |
| 69 | [chemical structure] |
| 70 | [chemical structure] |
| 71 | [chemical structure] |
| 72 | [chemical structure] |
| 73 | [chemical structure] |
| 74 | [chemical structure] |
| 75 | [chemical structure] |
| 76 | [chemical structure] |
| 77 | [chemical structure] |
| 78 | [chemical structure] |
| 79 | [chemical structure] |
| 80 | [chemical structure] |
| 81 | [chemical structure] |
| 82 | [chemical structure] |
| 83 | [chemical structure] |
| 84 | [chemical structure] |
| 85 | [chemical structure] |
| 86 | [chemical structure] |
| 87 | [chemical structure] |
| 88 | [chemical structure] |
| 89 | [chemical structure] |
| 90 | [chemical structure] |
| 91 | [chemical structure] |
| 92 | [chemical structure] |
| 93 | [chemical structure] |
| 94 | [chemical structure] |
| 95 | [chemical structure] |
| 96 | [chemical structure] |
| 97 | [chemical structure] |
| 98 | [chemical structure] |
| 99 | [chemical structure] |
| 100 | [chemical structure] |
| 101 | [chemical structure] |
| 102 | [chemical structure] |
| 103 | [chemical structure] |
| 104 | [chemical structure] |
| 105 | [chemical structure] |
| 106 | [chemical structure] |
| 107 | [chemical structure] |
| 108 | [chemical structure] |
| 109 | [chemical structure] |
| 110 | [chemical structure] |
| 111 | [chemical structure] |
| 112 | [chemical structure] |
| 113 | [chemical structure] |
| 114 | [chemical structure] |
| 115 | [chemical structure] |
| 116 | [chemical structure] |
| 117 | [chemical structure] |
| 118 | [chemical structure] |
| 119 | [chemical structure] |
| 120 | [chemical structure] |
| 121 | [chemical structure] |
| 122 | [chemical structure] |
| 123 | [chemical structure] |
| 124 | [chemical structure] |
| 125 | [chemical structure] |
| 126 | [chemical structure] |
| 127 | [chemical structure] |
| 128 | [chemical structure] |
| 129 | [chemical structure] |
| 130 | [chemical structure] |
| 131 | [chemical structure] |
| 132 | [chemical structure] |
| 133 | [chemical structure] |
| 134 | [chemical structure] |
| 135 | [chemical structure] |
| 136 | [chemical structure] |
| 137 | [chemical structure] |
| 138 | [chemical structure] |
| 139 | [chemical structure] |
| 140 | [chemical structure] |
| 141 | [chemical structure] |
| 142 | [chemical structure] |
| 143 | [chemical structure] |
| 144 | [chemical structure] |
| 145 | [chemical structure] |
| 146 | [chemical structure] |
| 147 | [chemical structure] |
| 148 | [chemical structure] |
| 149 | [chemical structure] |
| 150 | [chemical structure] |
| 151 | |

[1057] In some embodiments, the ionizable lipid has a beta-hydroxyl amine head group. In some embodiments, the ionizable lipid has a gamma-hydroxyl amine head group.

[1058] In some embodiments, an ionizable lipid of the disclosure is a lipid selected from Table 10b. In some embodiments, an ionizable lipid of the disclosure is Lipid 15 from Table 10b. In an embodiment, the ionizable lipid is described in US patent publication number US20170210697A1. In an embodiment, the ionizable lipid is described in US patent publication number US20170119904A1.

TABLE 10b

| Ionizable | |
|---|---|
| lipid | |
| number | Structure |
| 1 | [chemical structure] |
| 2 | [chemical structure] |
| 3 | [chemical structure] |
| 4 | [chemical structure] |
| 5 | [chemical structure] |
| 6 | [chemical structure] |
| 7 | [chemical structure] |
| 8 | [chemical structure] |
| 9 | [chemical structure] |
| 10 | [chemical structure] |
| 11 | [chemical structure] |
| 12 | [chemical structure] |
| 13 | [chemical structure] |
| 14 | [chemical structure] |
| 15 | [chemical structure] |
| 16 | [chemical structure] |
| 17 | [chemical structure] |
| 18 | [chemical structure] |
| 19 | [chemical structure] |
| 20 | [chemical structure] |
| 21 | [chemical structure] |
| 22 | [chemical structure] |
| 23 | [chemical structure] |
| 24 | [chemical structure] |
| 25 | [chemical structure] |
| 26 | [chemical structure] |
| 27 | [chemical structure] |
| 28 | [chemical structure] |
| 29 | [chemical structure] |
| 30 | [chemical structure] |
| 31 | [chemical structure] |
| 32 | [chemical structure] |
| 33 | [chemical structure] |
| 34 | [chemical structure] |
| 35 | [chemical structure] |
| 36 | [chemical structure] |
| 37 | [chemical structure] |
| 38 | [chemical structure] |
| 39 | |

[1059] In some embodiments, an ionizable lipid has one of the structures set forth in Table 10 below.

TABLE 10

| Number | Structure |
|---|---|
| 1 | [chemical structure] |
| 2 | [chemical structure] |
| 3 | [chemical structure] |
| 4 | [chemical structure] |
| 5 | [chemical structure] |
| 6 | [chemical structure] |
| 7 | [chemical structure] |
| 8 | [chemical structure] |
| 9 | [chemical structure] |
| 10 | [chemical structure] |
| 11 | [chemical structure] |
| 12 | [chemical structure] |
| 13 | [chemical structure] |
| 14 | [chemical structure] |
| 15 | [chemical structure] |
| 16 | [chemical structure] |
| 17 | [chemical structure] |
| 18 | [chemical structure] |
| 19 | [chemical structure] |
| 20 | [chemical structure] |
| 21 | [chemical structure] |
| 22 | [chemical structure] |
| 23 | [chemical structure] |
| 24 | [chemical structure] |
| 25 | [chemical structure] |
| 26 | [chemical structure] |
| 27 | [chemical structure] |
| 28 | [chemical structure] |
| 29 | [chemical structure] |
| 30 | [chemical structure] |
| 31 | [chemical structure] |
| 32 | [chemical structure] |
| 33 | [chemical structure] |
| 34 | [chemical structure] |
| 35 | [chemical structure] |
| 36 | [chemical structure] |
| 37 | [chemical structure] |
| 38 | [chemical structure] |
| 39 | [chemical structure] |
| 40 | [chemical structure] |
| 41 | [chemical structure] |
| 42 | [chemical structure] |
| 43 | [chemical structure] |
| 44 | [chemical structure] |
| 45 | [chemical structure] |
| 46 | [chemical structure] |
| 47 | [chemical structure] |
| 48 | [chemical structure] |
| 49 | [chemical structure] |

[1060] In some embodiments, the ionizable lipid has one of the structures set forth in Table 11 below. In some embodiments, the ionizable lipid as set forth in Table 11 is as described in international patent application PCT/US2010/061058.

TABLE 11

[chemical structure]

[chemical structure]

[chemical structure]

[chemical structure]

[chemical structure]

[chemical structure]

[chemical structure]

[chemical structure]

[chemical structure]

[chemical structure]

[chemical structure]

[chemical structure]

[chemical structure]

[chemical structure]

[chemical structure]

[chemical structure]

[chemical structure]

[chemical structure]

[chemical structure]

[chemical structure]

[chemical structure]

[chemical structure]

[chemical structure]

[chemical structure]

[chemical structure]

[chemical structure]

[chemical structure]

[chemical structure]

[chemical structure]

[chemical structure]

[chemical structure]

[chemical structure]

[chemical structure]

[chemical structure]

[chemical structure]

[chemical structure]

[chemical structure]

[chemical structure]

[chemical structure]

[chemical structure]

[chemical structure]

[chemical structure]

[chemical structure]

[chemical structure]

[chemical structure]

[chemical structure]

[chemical structure]

[chemical structure]

[chemical structure]

[chemical structure]

[chemical structure]

[chemical structure]

[chemical structure]

[chemical structure]

[chemical structure]

[chemical structure]

[chemical structure]

[chemical structure]

[chemical structure]

[chemical structure]

[chemical structure]

[chemical structure]

[chemical structure]

[chemical structure]

[chemical structure]

[chemical structure]

[chemical structure]

[chemical structure]

[chemical structure]

[chemical structure]

[chemical structure]

[chemical structure]

[chemical structure]

[chemical structure]

[chemical structure]

[chemical structure]

[chemical structure]

[chemical structure]

[chemical structure]

[chemical structure]

[chemical structure]

[chemical structure]

[chemical structure]

[chemical structure]

[chemical structure]

[chemical structure]

[chemical structure]

[chemical structure]

[chemical structure]

[chemical structure]

[chemical structure]

[chemical structure]

[chemical structure]

[chemical structure]

[chemical structure]

[chemical structure]

[chemical structure]

[chemical structure]

[chemical structure]

[chemical structure]

[chemical structure]

[chemical structure]

[chemical structure]

[chemical structure]

[chemical structure]

[chemical structure]

[chemical structure]

[chemical structure]

[chemical structure]

[chemical structure]

[chemical structure]

[chemical structure]

[chemical structure]

[chemical structure]

[chemical structure]

[chemical structure]

[chemical structure]

[chemical structure]

[chemical structure]

[chemical structure]

[chemical structure]

[chemical structure]

[chemical structure]

[chemical structure]

[chemical structure]

[chemical structure]

[chemical structure]

[chemical structure]

[chemical structure]

[chemical structure]

[chemical structure]

[chemical structure]

[chemical structure]

[chemical structure]

[chemical structure]

[chemical structure]

[chemical structure]

[chemical structure]

[chemical structure]

[chemical structure]

[chemical structure]

[chemical structure]

[chemical structure]

[chemical structure]

[chemical structure]

[chemical structure]

[chemical structure]

[chemical structure]

[chemical structure]

[chemical structure]

[chemical structure]

[chemical structure]

[chemical structure]

[chemical structure]

[chemical structure]

[chemical structure]

[chemical structure]

[chemical structure]

[chemical structure]

[chemical structure]

[chemical structure]

[chemical structure]

[chemical structure]

[chemical structure]

[chemical structure]

[chemical structure]

[chemical structure]

[chemical structure]

[chemical structure]

[chemical structure]

[chemical structure]

[chemical structure]

[chemical structure]

[chemical structure]

[chemical structure]

[chemical structure]

[chemical structure]

[chemical structure]

[chemical structure]

[chemical structure]

[chemical structure]

[chemical structure]

[chemical structure]

[chemical structure]

[chemical structure]

[chemical structure]

[chemical structure]

[chemical structure]

[chemical structure]

[chemical structure]

[chemical structure]

[chemical structure]

[chemical structure]

[chemical structure]

[chemical structure]

[chemical structure]

[chemical structure]

[chemical structure]

[chemical structure]

[chemical structure]

[chemical structure]

[chemical structure]

[chemical structure]

[chemical structure]

[chemical structure]

[chemical structure]

[chemical structure]

[chemical structure]

[chemical structure]

[chemical structure]

[chemical structure]

[chemical structure]

[chemical structure]

[chemical structure]

[chemical structure]

[chemical structure]

[chemical structure]

[chemical structure]

[chemical structure]

[chemical structure]

[chemical structure]

[chemical structure]

[chemical structure]

[chemical structure]

[chemical structure]

[chemical structure]

[chemical structure]

[chemical structure]

[chemical structure]

[chemical structure]

[chemical structure]

[chemical structure]

[chemical structure]

[chemical structure]

[chemical structure]

[chemical structure]

[chemical structure]

[chemical structure]

[chemical structure]

[chemical structure]

[chemical structure]

[chemical structure]

[chemical structure]

[chemical structure]

[chemical structure]

[chemical structure]

[chemical structure]

[chemical structure]

[chemical structure]

[chemical structure]

[chemical structure]

[chemical structure]

[chemical structure]

[chemical structure]

[chemical structure]

[chemical structure]

[chemical structure]

[chemical structure]

[chemical structure]

[chemical structure]

[chemical structure]

[chemical structure]

[chemical structure]

[chemical structure]

[chemical structure]

[chemical structure]

[chemical structure]

[chemical structure]

[chemical structure]

[chemical structure]

[chemical structure]

[chemical structure]

[chemical structure]

[chemical structure]

[chemical structure]

[chemical structure]

[chemical structure]

[chemical structure]

[chemical structure]

[chemical structure]

[chemical structure]

[chemical structure]

[chemical structure]

[chemical structure]

[chemical structure]

[chemical structure]

[chemical structure]

[chemical structure]

[chemical structure]

[chemical structure]

[chemical structure]

[chemical structure]

[chemical structure]

[chemical structure]

[chemical structure]

[chemical structure]

[chemical structure]

[chemical structure]

[chemical structure]

[chemical structure]

[chemical structure]

[chemical structure]

[chemical structure]

[chemical structure]

[chemical structure]

[chemical structure]

[chemical structure]

[chemical structure]

[chemical structure]

[chemical structure]

[chemical structure]

[chemical structure]

[chemical structure]

[chemical structure]

[chemical structure]

[chemical structure]

[chemical structure]

[chemical structure]

[chemical structure]

[chemical structure]

[chemical structure]

[chemical structure]

[chemical structure]

[chemical structure]

[chemical structure]

[chemical structure]

[chemical structure]

[chemical structure]

[chemical structure]

[chemical structure]

[chemical structure]

[chemical structure]

[chemical structure]

[chemical structure]

[chemical structure]

[chemical structure]

[chemical structure]

[chemical structure]

[chemical structure]

[chemical structure]

[chemical structure]

[chemical structure]

[chemical structure]

[chemical structure]

[chemical structure]

[chemical structure]

[chemical structure]

[chemical structure]

[chemical structure]

[chemical structure]

[chemical structure]

[chemical structure]

[chemical structure]

[chemical structure]

[chemical structure]

[chemical structure]

[chemical structure]

[chemical structure]

[chemical structure]

[chemical structure]

[chemical structure]

[chemical structure]

[chemical structure]

[chemical structure]

[chemical structure]

[chemical structure]

[chemical structure]

[chemical structure]

[chemical structure]

[chemical structure]

[chemical structure]

[chemical structure]

[chemical structure]

[chemical structure]

[chemical structure]

[chemical structure]

[chemical structure]

[chemical structure]

[chemical structure]

[chemical structure]

[chemical structure]

[chemical structure]

[chemical structure]

[chemical structure]

[chemical structure]

[chemical structure]

[chemical structure]

[chemical structure]

[chemical structure]

[chemical structure]

[chemical structure]

[chemical structure]

[chemical structure]

[chemical structure]

[chemical structure]

[chemical structure]

[chemical structure]

[chemical structure]

[chemical structure]

[chemical structure]

[chemical structure]

[chemical structure]

[chemical structure]

[chemical structure]

[chemical structure]

[chemical structure]

[chemical structure]

[chemical structure]

[chemical structure]

[chemical structure]

[chemical structure]

[chemical structure]

[chemical structure]

[chemical structure]

[chemical structure]

[chemical structure]

[chemical structure]

[chemical structure]

[chemical structure]

[chemical structure]

[chemical structure]

[chemical structure]

[chemical structure]

[chemical structure]

[chemical structure]

[chemical structure]

[chemical structure]

[chemical structure]

[chemical structure]

[chemical structure]

[chemical structure]

[chemical structure]

[chemical structure]

[chemical structure]

[chemical structure]

[chemical structure]

[chemical structure]

[chemical structure]

[chemical structure]

[chemical structure]

[chemical structure]

[chemical structure]

[chemical structure]

[chemical structure]

[chemical structure]

[chemical structure]

[chemical structure]

[chemical structure]

[chemical structure]

[chemical structure]

[chemical structure]

[chemical structure]

[chemical structure]

[chemical structure]

[chemical structure]

[chemical structure]

[chemical structure]

[chemical structure]

[chemical structure]

[chemical structure]

[chemical structure]

[chemical structure]

[chemical structure]

[chemical structure]

[chemical structure]

[chemical structure]

[chemical structure]

[chemical structure]

[chemical structure]

[chemical structure]

[chemical structure]

[chemical structure]

[chemical structure]

[chemical structure]

[chemical structure]

[chemical structure]

[chemical structure]

[chemical structure]

[chemical structure]

[chemical structure]

[chemical structure]

[chemical structure]

[chemical structure]

[chemical structure]

[chemical structure]

[chemical structure]

[chemical structure]

[chemical structure]

[chemical structure]

[chemical structure]

[chemical structure]

[chemical structure]

[chemical structure]

[chemical structure]

[chemical structure]

[chemical structure]

[chemical structure]

[chemical structure]

[chemical structure]

[chemical structure]

[chemical structure]

[chemical structure]

[chemical structure]

[chemical structure]

[chemical structure]

[chemical structure]

[chemical structure]

[chemical structure]

[chemical structure]

[chemical structure]

[chemical structure]

[chemical structure]

[chemical structure]

[chemical structure]

[chemical structure]

[chemical structure]

[chemical structure]

[chemical structure]

[chemical structure]

[chemical structure]

[chemical structure]

[chemical structure]

[chemical structure]

[chemical structure]

[chemical structure]

[chemical structure]

[chemical structure]

[chemical structure]

[chemical structure]

[chemical structure]

[chemical structure]

[chemical structure]

[chemical structure]

[chemical structure]

[chemical structure]

[chemical structure]

[chemical structure]

[chemical structure]

[chemical structure]

[chemical structure]

[chemical structure]

[chemical structure]

[1061] In some embodiments, the transfer vehicle comprises Lipid A, Lipid B, Lipid C, and/or Lipid D. In some embodiments, inclusion of Lipid A, Lipid B, Lipid C, and/or Lipid D improves encapsulation and/or endosomal escape. In some embodiments, Lipid A, Lipid B, Lipid C, and/or Lipid D are described in international patent application PCT/US2017/028981.

[1062] In some embodiments, an ionizable lipid is Lipid A, which is (9Z,12Z)-3-((4,4-bis(octyloxy)butanoyl)oxy)-2-((((3-(diethylamino)propoxy)carbonyl)oxy)methyl)propyl octadeca9,12-dienoate, also called 3-((4,44bis(octyloxy)butanoyl)oxy)-2-((((3-(diethylamino)propoxy)carbonyl)oxy)methyl)propyl (9Z,12Z)-octadeca-9,12-dienoate. Lipid A can be depicted as:

[chemical structure]

[1063] Lipid A may be synthesized according to WO2015/095340 (e.g., pp. 84-86), incorporated by reference in its entirety.

[1064] In some embodiments, an ionizable lipid is Lipid B, which is ((5-((dimethylamino)methyl)-1,3-phenylene)bis(oxy))bis(octane-8,1-diyl)bis(decanoate). Lipid B can be depicted as:

[chemical structure]

[1065] Lipid B may be synthesized according to WO2014/136086 (e.g., pp. 107-09), incorporated by reference in its entirety.

[1066] In some embodiments, an ionizable lipid is Lipid C, which is 2-((4-(((3-(dimethylamino)propoxy)carbonyl)oxy)hexadecanoyl)oxy)propane-1,3-diyl(9Z,9′Z,12Z,12′Z)-bis(octadeca-9,12-dienoate). Lipid C can be depicted as:

[chemical structure]

[1067] In some embodiments, an ionizable lipid is Lipid D, which is 3-(((3-(dimethylamino)propoxy)carbonyl)oxy)-13-(octanoyloxy)tridecyl 3-octylundecanoate. Lipid D can be depicted as:

[chemical structure]

[1068] Lipid C and Lipid D may be synthesized according to WO2015/095340, incorporated by reference in its entirety.

[1069] In some embodiments, an ionizable lipid is described in US patent publication number 20190321489. In some embodiments, an ionizable lipid is described in international patent publication WO 2010/053572, incorporated herein by reference. In some embodiments, an ionizable lipid is C₁₂-200, described at paragraph [00225] of WO 2010/053572.

[1070] Several ionizable lipids have been described in the literature, many of which are commercially available. In certain embodiments, such ionizable lipids are included in the transfer vehicles described herein. In some embodiments, the ionizable lipid N-[1-(2,3-dioleyloxy)propyl]-N,N,N-trimethylammonium chloride or “DOTMA” is used. (Felgner et al. Proc. Nat'l Acad. Sci. 84, 7413 (1987); U.S. Pat. No. 4,897,355). DOTMA can be formulated alone or can be combined with a neutral lipid, dioleoylphosphatidylethanolamine or “DOPE” or other cationic or non-cationic lipids into a lipid nanoparticle. Other suitable cationic lipids include, for example, ionizable cationic lipids as described in U.S. provisional patent application 61/617,468, filed Mar. 29, 2012 (incorporated herein by reference), such as, e.g., (15Z,18Z)—N,N-dimethyl-6-(9Z,12Z)-octadeca-9,12-dien-1-yl)tetracosa-15,18-dien-1-amine (HGT5000), (15Z,18Z)—N,N-dimethyl-6-((9Z,12Z)-octadeca-9,12-dien-1-yl)tetracosa-4,15,18-trien-1-amine (HGT5001), and (15Z,18Z)—N,N-dimethyl-6-((9Z,12Z)-octadeca-9,12-dien-1-yl)tetracosa-5,15,18-trien-1-amine (HGT5002), C₁₂-200 (described in WO 2010/053572), 2-(2,2-di((9Z,12Z)-octadeca-9,12-dien-1-yl)-1,3-dioxolan-4-yl)-N,N-dimethylethanamine (DLinKC2-DMA)) (See, WO 2010/042877; Semple et al., Nature Biotech. 28:172-176 (2010)), 2-(2,2-di((9Z,2Z)-octadeca-9,12-dien-1-yl)-1,3-dioxolan-4-yl)-N,N-dimethylethanamine (DLin-KC2-DMA), (3S,10R,13R,17R)-10,13-dimethyl-17-((R)-6-methylheptan-2-yl)-2, 3, 4, 7, 8, 9, 10, 11, 12, 13, 14, 15, 16, 17-tetradecahydro-1H-cyclopenta[a]phenanthren-3-yl 3-(1H-imidazol-4-yl)propanoate (ICE), (15Z,18Z)—N,N-dimethyl-6-(9Z,12Z)-octadeca-9,12-dien-1-yl)tetracosa-15,18-dien-1-amine (HGT5000), (15Z,18Z)—N,N-dimethyl-6-((9Z,12Z)-octadeca-9,12-dien-1-yl)tetracosa-4,15,18-trien-1-amine (HGT5001), (15Z,18 Z)—N,N-dimethyl-6-((9Z,12Z)-octadeca-9,12-dien-1-yl)tetracosa-5,15,18-trien-1-amine (HGT5002), 5-carboxyspermylglycine-dioctadecylamide (DOGS), 2,3-dioleyloxy-N-[2(spermine-carboxamido)ethyl]-N,N-dimethyl-1-propanaminium (DOSPA) (Behr et al. Proc. Nat.'l Acad. Sci. 86, 6982 (1989); U.S. Pat. Nos. 5,171,678; 5,334,761), 1,2-Dioleoyl-3-Dimethylammonium-Propane (DODAP), 1,2-Dioleoyl-3-Trimethylammonium-Propane or (DOTAP). Contemplated ionizable lipids also include 1,2-distcaryloxy-N,N-dimethyl-3-aminopropane (DSDMA), 1,2-dioleyloxy-N,N-dimethyl-3-aminopropane (DODMA), 1,2-dilinoleyloxy-N,N-dimethyl-3-aminopropane (DLinDMA), 1,2-dilinolenyloxy-N,N-dimethyl-3-aminopropane (DLenDMA), N-dioleyl-N,N-dimethylammonium chloride (DODAC), N,N-distearyl-N,N-dimethylammonium bromide (DDAB), N-(1,2-dimyristyloxyprop-3-yl)-N,N-dimethyl-N-hydroxyethyl ammonium bromide (DMRIE), 3-dimethylamino-2-(cholest-5-en-3-beta-oxybutan-4-oxy)-1-(cis,cis-9,12-octadecadienoxy)propane (CLinDMA), 2-[5′-(cholest-5-en-3-beta-oxy)-3′-oxapentoxy)-3-dimethyl-1-(cis,cis-9′, 1-2′-octadecadienoxy)propane (CpLinDMA), N,N-dimethyl-3,4-dioleyloxybenzylamine (DMOBA), 1,2-N,N′-dioleylcarbamyl-3-dimethylaminopropane (DOcarbDAP), 2,3-Dilinoleoyloxy-N,N-dimethylpropylamine (DLinDAP), 1,2-N,N′-Dilinoleylcarbamyl-3-dimethylamninopropane (DLincarbDAP), 1,2-Dilinoleoylcarbamyl-3-dimethylaminopropane (DLinCDAP), 2,2-dilinoleyl-4-dimethylaminomethyl-[1,3]-dioxolane (DLin-K-DMA), 2,2-dilinoleyl-4-dimethylaminoethyl-[1,3]-dioxolane (DLin-K-XTC2-DMA) or GL67, or mixtures thereof (Heyes, J., et al., J Controlled Release 107: 276-287 (2005); Morrissey, D V., et al., Nat. Biotechnol. 23(8): 1003-1007 (2005); PCT Publication WO2005/121348A1). The use of cholesterol-based ionizable lipids to formulate the transfer vehicles (e.g., lipid nanoparticles) is also contemplated by the present invention. Such cholesterol-based ionizable lipids can be used, either alone or in combination with other lipids. Suitable cholesterol-based ionizable lipids include, for example, DC-Cholesterol (N,N-dimethyl-N-ethylcarboxamidocholesterol), and 1,4-bis(3-N-oleylamino-propyl)piperazine (Gao, et al., Biochem. Biophys. Res. Comm. 179, 280 (1991); Wolf et al. BioTechniques 23, 139 (1997); U.S. Pat. No. 5,744,335).

[1071] Also contemplated are cationic lipids such as dialkylamino-based, imidazole-based, and guanidinium-based lipids. For example, also contemplated is the use of the ionizable lipid (3 S,10R, 13R, 17R)-10,13-dimethyl-17-((R)-6-methylheptan-2-yl)-2, 3, 4, 7, 8, 9, 10, 11, 12, 13, 14, 15, 16, 17-tetradecahydro-1H-cyclopenta[a]phenanthren-3-yl 3-(1H-imidazol-4-yl)propanoate (ICE), as disclosed in International Application No. PCT/US2010/058457, incorporated herein by reference.

[1072] Also contemplated are ionizable lipids such as the dialkylamino-based, imidazole-based, and guanidinium-based lipids. For example, certain embodiments are directed to a composition comprising one or more imidazole-based ionizable lipids, for example, the imidazole cholesterol ester or “ICE” lipid, (3S, 10R, 13R, 17R)-10, 13-dimethyl-17-((R)-6-methylheptan-2-yl)-2, 3, 4, 7, 8, 9, 10, 11, 12, 13, 14, 15, 16, 17-tetradecahydro-1H-cyclopenta[a]phenanthren-3-yl 3-(1H-imidazol-4-yl)propanoate, as represented by structure (XIII) below. In an embodiment, a transfer vehicle for delivery of circRNA may comprise one or more imidazole-based ionizable lipids, for example, the imidazole cholesterol ester or “ICE” lipid (3S, 10R, 13R, 17R)-10, 13-dimethyl-17-((R)-6-methylheptan-2-yl)-2, 3, 4, 7, 9, 10, 11, 12, 13, 14, 15, 16, 17-tetradecahydro-1H-cyclopenta[a]phenanthren-3-yl 3-(1H-imidazol-4-yl)propanoate, as represented by structure (XIII).

[chemical structure]

[1073] Without wishing to be bound by a particular theory, it is believed that the fusogenicity of the imidazole-based cationic lipid ICE is related to the endosomal disruption which is facilitated by the imidazole group, which has a lower pKa relative to traditional ionizable lipids. The endosomal disruption in turn promotes osmotic swelling and the disruption of the liposomal membrane, followed by the transfection or intracellular release of the nucleic acid(s) contents loaded therein into the target cell.

[1074] The imidazole-based ionizable lipids are also characterized by their reduced toxicity relative to other ionizable lipids.

[1075] In some embodiments, an ionizable lipid is described by US patent publication number 20190314284. In certain embodiments, the an ionizable lipid is described by structure 3, 4, 5, 6, 7, 8, 9, or 10 (e.g., HGT4001, HGT4002, HGT4003, HGT4004 and/or HGT4005). In certain embodiments, the one or more cleavable functional groups (e.g., a disulfide) allow, for example, a hydrophilic functional head-group to dissociate from a lipophilic functional tail-group of the compound (e.g., upon exposure to oxidative, reducing or acidic conditions), thereby facilitating a phase transition in the lipid bilayer of the one or more target cells. For example, when a transfer vehicle (e.g., a lipid nanoparticle) comprises one or more of the lipids of structures 3-10, the phase transition in the lipid bilayer of the one or more target cells facilitates the delivery of the circRNA into the one or more target cells.

[1076] In certain embodiments, the ionizable lipid is described by structure (XIV),

[chemical structure]

wherein:
[1077] R₁ is selected from the group consisting of imidazole, guanidinium, amino, imine, enamine, an optionally-substituted alkyl amino (e.g., an alkyl amino such as dimethylamino) and pyridyl;
[1078] R₂ is selected from the group consisting of structure XV and structure XVI;

[chemical structure]

[1079] wherein R₃ and R₄ are each independently selected from the group consisting of an optionally substituted, variably saturated or unsaturated C₆-C₂₀ alkyl and an optionally substituted, variably saturated or unsaturated C₆-C₂₀ acyl; and wherein n is zero or any positive integer (e.g., one, two, three, four, five, six, seven, eight, nine, ten, eleven, twelve, thirteen, fourteen, fifteen, sixteen, seventeen, eighteen, nineteen, twenty or more). In certain embodiments, R₃ and R₄ are each an optionally substituted, polyunsaturated Cis alkyl, while in other embodiments R₃ and R₄ are each an unsubstituted, polyunsaturated Cis alkyl. In certain embodiments, one or more of R₃ and R₄ are (9Z,12Z)-octadeca-9,12-dien.

[1080] Also disclosed herein are pharmaceutical compositions that comprise the compound of structure XIV, wherein R₁ is selected from the group consisting of imidazole, guanidinium, amino, imine, enamine, an optionally-substituted alkyl amino (e.g., an alkyl amino such as dimethylamino) and pyridyl; wherein R₂ is structure XV; and wherein n is zero or any positive integer. Further disclosed herein are pharmaceutical compositions comprising the compound of structure XIV, wherein R₁ is selected from the group consisting of imidazole, guanidinium, amino, imine, enamine, an optionally-substituted alkyl amino (e.g., an alkyl amino such as dimethylamino) and pyridyl; wherein R₂ is structure XVI; wherein R₃ and R₄ are each independently selected from the group consisting of an optionally substituted, variably saturated or unsaturated C₆-C₂₀ alkyl and an optionally substituted, variably saturated or unsaturated C₆-C₂₀ acyl; and wherein n is zero or any positive integer. In certain embodiments. R₃ and R₄ are each an optionally substituted, polyunsaturated Cis alkyl, while in other embodiments R₃ and R₄ are each an unsubstituted, polyunsaturated Cis alkyl (e.g., octadeca-9,12-dien).

[1081] In certain embodiments, the R₁ group or head-group is a polar or hydrophilic group (e.g., one or more of the imidazole, guanidinium and amino groups) and is bound to the R₂ lipid group by way of the disulfide (S—S) cleavable linker group, for example as depicted in structure XIV. Other contemplated cleavable linker groups may include compositions that comprise one or more disulfide (S—S) linker group bound (e.g., covalently bound) to, for example an alkyl group (e.g., C₁ to C₁₀alkyl). In certain embodiments, the R₁ group is covalently bound to the cleavable linker group by way of a C₁-C₂₀ alkyl group (e.g., where n is one to twenty), or alternatively may be directly bound to the cleavable linker group (e.g., where n is zero). In certain embodiments, the disulfide linker group is cleavable in vitro and/or in vivo (e.g., enzymatically cleavable or cleavable upon exposure to acidic or reducing conditions).

[1082] In certain embodiments, the inventions relate to the compound 5-(((10,13-dimethyl-17-(6-methylheptan-2-yl)-2,3,4,7,8,9,10,11,12,13,14,15,16,17-tetradecahydro-1H-cyclopenta[a]phenanthren-3-yl)disulfanyl)methyl)-1H-imidazole, having structure XVII (referred to herein as “HGT4001”).

[chemical structure]

[1083] In certain embodiments, the inventions relate to the compound 1-(2-(((3S,10R,13R)-10,13-dimethyl-17-((R)-6-methylheptan-2-yl)-2,3,4,7,8,9,10,11,12,13,14,15,16,17-tetradecahydro-1H-cyclopenta[a]phenanthren-3-yl)disulfanyl)ethyl)guanidine, having structure XVIII (referred to herein as “HGT4002”).

[chemical structure]

[1084] In certain embodiments, the inventions relate to the compound 2-((2,3-Bis((9Z,12Z)-octadeca-9,12-dien-1-yloxy)propyl)disulfanyl)-N,N-dimethylethanamine, having structure XIX (referred to herein as “HGT4003”).

[chemical structure]

[1085] In other embodiments, the inventions relate to the compound 5-(((2,3-bis((9Z,12Z)-octadeca-9,12-dien-1-yloxy)propyl)disulfanyl)methyl)-1H-imidazole having the structure of structure XX (referred to herein as “HGT4004”).

[chemical structure]

[1086] In still other embodiments, the inventions relate to the compound 1-(((2,3-bis((9Z,12Z)-octadeca-9,12-dien-1-yloxy)propyl)disulfanyl)methyl)guanidine having structure XXI (referred to herein as “HGT4005”).

[chemical structure]

[1087] In certain embodiments, the compounds described as structures 3-10 are ionizable lipids.

[1088] The compounds, and in particular the imidazole-based compounds described as structures 3-8 (e.g., HGT4001 and HGT4004), are characterized by their reduced toxicity, in particular relative to traditional ionizable lipids. In some embodiments, the transfer vehicles described herein comprise one or more imidazole-based ionizable lipid compounds such that the relative concentration of other more toxic ionizable lipids in such pharmaceutical or liposomal composition may be reduced or otherwise eliminated.

[1089] The ionizable lipids include those disclosed in international patent application PCT/US2019/025246, and US patent publications 2017/0190661 and 2017/0114010, incorporated herein by reference in their entirety. The ionizable lipids may include a lipid selected from the following tables 12, 13, 14, or 15.

TABLE 12

| | |
|---|---|
| ATX-001 | [chemical structure] |
| ATX-002 | [chemical structure] |
| ATX-003 | [chemical structure] |
| ATX-004 | [chemical structure] |
| ATX-005 | [chemical structure] |
| ATX-006 | [chemical structure] |
| ATX-007 | [chemical structure] |
| ATX-008 | [chemical structure] |
| ATX-009 | [chemical structure] |
| ATX-010 | [chemical structure] |
| ATX-011 | [chemical structure] |
| ATX-012 | [chemical structure] |
| ATX-013 | [chemical structure] |
| ATX-014 | [chemical structure] |
| ATX-015 | [chemical structure] |
| ATX-016 | [chemical structure] |
| ATX-017 | [chemical structure] |
| ATX-018 | [chemical structure] |
| ATX-019 | [chemical structure] |
| ATX-020 | [chemical structure] |
| ATX-021 | [chemical structure] |
| ATX-022 | [chemical structure] |
| ATX-023 | [chemical structure] |
| ATX-024 | [chemical structure] |
| ATX-025 | [chemical structure] |
| ATX-026 | [chemical structure] |
| ATX-027 | [chemical structure] |
| ATX-028 | [chemical structure] |
| ATX-029 | [chemical structure] |
| ATX-030 | [chemical structure] |
| ATX-031 | [chemical structure] |
| ATX-032 | [chemical structure] |

TABLE 13

| | |
|---|---|
| [chemical structure] | ATX-B-1 |
| [chemical structure] | ATX-B-2 |
| [chemical structure] | ATX-B-3 |
| [chemical structure] | ATX-B-4 |
| [chemical structure] | ATX-B-5 |
| [chemical structure] | ATX-B-6 |
| [chemical structure] | ATX-B-7 |
| [chemical structure] | ATX-B-8 |
| [chemical structure] | ATX-B-9 |
| [chemical structure] | ATX-B-10 |
| [chemical structure] | ATX-B-11 |
| [chemical structure] | ATX-B-12 |

TABLE 14

| Compound | ATX-# |
|---|---|
| [chemical structure] | 0063 |
| [chemical structure] | 0130 |
| [chemical structure] | 0131 |
| [chemical structure] | 0044 |
| [chemical structure] | 0111 |
| [chemical structure] | 0132 |
| [chemical structure] | 0134 |
| [chemical structure] | 0133 |
| [chemical structure] | 0064 |
| [chemical structure] | 0061 |
| [chemical structure] | 0100 |
| [chemical structure] | 0117 |
| [chemical structure] | 0114 |
| [chemical structure] | 0115 |
| [chemical structure] | 0101 |
| [chemical structure] | 0106 |
| [chemical structure] | 0116 |
| [chemical structure] | 0043 |
| [chemical structure] | 0086 |
| [chemical structure] | 0058 |
| [chemical structure] | 0081 |
| [chemical structure] | 0123 |
| [chemical structure] | 0122 |
| [chemical structure] | 0057 |
| [chemical structure] | 0088 |
| [chemical structure] | 0087 |
| [chemical structure] | 0124 |
| [chemical structure] | 0128 |
| [chemical structure] | 0127 |
| [chemical structure] | 0126 |
| [chemical structure] | 0129 |
| [chemical structure] | 0082 |
| [chemical structure] | 0085 |
| [chemical structure] | 0083 |
| [chemical structure] | 0121 |
| [chemical structure] | 0091 |
| [chemical structure] | 0102 |
| [chemical structure] | 0098 |
| [chemical structure] | 0092 |
| [chemical structure] | 0084 |
| [chemical structure] | 0095 |
| [chemical structure] | 0125 |
| [chemical structure] | 0094 |
| [chemical structure] | 0109 |
| [chemical structure] | 0110 |
| [chemical structure] | 0118 |
| [chemical structure] | 0108 |
| [chemical structure] | 0107 |
| [chemical structure] | 0093 |
| [chemical structure] | 0097 |
| [chemical structure] | 0096 |

TABLE 15a

| | |
|---|---|
| [chemical structure] | 11 |
| [chemical structure] | 13 |
| [chemical structure] | 14 |
| [chemical structure] | 15 |
| [chemical structure] | 16 |
| [chemical structure] | 17 |
| [chemical structure] | 18 |
| [chemical structure] | 19 |
| [chemical structure] | 20 |

[1090] In some embodiments, an ionizable lipid is as described in international patent application PCT/US2019/015913. In some embodiments, an ionizable lipid is chosen from the following:

[chemical structure]

[chemical structure]

[chemical structure]

[chemical structure]

[chemical structure]

[chemical structure]

[chemical structure]

[chemical structure]

[chemical structure]

[chemical structure]

[chemical structure]

[chemical structure]

[chemical structure]

[chemical structure]

[chemical structure]

[chemical structure]

[chemical structure]

[chemical structure]

[chemical structure]

[chemical structure]

[chemical structure]

[chemical structure]

[chemical structure]

[chemical structure]

[chemical structure]

[chemical structure]

[chemical structure]

[chemical structure]

[chemical structure]

[chemical structure]

[chemical structure]

[chemical structure]

[chemical structure]

[chemical structure]

[chemical structure]

[chemical structure]

[chemical structure]

[chemical structure]

[chemical structure]

[chemical structure]

[chemical structure]

[chemical structure]

[chemical structure]

[chemical structure]

[chemical structure]

[chemical structure]

[chemical structure]

[chemical structure]

[chemical structure]

[chemical structure]

[chemical structure]

[chemical structure]

[chemical structure]

[chemical structure]

[chemical structure]

[chemical structure]

[chemical structure]

[chemical structure]

[chemical structure]

[chemical structure]

[chemical structure]

[chemical structure]

[chemical structure]

[chemical structure]

[chemical structure]

[chemical structure]

[chemical structure]

[chemical structure]

[chemical structure]

[1091] 5.1 Amine Lipids

[1092] In certain embodiments, transfer vehicle compositions for the delivery of circular RNA comprise an amine lipid. In certain embodiments, an ionizable lipid is an amine lipid. In some embodiments, an amine lipid is described in international patent application PCT/US2018/053569.

[1093] In some embodiments, the amine lipid is Lipid E, which is (9Z, 12Z)-3-((4,4-bis(octyloxy)butanoyl)oxy)-2-((((3-(diethylamino)propoxy)carbonyl)oxy)methyl)propyl octadeca-9, 12-dienoate.

[1094] Lipid E can be depicted as:

[chemical structure]

[1095] Lipid E may be synthesized according to WO2015/095340 (e.g., pp. 84-86). In certain embodiments, the amine lipid is an equivalent to Lipid E.

[1096] In certain embodiments, an amine lipid is an analog of Lipid E. In certain embodiments, a Lipid E analog is an acetal analog of Lipid E. In particular transfer vehicle compositions, the acetal analog is a C4-C12 acetal analog. In some embodiments, the acetal analog is a C5-C12 acetal analog. In additional embodiments, the acetal analog is a C5-C10 acetal analog. In further embodiments, the acetal analog is chosen from a C4, C5, C6, C7, C9, C10, C11 and C12 acetal analog.

[1097] Amine lipids and other biodegradable lipids suitable for use in the transfer vehicles, e.g., lipid nanoparticles, described herein are biodegradable in vivo. The amine lipids described herein have low toxicity (e.g., are tolerated in animal models without adverse effect in amounts of greater than or equal to 10 mg/kg). In certain embodiments, transfer vehicles composing an amine lipid include those where at least 75% of the amine lipid is cleared from the plasma within 8, 10, 12, 24, or 48 hours, or 3, 4, 5, 6, 7, or 10 days.

[1098] Biodegradable lipids include, for example, the biodegradable lipids of WO2017/173054, WO2015/095340, and WO2014/136086.

[1099] Lipid clearance may be measured by methods known by persons of skill in the art. See, for example, Maier, M. A., et al. Biodegradable Lipids Enabling Rapidly Eliminated Lipid Nanoparticles for Systemic Delivery of RNAi Therapeutics. Mol. Ther. 2013, 21(8), 1570-78.

[1100] Transfer vehicle compositions comprising an amine lipid can lead to an increased clearance rate. In some embodiments, the clearance rate is a lipid clearance rate, for example the rate at which a lipid is cleared from the blood, serum, or plasma. In some embodiments, the clearance rate is an RNA clearance rate, for example the rate at which an circRNA is cleared from the blood, serum, or plasma. In some embodiments, the clearance rate is the rate at which transfer vehicles are cleared from the blood, serum, or plasma. In some embodiments, the clearance rate is the rate at which transfer vehicles are cleared from a tissue, such as liver tissue or spleen tissue. In certain embodiments, a high rate of clearance leads to a safety profile with no substantial adverse effects. The amine lipids and biodegradable lipids may reduce transfer vehicle accumulation in circulation and in tissues. In some embodiments, a reduction in transfer vehicle accumulation in circulation and in tissues leads to a safety profile with no substantial adverse effects.

[1101] Lipids may be ionizable depending upon the pH of the medium they are in. For example, in a slightly acidic medium, the lipid, such as an amine lipid, may be protonated and thus bear a positive charge. Conversely, in a slightly basic medium, such as, for example, blood, where pH is approximately 7.35, the lipid, such as an amine lipid, may not be protonated and thus bear no charge.

[1102] The ability of a lipid to bear a charge is related to its intrinsic pKa. In some embodiments, the amine lipids of the present disclosure may each, independently, have a pKa in the range of from about 5.1 to about 7.4. In some embodiments, the bioavailable lipids of the present disclosure may each, independently, have a pKa in the range of from about 5.1 to about 7.4. For example, the amine lipids of the present disclosure may each, independently, have a pKa in the range of from about 5.8 to about 6.5. Lipids with a pKa ranging from about 5.1 to about 7.4 are effective for delivery of cargo in vivo, e.g., to the liver. Further, it has been found that lipids with a pKa ranging from about 5.3 to about 6.4 are effective for delivery in vivo, e.g., into tumors. See, e.g., WO2014/136086.

[1103] 5.2 Lipids Containing a Disulfide Bond

[1104] In some embodiments, the ionizable lipid is described in U.S. Pat. No. 9,708,628.

[1105] The present invention provides a lipid represented by structure (XXII):

[chemical structure]

[1106] In structure (XXII), X^{a} and X^{b} are each independently X¹ or X² shown below.

[chemical structure]

[1107] R⁴ in X¹ is an alkyl group having 1-6 carbon atoms, which may be linear, branched or cyclic. The alkyl group preferably has a carbon number of 1-3. Specific examples of the alkyl group having 1-6 carbon atoms include methyl group, ethyl group, propyl group, isopropyl group, n-butyl group, sec-butyl group, isobutyl group, tert-butyl group, pentyl group, isopentyl group, neopentyl group, t-pentyl group, 1,2-dimethylpropyl group, 2-methylbutyl group, 2-methylpentyl group, 3-methylpentyl group, 2,2-dimethylbutyl group, 2,3-dimethylbutyl group, cyclohexyl group and the like. R⁴ is preferably a methyl group, an ethyl group, a propyl group or an isopropyl group, most preferably a methyl group.

[1108] The s in X² is 1 or 2. When s is 1, X² is a pyrrolidinium group, and when s is 2, X² is a piperidinium group. s is preferably 2. While the binding direction of X² is not limited, a nitrogen atom in X² preferably binds to R^{1a} and R^{1b}.

[1109] X^{a} may be the same as or different from X^{b}, and X^{a} is preferably the same group as X^{b}.

[1110] n^{a} and n^{b} are each independently 0 or 1, preferably 1. When n^{a} is 1, R^{3a} binds to X^{a} via Y^{a} and R^{2a}, and when n^{a} is 0, a structure of R^{3a}—X^{a}—R^{1a}—S— is taken. Similarly, when n^{b} is 1, R^{3b}binds to X^{b} via Y^{b} and R^{2b}, and when n^{b} is 0, a structure of R^{3b}—X^{b}—R^{1b}—S— is taken.

[1111] n^{a} may be the same as or different from n^{b}, and n^{a} is preferably the same as n^{b}.

[1112] R^{1a} and R^{1b} are each independently an alkylene group having 1-6 carbon atoms, which may be linear or branched, preferably linear. Specific examples of the alkylene group having 1-6 carbon atoms include methylene group, ethylene group, trimethylene group, isopropylene group, tetramethylene group, isobutylene group, pentamethylene group, neopentylene group and the like. R^{1a} and R^{1b} are each preferably a methylene group, an ethylene group, a trimethylene group, an isopropylene group or a tetramethylene group, most preferably an ethylene group.

[1113] R^{1a} may be the same as or different from R^{1b}, and R^{1a} is preferably the same group as R^{1b}.

[1114] R^{2a} and R^{2b} are each independently an alkylene group having 1-6 carbon atoms, which may be linear or branched, preferably linear. Examples of the alkylene group having 1-6 carbon atoms include those recited as the examples of the alkylene group having 1-6 carbon atoms for R^{1a} or R^{1b}. R^{2a} and R^{2b} are each preferably a methylene group, an ethylene group, a trimethylene group, an isopropylene group or a tetramethylene group.

[1115] When X^{a} and X^{b} are each X¹, R^{2a} and R^{2b} are preferably trimethylene groups. When X^{a} and X^{b} are each X², R^{2a} and R^{2b} are preferably ethylene groups.

[1116] R^{2a} may be the same as or different from R^{2b}, and R^{2a} is preferably the same group as R^{2b}

[1117] Y^{a} and Y^{b} are each independently an ester bond, an amide bond, a carbamate bond, an ether bond or a urea bond, preferably an ester bond, an amide bond or a carbamate bond, most preferably an ester bond. While the binding direction of Y^{a} and Y^{b} is not limited, when Y^{a} is an ester bond, a structure of R^{3a}—CO—O—R^{2a}— is preferable, and when Y^{b} is an ester bond, a structure of R^{3b}—CO—O—R^{2b}— is preferable.

[1118] Y^{a} may be the same as or different from Y^{b}, and Y^{a} is preferably the same group as Y^{b}.

[1119] R^{3a} and R^{3b} are each independently a sterol residue, a liposoluble vitamin residue or an aliphatic hydrocarbon group having 12-22 carbon atoms, preferably a liposoluble vitamin residue or an aliphatic hydrocarbon group having 12-22 carbon atoms, most preferably a liposoluble vitamin residue.

[1120] Examples of the sterol residue include a cholesteryl group (cholesterol residue), a cholestaryl group (cholestanol residue), a stigmasteryl group (stigmasterol residue), a β-sitosteryl group (β-sitosterol residue), a lanosteryl group (lanosterol residue), and an ergosteryl group (ergosterol residue) and the like. The sterol residue is preferably a cholesteryl group or a cholestaryl group.

[1121] As the liposoluble vitamin residue, a residue derived from liposoluble vitamin, as well as a residue derived from a derivative obtained by appropriately converting a hydroxyl group, aldehyde or carboxylic acid, which is a functional group in liposoluble vitamin, to other reactive functional group can be used. As for liposoluble vitamin having a hydroxyl group, for example, the hydroxyl group can be converted to a carboxylic acid by reacting with succinic acid anhydride, glutaric acid anhydride and the like. Examples of the liposoluble vitamin include retinoic acid, retinol, retinal, ergosterol, 7-dehydrocholesterol, calciferol, cholecalciferol, dihydroergocalciferol, dihydrotachysterol, tocopherol, tocotrienol and the like. Preferable examples of the liposoluble vitamin include retinoic acid and tocopherol.

[1122] The aliphatic hydrocarbon group having 12-22 carbon atoms may be linear or branched, preferably linear. The aliphatic hydrocarbon group may be saturated or unsaturated. In the case of an unsaturated aliphatic hydrocarbon group, the aliphatic hydrocarbon group generally contains 1-6, preferably 1-3, more preferably 1-2 unsaturated bonds. While the unsaturated bond includes a carbon-carbon double bond and a carbon-carbon triple bond, it is preferably a carbon-carbon double bond. The aliphatic hydrocarbon group has a carbon number of preferably 12-18, most preferably 13-17. While the aliphatic hydrocarbon group includes an alkyl group, an alkenyl group, an alkynyl group and the like, it is preferably an alkyl group or an alkenyl group. Specific examples of the aliphatic hydrocarbon group having 12-22 carbon atoms include dodecyl group, tridecyl group, tetradecyl group, pentadecyl group, hexadecyl group, heptadecyl group, octadecyl group, nonadecyl group, icosyl group, henicosyl group, docosyl group, dodecenyl group, tridecenyl group, tetradecenyl group, pentadecenyl group, hexadecenyl group, heptadecenyl group, octadecenyl group, nonadecenyl group, icosenyl group, henicosenyl group, docosenyl group, decadienyl group, tridecadienyl group, tetradecadienyl group, pentadecadienyl group, hexadecadienyl group, heptadecadienyl group, octadecadienyl group, nonadecadienyl group, icosadienyl group, henicosadienyl group, docosadienyl group, octadecatrienyl group, icosatrienyl group, icosatetraenyl group, icosapentaenyl group, docosahexaenyl group, isostearyl group and the like. The aliphatic hydrocarbon group having 12-22 carbon atoms is preferably tridecyl group, tetradecyl group, heptadecyl group, octadecyl group, heptadecadienyl group or octadecadienyl group, particularly preferably tridecyl group, heptadecyl group or heptadecadienyl group.

[1123] In one embodiment, an aliphatic hydrocarbon group having 12-22 carbon atoms, which is derived from fatty acid, aliphatic alcohol, or aliphatic amine is used. When R^{3a} (or R^{3b}) is derived from fatty acid, Y^{a} (or Y^{b}) is an ester bond or an amide bond, and fatty acid-derived carbonyl carbon is included in Y^{a} (or Y^{b}). For example, when linoleic acid is used, R^{3a} (or R^{3b}) is a heptadecadienyl group.

[1124] R^{3a} may be the same as or different from R^{3b}, and R^{3a} is preferably the same group as R^{3b}.

[1125] In one embodiment, X^{a} is the same as X^{b}, n^{a} is the same as n^{b}, R^{1a} is the same as R^{1b}, R^{2a} is the same as R^{2b}, R^{3a} is the same as R^{3b}, and Y^{a} is the same as Y^{b}.

[1126] In one embodiment,
[1127] X^{a} and X^{b} are each independently X1,
[1128] R⁴ is an alkyl group having 1-3 carbon atoms, n^{a} and n^{b} are each 1,
[1129] R^{1a} and R^{1b} are each independently an alkylene group having 1-6 carbon atoms,
[1130] R^{2a} and R^{2b} are each independently an alkylene group having 1-6 carbon atoms,
[1131] Y^{a} and Y^{b} are each an ester bond or an amide bond, and
[1132] R^{3a} and R^{3b} are each independently an aliphatic hydrocarbon group having 12-22 carbon atoms.

[1133] In one embodiment,
[1134] X^{a} and X^{b} are each X1,
[1135] R⁴ is an alkyl group having 1-3 carbon atoms, n^{a} and n^{b} are each 1,
[1136] R^{1a} and R^{1b} are each an alkylene group having 1-6 carbon atoms,
[1137] R^{2a} and R^{2b} are each an alkylene group having 1-6 carbon atoms,
[1138] Y^{a} and Y^{b} are each an ester bond or an amide bond,
[1139] R^{3a} and R^{3b} are each an aliphatic hydrocarbon group having 12-22 carbon atoms,
[1140] X^{a} is the same as X^{b},
[1141] R^{1a} is the same as R^{1b},
[1142] R^{2a} is the same as R^{2b}, and
[1143] R^{3a} is the same as R^{3b}.

[1144] In one embodiment,
[1145] X^{a} and X^{b} are each X¹,
[1146] R⁴ is a methyl group, n^{a} and n^{b} are each 1,
[1147] R^{1a} and R^{1b} are each an ethylene group,
[1148] R^{2a} and R^{2b} are each a trimethylene group,
[1149] Y^{a} and Y^{b} are each —CO—O—, and
[1150] R^{3a} and R^{3b} are each independently an alkyl group or alkenyl group having 13-17 carbon atoms.

[1151] In one embodiment,
[1152] X^{a} and X^{b} are each X¹,
[1153] R⁴ is a methyl group, n^{a} and n^{b} are each 1,
[1154] R^{1a} and R^{1b} are each an ethylene group,
[1155] R^{2a} and R^{2b} are each a trimethylene group,
[1156] Y^{a} and Y^{b} are each CO 0,
[1157] R^{3a} and R^{3b} are each an alkyl group or alkenyl group having 13-17 carbon atoms, and
[1158] R^{3a} is the same as R^{3b}.

[1159] In one embodiment,
[1160] X^{a} and X^{b} are each independently X¹,
[1161] R⁴ is an alkyl group having 1-3 carbon atoms, n^{a} and n^{b} are each 1,
[1162] R^{1a} and R^{1b} are each independently an alkylene group having 1-6 carbon atoms,
[1163] R^{2a} and R^{2b} are each independently an alkylene group having 1-6 carbon atoms,
[1164] Y^{a} and Y^{b} are each an ester bond or an amide bond, and
[1165] R^{3a} and R^{3b} are each independently a liposoluble vitamin residue (e.g., retinoic acid residue, tocopherol residue).

[1166] In one embodiment,
[1167] X^{a} and X^{b} are each X¹,
[1168] R⁴ is an alkyl group having 1-3 carbon atoms, n^{a} and n^{b} are each 1,
[1169] R^{1a} and R^{1b} are each an alkylene group having 1-6 carbon atoms,
[1170] R^{2a} and R^{2b} are each an alkylene group having 1-6 carbon atoms,
[1171] Y^{a} and Y^{b} are each an ester bond or an amide bond,
[1172] R^{3a} and R^{3b} are each a liposoluble vitamin residue (e.g., retinoic acid residue, tocopherol residue),
[1173] X^{a} is the same as X^{b},
[1174] R^{1a} is the same as R^{1b},
[1175] R^{2a} is the same as R^{2b}, and
[1176] R^{3a} is the same as R^{3b}.

[1177] In one embodiment,
[1178] X^{a} and X^{b} are each X¹,
[1179] R⁴ is a methyl group, n^{a} and n^{b} are each 1,
[1180] R^{1a} and R^{1b} are each an ethylene group,
[1181] R^{2a} and R^{2b} are each a trimethylene group,
[1182] Y^{a} and Y^{b} are each CO—O—, and
[1183] R^{3a} and R^{3b} are each independently a liposoluble vitamin residue (e.g., retinoic acid residue, tocopherol residue).

[1184] In one embodiment,
[1185] X^{a} and X^{b} are each X¹,
[1186] R⁴ is a methyl group, n^{a} and n^{b} are each 1,
[1187] R^{1a} and R^{1b} are each an ethylene group,
[1188] R^{2a} and R^{2b} are each a trimethylene group,
[1189] Y^{a} and Y^{b} are each CO 0,
[1190] R^{3a} and R^{3b} are each a liposoluble vitamin residue (e.g., retinoic acid residue, tocopherol residue), and
[1191] R^{3a} is the same as R^{3b}.

[1192] In one embodiment,
[1193] X^{a} and X^{b} are each independently X²,
[1194] t is 2,
[1195] R^{1a} and R^{1b} are each independently an alkylene group having 1-6 carbon atoms,
[1196] R^{2a} and R^{2b} are each independently an alkylene group having 1-6 carbon atoms,
[1197] Y^{a} and Y^{b} are each an ester bond, and
[1198] R^{3a} and R^{3b} are each independently a liposoluble vitamin residue (e.g., retinoic acid residue, tocopherol residue) or an aliphatic hydrocarbon group having 12-22 carbon atoms (e.g., alkyl group having 12-22 carbon atoms).

[1199] In one embodiment,
[1200] X^{a} and X^{b} are each independently X²,
[1201] t is 2,
[1202] R^{1a} and R^{1b} are each independently an alkylene group having 1-6 carbon atoms,
[1203] R^{2a} and R^{2b} are each independently an alkylene group having 1-6 carbon atoms,
[1204] Y^{a} and Y^{b} are each an ester bond,
[1205] R^{3a} and R^{3b} are each independently a liposoluble vitamin residue (e.g., retinoic acid residue, tocopherol residue) or an aliphatic hydrocarbon group having 12-22 carbon atoms (e.g., alkyl group having 12-22 carbon atoms),
[1206] X^{a} is the same as X^{b},
[1207] R^{1a} is the same as R^{1b},
[1208] R^{2a} is the same as R^{2b}, and
[1209] R^{3a} is the same as R^{3b}.

[1210] In one embodiment,
[1211] X^{a} and X^{b} are each independently X²,
[1212] t is 2,
[1213] R^{1a} and R^{1b} are each an ethylene group,
[1214] R^{2a} and R^{2b} are each independently an alkylene group having 1-6 carbon atoms,
[1215] Y^{a} and Y^{b} are each an ester bond,
[1216] R^{3a} and R^{3b} are each independently a liposoluble vitamin residue (e.g., retinoic acid residue, tocopherol residue) or an aliphatic hydrocarbon group having 12-22 carbon atoms (e.g., alkyl group having 12-22 carbon atoms),
[1217] X^{a} is the same as X^{b},
[1218] R^{2a} is the same as R^{2b}, and
[1219] R^{3a} is the same as R^{3b}.

[1220] In some embodiments, an ionizable lipid has one of the structures set forth in Table 15b below.

TABLE 15b

| Number | Structure |
|---|---|
| 1 | [chemical structure] |
| 2 | [chemical structure] |
| 3 | [chemical structure] |
| 4 | [chemical structure] |
| 5 | [chemical structure] |
| 6 | [chemical structure] |
| 7 | [chemical structure] |
| 8 | [chemical structure] |
| 9 | [chemical structure] |
| 10 | [chemical structure] |
| 11 | [chemical structure] |
| 12 | [chemical structure] |
| 13 | [chemical structure] |
| 14 | [chemical structure] |
| 15 | [chemical structure] |

[1221] A lipid of the present invention may have an —S—S— (disulfide) bond. The production method for such a compound includes, for example, a method including producing

R^{3a}—(Y^{a}—R^{2a})n^{a}—X^{a}—R^{1a}—SH, and

R^{3b}—(Y^{b}—R^{2b})n^{b}—X^{b}—R^{1b}—SH, and

subjecting them to oxidation (coupling) to give a compound containing —S—S—, a method including sequentially bonding necessary parts to a compound containing an —S—S— bond to finally obtain the compound of the present invention and the like. Preferred is the latter method.

[1222] A specific example of the latter method is shown below, which is not to be construed as limiting.

[1223] Examples of the starting compound include —S—S— bond-containing two terminal carboxylic acid, two terminal carboxylate, two terminal amine, two terminal isocyanate, two terminal alcohol, two terminal alcohol having a leaving group such as MsO (mesylate group) and the like, a two terminal carbonate having a leaving group such as pNP (p-nitrophenylcarbonate group) and the like.

[1224] For example, when a compound containing X¹ or X² for X^{a} and X^{b} is produced, two terminal functional groups of compound (1) containing an —S—S— bond are reacted with an —NH— group in compound (2) having the —NH— group and one functional group at the terminal, the functional group at the terminal in compound (2) which did not contribute to the reaction is reacted with a functional group in compound (3) containing R³, whereby the compound of the present invention containing an —S—S— bond, R^{1a} and R^{1b}, X^{a} and X^{b}, R^{2a} and R^{2b}, Y^{a} and Y^{b}, and R^{3a} and R^{3b} can be obtained.

[1225] In the reaction of compound (1) and compound (2), an alkali catalyst such as potassium carbonate, sodium carbonate, potassium t-butoxide and the like may be used as a catalyst, or the reaction may be performed without a catalyst. Preferably, potassium carbonate or sodium carbonate is used as a catalyst.

[1226] The amount of catalyst is 0.1-100 molar equivalents, preferably, 0.1-20 molar equivalents, more preferably 0.1-5 molar equivalents, relative to compound (1). The amount of compound (2) to be charged is 1-50 molar equivalents, preferably 1-10 molar equivalents, relative to compound (1).

[1227] The solvent to be used for the reaction of compound (1) and compound (2) is not particularly limited as long as it is a solvent or aqueous solution that does not inhibit the reaction. For example, ethyl acetate, dichloromethane, chloroform, benzene, toluene and the like can be mentioned. Among these, toluene and chloroform are preferable.

[1228] The reaction temperature is −20 to 200° C., preferably 0 to 80° C., more preferably 20 to 50° C., and the reaction time is 1-48 hr, preferably 2-24 hr.

[1229] When the reaction product of compound (1) and compound (2) is reacted with compound (3), an alkali catalyst such as potassium carbonate, sodium carbonate, potassium t-butoxide and the like, or an acid catalyst such as PTS (p-toluenesulfonic acid), MSA (methanesulfonic acid) and the like may be used, like the catalyst used for the reaction of compound (1) and compound (2), or the reaction may be performed without a catalyst.

[1230] In addition, the reaction product of compound (1) and compound (2) may be directly reacted with compound (3) by using a condensing agent such as DCC (dicyclohexylcarbodiimide), DIC (diisopropylcarbodiimide), EDC (1-ethyl-3-(3-dimethylaminopropyl)carbodiimide hydrochloride) and the like. Alternatively, compound (3) may be treated with a condensing agent to be once converted to an anhydride and the like, after which it is reacted with the reaction product of compound (1) and compound (2).

[1231] The amount of compound (3) to be charged is 1-50 molar equivalents, preferably 1-10 molar equivalents, relative to the reaction product of compound (1) and compound (2).

[1232] The catalyst to be used is appropriately selected according to the functional groups to be reacted.

[1233] The amount of catalyst is 0.05-100 molar equivalents, preferably 0.1-20 molar equivalents, more preferably 0.2-5 molar equivalent, relative to compound (1).

[1234] The solvent to be used for the reaction of the reaction product of compound (1) and compound (2) with compound (3) is not particularly limited as long as it is a solvent or aqueous solution that does not inhibit the reaction. For example, ethyl acetate, dichloromethane, chloroform, benzene, toluene and the like can be mentioned. Among these, toluene and chloroform are preferable.

[1235] The reaction temperature is 0 to 200° C., preferably 0 to 120° C., more preferably 20 to 50° C., and the reaction time is 1 hr-48 hr, preferably 2-24 hr.

[1236] The reaction product obtained by the above-mentioned reaction can be appropriately purified by a general purification method, for example, washing with water, silica gel column chromatography, crystallization, recrystallization, liquid-liquid extraction, reprecipitation, ion exchange column chromatography and the like.

[1237] 5.3 Structure XXIII Lipids

[1238] In some embodiments, an ionizable lipid is described in U.S. Pat. No. 9,765,022.

[1239] The present invention provides a compound represented by structure (XXIII):

[chemical structure]

[1240] In structure XXIII, a hydrophilic and optionally positively charged head is

[chemical structure]

in which each of Rₐ, Rₐ′, Rₐ″, and Rₐ′″, independently, is H, a C₁-C₂₀ monovalent aliphatic radical, a C₁-C₂₀ monovalent heteroaliphatic radical, a monovalent aryl radical, or a monovalent heteroaryl radical, and Z is a C₁-C₂₀ bivalent aliphatic radical, a C₁-C₂₀ bivalent heteroaliphatic radical, a bivalent aryl radical, or a bivalent heteroaryl radical; B is a C₁-C₂₄ monovalent aliphatic radical, a C₁-C₂₄ monovalent heteroaliphatic radical, a monovalent aryl radical, a monovalent heteroaryl radical, or

[chemical structure]

leach of R₁ and R₄, independently, is a bond, a C₁-C₁₀ bivalent aliphatic radical, a C₁-C₁₀ bivalent heteroaliphatic radical, a bivalent aryl radical, or a bivalent heteroaryl radical; each of R₂ and R₅, independently, is a bond, a C₁-C₂₀ bivalent aliphatic radical, a C₁-C₂₀ bivalent heteroaliphatic radical, a bivalent aryl radical, or a bivalent heteroaryl radical; each of R₃ and R₆, independently, is a C₁-C₂₀ monovalent aliphatic radical, a C₁-C₂₀ monovalent heteroaliphatic radical, a monovalent aryl radical, or a monovalent heteroaryl radical; each of

[chemical structure]

a hydrophobic tail, and

[chemical structure]

also a hydrophobic tail, has 8 to 24 carbon atoms; and each of X, a linker, and Y, also a linker, independently, is

[chemical structure]

in which each of m, n, p, q, and t, independently, is 1-6; W is O, S, or NR_{c}; each of L₁, L₃, L₅, L₇, and L₉, directly linked to R₁, R₂, R₄, or R₅, independently, is a bond, O, S, or NR_{d}; each of L², L⁴, L₆, L₈, and L₁₀, independently, is a bond, O, S, or NRₑ; V is OR_{f}, SR_{g}, or NRₕRᵢ; and each of R_{b}, R_{c}, R_{d}, Rₑ, R_{f}, R_{g}, Rₕ, and Rᵢ, independently, is H, OH, C₁₋₁₀ oxyaliphatic radical, C₁-C₁₀ monovalent aliphatic radical, C₁-C₁₀ monovalent heteroaliphatic radical, a monovalent aryl radical, or a monovalent heteroaryl radical.

[1241] A subset of the above-described lipid-like compounds include those in which A is

[chemical structure]

each of Rₐ and Rₐ′, independently, being a C₁-C₁₀ monovalent monovalent aliphatic radical, a C₁-C₁₀ monovalent heteroaliphatic radical, a monovalent aryl radical, or a monovalent heteroaryl radical; and Z being a C₁-C₁₀ bivalent aliphatic radical, a C₁-C₁₀ bivalent heteroaliphatic radical, a bivalent aryl radical, or a bivalent heteroaryl radical.

[1242] Some lipid-like compounds of this invention feature each of R₁ and R₄, independently, being C₁-C₆ (e.g., C₁-C₄) bivalent aliphatic radical or a C₁-C₆ (e.g., C₁-C₄) bivalent heteroaliphatic radical, the total carbon number for R₂ and R₃ being 12-20 (e.g., 14-18), the total carbon number of R₅ and R₆ also being 12-20 (e.g., 14-18), and each of X and Y, independently, is

[chemical structure]

[1243] Specific examples of X and Y include

[chemical structure]

m being 2-6.

[1244] Still within the scope of this invention is a pharmaceutical composition containing a nanocomplex that is formed of a protein and a bioreducible compound. In this pharmaceutical composition, the nanocomplex has a particle size of 50 to 500 nm; the bioreducible compound contains a disulfide hydrophobic moiety, a hydrophilic moiety, and a linker joining the disulfide hydrophobic moiety and the hydrophilic moiety; and the protein binds to the bioreducible compound via a non-covalent interaction, a covalent bond, or both.

[1245] In certain embodiments, the disulfide hydrophobic moiety is a heteroaliphatic radical containing one or more —S—S— groups and 8 to 24 carbon atoms; the hydrophilic moiety is an aliphatic or heteroaliphatic radical containing one or more hydrophilic groups and 1-20 carbon atoms, each of the hydrophilic groups being amino, alkylamino, dialkylamino, trialkylamino, tetraalkylammonium, hydroxyamino, hydroxyl, carboxyl, carboxylate, carbamate, carbamide, carbonate, phosphate, phosphite, sulfate, sulfite, or thiosulfate; and the linker is O, S, Si, C₁-C₆ alkylene,

[chemical structure]

in which the variables are defined above.

[1246] Specific examples of X and Y include O, S, Si, C₁-C₆ alkylene,

[chemical structure]

[1247] In some embodiments, a lipid-like compound of this invention, as shown instructure XXIII above, includes (i) a hydrophilic head, A; (ii) a hydrophobic tail, R₂—S—S—R₃; and (iii) a linker, X. Optionally, these compounds contain a second hydrophobic tail, R₅—S—S—R₆ and a second linker, Y.

[1248] The hydrophilic head of structure XXIII contains one or more hydrophilic functional groups, e.g., hydroxyl, carbonyl, carboxyl, amino, sulfhydryl, phosphate, amide, ester, ether, carbamate, carbonate, carbamide, and phosphodiester. These groups can form hydrogen bonds and are optionally positively or negatively charged.

[1249] Examples of the hydrophilic head include:

[chemical structure]

[chemical structure]

[chemical structure]

[chemical structure]

[1250] Other examples include those described in Akinc et al., Nature Biotechnology, 26, 561-69 (2008) and Mahon et al., US Patent Application Publication 2011/0293703.

[1251] The hydrophobic tail of structure XXIII is a saturated or unsaturated, linear or branched, acyclic or cyclic, aromatic or nonaromatic hydrocarbon moiety containing a disulfide bond and 8-24 carbon atoms. One or more of the carbon atoms can be replaced with a heteroatom, such as N, O, P, B, S, Si, Sb, A1, Sn, As, Se, and Ge. The tail is optionally substituted with one or more groups described above. The lipid-like compounds containing this disulfide bond can be bioreducible.

[1252] Examples include:

[chemical structure]

[1253] A linker of structure XXIII links the hydrophilic head and the hydrophobic tail. The linker can be any chemical group that is hydrophilic or hydrophobic, polar or non-polar, e.g., O, S, Si, amino, alkylene, ester, amide, carbamate, carbamide, carbonate, phosphate, phosphite, sulfate, sulfite, and thiosulfate. Examples include:

[chemical structure]

[1254] Shown below are exemplary lipid-like compounds of this invention:

[chemical structure]

[chemical structure]

[1255] The lipid-like compounds of structure XXIII can be prepared by methods well known the art. See Wang et al., ACS Synthetic Biology, 1, 403-07 (2012); Manoharan, et al., International Patent Application Publication WO 2008/042973; and Zugates et al., U.S. Pat. No. 8,071,082. The route shown below exemplifies synthesis of these lipid-like compounds:

[chemical structure]

[1256] Each of Lₐ, Lₐ′, L, and L′ can be one of L₁-L₁₀; each of Wₐ and W_{b}, independently, is W or V; and Rₐ and R₁-R₆ are defined above, as well as L₁-L₁₀, W, and V.

[1257] In this exemplary synthetic route, an amine compound, i.e., compound D, reacts with bromides E1 and E2 to form compound F, which is then coupled with both G1 and G2 to afford the final product, i.e., compound H. One or both of the double bonds in this compound (shown above) can be reduced to one or two single bonds to obtain different lipid-like compounds of structure XXIII.

[1258] Other lipid-like compounds of this invention can be prepared using other suitable starting materials through the above-described synthetic route and others known in the art. The method set forth above can include an additional step(s) to add or remove suitable protecting groups in order to ultimately allow synthesis of the lipid-like compounds. In addition, various synthetic steps can be performed in an alternate sequence or order to give the desired material. Synthetic chemistry transformations and protecting group methodologies (protection and deprotection) useful in synthesizing applicable lipid-like compounds are known in the art, including, for example, R. Larock, Comprehensive Organic Transformations (2nd Ed., VCH Publishers 1999); P. G. M. Wuts and T. W. Greene, Greene's Protective Groups in Organic Synthesis (4th Ed., John Wiley and Sons 2007); L. Fieser and M. Fieser, Fieser and Fieser's Reagents for Organic Synthesis (John Wiley and Sons 1994); and L. Paquette, ed., Encyclopedia of Reagents for Organic Synthesis (2nd ed., John Wiley and Sons 2009) and subsequent editions thereof. Certain lipid-like compounds may contain a non-aromatic double bond and one or more asymmetric centers. Thus, they can occur as racemates and racemic mixtures, single enantiomers, individual diastereomers, diastereomeric mixtures, and cis- or trans-isomeric forms. All such isomeric forms are contemplated.

[1259] As mentioned above, these lipid-like compounds are useful for delivery of pharmaceutical agents. They can be preliminarily screened for their efficacy in delivering pharmaceutical agents by an in vitro assay and then confirmed by animal experiments and clinic trials. Other methods will also be apparent to those of ordinary skill in the art.

[1260] Not to be bound by any theory, the lipid-like compounds of structure XXIII facilitate delivery of pharmaceutical agents by forming complexes, e.g., nanocomplexes and microparticles. The hydrophilic head of such a lipid-like compound, positively or negatively charged, binds to a moiety of a pharmaceutical agent that is oppositely charged and its hydrophobic moiety binds to a hydrophobic moiety of the pharmaceutical agent. Either binding can be covalent or non-covalent.

[1261] The above described complexes can be prepared using procedures described in publications such as Wang et al., ACS Synthetic Biology, 1, 403-07 (2012). Generally, they are obtained by incubating a lipid-like compound and a pharmaceutical agent in a buffer such as a sodium acetate buffer or a phosphate buffered saline (“PBS”).

[1262] 5.4 Hydrophilic Groups

[1263] In certain embodiments, the selected hydrophilic functional group or moiety may alter or otherwise impart properties to the compound or to the transfer vehicle of which such compound is a component (e.g., by improving the transfection efficiencies of a lipid nanoparticle of which the compound is a component). For example, the incorporation of guanidinium as a hydrophilic head-group in the compounds disclosed herein may promote the fusogenicity of such compounds (or of the transfer vehicle of which such compounds are a component) with the cell membrane of one or more target cells, thereby enhancing, for example, the transfection efficiencies of such compounds. It has been hypothesized that the nitrogen from the hydrophilic guanidinium moiety forms a six-membered ring transition state which grants stability to the interaction and thus allows for cellular uptake of encapsulated materials. (Wender, et al., Adv. Drug Del. Rev. (2008) 60: 452-472.) Similarly, the incorporation of one or more amino groups or moieties into the disclosed compounds (e.g., as a head-group) may further promote disruption of the endosomal/lysosomal membrane of the target cell by exploiting the fusogenicity of such amino groups. This is based not only on the pKa of the amino group of the composition, but also on the ability of the amino group to undergo a hexagonal phase transition and fuse with the target cell surface, i.e. the vesicle membrane. (Koltover, et al. Science (1998) 281: 78-81.) The result is believed to promote the disruption of the vesicle membrane and release of the lipid nanoparticle contents into the target cell.

[1264] Similarly, in certain embodiments the incorporation of, for example, imidazole as a hydrophilic head-group in the compounds disclosed herein may serve to promote endosomal or lysosomal release of, for example, contents that are encapsulated in a transfer vehicle (e.g., lipid nanoparticle) of the invention. Such enhanced release may be achieved by one or both of a proton-sponge mediated disruption mechanism and/or an enhanced fusogenicity mechanism. The proton-sponge mechanism is based on the ability of a compound, and in particular a functional moiety or group of the compound, to buffer the acidification of the endosome. This may be manipulated or otherwise controlled by the pKa of the compound or of one or more of the functional groups comprising such compound (e.g., imidazole). Accordingly, in certain embodiments the fusogenicity of, for example, the imidazole-based compounds disclosed herein (e.g., HGT4001 and HGT4004) are related to the endosomal disruption properties, which are facilitated by such imidazole groups, which have a lower pKa relative to other traditional ionizable lipids. Such endosomal disruption properties in turn promote osmotic swelling and the disruption of the liposomal membrane, followed by the transfection or intracellular release of the polynucleotide materials loaded or encapsulated therein into the target cell. This phenomenon can be applicable to a variety of compounds with desirable pKa profiles in addition to an imidazole moiety. Such embodiments also include multi-nitrogen based functionalities such as polyamines, poly-peptide (histidine), and nitrogen-based dendritic structures.

[1265] Exemplary ionizable and/or cationic lipids are described in International PCT patent publications WO2015/095340, WO2015/199952, WO2018/011633, WO2017/049245, WO2015/061467, WO2012/040184, WO2012/000104, WO2015/074085, WO2016/081029, WO2017/004 143, WO2017/075531, WO2017/117528, WO2011/022460, WO2013/148541, WO2013/116126, WO2011/153120, WO2012/044638, WO2012/054365, WO2011/090965, WO2013/016058, WO2012/162210, WO2008/042973, WO2010/129709, WO2010/144740, WO20 12/099755, WO2013/049328, WO2013/086322, WO2013/086373, WO2011/071860, WO2009/132131, WO2010/048536, WO2010/088537, WO2010/054401, WO2010/054406 WO2010/054405, WO2010/054384, WO2012/016184, WO2009/086558, WO2010/042877, WO2011/000106, WO2011/000107, WO2005/120152, WO2011/141705, WO2013/126803, WO2006/007712, WO2011/038160, WO2005/121348, WO2011/066651, WO2009/127060, WO2011/141704, WO2006/069782, WO2012/031043, WO2013/006825, WO2013/033563, WO2013/089151, WO2017/099823, WO2015/095346, and WO2013/086354, and US patent publications US2016/0311759, US2015/0376115, US2016/0151284, US2017/0210697, US2015/0140070, US2013/0178541, US2013/0303587, US2015/0141678, US2015/0239926, US2016/0376224, US2017/0119904, US2012/0149894, US2015/0057373, US2013/0090372, US2013/0274523, US2013/0274504, US2013/0274504, US2009/0023673, US2012/0128760, US2010/0324120, US2014/0200257, US2015/0203446, US2018/0005363, US2014/0308304, US2013/0338210, US2012/0101148, US2012/0027796, US2012/0058144, US2013/0323269, US2011/0117125, US2011/0256175, US2012/0202871, US2011/0076335, US2006/0083780, US2013/0123338, US2015/0064242, US2006/0051405, US2013/0065939, US2006/0008910, US2003/0022649, US2010/0130588, US2013/0116307, US2010/0062967, US2013/0202684, US2014/0141070, US2014/0255472, US2014/0039032, US2018/0028664, US2016/0317458, and US2013/0195920, the contents of all of which are incorporated herein by reference in their entirety. International patent application WO 2019/131770 is also incorporated herein by reference in its entirety.

[1266] B. Stabilizing Lipids

[1267] A stabilizing lipid or surface stabilizing lipid may be used to enhance the structure of the LNP. A stabilizing lipid as contemplated herein may be a polyethylene glycol (PEG)-modified phospholipid. The use and inclusion of polyethylene glycol (PEG)-modified phospholipids and derivatized lipids such as derivatized ceramides (PEG-CER), including N-Octanoyl-Sphingosine-1-[Succinyl(Methoxy Polyethylene Glycol)-2000] (C8 PEG-2000 ceramide) in the liposomal and pharmaceutical compositions described herein is contemplated, preferably in combination with one or more of the compounds and lipids disclosed herein. Contemplated PEG-modified lipids include, but are not limited to, a polyethylene glycol chain of up to 5 kDa in length covalently attached to a lipid with alkyl chain(s) of C6-C20 length. In some embodiments, the PEG-modified lipid employed in the compositions and methods of the invention is 1,2-dimyristoyl-sn-glycerol, methoxypolyethylene Glycol (2000 MW PEG) “DMG-PEG2000.” The addition of PEG-modified lipids to the lipid delivery vehicle may prevent complex aggregation and may also provide a means for increasing circulation lifetime and increasing the delivery of the lipid-polynucleotide composition to the target tissues, (Klibanov et al. (1990) FEBS Letters, 268 (1): 235-237), or they may be selected to rapidly exchange out of the formulation in vivo (see U.S. Pat. No. 5,885,613). Particularly useful exchangeable lipids are PEG-ceramides having shorter acyl chains (e.g., C14 or C18). The PEG-modified phospholipid and derivatized lipids of the present invention may comprise a molar ratio from about 0% to about 20%, about 0.5% to about 20%, about 1% to about 15%, about 4% to about 10%, or about 2% of the total lipid present in a liposomal lipid nanoparticle.

[1268] In an embodiment, a PEG-modified lipid is described in International Pat. Appl. No. PCT/US2019/015913, which is incorporated herein by reference in their entirety. In an embodiment, a transfer vehicle comprises one or more PEG-modified lipids.

[1269] Non-limiting examples of PEG-modified lipids include PEG-modified phosphatidylethanolamines and phosphatidic acids, PEG-ceramide conjugates (e.g., PEG-CerC14 or PEG-CerC20), PEG-modified dialkylamines and PEG-modified 1,2-diacyloxypropan-3-amines. In some further enbodiments, a PEG-modified lipid may be, e.g., PEG-c-DOMG, PEG-DMG, PEG-DLPE, PEG-DMPE, PEG-DPPC, or a PEG-DSPE.

[1270] In some still further embodiments, the PEG-modified lipid includes, but is not limited to 1,2-dimyristoyl-sn-glycerol methoxypolyethylene glycol (PEG-DMG), 1,2-distearoyl-sn-glycero-3-phosphoethanolamine-N-[amino(polyethylene glycol)] (PEG-DSPE), PEG-disteryl glycerol (PEG-DSG), PEG-dipalmetoleyl, PEG-dioleyl, PEG-distearyl, PEG-diacylglycamide (PEG-DAG), PEG-dipalmitoyl phosphatidylethanolamine (PEG-DPPE), or PEG-1,2-dimyristyloxlpropyl-3-amine (PEG-c-DMA).

[1271] In various embodiments, a PEG-modified lipid may also be referred to as “PEGylated lipid” or “PEG-lipid.”

[1272] In one embodiment, the PEG-lipid is selected from the group consisting of a PEG-modified phosphatidylethanolamine, a PEG-modified phosphatidic acid, a PEG-modified ceramide, a PEG-modified dialkylamine, a PEG-modified diacylglycerol, a PEG-modified dialkylglycerol, and mixtures thereof.

[1273] In some embodiments, the lipid moiety of the PEG-lipids includes those having lengths of from about C₁₄ to about C₂₂, such as from about C₁₄ to about C₁₆. In some embodiments, a PEG moiety, for example a mPEG-NH₂, has a size of about 1000, about 2000, about 5000, about 10,000, about 15,000 or about 20,000 daltons. In one embodiment, the PEG-lipid is PEG2k-DMG.

[1274] In one embodiment, the lipid nanoparticles described herein can comprise a lipid modified with a non-diffusible PEG. Non-limiting examples of non-diffusible PEGs include PEG-DSG and PEG-DSPE.

[1275] PEG-lipids are known in the art, such as those described in U.S. Pat. No. 8,158,601 and International Pat. Publ. No. WO2015/130584 A2, which are incorporated herein by reference in their entirety.

[1276] In various embodiments, lipids (e.g., PEG-lipids), described herein may be synthesized as described International Pat. Publ. No. PCT/US2016/000129, which is incorporated by reference in its entirety.

[1277] The lipid component of a lipid nanoparticle composition may include one or more molecules comprising polyethylene glycol, such as PEG or PEG-modified lipids. Such species may be alternately referred to as PEGylated lipids. A PEG lipid is a lipid modified with polyethylene glycol. A PEG lipid may be selected from the non-limiting group including PEG-modified phosphatidylethanolamines, PEG-modified phosphatidic acids, PEG-modified ceramides, PEG-modified dialkylamines, PEG-modified diacylglycerols, PEG-modified dialkylglycerols, and mixtures thereof. For example, a PEG lipid may be PEG-c-DOMG, PEG-DMG, PEG-DLPE, PEG-DMPE, PEG-DPPC, or a PEG-DSPE lipid.

[1278] In some embodiments the PEG-modified lipids are a modified form of PEG-DMG. PEG-DMG has the following structure:

[chemical structure]

[1279] In some embodiments the PEG-modified lipids are a modified form of PEG-C18, or PEG-1. PEG-1 has the following structure

[chemical structure]

[1280] In one embodiment, PEG lipids useful in the present invention can be PEGylated lipids described in International Publication No. WO2012099755, the contents of which is herein incorporated by reference in its entirety. Any of these exemplary PEG lipids described herein may be modified to comprise a hydroxyl group on the PEG chain. In certain embodiments, the PEG lipid is a PEG-OH lipid. In certain embodiments, the PEG-OH lipid includes one or more hydroxyl groups on the PEG chain. In certain embodiments, a PEG-OH or hydroxy-PEGylated lipid comprises an —OH group at the terminus of the PEG chain. Each possibility represents a separate embodiment of the present invention.

[1281] In some embodiments, the PEG lipid is a compound of Formula (P1):

[chemical structure]

or a salt or isomer thereof, wherein:
[1282] r is an integer between 1 and 100;
[1283] R is C₁₀₋₄₀ alkyl, C₁₀₋₄₀ alkenyl, or C₁₀₋₄₀ alkynyl; and optionally one or more methylene groups of R are independently replaced with C₃₋₁₀ carbocyclylene, 4 to 10 membered heterocyclylene, C₆₋₁₀ arylene, 4 to 10 membered heteroarylene, —N(R^{N})—, —O—, —S—, —C(O)—, —C(O)N(R^{N})—, —NR^{N}C(O)—, —NR^{N}C(O)N(R^{N})—, —C(O)O—, —OC(O)—, —OC(O)O—, —OC(O)N(R^{N})—, —NR^{N}C)-, —C(O)S—, —SC(O)—, —C(═NR^{N})—, —C(═NR^{N})N(R^{N})—, —NR^{N}C(═NR^{N})—, —NR^{N}C(═NR^{N})N(R^{N}) C(S)—, —C(S)N(R^{N})—, —NR^{N}C(S)—, —NR^{N}C(S)N(R^{N})—, —S(O)—, —OS(O)—, —S(O)O—, —OS(O)O—, —OS(O)₂—, —S(O)₂₀—, —OS(O)₂₀—, —N(R^{N})S(O)—, —S(O)N(R^{N})—, —N(R^{N})S(O)N(R^{N})—, —OS(O)N(R^{N})—, —N(R^{N})S(O)O—, —S(O)₂—, —N(R^{N})S(O)₂—, —S(O)₂N(R^{N})—, —N(R^{N})S(O)₂N(R^{N})—, —OS(O)₂N(R^{N})—, or —N(R^{N})S(O)₂O—; and each instance of R^{N} is independently hydrogen, C₁₋₆ alkyl, or a nitrogen protecting group.

[1284] For example, R is C17 alkyl. For example, the PEG lipid is a compound of Formula (P1-a):

[chemical structure]

or a salt or isomer thereof, wherein r is an integer between 1 and 100.

[1285] For example, the PEG lipid is a compound of the following formula:

[chemical structure]

[1286] C. Helper Lipids

[1287] In some embodiments, the transfer vehicle (e.g., LNP) described herein comprises one or more non-cationic helper lipids. In some embodiments, the helper lipid is a phospholipid. In some embodiments, the helper lipid is a phospholipid substitute or replacement. In some embodiments, the phospholipid or phospholipid substitute can be, for example, one or more saturated or (poly)unsaturated phospholipids, or phospholipid substitutes, or a combination thereof. In general, phospholipids comprise a phospholipid moiety and one or more fatty acid moieties.

[1288] A phospholipid moiety can be selected, for example, from the non-limiting group consisting of phosphatidyl choline, phosphatidyl ethanolamine, phosphatidyl glycerol, phosphatidyl serine, phosphatidic acid, 2-lysophosphatidyl choline, and a sphingomyelin.

[1289] A fatty acid moiety can be selected, for example, from the non-limiting group consisting of lauric acid, myristic acid, myristoleic acid, palmitic acid, palmitoleic acid, stearic acid, oleic acid, linoleic acid, alpha-linolenic acid, erucic acid, phytanoic acid, arachidic acid, arachidonic acid, eicosapentaenoic acid, behenic acid, docosapentaenoic acid, and docosahexaenoic acid.

[1290] Phospholipids include, but are not limited to, glycerophospholipids such as phosphatidylcholines, phosphatidylethanolamines, phosphatidylserines, phosphatidylinositols, phosphatidy glycerols, and phosphatidic acids. Phospholipids also include phosphosphingolipid, such as sphingomyelin.

[1291] In some embodiments, the helper lipid is a 1,2-distearoyl-177-glycero-3-phosphocholine (DSPC) analog, a DSPC substitute, oleic acid, or an oleic acid analog.

[1292] In some embodiments, a helper lipid is a non-phosphatidyl choline (PC) zwitterionic lipid, a DSPC analog, oleic acid, an oleic acid analog, or a DSPC substitute.

[1293] In some embodiments, a helper lipid is described in PCT/US2018/053569. Helper lipids suitable for use in a lipid composition of the disclosure include, for example, a variety of neutral, uncharged or zwitterionic lipids. Such helper lipids are preferably used in combination with one or more of the compounds and lipids disclosed herein. Examples of helper lipids include, but are not limited to, 5-heptadecylbenzene-1,3-diol (resorcinol), dipalmitoylphosphatidylcholine (DPPC), distearoylphosphatidylcholine (DSPC), pohsphocholine (DOPC), dimyristoylphosphatidylcholine (DMPC), phosphatidylcholine (PLPC), 1,2-distearoylsn-glycero-3-phosphocholine (DAPC), phosphatidylethanolamine (PE), egg phosphatidylcholine (EPC), dilauryloylphosphatidylcholine (DLPC), dimyristoylphosphatidylcholine (DMPC), 1-myristoyl-2-palmitoyl phosphatidylcholine (MPPC), 1-paimitoyl-2-myristoyl phosphatidylcholine (PMPC), 1-palmitoyl-2-stearoyl phosphatidylcholine (PSPC), 1,2-diarachidoyl-sn-glycero-3-phosphocholine (DBPC), 1-stearoyl-2-palmitoyl phosphatidylcholine (SPPC), 1,2-dieicosenoyl-sn-glycero-3-phosphocholine (DEPC), paimitoyioieoyl phosphatidylcholine (POPC), lysophosphatidyl choline, dioleoyl phosphatidylethanol amine (DOPE) dilinoleoylphosphatidylcholine distearoylphosphatidylethanolamine (DSPE), dimyristoyl phosphatidylethanolamine (DMPE), dipalmitoyl phosphatidylethanolamine (DPPE), palmitoyloleoyl phosphatidylethanolamine (POPE), lysophosphatidylethanolamine and combinations thereof. In one embodiment, the helper lipid may be distearoylphosphatidylcholine (DSPC) or dimyristoyl phosphatidyl ethanolamine (DMPE). In another embodiment, the helper lipid may be distearoylphosphatidylcholine (DSPC). Helper lipids function to stabilize and improve processing of the transfer vehicles. Such helper lipids are preferably used in combination with other excipients, for example, one or more of the ionizable lipids disclosed herein. In some embodiments, when used in combination with an ionizable lipid, the helper lipid may comprise a molar ratio of 5% to about 90%, or about 10% to about 70% of the total lipid present in the lipid nanoparticle.

[1294] D. Structural Lipids

[1295] In an embodiment, a structural lipid is described in international patent application PCT/US2019/015913.

[1296] The transfer vehicles described herein comprise one or more structural lipids. Incorporation of structural lipids in the lipid nanoparticle may help mitigate aggregation of other lipids in the particle. Structural lipids can include, but are not limited to, cholesterol, fecosterol, ergosterol, bassicasterol, tomatidine, tomatine, ursolic, alpha-tocopherol, and mixtures thereof. In certain embodiments, the structural lipid is cholesterol. In certain embodiments, the structural lipid includes cholesterol and a corticosteroid (such as, for example, prednisolone, dexamethasone, prednisone, and hydrocortisone), or a combination thereof.

[1297] In some embodiments, the structural lipid is a sterol. In certain embodiments, the structural lipid is a steroid. In certain embodiments, the structural lipid is cholesterol. In certain embodiments, the structural lipid is an analog of cholesterol. In certain embodiments, the structural lipid is alpha-tocopherol.

[1298] The transfer vehicles described herein comprise one or more structural lipids. Incorporation of structural lipids in a transfer vehicle, e.g., a lipid nanoparticle, may help mitigate aggregation of other lipids in the particle. In certain embodiments, the structural lipid includes cholesterol and a corticosteroid (such as, for example, prednisolone, dexamethasone, prednisone, and hydrocortisone), or a combination thereof.

[1299] In some embodiments, the structural lipid is a sterol. Structural lipids can include, but are not limited to, sterols (e.g., phytosterols or zoosterols).

[1300] In certain embodiments, the structural lipid is a steroid. For example, sterols can include, but are not limited to, cholesterol, 0-sitosterol, fecosterol, ergosterol, sitosterol, campesterol, stigmasterol, brassicasterol, ergosterol, tomatidine, tomatine, ursolic acid, or alpha-tocopherol.

[1301] In some embodiments, a transfer vehicle includes an effective amount of an immune cell delivery potentiating lipid, e.g., a cholesterol analog or an amino lipid or combination thereof, that, when present in a transfer vehicle, e.g., an lipid nanoparticle, may function by enhancing cellular association and/or uptake, internalization, intracellular trafficking and/or processing, and/or endosomal escape and/or may enhance recognition by and/or binding to immune cells, relative to a transfer vehicle lacking the immune cell delivery potentiating lipid. Accordingly, while not intending to be bound by any particular mechanism or theory, in one embodiment, a structural lipid or other immune cell delivery potentiating lipid of the disclosure binds to C1q or promotes the binding of a transfer vehicle comprising such lipid to C1q. Thus, for in vitro use of the transfer vehicles of the disclosure for delivery of a nucleic acid molecule to an immune cell, culture conditions that include C1q are used (e.g., use of culture media that includes serum or addition of exogenous C1q to serum-free media). For in vivo use of the transfer vehicles of the disclosure, the requirement for C1q is supplied by endogenous C1q.

[1302] In certain embodiments, the structural lipid is cholesterol. In certain embodiments, the structural lipid is an analog of cholesterol. In some embodiments, the structural lipid is a lipid in Table 16:

| CMPD | |
|---|---|
| No. S- | Structure |
| 1 | [chemical structure] |
| 22 | [chemical structure] |
| 2 | [chemical structure] |
| 3 | [chemical structure] |
| 4 | [chemical structure] |
| 5 | [chemical structure] |
| 6 | [chemical structure] |
| 7 | [chemical structure] |
| 23 | [chemical structure] |
| 24 | [chemical structure] |
| 25 | [chemical structure] |
| 26 | [chemical structure] |
| 27 | [chemical structure] |
| 28 | [chemical structure] |
| 8 | [chemical structure] |
| 9 | [chemical structure] |
| 10 | [chemical structure] |
| 11 | [chemical structure] |
| 12 | [chemical structure] |
| 13 | [chemical structure] |
| 29 | [chemical structure] |
| 30 | [chemical structure] |
| 31 | [chemical structure] |
| 32 | [chemical structure] |
| 33 | [chemical structure] |
| 34 | [chemical structure] |
| 14 | [chemical structure] |
| 15 | [chemical structure] |
| 16 | [chemical structure] |
| 17 | [chemical structure] |
| 18 | [chemical structure] |
| 19 | [chemical structure] |
| 35 | [chemical structure] |
| 36 | [chemical structure] |
| 37 | [chemical structure] |
| 38 | [chemical structure] |
| 39 | [chemical structure] |
| 40 | [chemical structure] |
| 20 | [chemical structure] |
| 21 | [chemical structure] |
| 150 | [chemical structure] |
| 154 | [chemical structure] |
| 162 | [chemical structure] |
| 41 | [chemical structure] |
| 42 | [chemical structure] |
| 165 | [chemical structure] |
| 169 | [chemical structure] |
| 170 | [chemical structure] |
| 163 | [chemical structure] |
| 164 | [chemical structure] |
| 184 | [chemical structure] |
| 171 | [chemical structure] |
| 172 | [chemical structure] |
| 43 | [chemical structure] |
| 47 | [chemical structure] |
| 44 | [chemical structure] |
| 45 | [chemical structure] |
| 46 | [chemical structure] |
| 175 | [chemical structure] |
| 176 | [chemical structure] |
| 48 | [chemical structure] |
| 49 | [chemical structure] |
| 50 | [chemical structure] |
| 177 | [chemical structure] |
| 178 | [chemical structure] |
| 51 | [chemical structure] |
| 52 | [chemical structure] |
| 53 | [chemical structure] |
| 54 | [chemical structure] |
| 55 | [chemical structure] |
| 56 | [chemical structure] |
| 57 | [chemical structure] |
| 60 | [chemical structure] |
| 61 | [chemical structure] |
| 62 | [chemical structure] |
| 63 | [chemical structure] |
| 64 | [chemical structure] |
| 65 | [chemical structure] |
| 66 | [chemical structure] |
| 58 | [chemical structure] |
| 59 | [chemical structure] |
| 153 | [chemical structure] |
| 67 | [chemical structure] |
| 149 | [chemical structure] |
| 68 | [chemical structure] |
| 69 | [chemical structure] |
| 71 | [chemical structure] |
| 72 | [chemical structure] |
| 70 | [chemical structure] |
| 73 | [chemical structure] |
| 74 | [chemical structure] |
| 75 | [chemical structure] |
| 76 | [chemical structure] |
| 77 | [chemical structure] |
| 78 | [chemical structure] |
| 79 | [chemical structure] |
| 80 | [chemical structure] |
| 81 | [chemical structure] |
| 82 | [chemical structure] |
| 83 | [chemical structure] |
| 84 | [chemical structure] |
| 85 | [chemical structure] |
| 86 | [chemical structure] |
| 87 | [chemical structure] |
| 152 | [chemical structure] |
| 157 | [chemical structure] |
| 88 | [chemical structure] |
| 89 | [chemical structure] |
| 90 | [chemical structure] |
| 91 | [chemical structure] |
| 93 | [chemical structure] |
| 94 | [chemical structure] |
| 95 | [chemical structure] |
| 96 | [chemical structure] |
| 92 | [chemical structure] |
| 97 | [chemical structure] |
| 98 | [chemical structure] |
| 99 | [chemical structure] |
| 100 | [chemical structure] |
| 101 | [chemical structure] |
| 102 | [chemical structure] |
| 103 | [chemical structure] |
| 104 | [chemical structure] |
| 105 | [chemical structure] |
| 180 | [chemical structure] |
| 181 | [chemical structure] |
| 182 | [chemical structure] |
| 106 | [chemical structure] |
| 107 | [chemical structure] |
| 108 | [chemical structure] |
| 109 | [chemical structure] |
| 110 | [chemical structure] |
| 121 | [chemical structure] |
| 111 | [chemical structure] |
| 112 | [chemical structure] |
| 113 | [chemical structure] |
| 114 | [chemical structure] |
| 115 | [chemical structure] |
| 116 | [chemical structure] |
| 117 | [chemical structure] |
| 122 | [chemical structure] |
| 123 | [chemical structure] |
| 124 | [chemical structure] |
| 125 | [chemical structure] |
| 126 | [chemical structure] |
| 127 | [chemical structure] |
| 128 | [chemical structure] |
| 118 | [chemical structure] |
| 119 | [chemical structure] |
| 120 | [chemical structure] |
| 156 | [chemical structure] |
| 158 | [chemical structure] |
| 160 | [chemical structure] |
| 129 | [chemical structure] |
| 130 | [chemical structure] |
| 155 | [chemical structure] |
| 167 | [chemical structure] |
| 168 | [chemical structure] |
| 173 | [chemical structure] |
| 161 | [chemical structure] |
| 166 | [chemical structure] |
| 174 | [chemical structure] |
| 179 | [chemical structure] |
| 131 | [chemical structure] |
| 132 | [chemical structure] |
| 133 | [chemical structure] |
| 134 | [chemical structure] |
| 135 | [chemical structure] |
| 136 | [chemical structure] |
| 137 | [chemical structure] |
| 138 | [chemical structure] |
| 139 | [chemical structure] |
| 140 | [chemical structure] |
| 142 | [chemical structure] |
| 143 | [chemical structure] |
| 144 | [chemical structure] |
| 145 | [chemical structure] |
| 146 | [chemical structure] |
| 147 | [chemical structure] |
| 148 | [chemical structure] |
| 141 | [chemical structure] |
| 159 | [chemical structure] |
| 151 | [chemical structure] |
| Composition | |
| S-No. | Structure |
| | [chemical structure] |
| | [chemical structure] |
| | [chemical structure] |
| | [chemical structure] |

[chemical structure]

[1303] E. Lipid Nanoparticle (LNP) Formulations

[1304] The formation of a lipid nanoparticle (LNP) described herein may be accomplished by any methods known in the art. For example, as described in U.S. Pat. Pub. No. US2012/0178702 A1, which is incorporated herein by reference in its entirety. Non-limiting examples of lipid nanoparticle compositions and methods of making them are described, for example, in Semple et al. (2010) Nat. Biotechnol. 28:172-176; Jayarama et al. (2012), Angew. Chem. Int. Ed., 51:8529-8533; and Maier et al. (2013) Molecular Therapy 21, 1570-1578 (the contents of each of which are incorporated herein by reference in their entirety).

[1305] In one embodiment, the LNP formulation may be prepared by, e.g., the methods described in International Pat. Pub. No. WO 2011/127255 or WO 2008/103276, the contents of each of which are herein incorporated by reference in their entirety.

[1306] In one embodiment, LNP formulations described herein may comprise a polycationic composition. As a non-limiting example, the polycationic composition may be a composition selected from Formulae 1-60 of U.S. Pat. Pub. No. US2005/0222064 A1, the content of which is herein incorporated by reference in its entirety.

[1307] In one embodiment, the lipid nanoparticle may be formulated by the methods described in U.S. Pat. Pub. No. US2013/0156845 A1, and International Pat. Pub. No. WO2013/093648 A2 or WO2012/024526 A2, each of which is herein incorporated by reference in its entirety.

[1308] In one embodiment, the lipid nanoparticles described herein may be made in a sterile environment by the system and/or methods described in U.S. Pat. Pub. No. US2013/0164400 A1, which is incorporated herein by reference in its entirety.

[1309] In one embodiment, the LNP formulation may be formulated in a nanoparticle such as a nucleic acid-lipid particle described in U.S. Pat. No. 8,492,359, which is incorporated herein by reference in its entirety.

[1310] A nanoparticle composition may optionally comprise one or more coatings. For example, a nanoparticle composition may be formulated in a capsule, film, or tablet having a coating. A capsule, film, or tablet including a composition described herein may have any useful size, tensile strength, hardness, or density.

[1311] In some embodiments, the lipid nanoparticles described herein may be synthesized using methods comprising microfluidic mixers. Exemplary microfluidic mixers may include, but are not limited to, a slit interdigitial micromixer including, but not limited to, those manufactured by Precision Nanosystems (Vancouver, BC, Canada), Microinnova (Allerheiligen bei Wildon, Austria) and/or a staggered herringbone micromixer (SHM) (Zhigaltsev, I. V. et al. (2012) Langmuir. 28:3633-40; Belliveau, N. M. et al. Mol. Ther. Nucleic. Acids. (2012) 1:e37; Chen, D. et al. J. Am. Chem. Soc. (2012) 134(16):6948-51; each of which is herein incorporated by reference in its entirety).

[1312] In some embodiments, methods of LNP generation comprising SHM, further comprise the mixing of at least two input streams wherein mixing occurs by microstructure-induced chaotic advection (MICA). According to this method, fluid streams flow through channels present in a herringbone pattern causing rotational flow and folding the fluids around each other. This method may also comprise a surface for fluid mixing wherein the surface changes orientations during fluid cycling. Methods of generating LNPs using SHM include those disclosed in U.S. Pat. Pub. Nos. US2004/0262223 A1 and US2012/0276209 A1, each of which is incorporated herein by reference in their entirety.

[1313] In one embodiment, the lipid nanoparticles may be formulated using a micromixer such as, but not limited to, a Slit Interdigital Microstructured Mixer (SIMM-V2) or a Standard Slit Interdigital Micro Mixer (SSIMM) or Caterpillar (CPMM) or Impinging-jet (IJMM) from the Institut fur Mikrotechnik Mainz GmbH, Mainz Germany). In one embodiment, the lipid nanoparticles are created using microfluidic technology (see, Whitesides (2006) Nature. 442: 368-373; and Abraham et al. (2002) Science. 295: 647-651; each of which is herein incorporated by reference in its entirety). As a non-limiting example, controlled microfluidic formulation includes a passive method for mixing streams of steady pressure-driven flows in micro channels at a low Reynolds number (see, e.g., Abraham et al. (2002) Science. 295: 647651; which is herein incorporated by reference in its entirety).

[1314] In one embodiment, the circRNA of the present invention may be formulated in lipid nanoparticles created using a micromixer chip such as, but not limited to, those from Harvard Apparatus (Holliston, MA), Dolomite Microfluidics (Royston, UK), or Precision Nanosystems (Van Couver, BC, Canada). A micromixer chip can be used for rapid mixing of two or more fluid streams with a split and recombine mechanism.

[1315] In one embodiment, the lipid nanoparticles may have a diameter from about 10 to about 100 nm such as, but not limited to, about 10 to about 20 nm, about 10 to about 30 nm, about 10 to about 40 nm, about 10 to about 50 nm, about 10 to about 60 nm, about 10 to about 70 nm, about 10 to about 80 nm, about 10 to about 90 nm, about 20 to about 30 nm, about 20 to about 40 nm, about 20 to about 50 nm, about 20 to about 60 nm, about 20 to about 70 nm, about 20 to about 80 nm, about 20 to about 90 nm, about 20 to about 100 nm, about 30 to about 40 nm, about 30 to about 50 nm, about 30 to about 60 nm, about 30 to about 70 nm, about 30 to about 80 nm, about 30 to about 90 nm, about 30 to about 100 nm, about 40 to about 50 nm, about 40 to about 60 nm, about 40 to about 70 nm, about 40 to about 80 nm, about 40 to about 90 nm, about 40 to about 100 nm, about 50 to about 60 nm, about 50 to about 70 nm about 50 to about 80 nm, about 50 to about 90 nm, about 50 to about 100 nm, about 60 to about 70 nm, about 60 to about 80 nm, about 60 to about 90 nm, about 60 to about 100 nm, about 70 to about 80 nm, about 70 to about 90 nm, about 70 to about 100 nm, about 80 to about 90 nm, about 80 to about 100 nm and/or about 90 to about 100 nm. In one embodiment, the lipid nanoparticles may have a diameter from about 10 to 500 nm. In one embodiment, the lipid nanoparticle may have a diameter greater than 100 nm, greater than 150 nm, greater than 200 nm, greater than 250 nm, greater than 300 nm, greater than 350 nm, greater than 400 nm, greater than 450 nm, greater than 500 nm, greater than 550 nm, greater than 600 nm, greater than 650 nm, greater than 700 nm, greater than 750 nm, greater than 800 nm, greater than 850 nm, greater than 900 nm, greater than 950 nm or greater than 1000 nm. Each possibility represents a separate embodiment of the present invention.

[1316] In some embodiments, a nanoparticle (e.g., a lipid nanoparticle) has a mean diameter of 10-500 nm, 20-400 nm, 30-300 nm, or 40-200 nm. In some embodiments, a nanoparticle (e.g., a lipid nanoparticle) has a mean diameter of 50-150 nm, 50-200 nm, 80-100 nm, or 80-200 nm.

[1317] In some embodiments, the lipid nanoparticles described herein can have a diameter from below 0.1 μm to up to 1 mm such as, but not limited to, less than 0 0.1 μm, less than 1.0 μm, less than 5 μm, less than 10 μm, less than 15 μm, less than 20 μm, less than 25 μm, less than 30 μm, less than 35 μm, less than 40 μm, less than 50 μm, less than 55 μm, less than 60 μm, less than 65 μm, less than 70 μm, less than 75 μm, less than 80 μm, less than 85 μm, less than 90 μm, less than 95 μm, less than 100 μm, less than 125 μm, less than 150 μm, less than 175 μm, less than 200 μm, less than 225 μm, less than 250 μm, less than 275 μm, less than 300 μm, less than 325 μm, less than 350 μm, less than 375 μm, less than 400 μm, less than 425 μm, less than 450 μm, less than 475 μm, less than 500 μm, less than 525 μm, less than 550 μm, less than 575 μm, less than 600 μm, less than 625 μm, less than 650 μm, less than 675 μm, less than 700 μm, less than 725 μm, less than 750 μm, less than 775 μm, less than 800 μm, less than 825 μm, less than 850 μm, less than 875 μm, less than 900 μm, less than 925 μm, less than 950 μm, less than 975 μm.

[1318] In another embodiment, LNPs may have a diameter from about 1 nm to about 100 nm, from about 1 nm to about 10 nm, about 1 nm to about 20 nm, from about 1 nm to about 30 nm, from about 1 nm to about 40 nm, from about 1 nm to about 50 nm, from about 1 nm to about 60 nm, from about 1 nm to about 70 nm, from about 1 nm to about 80 nm, from about 1 nm to about 90 nm, from about 5 nm to about from 100 nm, from about 5 nm to about 10 nm, about 5 nm to about 20 nm, from about 5 nm to about 30 nm, from about 5 nm to about 40 nm, from about 5 nm to about 50 nm, from about 5 nm to about 60 nm, from about 5 nm to about 70 nm, from about 5 nm to about 80 nm, from about 5 nm to about 90 nm, about 10 to about 50 nM, from about 20 to about 50 nm, from about 30 to about 50 nm, from about 40 to about 50 nm, from about 20 to about 60 nm, from about 30 to about 60 nm, from about 40 to about 60 nm, from about 20 to about 70 nm, from about 30 to about 70 nm, from about 40 to about 70 nm, from about 50 to about 70 nm, from about 60 to about 70 nm, from about 20 to about 80 nm, from about 30 to about 80 nm, from about 40 to about 80 nm, from about 50 to about 80 nm, from about 60 to about 80 nm, from about 20 to about 90 nm, from about 30 to about 90 nm, from about 40 to about 90 nm, from about 50 to about 90 nm, from about 60 to about 90 nm and/or from about 70 to about 90 nm. Each possibility represents a separate embodiment of the present invention.

[1319] A nanoparticle composition may be relatively homogenous. A polydispersity index may be used to indicate the homogeneity of a nanoparticle composition, e.g., the particle size distribution of the nanoparticle compositions. A small (e.g., less than 0.3) polydispersity index generally indicates a narrow particle size distribution. A nanoparticle composition may have a polydispersity index from about 0 to about 0.25, such as 0.01, 0.02, 0.03, 0.04, 0.05, 0.06, 0.07, 0.08, 0.09, 0.10, 0.1 1, 0.12, 0.13, 0.14, 0.15, 0.16, 0.17, 0.18, 0.19, 0.20, 0.21, 0.22, 0.23, 0.24, or 0.25. In some embodiments, the polydispersity index of a nanoparticle composition may be from about 0.10 to about 0.20. Each possibility represents a separate embodiment of the present invention.

[1320] The zeta potential of a nanoparticle composition may be used to indicate the electrokinetic potential of the composition. For example, the zeta potential may describe the surface charge of a nanoparticle composition. Nanoparticle compositions with relatively low charges, positive or negative, are generally desirable, as more highly charged species may interact undesirably with cells, tissues, and other elements in the body. In some embodiments, the zeta potential of a nanoparticle composition may be from about −20 mV to about +20 mV, from about −20 mV to about +15 mV, from about −20 mV to about +10 mV, from about −20 mV to about +5 mV, from about −20 mV to about 0 mV, from about −20 mV to about −5 mV, from about −20 mV to about −10 mV, from about −20 mV to about −15 mV from about −20 mV to about +20 mV, from about −20 mV to about +15 mV, from about −20 mV to about +10 mV, from about −20 mV to about +5 mV, from about −20 mV to about 0 mV, from about 0 mV to about +20 mV, from about 0 mV to about +15 mV, from about 0 mV to about +10 mV, from about 0 mV to about +5 mV, from about +5 mV to about +20 mV, from about +5 mV to about +15 mV, or from about +5 mV to about +10 mV. Each possibility represents a separate embodiment of the present invention.

[1321] The efficiency of encapsulation of a therapeutic agent describes the amount of therapeutic agent that is encapsulated or otherwise associated with a nanoparticle composition after preparation, relative to the initial amount provided. The encapsulation efficiency is desirably high (e.g., close to 100%). The encapsulation efficiency may be measured, for example, by comparing the amount of therapeutic agent in a solution containing the nanoparticle composition before and after breaking up the nanoparticle composition with one or more organic solvents or detergents. Fluorescence may be used to measure the amount of free therapeutic agent (e.g., nucleic acids) in a solution. For the nanoparticle compositions described herein, the encapsulation efficiency of a therapeutic agent may be at least 50%, for example 50%, 55%, 60%, 65%, 70%, 75%, 80%, 85%, 90%, 91%, 92%, 93%, 94%, 95%, 96%, 97%, 98%, 99%, or 100%. In some embodiments, the encapsulation efficiency may be at least 80%. In certain embodiments, the encapsulation efficiency may be at least 90%. Each possibility represents a separate embodiment of the present invention. In some embodiments, the lipid nanoparticle has a polydiversity value of less than 0.4. In some embodiments, the lipid nanoparticle has a net neutral charge at a neutral pH. In some embodiments, the lipid nanoparticle has a mean diameter of 50-200 nm.

[1322] The properties of a lipid nanoparticle formulation may be influenced by factors including, but not limited to, the selection of the cationic lipid component, the degree of cationic lipid saturation, the selection of the non-cationic lipid component, the degree of noncationic lipid saturation, the selection of the structural lipid component, the nature of the PEGylation, ratio of all components and biophysical parameters such as size. As described herein, the purity of a PEG lipid component is also important to an LNP's properties and performance. The present invention contemplates the use of such lipid nanoparticle formulations as disclosed, for example, in International Application No. PCT/US2021/031629, in U.S. Provisional Application No. 63/022,248, filed on May 8, 2020; U.S. Provisional Application No. 63/087,582, filed on Oct. 5, 2020; and International Patent Application No. PCT/US2020/063494, filed on Dec. 4, 2020, the teachings of which are incorporated herein by reference in their entirety.

[1323] F. Methods for Lipid Nanoparticles (LNP)

[1324] In one embodiment, a lipid nanoparticle formulation may be prepared by the methods described in International Publication Nos. WO2011127255 or WO2008103276, each of which is herein incorporated by reference in their entirety. In some embodiments, lipid nanoparticle formulations may be as described in International Publication No. WO2019131770, which is herein incorporated by reference in its entirety.

[1325] In some embodiments, circular RNA is formulated according to a process described in U.S. patent application Ser. No. 15/809,680. In some embodiments, the present invention provides a process of encapsulating circular RNA in transfer vehicles comprising the steps of forming lipids into pre-formed transfer vehicles (i.e. formed in the absence of RNA) and then combining the pre-formed transfer vehicles with RNA. In some embodiments, the novel formulation process results in an RNA formulation with higher potency (peptide or protein expression) and higher efficacy (improvement of a biologically relevant endpoint) both in vitro and in vivo with potentially better tolerability as compared to the same RNA formulation prepared without the step of preforming the lipid nanoparticles (e.g., combining the lipids directly with the RNA).

[1326] For certain cationic lipid nanoparticle formulations of RNA, in order to achieve high encapsulation of RNA, the RNA in buffer (e.g., citrate buffer) has to be heated. In those processes or methods, the heating is required to occur before the formulation process (i.e. heating the separate components) as heating post-formulation (post-formation of nanoparticles) does not increase the encapsulation efficiency of the RNA in the lipid nanoparticles. In contrast, in some embodiments of the novel processes of the present invention, the order of heating of RNA does not appear to affect the RNA encapsulation percentage. In some embodiments, no heating (i.e. maintaining at ambient temperature) of one or more of the solutions comprising the pre-formed lipid nanoparticles, the solution comprising the RNA and the mixed solution comprising the lipid nanoparticle encapsulated RNA is required to occur before or after the formulation process.

[1327] RNA may be provided in a solution to be mixed with a lipid solution such that the RNA may be encapsulated in lipid nanoparticles. A suitable RNA solution may be any aqueous solution containing RNA to be encapsulated at various concentrations. For example, a suitable RNA solution may contain an RNA at a concentration of or greater than about 0.01 mg/ml, 0.05 mg/ml, 0.06 mg/ml, 0.07 mg/ml, 0.08 mg/ml, 0.09 mg/ml, 0.1 mg/ml, 0.15 mg/ml, 0.2 mg/ml, 0.3 mg/ml, 0.4 mg/ml, 0.5 mg/ml, 0.6 mg/ml, 0.7 mg/ml, 0.8 mg/ml, 0.9 mg/ml, or 1.0 mg/ml. In some embodiments, a suitable RNA solution may contain an RNA at a concentration in a range from about 0.01-1.0 mg/ml, 0.01-0.9 mg/ml, 0.01-0.8 mg/ml, 0.01-0.7 mg/ml, 0.01-0.6 mg/ml, 0.01-0.5 mg/ml, 0.01-0.4 mg/ml, 0.01-0.3 mg/ml, 0.01-0.2 mg/ml, 0.01-0.1 mg/ml, 0.05-1.0 mg/ml, 0.05-0.9 mg/ml, 0.05-0.8 mg/ml, 0.05-0.7 mg/ml, 0.05-0.6 mg/ml, 0.05-0.5 mg/ml, 0.05-0.4 mg/ml, 0.05-0.3 mg/ml, 0.05-0.2 mg/ml, 0.05-0.1 mg/ml, 0.1-1.0 mg/ml, 0.2-0.9 mg/ml, 0.3-0.8 mg/ml, 0.4-0.7 mg/ml, or 0.5-0.6 mg/ml.

[1328] Typically, a suitable RNA solution may also contain a buffering agent and/or salt. Generally, buffering agents can include HEPES, Tris, ammonium sulfate, sodium bicarbonate, sodium citrate, sodium acetate, potassium phosphate or sodium phosphate. In some embodiments, suitable concentration of the buffering agent may be in a range from about 0.1 mM to 100 mM, 0.5 mM to 90 mM, 1.0 mM to 80 mM, 2 mM to 70 mM, 3 mM to 60 mM, 4 mM to 50 mM, 5 mM to 40 mM, 6 mM to 30 mM, 7 mM to 20 mM, 8 mM to 15 mM, or 9 to 12 mM.

[1329] Exemplary salts can include sodium chloride, magnesium chloride, and potassium chloride. In some embodiments, suitable concentration of salts in an RNA solution may be in a range from about 1 mM to 500 mM, 5 mM to 400 mM, 10 mM to 350 mM, 15 mM to 300 mM, 20 mM to 250 mM, 30 mM to 200 mM, 40 mM to 190 mM, 50 mM to 180 mM, 50 mM to 170 mM, 50 mM to 160 mM, 50 mM to 150 mM, or 50 mM to 100 mM.

[1330] In some embodiments, a suitable RNA solution may have a pH in a range from about 3.5-6.5, 3.5-6.0, 3.5-5.5, 3.5-5.0, 3.5-4.5, 4.0-5.5, 4.0-5.0, 4.0-4.9, 4.0-4.8, 4.0-4.7, 4.0-4.6, or 4.0-4.5.

[1331] Various methods may be used to prepare an RNA solution suitable for the present invention. In some embodiments, RNA may be directly dissolved in a buffer solution described herein. In some embodiments, an RNA solution may be generated by mixing an RNA stock solution with a buffer solution prior to mixing with a lipid solution for encapsulation. In some embodiments, an RNA solution may be generated by mixing an RNA stock solution with a buffer solution immediately before mixing with a lipid solution for encapsulation.

[1332] According to the present invention, a lipid solution contains a mixture of lipids suitable to form transfer vehicles for encapsulation of RNA. In some embodiments, a suitable lipid solution is ethanol based. For example, a suitable lipid solution may contain a mixture of desired lipids dissolved in pure ethanol (i.e. 100% ethanol). In another embodiment, a suitable lipid solution is isopropyl alcohol based. In another embodiment, a suitable lipid solution is dimethylsulfoxide-based. In another embodiment, a suitable lipid solution is a mixture of suitable solvents including, but not limited to, ethanol, isopropyl alcohol and dimethylsulfoxide.

[1333] A suitable lipid solution may contain a mixture of desired lipids at various concentrations. In some embodiments, a suitable lipid solution may contain a mixture of desired lipids at a total concentration in a range from about 0.1-100 mg/ml, 0.5-90 mg/ml, 1.0-80 mg/ml, 1.0-70 mg/ml, 1.0-60 mg/ml, 1.0-50 mg/ml, 1.0-40 mg/ml, 1.0-30 mg/ml, 1.0-20 mg/ml, 1.0-15 mg/ml, 1.0-10 mg/ml, 1.0-9 mg/ml, 1.0-8 mg/ml, 1.0-7 mg/ml, 1.0-6 mg/ml, or 1.0-5 mg/ml.

[1334] G. Liposomes

[1335] In certain embodiments, liposomes or other lipid bilayer vesicles are disclosed herein and may be used as a component or as the whole transfer vehicle to facilitate or enhance the delivery and release of circular RAN to one or more target cells. Liposomes are usually characterized by having an interior space sequestered from an outer medium by a membrane of one or more bilayers forming a microscopic sack or vesicle. Bilayer membranes of liposomes are typically formed by lipids, i.e. amphiphilic molecules of synthetic or natural origin that comprise spatially separated hydrophobic or hydrophilic domains (Lasic, D, and Papahadjopoulos, D., eds. Medical Applications of Liposomes. Elsevier, Amsterdam, 1998).

[1336] In some embodiments, the circular RNA is encapsulated, or the liposome can be prepared using various methods, including but not limited to mechanical dispersion, solvent dispersion, and or detergent removal. Each of these methods include the steps of drying the lipids from organic solvents, dispersing the lipid in aqueous media, resizing the liposomes and purifying the/liposome suspension (Gomez et al., ACS Omega. 2019. 4(6): 10866-10876). Various other methods of liposome preparation can be found in Akbarzadeh et al., Nanoscale Res Lett. 2013; 8(1): 102. In some embodiments, the circular RNA may be loaded passively (i.e. the circular RNA is encapsulated during liposome formation) or actively (i.e. after liposome formation).

[1337] In some embodiments, the liposome disclosed herein may comprise one or more bilayers. In certain embodiments, the liposome may comprise a multilamellar vesicle or a unilamellar vesicle.

[1338] In certain embodiments, the liposome as described herein comprises of naturally derived or engineered phospholipids. In some embodiments, the liposomes may further comprise PEG-lipids that aid with stability of the overall liposome structure. Other improvements, including but not limited to corticosteroid and other steroids may be used to help with maintaining structure and stability of the liposome.

### Dendrimer

[1339] In certain embodiments, the transfer vehicle for transporting the circular RNA comprises a dendrimer. Use of “dendrimer” describes the architectural motif of the transfer vehicle. In some embodiments, the dendrimer includes but is not limited to containing an interior core and one or more layers (i.e. generations) that extend or attach out from the interior core. In some of the embodiments, the generations may contain one or more branching points and an exterior surface of terminal groups that attach to the outermost generation. The branching points, in certain embodiments, may be mostly monodispersed and contain symmetric branching units built around the interior core. In some embodiments, the interior core

[1340] Synthesis of the dendrimer may comprise the divergent method, convergent growth, hypercore and branched monomer growth, double exponential growth, lego chemistry, click chemistry and other methods as available in the art (Mendes L. et al., Molecules. 2017. 22 (9): 1401 further describes these methods).

[1341] H. Polymer-Based Delivery

[1342] In certain embodiments, as described herein, the transfer vehicle for the circular RNA polynucleotide comprises a polymer nanoparticle. In some embodiments, the polymer nanoparticle includes nanocapsules and nanospheres. Nanocapsules, in some embodiments, are composed of an oily core surrounded by a polymeric shell. In some embodiments, the circular RNA is contained within the core and the polymeric shell controls the release of the circular RNA. On the other hand, nanospheres comprise a continuous polymeric network in which the circular RNA is retained or absorbed onto the surface. In some embodiments, cationic polymers is used to encapsulate the circular RNA due to the favorable electrostatic interaction of the cations to the negatively charged nucleic acids and cell membrane.

[1343] The polymer nanoparticle may be prepared by various methods. In some embodiments, the polymer nanoparticle may be prepared by nanoprecipitation, emulsion techniques, solvent evaporation, solvent diffusion, reverse salting-out or other methods available in the art.

[1344] I. Polymer-Lipid Hybrids

[1345] In certain embodiments, as described herein, the transfer vehicle for the circular RNA polynucleotide comprises a polymer-lipid hybrid nanoparticle (LPHNP). In some embodiments, the LPHNP comprises a polymer core enveloped within a lipid bilayer. In some embodiments, the polymer core encapsulates the circular RNA polynucleotide. In some embodiments, the LPHNP further comprises an outer lipid bilayer. In certain embodiments this outer lipid bilayer comprises a PEG-lipid, helper lipid, cholesterol or other molecule as known in the art to help with stability in a lipid-based nanoparticle. The lipid bilayer closest to the polymer core mitigates the loss of the entrapped circular RNA during LPHNP formation and protects from degradation of the polymer core by preventing diffusion of water from outside of the transfer vehicle into the polymer core (Mukherjee et al., In J. Nanomedicine. 2019; 14: 1937-1952).

[1346] There are various methods of developing and formulating a LPHNP. In certain embodiments, the LPHNP is developed using a one-step or a two-step method available in the art. In some embodiments, the one-step method for forming an LPHNP is through nanoprecipitation or emulsification-solvent evaporation. In certain embodiments, the two-step method includes nanoprecipitation, emulsification-solvent evaporation, high-pressure homogenization, or other method available in the art.

[1347] J. Peptide-Based Delivery

[1348] In certain embodiments, the circular RNA can be transported using a peptide-based delivery mechanism. In some embodiments, the peptide-based delivery mechanism comprises a lipoprotein. Based on the size of the drug to be delivered, the lipoprotein may be either a low-density (LDL) or high-density lipoprotein (HDL). As seen in U.S. Pat. No. 8,734,853B2, high-density lipoproteins are capable of transporting a nucleic acid in vivo and in vitro.

[1349] In particular embodiments, the lipid component includes cholesterol. In more particular embodiments, the lipid component includes a combination of cholesterol and cholesterol oleate.

[1350] The HDL-nucleic acid particle can be of any size, but in particular embodiments the particle has a molecular size of from about 100 Angstroms to about 500 Angstroms. In more particular embodiments, the particle has a molecular size of from about 100 Angstroms to about 300 Angstroms. The size may be dependent on the size of the nucleic acid component incorporated into the particle.

[1351] The HDL-nucleic acid particle can have a broad range in molecular weight. The weight is dependent on the size of the nucleic acid incorporated into the particle. For example, in some embodiments, the particle has a molecular weight of between about 100,000 Daltons to about 1,000,000 Daltons. In more particular embodiments, the particle has a molecular weight of between about 100,000 Daltons to about 500,000 Daltons. In specific embodiments, the particle has a molecular weight of between about 100,000 Daltons to about 300,000 Daltons.

[1352] The HDL-nucleic acid particles of the present invention can be made by different methods. For example, a nucleic acid (e.g., siRNA) may be neutralized by combining the nucleic acid with peptides or polypeptides composed of contiguous positively-charged amino acids. For example, as discussed above, amino acid sequences may include 2 or more contiguous lysine residues. The positive charge of the amino acid sequences neutralizes the negatively charged nucleic acid molecule. The nucleic acid can then be encapsulated in an HDL particle using a method as described in Lacko et al. (2002).

[1353] K. Carbohydrate Carrier

[1354] In certain embodiments, the circular RNA polynucleotide can be transported using a carbohydrate carrier or a sugar-nanocapsule. In certain embodiments, the carbohydrate carrier comprises a sugar-decorated nanoparticle, peptide- and saccharide-conjugated dendrimer, nanoparticles based on polysaccharides, and other carbohydrate-based carriers available in the art. As described herein, the incorporation of carbohydrate molecules may be through synthetic means.

[1355] In some embodiments, the carbohydrate carrier comprises polysaccharides. These polysaccharides may be made from the microbial cell wall of the target cell. For example, carbohydrate carriers comprise of mannan carbohydrates have been shown to successfully deliver mRNA (Son et al., Nano Lett. 2020. 20(3): 1499-1509).

[1356] L. Glycan-Decorated Nanoparticles/Glyconanoparticles

[1357] In certain embodiments, as provided herein, the transfer vehicle for the circular RNA is a glyconanoparticle (GlycoNP). As known in the art, glyconanoparticles comprise a core comprising gold, iron oxide, semiconductor nanoparticles or a combination thereof. In some embodiments, the glyconanoparticle is functionalized using carbohydrates. In certain embodiments, the glyconanoparticle comprises a carbon nanotube or graphene. In one embodiment the glyconanoparticle comprises a polysaccharide-based GlycoNP (e.g., chitosan-based GlycoNP). In certain embodiments, the glyconanoparticle is a glycodendrimer.

[1358] M. Exosomes, Fusome & Organelle-Based Delivery Systems

[1359] In certain embodiments, as provided herein, the circular RNA is transferred through use of an exosome, a type of extracellular vesicle. Exosomes naturally are secreted by various types of cells and are used as a transport vesicle for various forms of cargo. During delivery exosomes can contain and protecting specific mRNAs, regulatory microRNAs, lipids, and proteins (Luan et al., Acta Pharmacologica Sinica. 2017. 38:754-763). Naturally, exosomes may be 30 nm to 125 nm.

[1360] In some embodiments, the exosome may be made in part from an immune cell. As shown in Haney et al, use of immune cell derived exosomes are able to avoid mononuclear phagocytes (J Control Release. 2015. 207:18-30). In some embodiments, the exosome may be a dendritic cell, macrophage, T-cell, B-cell or derived from another immune cell. As seen in WO/2021/041473A1, various forms of RNAs of varying lengths may be transported through exosome delivery including messenger RNA (mRNA), microRNA (miRNA), long intergenic non-coding RNA (lincRNA), long non-coding RNA (lncRNA), non-coding RNA (ncRNA), non-messenger RNA (nmRNA), small RNA (sRNA), small non-messenger RNA (smnRNA), DNA damage response RNA (DD RNA), extracellular RNA (exRNA), small nuclear RNA (snRNA), small nucleolar RNA (snoRNA), and precursor messenger RNA (pre-mRNA).

[1361] In other embodiments, the transfer vehicle may comprise in whole or in part from a fusome. In some embodiments, the fusome is derived from an endoplasmic reticulum of a germline cyst. In certain embodiments, the germline cyst is from a Drosophila ovary.

[1362] N. Microneedles, Electroporation, Continuous Pumps, & Gene Gun

[1363] In certain embodiments, the circular RNA polynucleotide may be transported using noncellular and instead be through mechanical delivery mechanisms. In some embodiments, this delivery method includes microneedles, electroporation, continuous pumps and/or gene guns.

[1364] Various methods and apparatuses have been developed for microneedling a nucleic acid into a specific set of cells. A method for delivery of biological material across the biological tissue has been described by Kodgule et al and is taught for example in US 2011/0196308, the contents of which are incorporated herein by reference in their entirety. According to Kodgule, multiple biodegradable microneedles containing a therapeutic active ingredient are incorporated in a device which delivers proteins, carbohydrates, nucleic acid molecules, lipids and other pharmaceutically active ingredients or combinations thereof.

[1365] Intradermal delivery of biologically active agents by needle-free injection and electroporation has been described by Hoffmann et al and is taught for example in U.S. Pat. No. 7,171,264 the contents of which are incorporated herein by reference in their entirety. According to Hoffmann, one or more needle-free injectors are incorporated into an electroporation device and the combination of needle-free injection and electroporation is sufficient to introduce the agent into cells in skin, muscle or mucosa. In certain embodiments, the electroporation is through a continuous-flow microfluidic electroporation.

[1366] O. Pharmaceutical Salts, Buffers, & Solutions

[1367] In some embodiments, the transfer vehicle of the circular RNA polynucleotide is a solution or diluent comprising of a salt or a buffer.

### 7. Combinations of Proteins and IRES

[1368] In certain embodiments, as provided herein, the payload encoded by the circular RNA polynucleotide may be optimized through use of a specific internal ribosome entry sites (IRES) within the translation initiation element (TIE). In some embodiments, IRES specificity within a circular RNA can significantly enhance expression of specific proteins encoded within the coding element.

### 8. Targeting

[1369] A. Targeting Methods

[1370] The present invention also contemplates the discriminatory targeting of target cells and tissues by both passive and active targeting means. The phenomenon of passive targeting exploits the natural distributions patterns of a transfer vehicle in vivo without relying upon the use of additional excipients or means to enhance recognition of the transfer vehicle by target cells. For example, transfer vehicles which are subject to phagocytosis by the cells of the reticulo-endothelial system are likely to accumulate in the liver or spleen, and accordingly may provide a means to passively direct the delivery of the compositions to such target cells.

[1371] Alternatively, the present invention contemplates active targeting, which involves the use of targeting moieties that may be bound (either covalently or non-covalently) to the transfer vehicle to encourage localization of such transfer vehicle at certain target cells or target tissues. For example, targeting may be mediated by the inclusion of one or more endogenous targeting moieties in or on the transfer vehicle to encourage distribution to the target cells or tissues. Recognition of the targeting moiety by the target tissues actively facilitates tissue distribution and cellular uptake of the transfer vehicle and/or its contents in the target cells and tissues (e.g., the inclusion of an apolipoprotein-E targeting ligand in or on the transfer vehicle encourages recognition and binding of the transfer vehicle to endogenous low density lipoprotein receptors expressed by hepatocytes). As provided herein, the composition can comprise a moiety capable of enhancing affinity of the composition to the target cell. Targeting moieties may be linked to the outer bilayer of the lipid particle during formulation or post-formulation. These methods are well known in the art. In addition, some lipid particle formulations may employ fusogenic polymers such as PEAA, hemagluttinin, other lipopeptides (see U.S. patent application Ser. No. 08/835,281, and 60/083,294, which are incorporated herein by reference) and other features useful for in vivo and/or intracellular delivery. In other some embodiments, the compositions of the present invention demonstrate improved transfection efficacies, and/or demonstrate enhanced selectivity towards target cells or tissues of interest. Contemplated therefore are compositions which comprise one or more moieties (e.g., peptides, aptamers, oligonucleotides, a vitamin or other molecules) that are capable of enhancing the affinity of the compositions and their nucleic acid contents for the target cells or tissues. Suitable moieties may optionally be bound or linked to the surface of the transfer vehicle. In some embodiments, the targeting moiety may span the surface of a transfer vehicle or be encapsulated within the transfer vehicle. Suitable moieties and are selected based upon their physical, chemical or biological properties (e.g., selective affinity and/or recognition of target cell surface markers or features). Cell-specific target sites and their corresponding targeting ligand can vary widely. Suitable targeting moieties are selected such that the unique characteristics of a target cell are exploited, thus allowing the composition to discriminate between target and non-target cells. For example, compositions of the invention may include surface markers (e.g., apolipoprotein-B or apolipoprotein-E) that selectively enhance recognition of, or affinity to hepatocytes (e.g., by receptor-mediated recognition of and binding to such surface markers). As an example, the use of galactose as a targeting moiety would be expected to direct the compositions of the present invention to parenchymal hepatocytes, or alternatively the use of mannose containing sugar residues as a targeting ligand would be expected to direct the compositions of the present invention to liver endothelial cells (e.g., mannose containing sugar residues that may bind preferentially to the asialoglycoprotein receptor present in hepatocytes). (See Hillery A M, et al. “Drug Delivery and Targeting: For Pharmacists and Pharmaceutical Scientists” (2002) Taylor & Francis, Inc.) The presentation of such targeting moieties that have been conjugated to moieties present in the transfer vehicle (e.g., a lipid nanoparticle) therefore facilitate recognition and uptake of the compositions of the present invention in target cells and tissues. Examples of suitable targeting moieties include one or more peptides, proteins, aptamers, vitamins and oligonucleotides.

[1372] In particular embodiments, a transfer vehicle comprises a targeting moiety. In some embodiments, the targeting moiety mediates receptor-mediated endocytosis selectively into a specific population of cells. In some embodiments, the targeting moiety is capable of binding to a T cell antigen. In some embodiments, the targeting moiety is capable of binding to a NK, NKT, or macrophage antigen. In some embodiments, the targeting moiety is capable of binding to a protein selected from the group CD3, CD4, CD8, PD-1, 4-1BB, and CD2. In some embodiments, the targeting moiety is an single chain Fv (scFv) fragment, nanobody, peptide, peptide-based macrocycle, minibody, heavy chain variable region, light chain variable region or fragment thereof. In some embodiments, the targeting moiety is selected from T-cell receptor motif antibodies, T-cell α chain antibodies, T-cell β chain antibodies, T-cell γ chain antibodies, T-cell δ chain antibodies, CCR7 antibodies, CD3 antibodies, CD4 antibodies, CD5 antibodies, CD7 antibodies, CD8 antibodies, CD11b antibodies, CD11c antibodies, CD16 antibodies, CD19 antibodies, CD20 antibodies, CD21 antibodies, CD22 antibodies, CD25 antibodies, CD28 antibodies, CD34 antibodies, CD35 antibodies, CD40 antibodies, CD45RA antibodies, CD45RO antibodies, CD52 antibodies, CD56 antibodies, CD62L antibodies, CD68 antibodies, CD80 antibodies, CD95 antibodies, CD 117 antibodies, CD127 antibodies, CD133 antibodies, CD137 (4-1BB) antibodies, CD163 antibodies, F4/80 antibodies, IL-4Rα antibodies, Sca-1 antibodies, CTLA-4 antibodies, GITR antibodies GARP antibodies, LAP antibodies, granzyme B antibodies, LFA-1 antibodies, transferrin receptor antibodies, and fragments thereof. In some embodiments, the targeting moiety is a small molecule binder of an ectoenzyme on lymphocytes. Small molecule binders of ectoenzymes include A2A inhibitors CD73 inhibitors, CD39 or adesines receptors A2aR and A2bR. Potential small molecules include AB928.

[1373] In some embodiments, transfer vehicles are formulated and/or targeted as described in Shobaki N, Sato Y, Harashima H. Mixing lipids to manipulate the ionization status of lipid nanoparticles for specific tissue targeting. Int J Nanomedicine. 2018; 13:8395-8410. Published 2018 Dec. 10. In some embodiments, a transfer vehicle is made up of 3 lipid types. In some embodiments, a transfer vehicle is made up of 4 lipid types. In some embodiments, a transfer vehicle is made up of 5 lipid types. In some embodiments, a transfer vehicle is made up of 6 lipid types.

[1374] B. Target Cells

[1375] Where it is desired to deliver a nucleic acid to an immune cell, the immune cell represents the target cell. In some embodiments, the compositions of the invention transfect the target cells on a discriminatory basis (i.e., do not transfect non-target cells). The compositions of the invention may also be prepared to preferentially target a variety of target cells, which include, but are not limited to, T cells, B cells, macrophages, and dendritic cells.

[1376] In some embodiments, the target cells are deficient in a protein or enzyme of interest. For example, where it is desired to deliver a nucleic acid to a hepatocyte, the hepatocyte represents the target cell. In some embodiments, the compositions of the invention transfect the target cells on a discriminatory basis (i.e., do not transfect non-target cells). The compositions of the invention may also be prepared to preferentially target a variety of target cells, which include, but are not limited to, hepatocytes, epithelial cells, hematopoietic cells, epithelial cells, endothelial cells, lung cells, bone cells, stem cells, mesenchymal cells, neural cells (e.g., meninges, astrocytes, motor neurons, cells of the dorsal root ganglia and anterior horn motor neurons), photoreceptor cells (e.g., rods and cones), retinal pigmented epithelial cells, secretory cells, cardiac cells, adipocytes, vascular smooth muscle cells, cardiomyocytes, skeletal muscle cells, beta cells, pituitary cells, synovial lining cells, ovarian cells, testicular cells, fibroblasts, B cells, T cells, reticulocytes, leukocytes, granulocytes and tumor cells.

[1377] The compositions of the invention may be prepared to preferentially distribute to target cells such as in the heart, lungs, kidneys, liver, and spleen. In some embodiments, the compositions of the invention distribute into the cells of the liver or spleen to facilitate the delivery and the subsequent expression of the circRNA comprised therein by the cells of the liver (e.g., hepatocytes) or the cells of spleen (e.g., immune cells). The targeted cells may function as a biological “reservoir” or “depot” capable of producing, and systemically excreting a functional protein or enzyme. Accordingly, in one embodiment of the invention the transfer vehicle may target hepatocytes or immune cells and/or preferentially distribute to the cells of the liver or spleen upon delivery. In an embodiment, following transfection of the target hepatocytes or immune cells, the circRNA loaded in the vehicle are translated and a functional protein product is produced, excreted and systemically distributed. In other embodiments, cells other than hepatocytes (e.g., lung, spleen, heart, ocular, or cells of the central nervous system) can serve as a depot location for protein production.

[1378] In one embodiment, the compositions of the invention facilitate a subject's endogenous production of one or more functional proteins and/or enzymes. In an embodiment of the present invention, the transfer vehicles comprise circRNA which encode a deficient protein or enzyme. Upon distribution of such compositions to the target tissues and the subsequent transfection of such target cells, the exogenous circRNA loaded into the transfer vehicle (e.g., a lipid nanoparticle) may be translated in vivo to produce a functional protein or enzyme encoded by the exogenously administered circRNA (e.g., a protein or enzyme in which the subject is deficient). Accordingly, the compositions of the present invention exploit a subject's ability to translate exogenously- or recombinantly-prepared circRNA to produce an endogenously-translated protein or enzyme, and thereby produce (and where applicable excrete) a functional protein or enzyme. The expressed or translated proteins or enzymes may also be characterized by the in vivo inclusion of native post-translational modifications which may often be absent in recombinantly-prepared proteins or enzymes, thereby further reducing the immunogenicity of the translated protein or enzyme.

[1379] The administration of circRNA encoding a deficient protein or enzyme avoids the need to deliver the nucleic acids to specific organelles within a target cell. Rather, upon transfection of a target cell and delivery of the nucleic acids to the cytoplasm of the target cell, the circRNA contents of a transfer vehicle may be translated and a functional protein or enzyme expressed.

[1380] In some embodiments, a circular RNA comprises one or more miRNA binding sites. In some embodiments, a circular RNA comprises one or more miRNA binding sites recognized by miRNA present in one or more non-target cells or non-target cell types (e.g., Kupffer cells or hepatic cells) and not present in one or more target cells or target cell types (e.g., hepatocytes or T cells). In some embodiments, a circular RNA comprises one or more miRNA binding sites recognized by miRNA present in an increased concentration in one or more non-target cells or non-target cell types (e.g., Kupffer cells or hepatic cells) compared to one or more target cells or target cell types (e.g., hepatocytes or T cells). miRNAs are thought to function by pairing with complementary sequences within RNA molecules, resulting in gene silencing.

[1381] In some embodiments, the compositions of the invention transfect or distribute to target cells on a discriminatory basis (i.e. do not transfect non-target cells). The compositions of the invention may also be prepared to preferentially target a variety of target cells, which include, but are not limited to, hepatocytes, epithelial cells, hematopoietic cells, epithelial cells, endothelial cells, lung cells, bone cells, stem cells, mesenchymal cells, neural cells (e.g., meninges, astrocytes, motor neurons, cells of the dorsal root ganglia and anterior horn motor neurons), photoreceptor cells (e.g., rods and cones), retinal pigmented epithelial cells, secretory cells, cardiac cells, adipocytes, vascular smooth muscle cells, cardiomyocytes, skeletal muscle cells, beta cells, pituitary cells, synovial lining cells, ovarian cells, testicular cells, fibroblasts, B cells, T cells, reticulocytes, leukocytes, granulocytes and tumor cells.

### 9. Pharmaceutical Compositions

[1382] In certain embodiments, provided herein are compositions (e.g., pharmaceutical compositions) comprising a therapeutic agent provided herein. In some embodiments, the therapeutic agent is a circular RNA polynucleotide provided herein. In some embodiments the therapeutic agent is a vector provided herein. In some embodiments, the therapeutic agent is a cell comprising a circular RNA or vector provided herein (e.g., a human cell, such as a human T cell). In certain embodiments, the composition further comprises a pharmaceutically acceptable carrier. In some embodiments, the compositions provided herein comprise a therapeutic agent provided herein in combination with other pharmaceutically active agents or drugs, such as anti-inflammatory drugs or antibodies capable of targeting B cell antigens, e.g., anti-CD20 antibodies, e.g., rituximab.

[1383] With respect to pharmaceutical compositions, the pharmaceutically acceptable carrier can be any of those conventionally used and is limited only by chemico-physical considerations, such as solubility and lack of reactivity with the active agent(s), and by the route of administration. The pharmaceutically acceptable carriers described herein, for example, vehicles, adjuvants, excipients, and diluents, are well-known to those skilled in the art and are readily available to the public. It is preferred that the pharmaceutically acceptable carrier be one which is chemically inert to the therapeutic agent(s) and one which has no detrimental side effects or toxicity under the conditions of use.

[1384] The choice of carrier will be determined in part by the particular therapeutic agent, as well as by the particular method used to administer the therapeutic agent. Accordingly, there are a variety of suitable formulations of the pharmaceutical compositions provided herein.

[1385] In certain embodiments, the pharmaceutical composition comprises a preservative. In certain embodiments, suitable preservatives may include, for example, methylparaben, propylparaben, sodium benzoate, and benzalkonium chloride. Optionally, a mixture of two or more preservatives may be used. The preservative or mixtures thereof are typically present in an amount of about 0.0001% to about 2% by weight of the total composition.

[1386] In some embodiments, the pharmaceutical composition comprises a buffering agent. In some embodiments, suitable buffering agents may include, for example, citric acid, sodium citrate, phosphoric acid, potassium phosphate, and various other acids and salts. A mixture of two or more buffering agents optionally may be used. The buffering agent or mixtures thereof are typically present in an amount of about 0.001% to about 4% by weight of the total composition.

[1387] In some embodiments, the concentration of therapeutic agent in the pharmaceutical composition can vary, e.g., less than about 1%, or at least about 1%, 2%, 3%, 4%, 5%, 6%, 7%, 8%, 9% 10%, 15%, 20%, 25%, 30%, 35%, 40%, 45%, or about 50% or more by weight, and can be selected primarily by fluid volumes, and viscosities, in accordance with the particular mode of administration selected.

[1388] The following formulations for oral, aerosol, parenteral (e.g., subcutaneous, intravenous, intraarterial, intramuscular, intradermal, intraperitoneal, and intrathecal), and topical administration are merely exemplary and are in no way limiting. More than one route can be used to administer the therapeutic agents provided herein, and in certain instances, a particular route can provide a more immediate and more effective response than another route.

[1389] Formulations suitable for oral administration can comprise or consist of (a) liquid solutions, such as an effective amount of the therapeutic agent dissolved in diluents, such as water, saline, or orange juice; (b) capsules, sachets, tablets, lozenges, and troches, each containing a predetermined amount of the active ingredient, as solids or granules; (c) powders; (d) suspensions in an appropriate liquid; and (e) suitable emulsions. Liquid formulations may include diluents, such as water and alcohols, for example, ethanol, benzyl alcohol and the polyethylene alcohols, either with or without the addition of a pharmaceutically acceptable surfactant. Capsule forms can be of the ordinary hard or soft shelled gelatin type containing, for example, surfactants, lubricants, and inert fillers, such as lactose, sucrose, calcium phosphate, and corn starch. Tablet forms can include one or more of lactose, sucrose, mannitol, corn starch, potato starch, alginic acid, microcrystalline cellulose, acacia, gelatin, guar gum, colloidal silicon dioxide, croscarmellose sodium, talc, magnesium stearate, calcium stearate, zinc stearate, stearic acid, and other excipients, colorants, diluents, buffering agents, disintegrating agents, moistening agents, preservatives, flavoring agents, and other pharmacologically compatible excipients. Lozenge forms can comprise the therapeutic agent with a flavorant, usually sucrose, acacia or tragacanth. Pastilles can comprise the therapeutic agent with an inert base, such as gelatin and glycerin, or sucrose and acacia, emulsions, gels, and the like containing, in addition to, such excipients as are known in the art.

[1390] Formulations suitable for parenteral administration include aqueous and nonaqueous isotonic sterile injection solutions, which can contain antioxidants, buffers, bacteriostats, and solutes that render the formulation isotonic with the blood of the intended recipient, and aqueous and nonaqueous sterile suspensions that can include suspending agents, solubilizers, thickening agents, stabilizers, and preservatives. In some embodiments, the therapeutic agents provided herein can be administered in a physiologically acceptable diluent in a pharmaceutical carrier, such as a sterile liquid or mixture of liquids including water, saline, aqueous dextrose and related sugar solutions, an alcohol such as ethanol or hexadecyl alcohol, a glycol such as propylene glycol or polyethylene glycol, dimethylsulfoxide, glycerol, ketals such as 2,2-dimethyl-1,3-dioxolane-4-methanol, ethers, poly(ethyleneglycol) 400, oils, fatty acids, fatty acid esters or glycerides, or acetylated fatty acid glycerides with or without the addition of a pharmaceutically acceptable surfactant such as a soap or a detergent, suspending agent such as pectin, carbomers, methylcellulose, hydroxypropylmethylcellulose, or carboxymethylcellulose, or emulsifying agents and other pharmaceutical adjuvants.

[1391] Oils, which can be used in parenteral formulations in some embodiments, include petroleum, animal oils, vegetable oils, or synthetic oils. Specific examples of oils include peanut, soybean, sesame, cottonseed, corn, olive, petrolatum, and mineral oil. Suitable fatty acids for use in parenteral formulations include oleic acid, stearic acid, and isostearic acid. Ethyl oleate and isopropyl myristate are examples of suitable fatty acid esters.

[1392] Suitable soaps for use in certain embodiments of parenteral formulations include fatty alkali metal, ammonium, and triethanolamine salts, and suitable detergents include (a) cationic detergents such as, for example, dimethyl dialkyl ammonium halides. and alkyl pyridinium halides, (b) anionic detergents such as, for example, alkyl, aryl, and olefin sulfonates, alky, olefin, ether, and monoglyceride sulfates, and sulfosuccinates, (c) nonionic detergents such as, for example, fatty amine oxides, fatty acid alkanolamides, and polyoxyethylenepolypropylene copolymers, (d) amphoteric detergents such as, for example, alkyl-β-aminopropionates, and 2-alkyl-imidazoline quaternary ammonium salts, and (e) mixtures thereof.

[1393] In some embodiments, the parenteral formulations will contain, for example, from about 0.5% to about 25% by weight of the therapeutic agent in solution. Preservatives and buffers may be used. In order to minimize or eliminate irritation at the site of injection, such compositions may contain one or more nonionic surfactants having, for example, a hydrophile-lipophile balance (HLB) of from about 12 to about 17. The quantity of surfactant in such formulations will typically range, for example, from about 5% to about 15% by weight. Suitable surfactants include polyethylene glycol, sorbitan, fatty acid esters such as sorbitan monooleate, and high molecular weight adducts of ethylene oxide with a hydrophobic base formed by the condensation of propylene oxide with propylene glycol. The parenteral formulations can be presented in unit-dose or multi-dose sealed containers, such as ampoules or vials, and can be stored in a freeze-dried (lyophilized) condition requiring only the addition of a sterile liquid excipient, for example, water for injections, immediately prior to use. Extemporaneous injection solutions and suspensions can be prepared from sterile powders, granules, and tablets of the kind previously described.

[1394] In certain embodiments, injectable formulations are provided herein. The requirements for effective pharmaceutical carriers for injectable compositions are well-known to those of ordinary skill in the art (see, e.g., Pharmaceutics and Pharmacy Practice, J.B. Lippincott Company, Philadelphia, PA, Banker and Chalmers, eds., pages 238-250 (1982), and ASHP Handbook on Injectable Drugs, Toissel, 4th ed, pages 622-630 (1986)).

[1395] In some embodiments, topical formulations are provided herein. Topical formulations, including those that are useful for transdermal drug release, are suitable in the context of certain embodiments provided herein for application to skin. In some embodiments, the therapeutic agent alone or in combination with other suitable components, can be made into aerosol formulations to be administered via inhalation. These aerosol formulations can be placed into pressurized acceptable propellants, such as dichlorodifluoromethane, propane, nitrogen, and the like. They also may be formulated as pharmaceuticals for non-pressured preparations, such as in a nebulizer or an atomizer. Such spray formulations also may be used to spray mucosa.

[1396] In certain embodiments, the therapeutic agents provided herein can be formulated as inclusion complexes, such as cyclodextrin inclusion complexes, or liposomes. Liposomes can serve to target the therapeutic agents to a particular tissue. Liposomes also can be used to increase the half-life of the therapeutic agents. Many methods are available for preparing liposomes, as described in, for example, Szoka et al., Ann. Rev. Biophys. Bioeng., 9, 467 (1980) and U.S. Pat. Nos. 4,235,871, 4,501,728, 4,837,028, and 5,019,369.

[1397] In some embodiments, the therapeutic agents provided herein are formulated in time-released, delayed release, or sustained release delivery systems such that the delivery of the composition occurs prior to, and with sufficient time to, cause sensitization of the site to be treated. Such systems can avoid repeated administrations of the therapeutic agent, thereby increasing convenience to the subject and the physician, and may be particularly suitable for certain composition embodiments provided herein. In one embodiment, the compositions of the invention are formulated such that they are suitable for extended-release of the circRNA contained therein. Such extended-release compositions may be conveniently administered to a subject at extended dosing intervals. For example, in one embodiment, the compositions of the present invention are administered to a subject twice a day, daily or every other day. In an embodiment, the compositions of the present invention are administered to a subject twice a week, once a week, every ten days, every two weeks, every three weeks, every four weeks, once a month, every six weeks, every eight weeks, every three months, every four months, every six months, every eight months, every nine months or annually.

[1398] In some embodiments, a protein encoded by an inventive polynucleotide is produced by a target cell for sustained amounts of time. For example, the protein may be produced for more than one hour, more than four, more than six, more than 12, more than 24, more than 48 hours, or more than 72 hours after administration. In some embodiments the polypeptide is expressed at a peak level about six hours after administration. In some embodiments the expression of the polypeptide is sustained at least at a therapeutic level. In some embodiments, the polypeptide is expressed at least at a therapeutic level for more than one, more than four, more than six, more than 12, more than 24, more than 48, or more than 72 hours after administration. In some embodiments, the polypeptide is detectable at a therapeutic level in patient tissue (e.g., liver or lung). In some embodiments, the level of detectable polypeptide is from continuous expression from the circRNA composition over periods of time of more than one, more than four, more than six, more than 12, more than 24, more than 48, or more than 72 hours after administration.

[1399] In certain embodiments, a protein encoded by an inventive polynucleotide is produced at levels above normal physiological levels. The level of protein may be increased as compared to a control. In some embodiments, the control is the baseline physiological level of the polypeptide in a normal individual or in a population of normal individuals. In other embodiments, the control is the baseline physiological level of the polypeptide in an individual having a deficiency in the relevant protein or polypeptide or in a population of individuals having a deficiency in the relevant protein or polypeptide. In some embodiments, the control can be the normal level of the relevant protein or polypeptide in the individual to whom the composition is administered. In other embodiments, the control is the expression level of the polypeptide upon other therapeutic intervention, e.g., upon direct injection of the corresponding polypeptide, at one or more comparable time points.

[1400] In certain embodiments, the levels of a protein encoded by an inventive polynucleotide are detectable at 3 days, 4 days, 5 days, or 1 week or more after administration. Increased levels of protein may be observed in a tissue (e.g., liver or lung).

[1401] In some embodiments, the method yields a sustained circulation half-life of a protein encoded by an inventive polynucleotide. For example, the protein may be detected for hours or days longer than the half-life observed via subcutaneous injection of the protein or mRNA encoding the protein. In some embodiments, the half-life of the protein is 1 day, 2 days, 3 days, 4 days, 5 days, or 1 week or more.

[1402] Many types of release delivery systems are available and known to those of ordinary skill in the art. They include polymer based systems such as poly(lactide-glycolide), copolyoxalates, polycaprolactones, polyesteramides, polyorthoesters, polyhydroxybutyric acid, and polyanhydrides. Microcapsules of the foregoing polymers containing drugs are described in, for example, U.S. Pat. No. 5,075,109. Delivery systems also include non-polymer systems that are lipids including sterols such as cholesterol, cholesterol esters, and fatty acids or neutral fats such as mono-di-and tri-glycerides; hydrogel release systems; sylastic systems; peptide based systems: wax coatings; compressed tablets using conventional binders and excipients; partially fused implants; and the like. Specific examples include, but are not limited to: (a) erosional systems in which the active composition is contained in a form within a matrix such as those described in U.S. Pat. Nos. 4,452,775, 4,667,014, 4,748,034, and 5,239,660 and (b) diffusional systems in which an active component permeates at a controlled rate from a polymer such as described in U.S. Pat. Nos. 3,832,253 and 3,854,480. In addition, pump-based hardware delivery systems can be used, some of which are adapted for implantation.

[1403] In some embodiments, the therapeutic agent can be conjugated either directly or indirectly through a linking moiety to a targeting moiety. Methods for conjugating therapeutic agents to targeting moieties is known in the art. See, for instance, Wadwa et al., J, Drug Targeting 3:111 (1995) and U.S. Pat. No. 5,087,616.

[1404] In some embodiments, the therapeutic agents provided herein are formulated into a depot form, such that the manner in which the therapeutic agent is released into the body to which it is administered is controlled with respect to time and location within the body (see, for example, U.S. Pat. No. 4,450,150). Depot forms of therapeutic agents can be, for example, an implantable composition comprising the therapeutic agents and a porous or non-porous material, such as a polymer, wherein the therapeutic agents are encapsulated by or diffused throughout the material and/or degradation of the non-porous material. The depot is then implanted into the desired location within the body and the therapeutic agents are released from the implant at a predetermined rate.

### 10. Therapeutic Methods

[1405] A. Areas for Treatment & Relevant Diseases/Disorders

[1406] In certain aspects, provided herein is a method of treating and/or preventing a condition, e.g., an autoimmune disorder or cancer.

[1407] In certain embodiments, the therapeutic agents provided herein are co-administered with one or more additional therapeutic agents (e.g., in the same pharmaceutical composition or in separate pharmaceutical compositions). In some embodiments, the therapeutic agent provided herein can be administered first and the one or more additional therapeutic agents can be administered second, or vice versa. Alternatively, the therapeutic agent provided herein and the one or more additional therapeutic agents can be administered simultaneously.

[1408] In some embodiments, the subject is a mammal. In some embodiments, the mammal referred to herein can be any mammal, including, but not limited to, mammals of the order Rodentia, such as mice and hamsters, or mammals of the order Logomorpha, such as rabbits. The mammals may be from the order Carnivora, including Felines (cats) and Canines (dogs). The mammals may be from the order Artiodactyla, including Bovines (cows) and Swines (pigs), or of the order Perssodactyla, including Equines (horses). The mammals may be of the order Primates, Ceboids, or Simoids (monkeys) or of the order Anthropoids (humans and apes). Preferably, the mammal is a human.

### EXAMPLES

[1409] Wesselhoeft et al., (2019) RNA Circularization Diminishes Immunogenicity and Can Extend Translation Duration In vivo. Molecular Cell. 74(3), 508-520 and Wesselhoeft et al., (2018) Engineering circular RNA for Potent and Stable Translation in Eukaryotic Cells. Nature Communications. 9, 2629 are incorporated by reference in their entirety.

[1410] The invention is further described in detail by reference to the following examples but are not intended to be limited to the following examples. These examples encompass any and all variations of the illustrations with the intention of providing those of ordinary skill in the art with complete disclosure and description of how to make and use the subject invention and are not intended to limit the scope of what is regarded as the invention.

### Example 1

### Example 1A: External Duplex Regions Allow for Circularization of Long Precursor RNA Using the Permuted Intron Exon (PIE) Circularization Strategy

[1411] A 1.1kb sequence containing a full-length encephalomyocarditis virus (EMCV) IRES, a Gaussia luciferase (GLuc) expression sequence, and two short exon fragments of the permuted intron-exon (PIE) construct were inserted between the 3′ and 5′ introns of the permuted group I catalytic intron in the thymidylate synthase (Td) gene of the T4 phage. Precursor RNA was synthesized by run-off transcription. Circularization was attempted by heating the precursor RNA in the presence of magnesium ions and GTP, but splicing products were not obtained.

[1412] Perfectly complementary 9 nucleotide and 19 nucleotide long duplex regions were designed and added at the 5′ and 3′ ends of the precursor RNA. Addition of these homology arms increased splicing efficiency from 0 to 16% for 9 nucleotide duplex regions and to 48% for 19 nucleotide duplex regions as assessed by disappearance of the precursor RNA band.

[1413] The splicing product was treated with RNase R. Sequencing across the putative splice junction of RNase R-treated splicing reactions revealed ligated exons, and digestion of the RNase R-treated splicing reaction with oligonucleotide-targeted RNase H produced a single band in contrast to two bands yielded by RNase H-digested linear precursor. This shows that circular RNA is a major product of the splicing reactions of precursor RNA containing the 9 or 19 nucleotide long external duplex regions

### Example 1B: Spacers that Conserve Secondary Structures of IRES and PIE Splice Sites Increase Circularization Efficiency

[1414] A series of spacers was designed and inserted between the 3′ PIE splice site and the IRES. These spacers were designed to either conserve or disrupt secondary structures within intron sequences in the IRES, 3′ PIE splice site, and/or 5′ splice site. The addition of spacer sequences designed to conserve secondary structures resulted in 87% splicing efficiency, while the addition of a disruptive spacer sequences resulted in no detectable splicing.

### Example 2

### Example 2A: Internal Duplex Regions in Addition to External Duplex Regions Create a Splicing Bubble and Allows for Translation of Several Expression Sequences

[1415] Spacers were designed to be unstructured, non-homologous to the intron and IRES sequences, and to contain spacer-spacer duplex regions. These were inserted between the 5′ exon and IRES and between the 3′ exon and expression sequence in constructs containing external duplex regions, EMCV IRES, and expression sequences for Gaussia luciferase (total length: 1289 nt), Firefly luciferase (2384 nt), eGFP (1451 nt), human erythropoietin (1313 nt), and Cas9 endonuclease (4934 nt). Circularization of all 5 constructs was achieved. Circularization of constructs utilizing T4 phage and Anabaena introns were roughly equal. Circularization efficiency was higher for shorter sequences. To measure translation, each construct was transfected into HEK293 cells. Gaussia and Firefly luciferase transfected cells produced a robust response as measured by luminescence, human erythropoietin was detectable in the media of cells transfected with erythropoietin circRNA, and EGFP fluorescence was observed from cells transfected with EGFP circRNA. Co-transfection of Cas9 circRNA with sgRNA directed against GFP into cells constitutively expressing GFP resulted in ablated fluorescence in up to 97% of cells in comparison to an sgRNA-only control.

### Example 2B: Use of CVB3 IRES Increases Protein Production

[1416] Constructs with internal and external duplex regions and differing IRES containing either Gaussia luciferase or Firefly luciferase expression sequences were made. Protein production was measured by luminescence in the supernatant of HEK293 cells 24 hours after transfection. The Coxsackievirus B3 (CVB3) IRES construct produced the most protein in both cases.

### Example 2C: Use of polyA or polyAC Spacers Increases Protein Production

[1417] Thirty nucleotide long polyA or polyAC spacers were added between the IRES and splice junction in a construct with each IRES that produced protein in example 2B. Gaussia luciferase activity was measured by luminescence in the supernatant of HEK293 cells 24 hours after transfection. Both spacers improved expression in every construct over control constructs without spacers.

### Example 3

[1418] HEK293 or HeLa Cells Transfected with Circular RNA Produce More Protein than Those Transfected with Comparable Unmodified or Modified Linear RNA.

[1419] HPLC-purified Gaussia luciferase-coding circRNA (CVB3-GLuc-pAC) was compared with a canonical unmodified 5′ methylguanosine-capped and 3′ polyA-tailed linear GLuc mRNA, and a commercially available nucleoside-modified (pseudouridine, 5-methylcytosine) linear GLuc mRNA (from Trilink). Luminescence was measured 24 h post-transfection, revealing that circRNA produced 811.2% more protein than the unmodified linear mRNA in HEK293 cells and 54.5% more protein than the modified mRNA. Similar results were obtained in HeLa cells and a comparison of optimized circRNA coding for human erythropoietin with linear mRNA modified with 5-methoxyuridine.

[1420] Luminescence data was collected over 6 days. In HEK293 cells, circRNA transfection resulted in a protein production half-life of 80 hours, in comparison with the 43 hours of unmodified linear mRNA and 45 hours of modified linear mRNA. In HeLa cells, circRNA transfection resulted in a protein production half-life of 116 hours, in comparison with the 44 hours of unmodified linear mRNA and 49 hours of modified linear mRNA. CircRNA produced substantially more protein than both the unmodified and modified linear mRNAs over its lifetime in both cell types.

### Example 4

### Example 4A: Purification of circRNA by RNase Digestion, HPLC Purification, and Phosphatase Treatment Decreases Immunogenicity. Completely Purified Circular RNA is Significantly Less Immunogenic than Unpurified or Partially Purified Circular RNA. Protein Expression Stability and Cell Viability are Dependent on Cell Type and Circular RNA Purity

[1421] Human embryonic kidney 293 (HEK293) and human lung carcinoma A549 cells were transfected with:
[1422] a. products of an unpurified GLuc circular RNA splicing reaction,
[1423] b. products of RNase R digestion of the splicing reaction,
[1424] c. products of RNase R digestion and HPLC purification of the splicing reaction, or
[1425] d. products of RNase digestion, HPLC purification, and phosphatase treatment of the splicing reaction.

[1426] RNase R digestion of splicing reactions was insufficient to prevent cytokine release in A549 cells in comparison to untransfected controls.

[1427] The addition of HPLC purification was also insufficient to prevent cytokine release, although there was a significant reduction in interleukin-6 (IL-6) and a significant increase in interferon-α1 (IFNα1) compared to the unpurified splicing reaction.

[1428] The addition of a phosphatase treatment after HPLC purification and before RNase R digestion dramatically reduced the expression of all upregulated cytokines assessed in A549 cells. Secreted monocyte chemoattractant protein 1 (MCP1), IL-6, IFNα1, tumor necrosis factor α (TNFα), and IFNγ inducible protein-10 (IP-10) fell to undetectable or un-transfected baseline levels.

[1429] There was no substantial cytokine release in HEK293 cells. A549 cells had increased GLuc expression stability and cell viability when transfected with higher purity circular RNA. Completely purified circular RNA had a stability phenotype similar to that of transfected 293 cells.

### Example 4B: Circular RNA does not Cause Significant Immunogenicity and is not a RIG-I Ligand

[1430] A549 cells were transfected with:
[1431] a. unpurified circular RNA,
[1432] b. high molecular weight (linear and circular concatenations) RNA,
[1433] c. circular (nicked) RNA,
[1434] d. an early fraction of purified circular RNA (more overlap with nicked RNA peak),
[1435] e. a late fraction of purified circular RNA (less overlap with nicked RNA peak),
[1436] f. introns excised during circularization, or
[1437] g. vehicle (i.e. untransfected control).

[1438] Precursor RNA was separately synthesized and purified in the form of the splice site deletion mutant (DS) due to difficulties in obtaining suitably pure linear precursor RNA from the splicing reaction. Cytokine release and cell viability was measured in each case.

[1439] Robust IL-6, RANTES, and IP-10 release was observed in response to most of the species present within the splicing reaction, as well as precursor RNA. Early circRNA fractions elicited cytokine responses comparable to other non-circRNA fractions, indicating that even relatively small quantities of linear RNA contaminants are able to induce a substantial cellular immune response in A549 cells. Late circRNA fractions elicited no cytokine response in excess of that from untransfected controls. A549 cell viability 36 hours post-transfection was significantly greater for late circRNA fractions compared with all of the other fractions.

[1440] RIG-I and IFN-β1 transcript induction upon transfection of A549 cells with late circRNA HPLC fractions, precursor RNA or unpurified splicing reactions were analyzed. Induction of both RIG-I and IFN-β1 transcripts were weaker for late circRNA fractions than precursor RNA and unpurified splicing reactions. RNase R treatment of splicing reactions alone was not sufficient to ablate this effect. Addition of very small quantities of the RIG-I ligand 3p-hpRNA to circular RNA induced substantial RIG-I transcription. In HeLa cells, transfection of RNase R-digested splicing reactions induced RIG-I and IFN-β1, but purified circRNA did not. Overall, HeLa cells were less sensitive to contaminating RNA species than A549 cells.

[1441] A time course experiment monitoring RIG-I, IFN-β1, IL-6, and RANTES transcript induction within the first 8 hours after transfection of A549 cells with splicing reactions or fully purified circRNA did not reveal a transient response to circRNA. Purified circRNA similarly failed to induce pro-inflammatory transcripts in RAW264.7 murine macrophages.

[1442] A549 cells were transfected with purified circRNA containing an EMCV IRES and EGFP expression sequence. This failed to produce substantial induction of pro-inflammatory transcripts. These data demonstrate that non-circular components of the splicing reaction are responsible for the immunogenicity observed in previous studies and that circRNA is not a natural ligand for RIG-I.

### Example 5

[1443] Circular RNA Avoids Detection by TLRs.

[1444] TLR 3, 7, and 8 reporter cell lines were transfected with multiple linear or circular RNA constructs and secreted embryonic alkaline phosphatase (SEAP) was measured.

[1445] Linearized RNA was constructed by deleting the intron and homology arm sequences. The linear RNA constructs were then treated with phosphatase (in the case of capped RNAs, after capping) and purified by HPLC.

[1446] None of the attempted transfections produced a response in TLR7 reporter cells. TLR3 and TLR8 reporter cells were activated by capped linearized RNA, polyadenylated linearized RNA, the nicked circRNA HPLC fraction, and the early circRNA fraction. The late circRNA fraction and m1ψ-mRNA did not provoke TLR-mediated response in any cell line.

[1447] In a second experiment, circRNA was linearized using two methods: treatment of circRNA with heat in the presence of magnesium ions and DNA oligonucleotide-guided RNase H digestion. Both methods yielded a majority of full-length linear RNA with small amounts of intact circRNA. TLR3, 7, and 8 reporter cells were transfected with circular RNA, circular RNA degraded by heat, or circular RNA degraded by RNase H, and SEAP secretion was measured 36 hours after transfection. TLR8 reporter cells secreted SEAP in response to both forms of degraded circular RNA, but did not produce a greater response to circular RNA transfection than mock transfection. No activation was observed in TLR3 and TLR7 reporter cells for degraded or intact conditions, despite the activation of TLR3 by in vitro transcribed linearized RNA.

### Example 6

[1448] Unmodified Circular RNA Produces Increased Sustained In Vivo Protein Expression than Linear RNA.

[1449] Mice were injected and HEK293 cells were transfected with unmodified and m1ψ-modified human erythropoietin (hEpo) linear mRNAs and circRNAs. Equimolar transfection of m1ψ-mRNA and unmodified circRNA resulted in robust protein expression in HEK293 cells. hEpo linear mRNA and circRNA displayed similar relative protein expression patterns and cell viabilities in comparison to GLuc linear mRNA and circRNA upon equal weight transfection of HEK293 and A549 cells.

[1450] In mice, hEpo was detected in serum after the injection of hEpo circRNA or linear mRNA into visceral adipose. hEpo detected after the injection of unmodified circRNA decayed more slowly than that from unmodified or m1ψ-mRNA and was still present 42 hours post-injection. Serum hEpo rapidly declined upon the injection of unpurified circRNA splicing reactions or unmodified linear mRNA. Injection of unpurified splicing reactions produced a cytokine response detectable in serum that was not observed for the other RNAs, including purified circRNA.

### Example 7

[1451] Circular RNA can be Effectively Delivered In Vivo or In Vitro Via Lipid Nanoparticles.

[1452] Purified circular RNA was formulated into lipid nanoparticles (LNPs) with the ionizable lipidoid cKK-E12 (Dong et al., 2014; Kauffman et al., 2015). The particles formed uniform multilamellar structures with an average size, polydispersity index, and encapsulation efficiency similar to that of particles containing commercially available control linear mRNA modified with 5moU.

[1453] Purified hEpo circRNA displayed greater expression than 5moU-mRNA when encapsulated in LNPs and added to HEK293 cells. Expression stability from LNP-RNA in HEK293 cells was similar to that of RNA delivered by transfection reagent, with the exception of a slight delay in decay for both 5moU-mRNA and circRNA. Both unmodified circRNA and 5moU-mRNA failed to activate RIG-I/IFN-β1 in vitro.

[1454] In mice, LNP-RNA was delivered by local injection into visceral adipose tissue or intravenous delivery to the liver. Serum hEpo expression from circRNA was lower but comparable with that from 5moU-mRNA 6 hours after delivery in both cases. Serum hEpo detected after adipose injection of unmodified LNP-circRNA decayed more slowly than that from LNP-5moU-mRNA, with a delay in expression decay present in serum that was similar to that noted in vitro, but serum hEpo after intravenous injection of LNP-circRNA or LNP-5moU-mRNA decayed at approximately the same rate. There was no increase in serum cytokines or local RIG-I, TNFα, or IL-6 transcript induction in any of these cases.

### Example 8

[1455] Expression and Functional Stability by IRES in HEK293, HepG2, and 1C1C7 Cells.

[1456] Constructs including anabaena intron/exon regions, a Gaussia luciferase expression sequence, and varying IRES were circularized. 100 ng of each circularization reaction was separately transfected into 20,000 HEK293 cells, HepG2 cells, and 1C1C7 cells using Lipofectamine MessengerMax. Luminescence in each supernatant was assessed after 24 hours as a measure of protein expression. In HEK293 cells, constructs including Crohivirus B, Salivirus FHB, Aichi Virus, Salivirus HG-J1, and Enterovirus J IRES produced the most luminescence at 24 hours (FIG. 1A). In HepG2 cells, constructs including Aichi Virus, Salivirus FHB, EMCV-Cf, and CVA3 IRES produced high luminescence at 24 hours (FIG. 1). In 1C1C7 cells, constructs including Salivirus FHB, Aichi Virus, Salivirus NG-J1, and Salivirus A SZ-1 IRES produced high luminescence at 24 hours (FIG. 1C).

[1457] A trend of larger IRES producing greater luminescence at 24 hours was observed. Shorter total sequence length tends to increase circularization efficiency, so selecting a high expression and relatively short IRES may result in an improved construct. In HEK293 cells, a construct using the Crohivirus B IRES produced the highest luminescence, especially in comparison to other IRES of similar length (FIG. 2A). Expression from IRES constructs in HepG2 and 1C1C7 cells plotted against IRES size are in FIGS. 2B and 2C.

[1458] Functional stability of select IRES constructs in HepG2 and 1C1C7 cells were measured over 3 days. Luminescence from secreted Gaussia luciferase in supernatant was measured every 24 hours after transfection of 20,000 cells with 100 ng of each circularization reaction, followed by complete media replacement. Salivirus A GUT and Salivirus FHB exhibited the highest functional stability in HepG2 cells, and Salivirus N-J1 and Salivirus FHB produced the most stable expression in 1C1C7 cells (FIGS. 3A and 3B).

### Example 9

[1459] Expression and Functional Stability by IRES in Jurkat Cells.

[1460] 2 sets of constructs including anabaena intron/exon regions, a Gaussia luciferase expression sequence, and a subset of previously tested IRES were circularized. 60,000 Jurkat cells were electroporated with 1 μg of each circularization reaction. Luminescence from secreted Gaussia luciferase in supernatant was measured 24 hours after electroporation. A CVB3 IRES construct was included in both sets for comparison between sets and to previously defined IRES efficacy. CVB1 and Salivirus A SZ1 IRES constructs produced the most expression at 24h. Data can be found in FIGS. 4A and 4B.

[1461] Functional stability of the TRES constructs in each round of electroporated Jurkat cells was measured over 3 days. Luminescence from secreted Gaussia luciferase in supernatant was measured every 24 hours after electroporation of 60,000 cells with 1 μg of each circularization reaction, followed by complete media replacement (FIGS. 5A and 5B).

[1462] Salivirus A SZ1 and Salivirus A BN2 IRES constructs had high functional stability compared to other constructs.

### Example 10

[1463] Expression, Functional Stability, and Cytokine Release of Circular and Linear RNA in Jurkat Cells.

[1464] A construct including anabaena intron/exon regions, a Gaussia luciferase expression sequence, and a Salivirus FHB IRES was circularized. mRNA including a Gaussia luciferase expression sequence and a ˜150 nt polyA tail, and modified to replace 100% of uridine with 5-methoxy uridine (5moU) is commercially available and was purchased from Trilink. 5moU nucleotide modifications have been shown to improve mRNA stability and expression (Bioconjug Chem. 2016 Mar. 16; 27(3):849-53). Expression of modified mRNA, circularization reactions (unpure), and circRNA purified by size exclusion HPLC (pure) in Jurkat cells were measured and compared (FIG. 6A). Luminescence from secreted Gaussia luciferase in supernatant was measured 24 hours after electroporation of 60,000 cells with 1 μg of each RNA species.

[1465] Luminescence from secreted Gaussia luciferase in supernatant was measured every 24 hours after electroporation of 60,000 cells with lug of each RNA species, followed by complete media replacement. A comparison of functional stability data of modified mRNA and circRNA in Jurkat cells over 3 days is in FIG. 6B.

[1466] IFNγ (FIG. 7A), IL-6 (FIG. 7B), IL-2 (FIG. 7C), RIG-I (FIG. 7D), IFN-β1 (FIG. 7E), and TNFα (FIG. 7F) transcript induction was measured 18 hours after electroporation of 60,000 Jurkat cells with 1 μg of each RNA species described above and 3p-hpRNA (5′ triphosphate hairpin RNA, which is a known RIG-I agonist).

### Example 11

[1467] Expression of Circular and Linear RNA in Monocytes and Macrophages.

[1468] A construct including anabaena intron/exon regions, a Gaussia luciferase expression sequence, and a Salivirus FHB IRES was circularized. mRNA including a Gaussia luciferase expression sequence and a ˜150 nt polyA tail, and modified to replace 100% of uridine with 5-methoxy uridine (5moU) was purchased from Trilink. Expression of circular and modified mRNA was measured in human primary monocytes (FIG. 8A) and human primary macrophages (FIG. 8B). Luminescence from secreted Gaussia luciferase in supernatant was measured 24 hours after electroporation of 60,000 cells with 1 μg of each RNA species. Luminescence was also measured 4 days after electroporation of human primary macrophages with media changes every 24 hours (FIG. 8C). The difference in luminescence was statistically significant in each case (p<0.05).

### Example 12

[1469] Expression and Functional Stability by IRES in Primary T Cells.

[1470] Constructs including anabaena intron/exon regions, a Gaussia luciferase expression sequence, and a subset of previously tested IRES were circularized and reaction products were purified by size exclusion HPLC. 150,000 primary human CD3+ T cells were electroporated with 1 μg of each circRNA. Luminescence from secreted Gaussia luciferase in supernatant was measured 24 hours after electroporation (FIG. 9A). Aichi Virus and CVB3 IRES constructs had the most expression at 24 hours.

[1471] Luminescence was also measured every 24 hours after electroporation for 3 days in order to compare functional stability of each construct (FIG. 9B). The construct with a Salivirus A SZ1 IRES was the most stable.

### Example 13

[1472] Expression and Functional Stability of Circular and Linear RNA in Primary T Cells and PBMCs.

[1473] Constructs including anabaena intron/exon regions, a Gaussia luciferase expression sequence, and a Salivirus A SZ1 IRES or Salivirus FHB IRES were circularized. mRNA including a Gaussia luciferase expression sequence and a ˜150 nt polyA tail, and modified to replace 100% of uridine with 5-methoxy uridine (5moU) and was purchased from Trilink. Expression of Salivirus A SZ1 IRES HPLC purified circular and modified mRNA was measured in human primary CD3+ T cells. Expression of Salivirus FHB HPLC purified circular, unpurified circular and modified mRNA was measured in human PBMCs. Luminescence from secreted Gaussia luciferase in supernatant was measured 24 hours after electroporation of 150,000 cells with 1 μg of each RNA species. Data for primary human T cells is in FIGS. 10A and 10B, and data for PBMCs is in FIG. 10C. The difference in expression between the purified circular RNA and unpurified circular RNA or linear RNA was significant in each case (p<0.05).

[1474] Luminescence from secreted Gaussia luciferase in primary T cell supernatant was measured every 24 hours after electroporation over 3 days in order to compare construct functional stability. Data is shown in FIG. 10B. The difference in relative luminescence from the day 1 measurement between purified circular RNA and linear RNA was significant at both day 2 and day 3 for primary T cells.

### Example 14

[1475] Circularization Efficiency by Permutation Site in Anabaena Intron.

[1476] RNA constructs including a CVB3 IRES, a Gaussia luciferase expression sequence, anabaena intron/exon regions, spacers, internal duplex regions, and homology arms were produced. Circularization efficiency of constructs using the traditional anabaena intron permutation site and 5 consecutive permutations sites in P9 was measured by HPLC. HPLC chromatograms for the 5 consecutive permutation sites in P9 are shown in FIG. 11A.

[1477] Circularization efficiency was measured at a variety of permutation sites. Circularization efficiency is defined as the area under the HPLC chromatogram curve for each of: circRNA/(circRNA+precursor RNA). Ranked quantification of circularization efficiency at each permutation site is in FIG. 11B. 3 permutation sites (indicated in FIG. 111B) were selected for further investigation.

[1478] Circular RNA in this example was circularized by in vitro transcription (IVT) then purified via spin column. Circularization efficiency for all constructs would likely be higher if the additional step of incubation with Mg²⁺ and guanosine nucleotide were included; however, removing this step allowed for comparison between, and optimization of, circular RNA constructs. This level of optimization is especially useful for maintaining high circularization efficiency with large RNA constructs, such as those encoding chimeric antigen receptors.

### Example 15

[1479] Circularization Efficiency of Alternative Introns.

[1480] Precursor RNA containing a permuted group 1 intron of variable species origin or permutation site and several constant elements including: a CVB3 IRES, a Gaussia luciferase expression sequence, spacers, internal duplex regions, and homology arms were created. Circularization data can be found in FIG. 12. FIG. 12A shows chromatograms resolving precursor, CircRNA and introns. FIG. 12B provides ranked quantification of circularization efficiency, based on the chromatograms shown in FIG. 12A, as a function of intron construct.

[1481] Circular RNA in this example was circularized by in vitro transcription (IVT) then spin column purification. Circularization efficiency for all constructs would likely be higher if the additional step of incubation with Mg²+ and guanosine nucleotide were included; however, removing this step allows for comparison between, and optimization of, circular RNA constructs. This level of optimization is especially useful for maintaining high circularization efficiency with large RNA constructs, such as those encoding chimeric antigen receptors.

### Example 16

[1482] Circularization Efficiency by Homology Arm Presence or Length.

[1483] RNA constructs including a CVB3 IRES, a Gaussia luciferase expression sequence, anabaena intron/exon regions, spacers, and internal duplex regions were produced. Constructs representing 3 anabaena intron permutation sites were tested with 30 nt, 25% GC homology arms or without homology arms (“NA”). These constructs were allowed to circularize without the step of incubation with Mg²⁺. Circularization efficiency was measured and compared. Data can be found in FIG. 13. Circularization efficiency was higher for each construct lacking homology arms. FIG. 13A provides ranked quantification of circularization efficiency; FIG. 13B provides chromatograms resolving precursor, circRNA and introns.

[1484] For each of the 3 permutation sites, constructs were created with 10 nt, 20 nt, and 30 nt arm length and 25%, 50%, and 75% GC. Splicing efficiency of these constructs was measured and compared to constructs without homology arms (FIG. 14). Splicing efficiency is defined as the proportion of free introns relative to the total RNA in the splicing reaction.

[1485] FIG. 15 A (left) contains HPLC chromatograms showing the contribution of strong homology arms to improved splicing efficiency. Top left: 75% GC content, 10 nt homology arms. Center left: 75% GC content, 20 nt homology arms. Bottom left: 75% GC content, 30 nt homology arms.

[1486] FIG. 15 A (right) shows HPLC chromatograms indicating increased splicing efficiency paired with increased nicking, appearing as a shoulder on the circRNA peak. Top right: 75% GC content, 10 nt homology arms. Center right: 75% GC content, 20 nt homology arms. Bottom right: 75% GC content, 30 nt homology arms.

[1487] FIG. 15 B (left) shows select combinations of permutation sites and homology arms hypothesized to demonstrate improved circularization efficiency.

[1488] FIG. 15 B (right) shows select combinations of permutation sites and homology arms hypothesized to demonstrate improved circularization efficiency, treated with E. coli polyA polymerase.

[1489] Circular RNA in this example was circularized by in vitro transcription (IVT) then spin-column purified. Circularization efficiency for all constructs would likely be higher if an additional Mg²⁺ incubation step with guanosine nucleotide were included; however, removing this step allowed for comparison between, and optimization of, circular RNA constructs. This level of optimization is especially useful for maintaining high circularization efficiency with large RNA constructs, such as those encoding chimeric antigen receptors.

### Example 17

[1490] Circular RNA Encoding Chimeric Antigen Receptors.

[1491] Constructs including anabaena intron/exon regions, a Kymriah chimeric antigen receptor (CAR) expression sequence, and a CVB3 IRES were circularized. 100,000 human primary CD3+ T cells were electroporated with 500ng of circRNA and co-cultured for 24 hours with Raji cells stably expressing GFP and firefly luciferase. Effector to target ratio (E:T ratio) 0.75:1. 100,000 human primary CD3+ T cells were mock electroporated and co-cultured as a control (FIG. 16).

[1492] Sets of 100,000 human primary CD3+ T cells were mock electroporated or electroporated with 1 μg of circRNA then co-cultured for 48 hours with Raji cells stably expressing GFP and firefly luciferase. E:T ratio 10:1 (FIG. 17).

[1493] Quantification of specific lysis of Raji target cells was determined by detection of firefly luminescence (FIG. 18). 100,000 human primary CD3+ T cells either mock electroporated or electroporated with circRNA encoding different CAR sequences were co-cultured for 48 hours with Raji cells stably expressing GFP and firefly luciferase. % Specific lysis defined as 1-[CAR condition luminescence]/[mock condition luminescence]. E:T ratio 10:1.

### Example 18

[1494] Expression and Functional Stability of Circular and Linear RNA in Jurkat Cells and Resting Human T Cells.

[1495] Constructs including anabaena intron/exon regions, a Gaussia luciferase expression sequence, and a subset of previously tested IRES were circularized and reaction products were purified by size exclusion HPLC. 150,000 Jurkat cells were electroporated with 1 μg of circular RNA or 5moU-mRNA. Luminescence from secreted Gaussia luciferase in supernatant was measured 24 hours after electroporation (FIG. 19A left). 150,000 resting primary human CD3+ T cells (10 days post-stimulation) were electroporated with 1 μg of circular RNA or 5moU-mRNA. Luminescence from secreted Gaussia luciferase in supernatant was measured 24 hours after electroporation (FIG. 19A right).

[1496] Luminescence from secreted Gaussia luciferase in supernatant was measured every 24 hours after electroporation, followed by complete media replacement. Functional stability data is shown in FIG. 19B. Circular RNA had more functional stability than linear RNA in each case, with a more pronounced difference in Jurkat cells.

### Example 19

[1497] IFN-β1, RIG-I, IL-2, IL-6, IFNγ, and TNFα transcript induction of cells electroporated with linear RNA or varying circular RNA constructs.

[1498] Constructs including anabaena intron/exon regions, a Gaussia luciferase expression sequence, and a subset of previously tested IRES were circularized and reaction products were purified by size exclusion HPLC. 150,000 CD3+ human T cells were electroporated with 1 μg of circular RNA, 5moU-mRNA, or immunostimulatory positive control poly inosine:cytosine. IFN-β1 (FIG. 20A), RIG-I (FIG. 20B), IL-2 (FIG. 20C), IL-6 (FIG. 20D), IFN-γ (FIG. 20E), and TNF-α (FIG. 20F) transcript induction was measured 18 hours after electroporation.

### Example 20

[1499] Specific Lysis of Target Cells and IFNγ Transcript Induction by CAR Expressing Cells Electroporated with Different Amounts of Circular or Linear RNA; Specific Lysis of Target and Non-Target Cells by CAR Expressing Cells at Different E: T Ratios.

[1500] Constructs including anabaena intron/exon regions, an anti-CD19 CAR expression sequence, and a CVB3 IRES were circularized and reaction products were purified by size exclusion HPLC. 150,000 human primary CD3+ T cells either mock electroporated or electroporated with different quantities of circRNA encoding an anti-CD19 CAR sequence were co-cultured for 12 hours with Raji cells stably expressing GFP and firefly luciferase at an E:T ratio of 2:1. Specific lysis of Raji target cells was determined by detection of firefly luminescence (FIG. 21A). % Specific lysis was defined as 1-[CAR condition luminescence]/[mock condition luminescence]. IFNγ transcript induction was measured 24 hours after electroporation (FIG. 21).

[1501] 150,000 human primary CD3+ T cells were either mock electroporated or electroporated with 500ng circRNA or m1ψ-mRNA encoding an anti-CD19 CAR sequence, then co-cultured for 24 hours with Raji cells stably expressing firefly luciferase at different E:T ratios. Specific lysis of Raji target cells was determined by detection of firefly luminescence (FIG. 22A). Specific lysis was defined as 1-[CAR condition luminescence]/[mock condition luminescence].

[1502] CAR expressing T cells were also co-cultured for 24 hours with Raji or K562 cells stably expressing firefly luciferase at different E:T ratios. Specific lysis of Raji target cells or K562 non-target cells was determined by detection of firefly luminescence (FIG. 22B). % Specific lysis is defined as 1−[CAR condition luminescence]/[mock condition luminescence].

### Example 21

[1503] Specific Lysis of Target Cells by T Cells Electroporated with Circular RNA or Linear RNA Encoding a CAR.

[1504] Constructs including anabaena intron/exon regions, an anti-CD19 CAR expression sequence, and a CVB3 IRES were circularized and reaction products were purified by size exclusion HPLC. Human primary CD3+ T cells were electroporated with 500 ng of circular RNA or an equimolar quantity of m1ψ-mRNA, each encoding a CD19-targeted CAR. Raji cells were added to CAR-T cell cultures over 7 days at an E:T ratio of 10:1. % Specific lysis was measured for both constructs at 1, 3, 5, and 7 days (FIG. 23).

### Example 22

[1505] Specific Lysis of Raji Cells by T Cells Expressing an Anti-CD19 CAR or an Anti-BCMA CAR.

[1506] Constructs including anabaena intron/exon regions, anti-CD19 or anti-BCMA CAR expression sequence, and a CVB3 IRES were circularized and reaction products were purified by size exclusion HPLC. 150,000 primary human CD3+ T cells were electroporated with 500ng of circRNA, then were co-cultured with Raji cells at an E:T ratio of 2:1. % Specific lysis was measured 12 hours after electroporation (FIG. 24).

### Example 23

[1507] Expression, Functional Stability, and Cytokine Transcript Induction of Circular and Linear RNA Expressing Antigens.

[1508] Constructs including one or more antigen expression sequences are circularized and reaction products are purified by size exclusion HPLC. Antigen presenting cells are electroporated with circular RNA or mRNA.

[1509] In vitro antigen production is measured via ELISA. Optionally, antigen production is measured every 24 hours after electroporation. Cytokine transcript induction or release is measured 18 hours after electroporation of antigen presenting cells with circular or linear RNA encoding antigens. The tested cytokines may include IFN-β1, RIG-I, IL-2, IL-6, IFNγ, RANTES, and TNFα.

[1510] In vitro antigen production and cytokine induction are measured using purified circRNA, purified circRNA plus antisense circRNA, and unpurified circRNA in order to find the ratio that best preserves expression and immune stimulation.

### Example 24

[1511] In Vivo Antigen and Antibody Expression in Animal Models.

[1512] To assess the ability of antigen encoding circRNAs to facilitate antigen expression and antibody production in vivo, escalating doses of RNA encoding one or more antigens is introduced into mice via intramuscular injection.

[1513] Mice are injected once, blood collected after 28 days, then injected again, with blood collected 14 days thereafter. Neutralizing antibodies against antigen of interest is measured via ELISA.

### Example 25

[1514] Protection Against Infection.

[1515] To assess the ability of antigen encoding circRNAs to protect against or cure an infection, RNA encoding one or more antigens of a virus (such as influenza) is introduced into mice via intramuscular injection.

[1516] Mice receive an initial injection and boost injections of circRNA encoding one or more antigens. Protection from a virus such as influenza is determined by weight loss and mortality over 2 weeks.

### Example 26

### Example 26A: Synthesis of Compounds

[1517] Synthesis of representative ionizable lipids of the invention are described in PCT applications PCT/US2016/052352, PCT/US2016/068300, PCT/US2010/061058, PCT/US2018/058555, PCT/US2018/053569, PCT/US2017/028981, PCT/US2019/025246, PCT/US2018/035419, PCT/US2019/015913, and US applications with publication numbers 20190314524, 20190321489, and 20190314284, the contents of each of which are incorporated herein by reference in their entireties.

### Example 26B: Synthesis of Compounds

[1518] Synthesis of representative ionizable lipids of the invention are described in US patent publication number US20170210697A1, the contents of which is incorporated herein by reference in its entirety.

### Example 27

[1519] Protein Expression by Organ

[1520] Circular or linear RNA encoding FLuc was generated and loaded into transfer vehicles with the following formulation: 50% ionizable Lipid 10b-15 represented by

[chemical structure]

10% DSPC, 1.5% PEG-DMG, 38.5% cholesterol. CD-1 mice were dosed at 0.2 mg/kg and luminescence was measured at 6 hours (live IVIS) and 24 hours (live IVIS and ex vivo IVIS). Total Flux (photons/second over a region of interest) of the liver, spleen, kidney, lung, and heart was measured (FIGS. 25 and 26).

### Example 28

[1521] Distribution of Expression in the Spleen

[1522] Circular or linear RNA encoding GFP is generated and loaded into transfer vehicles with the following formulation: 50% ionizable Lipid 10b-15 represented by

[chemical structure]

10% DSPC, 1.5% PEG-DMG, 38.5% cholesterol. The formulation is administered to CD-1 mice. Flow cytometry is run on spleen cells to determine the distribution of expression across cell types.

### Example 29

### Example 29A: Production of Nanoparticle Compositions

[1523] In order to investigate safe and efficacious nanoparticle compositions for use in the delivery of circular RNA to cells, a range of formulations are prepared and tested. Specifically, the particular elements and ratios thereof in the lipid component of nanoparticle compositions are optimized.

[1524] Nanoparticles can be made in a 1 fluid stream or with mixing processes such as microfluidics and T-junction mixing of two fluid streams, one of which contains the circular RNA and the other has the lipid components.

[1525] Lipid compositions are prepared by combining an ionizable lipid, optionally a helper lipid (such as DOPE, DSPC, or oleic acid obtainable from Avanti Polar Lipids, Alabaster, AL), a PEG lipid (such as 1,2-dimyristoyl-sn-glycerol methoxypolyethylene glycol, also known as PEG-DMG, obtainable from Avanti Polar Lipids, Alabaster, AL), and a structural lipid such as cholesterol at concentrations of about, e.g., 40 or 50 mM in a solvent, e.g., ethanol. Solutions should be refrigerated for storage at, for example, −20° C. Lipids are combined to yield desired molar ratios (see, for example, Tables 17a and 17b below) and diluted with water and ethanol to a final lipid concentration of e.g., between about 5.5 mM and about 25 mM.

TABLE 17a

| Formulation | |
|---|---|
| number | Description |
| 1 | Aliquots of 50 mg/mL ethanolic solutions of C12-200, DOPE, Chol and DMG- |
| | PEG2K (40:30:25:5) are mixed and diluted with ethanol to 3 mL final volume. |
| | Separately, an aqueous buffered solution (10 mM citrate/150 mM NaCl, pH |
| | 4.5) of circRNA is prepared from a 1 mg/mL stock. The lipid solution is |
| | injected rapidly into the aqueous circRNA solution and shaken to yield a final |
| | suspension in 20% ethanol. The resulting nanoparticle suspension is filtered, |
| | diafiltrated with 1 × PBS (pH 7.4), concentrated and stored at 2-8° C. |
| 2 | Aliquots of 50 mg/mL ethanolic solutions of DODAP, DOPE, cholesterol and |
| | DMG-PEG2K (18:56:20:6) are mixed and diluted with ethanol to 3 mL final |
| | volume. Separately, an aqueous buffered solution (10 mM citrate/150 mM |
| | NaCl, pH 4.5) of EPO circRNA is prepared from a 1 mg/mL stock. The lipid |
| | solution is injected rapidly into the aqueous circRNA solution and shaken to |
| | yield a final suspension in 20% ethanol. The resulting nanoparticle suspension |
| | is filtered, diafiltrated with 1 × PBS (pH 7.4), concentrated and stored at 2-8° C. |
| | Final concentration = 1.35 mg/mL EPO circRNA (encapsulated). Zave = 75.9 nm |
| | (Dv(50) = 57.3 nm; Dv(90) = 92.1 nm). |
| 3 | Aliquots of 50 mg/mL ethanolic solutions of HGT4003, DOPE, cholesterol and |
| | DMG-PEG2K (50:25:20:5) are mixed and diluted with ethanol to 3 mL final |
| | volume. Separately, an aqueous buffered solution (10 mM citrate/150 mM |
| | NaCl, pH 4.5) of circRNA is prepared from a 1 mg/mL stock. The lipid solution |
| | is injected rapidly into the aqueous circRNA solution and shaken to yield a final |
| | suspension in 20% ethanol. The resulting nanoparticle suspension is filtered, |
| | diafiltrated with 1 × PBS (pH 7.4), concentrated and stored at 2-8° C. |
| 4 | Aliquots of 50 mg/mL ethanolic solutions of ICE, DOPE and DMG-PEG2K |
| | (70:25:5) are mixed and diluted with ethanol to 3 mL final volume. Separately, |
| | an aqueous buffered solution (10 mM citrate/150 mM NaCl, pH 4.5) of |
| | circRNA is prepared from a 1 mg/mL stock. The lipid solution is injected |
| | rapidly into the aqueous circRNA solution and shaken to yield a final |
| | suspension in 20% ethanol. The resulting nanoparticle suspension is filtered, |
| | diafiltrated with 1 × PBS (pH 7.4), concentrated and stored at 2-8° C. |
| 5 | Aliquots of 50 mg/mL ethanolic solutions of HGT5000, DOPE, cholesterol and |
| | DMG-PEG2K (40:20:35:5) are mixed and diluted with ethanol to 3 mL final |
| | volume. Separately, an aqueous buffered solution (10 mM citrate/150 mM |
| | NaCl, pH 4.5) of EPO circRNA is prepared from a 1 mg/mL stock. The lipid |
| | solution is injected rapidly into the aqueous circRNA solution and shaken to |
| | yield a final suspension in 20% ethanol. The resulting nanoparticle suspension |
| | is filtered, diafiltrated with 1 × PBS (pH 7.4), concentrated and stored at 2-8° C. |
| | Final concentration = 1.82 mg/mL EPO mRNA (encapsulated). Zave = 105.6 nm |
| | (Dv(50) = 53.7 nm; Dv(90) = 157 nm). |
| 6 | Aliquots of 50 mg/mL ethanolic solutions of HGT5001, DOPE, cholesterol and |
| | DMG-PEG2K (40:20:35:5) are mixed and diluted with ethanol to 3 mL final |
| | volume. Separately, an aqueous buffered solution (10 mM citrate/150 mM |
| | NaCl, pH 4.5) of EPO circRNA is prepared from a 1 mg/mL stock. The lipid |
| | solution is injected rapidly into the aqueous circRNA solution and shaken to |
| | yield a final suspension in 20% ethanol. The resulting nanoparticle suspension |
| | is filtered, diafiltrated with 1 × PBS (pH 7.4), concentrated and stored at 2-8° C. |
| 7 | Aliquots of 50 mg/mL ethanolic solutions of HGT5001, DOPE, cholesterol and |
| | DMG-PEG2K (35:16:46.5:2.5) are mixed and diluted with ethanol to 3 mL |
| | final volume. Separately, an aqueous buffered solution (10 mM citrate/150 mM |
| | NaCl, pH 4.5) of EPO circRNA is prepared from a 1 mg/mL stock. The lipid |
| | solution is injected rapidly into the aqueous circRNA solution and shaken to |
| | yield a final suspension in 20% ethanol. The resulting nanoparticle suspension |
| | is filtered, diafiltrated with 1 × PBS (pH 7.4), concentrated and stored at 2-8° C. |
| 8 | Aliquots of 50 mg/mL ethanolic solutions of HGT5001, DOPE, cholesterol and |
| | DMG-PEG2K (40:10:40:10) are mixed and diluted with ethanol to 3 mL final |
| | volume. Separately, an aqueous buffered solution (10 mM citrate/150 mM |
| | NaCl, pH 4.5) of EPO circRNA is prepared from a 1 mg/mL stock. The lipid |
| | solution is injected rapidly into the aqueous circRNA solution and shaken to |
| | yield a final suspension in 20% ethanol. The resulting nanoparticle suspension |
| | is filtered, diafiltrated with 1 × PBS (pH 7.4), concentrated and stored at 2-8° C. |
| 9 | Aliquots of 50 mg/mL ethanolic solutions of LP-01, DSPC, cholesterol and |
| | DMG-PEG2K (45:9:44:2) are mixed and diluted with ethanol to 3 mL final |
| | volume. Separately, an aqueous buffered solution (50 mM Na Acetate, pH 4.5) |
| | of FLuc, hEPO, micro-dystrophin, mini-dystrophin, or dystrophin circRNA is |
| | prepared from a 1 mg/mL stock. The lipid solution is injected rapidly into the |
| | aqueous circRNA solution and shaken to yield a final suspension in 25% |
| | ethanol. The resulting nanoparticle suspension is filtered, diafiltrated with |
| | 1 × PBS (pH 7.4), concentrated and stored at 2-8° C. |
| 10 | Aliquots of 50 mg/mL ethanolic solutions of LP-01, DSPC, cholesterol and |
| | DMG-PEG2K, and DMSO solution of Ethyl Lauroyl Arginate |
| | (38.25:7.65:37.4:1.7:15) are mixed and diluted with ethanol to 3 mL final |
| | volume. Separately, an aqueous buffered solution (50 mM Bis-Tris, pH 7.0) of |
| | FLuc, hEPO, micro-dystrophin, mini-dystrophin, or dystrophin circRNA is |
| | prepared from a 1 mg/mL stock. The lipid solution is injected rapidly into the |
| | aqueous circRNA solution and shaken to yield a final suspension in 25% |
| | ethanol. The resulting nanoparticle suspension is filtered, diafiltrated with |
| | 1 × PBS (pH 7.4), concentrated and stored at 2-8° C. |
| 11 | Aliquots of 50 mg/mL ethanolic solutions of SM-102, DSPC, cholesterol and |
| | DMG-PEG2K (50:10:38.5:1.5) are mixed and diluted with ethanol to 3 mL |
| | final volume. Separately, an aqueous buffered solution (6.25 mM Na Acetate, |
| | pH 4.5) of FLuc, hEPO, micro-dystrophin, mini-dystrophin, or dystrophin |
| | circRNA is prepared from a 1 mg/mL stock. The lipid solution is injected |
| | rapidly into the aqueous circRNA solution and shaken to yield a final |
| | suspension in 25% ethanol. The resulting nanoparticle suspension is filtered, |
| | diafiltrated with 1 × PBS (pH 7.4), concentrated and stored at 2-8° C. |
| 12 | Aliquots of 50 mg/mL ethanolic solutions of SM-102, DSPC, cholesterol and |
| | DMG-PEG2K, and DMSO solution of Ethyl Lauroyl Arginate |
| | (42.5:8.5:32.73:1.275:15) are mixed and diluted with ethanol to 3 mL final |
| | volume. Separately, an aqueous buffered solution (20 mM Na Acetate, pH 4.5) |
| | of FLuc, hEPO, micro-dystrophin, mini-dystrophin, or dystrophin circRNA is |
| | prepared from a 1 mg/mL stock. The lipid solution is injected rapidly into the |
| | aqueous circRNA solution and shaken to yield a final suspension in 25% |
| | ethanol. The resulting nanoparticle suspension is filtered, diafiltrated with |
| | 1 × PBS (pH 7.4), concentrated and stored at 2-8° C. |

[1526] In some embodiments, transfer vehicle has a formulation as described in Table 17a.

TABLE 17b

| Composition (mol %) | Components |
|---|---|
| 40:20:38.5:1.5 | Compound:Phospholipid:Phytosterol*:PEG- |
| | DMG |
| 45:15:38.5:1.5 | Compound:Phospholipid:Phytosterol*:PEG- |
| | DMG |
| 50:10:38.5:1.5 | Compound:Phospholipid:Phytosterol*:PEG- |
| | DMG |
| 55:5:38.5:1.5 | Compound:Phospholipid:Phytosterol*:PEG- |
| | DMG |
| 60:5:33.5:1.5 | Compound:Phospholipid:Phytosterol*:PEG- |
| | DMG |
| 45:20:33.5:1.5 | Compound:Phospholipid:Phytosterol*:PEG- |
| | DMG |
| 50:20:28.5:1.5 | Compound:Phospholipid:Phytosterol*:PEG- |
| | DMG |
| 55:20:23.5:1.5 | Compound:Phospholipid:Phytosterol*:PEG- |
| | DMG |
| 60:20:18.5:1.5 | Compound:Phospholipid:Phytosterol*:PEG- |
| | DMG |
| 40:15:43.5:1.5 | Compound:Phospholipid:Phytosterol*:PEG- |
| | DMG |
| 50:15:33.5:1.5 | Compound:Phospholipid:Phytosterol*:PEG- |
| | DMG |
| 55:15:28.5:1.5 | Compound:Phospholipid:Phytosterol*:PEG- |
| | DMG |
| 60:15:23.5:1.5 | Compound:Phospholipid:Phytosterol*:PEG- |
| | DMG |
| 40:10:48.5:1.5 | Compound:Phospholipid:Phytosterol*:PEG- |
| | DMG |
| 45:10:43.5:1.5 | Compound:Phospholipid:Phytosterol*:PEG- |
| | DMG |
| 55:10:33.5:1.5 | Compound:Phospholipid:Phytosterol*:PEG- |
| | DMG |
| 60:10:28.5:1.5 | Compound:Phospholipid:Phytosterol*:PEG- |
| | DMG |
| 40:5:53.5:1.5 | Compound:Phospholipid:Phytosterol*:PEG- |
| | DMG |
| 45:5:48.5:1.5 | Compound:Phospholipid:Phytosterol*:PEG- |
| | DMG |
| 50:5:43.5:1.5 | Compound:Phospholipid:Phytosterol*:PEG- |
| | DMG |
| 40:20:40:0 | Compound:Phospholipid:Phytosterol*:PEG- |
| | DMG |
| 45:20:35:0 | Compound:Phospholipid:Phytosterol*:PEG- |
| | DMG |
| 50:20:30:0 | Compound:Phospholipid:Phytosterol*:PEG- |
| | DMG |
| 55:20:25:0 | Compound:Phospholipid:Phytosterol*:PEG- |
| | DMG |
| 60:20:20:0 | Compound:Phospholipid:Phytosterol*:PEG- |
| | DMG |
| 45:15:45:0 | Compound:Phospholipid:Phytosterol*:PEG- |
| | DMG |

[1527] In some embodiments, transfer vehicle has a formulation as described in Table 17b.

[1528] For nanoparticle compositions including circRNA, solutions of the circRNA at concentrations of 0.1 mg/ml in deionized water are diluted in a buffer, e.g., 50 mM sodium citrate buffer at a pH between 3 and 4 to form a stock solution. Alternatively, solutions of the circRNA at concentrations of 0.15 mg/ml in deionized water are diluted in a buffer, e.g., 6.25 mM sodium acetate buffer at a pH between 3 and 4.5 to form a stock solution.

[1529] Nanoparticle compositions including a circular RNA and a lipid component are prepared by combining the lipid solution with a solution including the circular RNA at lipid component to circRNA wt:wt ratios between about 5:1 and about 50:1. The lipid solution is rapidly injected using, e.g., a NanoAssemblr microfluidic based system at flow rates between about 10 ml/min and about 18 ml/min or between about 5 ml/min and about 18 ml/min into the circRNA solution, to produce a suspension with a water to ethanol ratio between about 1:1 and about 4:1.

[1530] Nanoparticle compositions can be processed by dialysis to remove ethanol and achieve buffer exchange. Formulations are dialyzed twice against phosphate buffered saline (PBS), pH 7.4, at volumes 200 times that of the primary product using Slide-A-Lyzer cassettes (Thermo Fisher Scientific Inc., Rockford, IL) with a molecular weight cutoff of 10 kDa or 20 kDa. The formulations are then dialyzed overnight at 4° C. The resulting nanoparticle suspension is filtered through 0.2 μm sterile filters (Sarstedt, Numbrecht, Germany) into glass vials and sealed with crimp closures. Nanoparticle composition solutions of 0.01 mg/ml to 0.15 mg/ml are generally obtained.

[1531] The method described above induces nano-precipitation and particle formation.

[1532] Alternative processes including, but not limited to, T-junction and direct injection, may be used to achieve the same nano-precipitation. B. Characterization of nanoparticle compositions

[1533] A Zetasizer Nano ZS (Malvern Instruments Ltd, Malvern, Worcestershire, UK) can be used to determine the particle size, the polydispersity index (PDI) and the zeta potential of the nanoparticle compositions in 1×PBS in determining particle size and 15 mM PBS in determining zeta potential.

[1534] Ultraviolet-visible spectroscopy can be used to determine the concentration of circRNA in nanoparticle compositions. 100 μL of the diluted formulation in 1×PBS is added to 900 μL of a 4:1 (v/v) mixture of methanol and chloroform. After mixing, the absorbance spectrum of the solution is recorded, for example, between 230 nm and 330 nm on a DU 800 spectrophotometer (Beckman Coulter, Beckman Coulter, Inc., Brea, CA). The concentration of circRNA in the nanoparticle composition can be calculated based on the extinction coefficient of the circRNA used in the composition and on the difference between the absorbance at a wavelength of, for example, 260 nm and the baseline value at a wavelength of, for example, 330 nm.

[1535] A QUANT-IT™ RIBOGREEN® RNA assay (Invitrogen Corporation Carlsbad, CA) can be used to evaluate the encapsulation of circRNA by the nanoparticle composition. The samples are diluted to a concentration of approximately 5 μg/mL or 1 μg/mL in a TE buffer solution (10 mM Tris-HCl, 1 mM EDTA, pH 7.5). 50 μL of the diluted samples are transferred to a polystyrene 96 well plate and either 50 μL of TE buffer or 50 μL of a 2-4% Triton X-100 solution is added to the wells. The plate is incubated at a temperature of 37° C. for 15 minutes. The RIBOGREEN® reagent is diluted 1:100 or 1:200 in TE buffer, and 100 μL of this solution is added to each well. The fluorescence intensity can be measured using a fluorescence plate reader (Wallac Victor 1420 Multilabel Counter; Perkin Elmer, Waltham, MA) at an excitation wavelength of, for example, about 480 nm and an emission wavelength of, for example, about 520 nm. The fluorescence values of the reagent blank are subtracted from that of each of the samples and the percentage of free circRNA is determined by dividing the fluorescence intensity of the intact sample (without addition of Triton X-100) by the fluorescence value of the disrupted sample (caused by the addition of Triton X-100). C.

### Example 29B: In Vivo Formulation Studies

[1536] In order to monitor how effectively various nanoparticle compositions deliver circRNA to targeted cells, different nanoparticle compositions including circRNA are prepared and administered to rodent populations. Mice are intravenously, intramuscularly, intraarterially, or intratumorally administered a single dose including a nanoparticle composition with a lipid nanoparticle formulation. In some instances, mice may be made to inhale doses. Dose sizes may range from 0.001 mg/kg to 10 mg/kg, where 10 mg/kg describes a dose including 10 mg of a circRNA in a nanoparticle composition for each 1 kg of body mass of the mouse. A control composition including PBS may also be employed.

[1537] Upon administration of nanoparticle compositions to mice, dose delivery profiles, dose responses, and toxicity of particular formulations and doses thereof can be measured by enzyme-linked immunosorbent assays (ELISA), bioluminescent imaging, or other methods. Time courses of protein expression can also be evaluated. Samples collected from the rodents for evaluation may include blood and tissue (for example, muscle tissue from the site of an intramuscular injection and internal tissue); sample collection may involve sacrifice of the animals.

[1538] Higher levels of protein expression induced by administration of a composition including a circRNA will be indicative of higher circRNA translation and/or nanoparticle composition circRNA delivery efficiencies. As the non-RNA components are not thought to affect translational machineries themselves, a higher level of protein expression is likely indicative of a higher efficiency of delivery of the circRNA by a given nanoparticle composition relative to other nanoparticle compositions or the absence thereof.

### Example 30

[1539] Characterization of Nanoparticle Compositions

[1540] A Zetasizer Nano ZS (Malvern Instruments Ltd, Malvern, Worcestershire, UK) can be used to determine the particle size, the polydispersity index (PDI) and the zeta potential of the transfer vehicle compositions in 1×PBS in determining particle size and 15 mM PBS in determining zeta potential.

[1541] Ultraviolet-visible spectroscopy can be used to determine the concentration of a therapeutic and/or prophylactic (e.g., RNA) in transfer vehicle compositions. 100 μL of the diluted formulation in 1×PBS is added to 900 μL of a 4:1 (v/v) mixture of methanol and chloroform. After mixing, the absorbance spectrum of the solution is recorded, for example, between 230 nm and 330 nm on a DU 800 spectrophotometer (Beckman Coulter, Beckman Coulter, Inc., Brea, CA). The concentration of therapeutic and/or prophylactic in the transfer vehicle composition can be calculated based on the extinction coefficient of the therapeutic and/or prophylactic used in the composition and on the difference between the absorbance at a wavelength of, for example, 260 nm and the baseline value at a wavelength of, for example, 330 nm.

[1542] For transfer vehicle compositions including RNA, a QUANT-IT™ RIBOGREEN® RNA assay (Invitrogen Corporation Carlsbad, CA) can be used to evaluate the encapsulation of RNA by the transfer vehicle composition. The samples are diluted to a concentration of approximately g/mL or 1 μg/mL in a TE buffer solution (10 mM Tris-HCl, 1 mM EDTA, pH 7.5). 50 μL of the diluted samples are transferred to a polystyrene 96 well plate and either 50 μL of TE buffer or 50 μL of a 2-4% Triton X-100 solution is added to the wells. The plate is incubated at a temperature of 37° C. for 15 minutes. The RIBOGREEN® reagent is diluted 1:100 or 1:200 in TE buffer, and 100 μL of this solution is added to each well. The fluorescence intensity can be measured using a fluorescence plate reader (Wallac Victor 1420 Multilablel Counter; Perkin Elmer, Waltham, MA) at an excitation wavelength of, for example, about 480 nm and an emission wavelength of, for example, about 520 nm. The fluorescence values of the reagent blank are subtracted from that of each of the samples and the percentage of free RNA is determined by dividing the fluorescence intensity of the intact sample (without addition of Triton X-100) by the fluorescence value of the disrupted sample (caused by the addition of Triton X-100).

### Example 31

[1543] T Cell Targeting

[1544] To target transfer vehicles to T-cells, T cell antigen binders, e.g., anti-CD8 antibodies, are coupled to the surface of the transfer vehicle. Anti-T cell antigen antibodies are mildly reduced with an excess of DTT in the presence of EDTA in PBS to expose free hinge region thiols. To remove DTT, antibodies are passed through a desalting column. The heterobifunctional cross-linker SM(PEG)24 is used to anchor antibodies to the surface of circRNA-loaded transfer vehicles (Amine groups are present in the head groups of PEG lipids, free thiol groups on antibodies were created by DTT, SM(PEG)24 cross-links between amines and thiol groups). Transfer vehicles are first incubated with an excess of SM(PEG)24 and centrifuged to remove unreacted cross-linker. Activated transfer vehicles are then incubated with an excess of reduced anti-T cell antigen antibody. Unbound antibody is removed using a centrifugal filtration device.

### Example 32

[1545] RNA Containing Transfer Vehicle Using RV88.

[1546] In this example RNA containing transfer vehicles are synthesized using the 2-D vortex microfluidic chip with the cationic lipid RV88 for delivery of circRNA.

[chemical structure]

TABLE 18a

| Materials and Instrument | Vendor | Cat # |
|---|---|---|
| 1M Tris-HCl, pH 6.0, Sterile | Teknova | T1080 |
| 5M Sodium Chloride solution | Teknova | S0250 |
| QB Citrate buffer, pH 6.0 | Teknova | Q2446 |
| (100 mM) | | |
| Nuclease-free water | Ambion | AM9937 |
| Triton X-100 | Sigma-Aldrich | T8787-100ML |
| RV88 | GVK bio | |
| DSPC | Lipoid | 556500 |
| Cholesterol | Sigma | C3045-5G |
| PEG2K | Avanti Polar Lipids | 880150 |
| Ethanol | Acros Organic | 615090010 |
| 5 mL Borosilicate glass vials | Thermo Scientific | ST5-20 |
| PD MiniTrap G-25 Desalting | GE Healthcare | VWR Cat. |
| Columns | | #95055-984 |
| Quant-iT RiboGreen RNA | Molecular Probes/Life | R11490 |
| Assay kit | Technologies | |
| Black 96-well microplates | Greiner | 655900 |

[1547] RV88, DSPC, and cholesterol all being prepared in ethanol at a concentration of 10 mg/ml in borosilica vials. The lipid 14:0-PEG2K PE is prepared at a concentration of 4 mg/ml also in a borosilica glass vial. Dissolution of lipids at stock concentrations is attained by sonication of the lipids in ethanol for 2 min. The solutions are then heated on an orbital tilting shaker set at 170 rpm at 37° C. for 10 min. Vials are then equilibrated at 26° C. for a minimum of 45 min. The lipids are then mixed by adding volumes of stock lipid as shown in Table 18b. The solution is then adjusted with ethanol such that the final lipid concentration was 7.92 mg/ml.

TABLE 18b

| | | | | | Stock | | Ethanol |
|---|---|---|---|---|---|---|---|
| Composition | MW | % | nmoles | mg | (mg/ml) | ul | (ul) |
| RV88 | 794.2 | 40% | 7200 | 5.72 | 10 | 571.8 | 165.3 |
| DSPC | 790.15 | 10% | 1800 | 1.42 | 10 | 142.2 | |
| Cholesterol | 386.67 | 48% | 8640 | 3.34 | 10 | 334.1 | |
| PEG2K | 2693.3 | 2% | 360 | 0.97 | 4 | 242.4 | |

[1548] RNA is prepared as a stock solution with 75 mM Citrate buffer at pH 6.0 and a concentration of RNA at 1.250 mg/ml. The concentration of the RNA is then adjusted to 0.1037 mg/ml with 75 mM citrate buffer at pH 6.0, equilibrated to 26° C. The solution is then incubated at 26° C. for a minimum of 25 min.

[1549] The microfluidic chamber is cleaned with ethanol and neMYSIS syringe pumps are prepared by loading a syringe with the RNA solution and another syringe with the ethanolic lipid. Both syringes are loaded and under the control of neMESYS software. The solutions are then applied to the mixing chip at an aqueous to organic phase ratio of 2 and a total flow rate of 22 ml/min (14.67 ml/min for RNA and 7.33 ml/min for the lipid solution. Both pumps are started synchronously. The mixer solution that flowed from the microfluidic chip is collected in 4×1 ml fractions with the first fraction being discarded as waste. The remaining solution containing the RNA-liposomes is exchanged by using G-25 mini desalting columns to 10 mM Tris-HCl, 1 mM EDTA, at pH 7.5. Following buffer exchange, the materials are characterized for size, and RNA entrapment through DLS analysis and Ribogreen assays, respectively.

### Example 33

[1550] RNA Containing Transfer Vehicle Using RV94.

[1551] In this example, RNA containing liposome are synthesized using the 2-D vortex microfluidic chip with the cationic lipid RV94 for delivery of circRNA.

[chemical structure]

TABLE 19

| Materials and Instrument | Vendor | Cat # |
|---|---|---|
| 1M Trs-HCl, pH 6.0, Sterile | Teknova | T1080 |
| SM Sodium Chloride solution | Teknova | S0250 |
| QB Citrate buffer, pH 6.0 | Teknova | Q2446 |
| (100 mM) | | |
| Nuclease-free water | Ambion | AM9937 |
| Triton X-100 | Sigma-Aldrich | T8787-100ML |
| RV94 | GVKbio | |
| DSPC | Lipoid | 556500 |
| Cholesterol | Sigma | C3045-5G |
| PEG2K | Avanti Polar Lipids | 880150 |
| Ethanol | Acros Organic | 615090010 |
| 5 mL Borosilicate glass vials | Thermo Scientific | ST5-20 |
| PD MiniTrap G-25 Desalting | GE Healthcare | VWR Cat |
| Columns | | #95055-984 |
| Quant-iT RiboGreen RNA | Molecular Probes/Life | R11490 |
| Assay kit | Technologies | |
| Black 96-well microplates | Greiner | 655900 |

[1552] The lipids were prepared as in Example 32 using the material amounts named in Table 19 to a final lipid concentration of 7.92 mg/ml.

TABLE 20

| | | | | | Stock | | Ethanol |
|---|---|---|---|---|---|---|---|
| Composition | MW | % | nmoles | mg | (mg/ml) | ul | (ul) |
| RV94 | 808.22 | 40% | 2880 | 2.33 | 10 | 232.8 | 155.3 |
| DSPC | 790.15 | 10% | 720 | 0.67 | 10 | 56.9 | |
| Cholesterol | 386.67 | 48% | 3456 | 1.34 | 10 | 133.6 | |
| PEG2K | 2693.3 | 2% | 144 | 0.39 | 4 | 97.0 | |

[1553] The aqueous solution of circRNA is prepared as a stock solution with 75 mM Citrate buffer at pH 6.0 the circRNA at 1 0.250 mg/ml. The concentration of the RNA is then adjusted to 0.1037 mg/ml with 75 mM citrate buffer at pH 6.0, equilibrated to 26° C. The solution is then incubated at 26° C. for a minimum of 25 min.

[1554] The microfluidic chamber is cleaned with ethanol and neMYSIS syringe pumps are prepared by loading a syringe with the RNA solution and another syringe with the ethanolic lipid. Both syringes are loaded and under the control of neMESYS software. The solutions are then applied to the mixing chip at an aqueous to organic phase ratio of 2 and a total flow rate of 22 ml/min (14.67 ml/min for RNA and 7.33 ml/min for the lipid solution. Both pumps are started synchronously. The mixer solution that flowed from the microfluidic chip is collected in 4×1 ml fractions with the first fraction being discarded as waste. The remaining solution containing the circRNA-transfer vehicles is exchanged by using G-25 mini desalting columns to 10 mM Tris-HCl, 1 mM EDTA, at pH 7.5, as described above. Following buffer exchange, the materials are characterized for size, and RNA entrapment through DLS analysis and Ribogreen assays, respectively. The biophysical analysis of the liposomes is shown in Table 21.

TABLE 21

| | | | | RNA | RNA | | |
|---|---|---|---|---|---|---|---|
| | | | Ratio | encapsulation | encapsulation | | |
| Sample | N:P | TFR | (aqueous/ | amount | yield | size | |
| Name | Ratio | ml/min | org phase) | (μg/ml) | % | d · nm | PDI |
| SAM- | 8 | 22 | 2 | 31.46 | 86.9 | 113.1 | 0.12 |
| RV94 | | | | | | | |

### Example 34

[1555] General Protocol for in Line Mixing.

[1556] Individual and separate stock solutions are prepared—one containing lipid and the other circRNA. Lipid stock containing a desired lipid or lipid mixture, DSPC, cholesterol and PEG lipid is prepared by solubilized in 90% ethanol. The remaining 10% is low pH citrate buffer. The concentration of the lipid stock is 4 mg/mL. The pH of this citrate buffer can range between pH 3 and pH 5, depending on the type of lipid employed. The circRNA is also solubilized in citrate buffer at a concentration of 4 mg/mL. 5 mL of each stock solution is prepared.

[1557] Stock solutions are completely clear and lipids are ensured to be completely solubilized before combining with circRNA. Stock solutions may be heated to completely solubilize the lipids. The circRNAs used in the process may be unmodified or modified oligonucleotides and may be conjugated with lipophilic moieties such as cholesterol.

[1558] The individual stocks are combined by pumping each solution to a T-junction. A dual-head Watson-Marlow pump was used to simultaneously control the start and stop of the two streams. A 1.6 mm polypropylene tubing is further downsized to 0.8 mm tubing in order to increase the linear flow rate. The polypropylene line (ID=0.8 mm) are attached to either side of a T-junction. The polypropylene T has a linear edge of 1.6 mm for a resultant volume of 4.1 mm³. Each of the large ends (1.6 mm) of polypropylene line is placed into test tubes containing either solubilized lipid stock or solubilized circRNA. After the T-junction, a single tubing is placed where the combined stream exited. The tubing is then extended into a container with 2x volume of PBS, which is rapidly stirred. The flow rate for the pump is at a setting of 300 rpm or 110 mL/min. Ethanol is removed and exchanged for PBS by dialysis. The lipid formulations are then concentrated using centrifugation or diafiltration to an appropriate working concentration.

[1559] C57BL/6 mice (Charles River Labs, MA) receive either saline or formulated circRNA via tail vein injection. At various time points after administration, serum samples are collected by retroorbital bleed. Serum levels of Factor VII protein are determined in samples using a chromogenic assay (Biophen FVTI, Aniara Corporation, OH). To determine liver RNA levels of Factor VII, animals are sacrificed and livers are harvested and snap frozen in liquid nitrogen. Tissue lysates are prepared from the frozen tissues and liver RNA levels of Factor VII are quantified using a branched DNA assay (QuantiGene Assay, Panomics, CA).

[1560] FVII activity is evaluated in FVTI siRNA-treated animals at 48 hours after intravenous (bolus) injection in C57BL/6 mice. FVII is measured using a commercially available kit for determining protein levels in serum or tissue, following the manufacturer's instructions at a microplate scale. FVII reduction is determined against untreated control mice, and the results are expressed as % Residual FVII. Two dose levels (0.05 and 0.005 mg/kg FVII siRNA) are used in the screen of each novel liposome composition.

### Example 36

[1561] circRNA Formulation Using Preformed Vesicles.

[1562] Cationic lipid containing transfer vehicles are made using the preformed vesicle method. Cationic lipid, DSPC, cholesterol and PEG-lipid are solubilized in ethanol at a molar ratio of 40/10/40/10, respectively. The lipid mixture is added to an aqueous buffer (50 mM citrate, pH 4) with mixing to a final ethanol and lipid concentration of 30% (vol/vol) and 6.1 mg/mL respectively and allowed to equilibrate at room temperature for 2 min before extrusion. The hydrated lipids are extruded through two stacked 80 nm pore-sized filters (Nuclepore) at 22° C. using a Lipex Extruder (Northern Lipids, Vancouver, BC) until a vesicle diameter of 70-90 nm, as determined by Nicomp analysis, is obtained. For cationic lipid mixtures which do not form small vesicles, hydrating the lipid mixture with a lower pH buffer (50 mM citrate, pH 3) to protonate the phosphate group on the DSPC headgroup helps form stable 70-90 nm vesicles.

[1563] The FVII circRNA (solubilised in a 50 mM citrate, pH 4 aqueous solution containing 30% ethanol) is added to the vesicles, pre-equilibrated to 35° C., at a rate of −5 mL/min with mixing. After a final target circRNA/lipid ratio of 0.06 (wt wt) is achieved, the mixture is incubated for a further 30 min at 35° C. to allow vesicle re-organization and encapsulation of the FVII RNA. The ethanol is then removed and the external buffer replaced with PBS (155 mM NaCl, 3 mM Na2HP04, ImM KH2P04, pH 7.5) by either dialysis or tangential flow diafiltration. The final encapsulated circRNA-to-lipid ratio is determined after removal of unencapsulated RNA using size-exclusion spin columns or ion exchange spin columns.

### Example 37

### Example 37A: Expression of Trispecific Antigen Binding Proteins from Engineered Circular RNA

[1564] Circular RNAs are designed to include: (1) a 3′ post splicing group I intron fragment; (2) an Internal R1bosome Entry Site (IRES); (3) a trispecific antigen-binding protein coding region; and (4) a 3′ homology region. The trispecific antigen-binding protein regions are constructed to produce an exemplary trispecific antigen-binding protein that will bind to a target antigen, e.g., GPC3.

### Example 37B: Generation of a scFv CD3 Binding Domain

[1565] The human CD3epsilon chain canonical sequence is Uniprot Accession No. P07766. The human CD3gamma chain canonical sequence is Uniprot Accession No. P09693. The human CD3delta chain canonical sequence is Uniprot Accession No. P043234. Antibodies against CD3epsilon, CD3gamma or CD3delta are generated via known technologies such as affinity maturation. Where murine anti-CD3 antibodies are used as a starting material, humanization of murine anti-CD3 antibodies is desired for the clinical setting, where the mouse-specific residues may induce a human-anti-mouse antigen (HAMA) response in subjects who receive treatment of a trispecific antigen-binding protein described herein. Humanization is accomplished by grafting CDR regions from murine anti-CD3 antibody onto appropriate human germline acceptor frameworks, optionally including other modifications to CDR and/or framework regions.

[1566] Human or humanized anti-CD3 antibodies are therefore used to generate scFv sequences for CD3 binding domains of a trispecific antigen-binding protein. DNA sequences coding for human or humanized VL and VH domains are obtained, and the codons for the constructs are, optionally, optimized for expression in cells from Homo sapiens. The order in which the VL and VH domains appear in the scFv is varied (i.e. VL-VH, or VH-VL orientation), and three copies of the “G4S” or “G₄S” subunit (G₄S)₃ connect the variable domains to create the scFv domain. Anti-CD3 scFv plasmid constructs can have optional Flag, His or other affinity tags, and are electroporated into HEK293 or other suitable human or mammalian cell lines and purified. Validation assays include binding analysis by FACS, kinetic analysis using Proteon, and staining of CD3-expressing cells.

### Example 37C: Generation of a scFv Glypican-3 (GPC3) Binding Domain

[1567] Glypican-3 (GPC3) is one of the cell surface proteins present on Hepatocellular Carcinoma but not on healthy normal liver tissue. It is frequently observed to be elevated in hepatocellular carcinoma and is associated with poor prognosis for HCC patients. It is known to activate Wnt signalling. GPC3 antibodies have been generated including MDX-1414, HN3, GC33, and YP7.

[1568] A scFv binding to GPC-3 or another target antigen is generated similarly to the above method for generation of a scFv binding domain to CD3.

### Example 37D: Expression of Trispecific Antigen-Binding Proteins In Vitro

[1569] A CHO cell expression system (Flp-In®, Life Technologies), a derivative of CHO-K1 Chinese Hamster ovary cells (ATCC, CCL-61) (Kao and Puck, Proc. Natl. Acad Sci USA 1968; 60(4):1275-81), is used. Adherent cells are subcultured according to standard cell culture protocols provided by Life Technologies.

[1570] For adaption to growth in suspension, cells are detached from tissue culture flasks and placed in serum-free medium. Suspension-adapted cells are cryopreserved in medium with 10% DMSO.

[1571] Recombinant CHO cell lines stably expressing secreted trispecific antigen-binding proteins are generated by transfection of suspension-adapted cells. During selection with the antibiotic Hygromycin B viable cell densities are measured twice a week, and cells are centrifuged and resuspended in fresh selection medium at a maximal density of 0.1×10⁶ viable cells/mL. Cell pools stably expressing trispecific antigen-binding proteins are recovered after 2-3 weeks of selection at which point cells are transferred to standard culture medium in shake flasks. Expression of recombinant secreted proteins is confirmed by performing protein gel electrophoresis or flow cytometry. Stable cell pools are cryopreserved in DMSO containing medium.

[1572] Trispecific antigen-binding proteins are produced in 10-day fed-batch cultures of stably transfected CHO cell lines by secretion into the cell culture supernatant. Cell culture supernatants are harvested after 10 days at culture viabilities of typically >75%. Samples are collected from the production cultures every other day and cell density and viability are assessed. On day of harvest, cell culture supernatants are cleared by centrifugation and vacuum filtration before further use.

[1573] Protein expression titers and product integrity in cell culture supernatants are analyzed by SDS-PAGE.

### Example 37E: Purification of Trispecific Antigen-Binding Proteins

[1574] Trispecific antigen-binding proteins are purified from CHO cell culture supernatants in a two-step procedure. The constructs are subjected to affinity chromatography in a first step followed by preparative size exclusion chromatography (SEC) on Superdex 200 in a second step. Samples are buffer-exchanged and concentrated by ultrafiltration to a typical concentration of >1 mg/mL Purity and homogeneity (typically >90%) of final samples are assessed by SDS PAGE under reducing and non-reducing conditions, followed by immunoblotting using an anti-(half-life extension domain) or anti idiotype antibody as well as by analytical SEC, respectively. Purified proteins are stored at aliquots at −80° C. until use.

### Example 38

[1575] Expression of Engineered Circular RNA with a Half-Life Extension Domain has Improved Pharmacokinetic Parameters than without a Half-Life Extension Domain

[1576] The trispecific antigen-binding protein encoded on a circRNA molecule of example 23 is administered to cynomolgus monkeys as a 0.5 mg/kg bolus injection intramuscularly. Another cynomolgus monkey group receives a comparable protein encoded on a circRNA molecule in size with binding domains to CD3 and GPC-3, but lacking a half-life extension domain. A third and fourth group receive a protein encoded on a circRNA molecule with CD3 and half-life extension domain binding domains and a protein with GPC-3 and half-life extension domains, respectively. Both proteins encoded by circRNA are comparable in size to the trispecific antigen-binding protein. Each test group consists of 5 monkeys. Serum samples are taken at indicated time points, serially diluted, and the concentration of the proteins is determined using a binding ELISA to CD3 and/or GPC-3.

[1577] Pharmacokinetic analysis is performed using the test article plasma concentrations. Group mean plasma data for each test article conforms to a multi-exponential profile when plotted against the time post-dosing. The data are fit by a standard two-compartment model with bolus input and first-order rate constants for distribution and elimination phases. The general equation for the best fit of the data for i.v. administration is: c(t)=Ae^{˜at}+Be^{˜pt}, where c(t) is the plasma concentration at time t, A and B are intercepts on the Y-axis, and α and β are the apparent first-order rate constants for the distribution and elimination phases, respectively. The a-phase is the initial phase of the clearance and reflects distribution of the protein into all extracellular fluid of the animal, whereas the second or β-phase portion of the decay curve represents true plasma clearance. Methods for fitting such equations are well known in the art. For example, A=D/V(a−k21)/(a−p), B=D/V(p−k21)/(a−p), and α and β (for α>β) are roots of the quadratic equation: r²+(k12+k21+k10)r+k21k10=0 using estimated parameters of V=volume of distribution, k10=elimination rate, k12=transfer rate from compartment 1 to compartment 2 and k21=transfer rate from compartment 2 to compartment 1, and D=the administered dose.

[1578] Data analysis: Graphs of concentration versus time profiles are made using KaleidaGraph (KaleidaGraph™ V. 3.09 Copyright 1986-1997. Synergy Software. Reading, Pa.). Values reported as less than reportable (LTR) are not included in the PK analysis and are not represented graphically. Pharmacokinetic parameters are determined by compartmental analysis using WinNonlin software (WinNonlin® Professional V. 3.1 WinNonlin™ Copyright 1998-1999. Pharsight Corporation. Mountain View, Calif). Pharmacokinetic parameters are computed as described in Ritschel W A and Kearns G L, 1999, EST: Handbook Of Basic Pharmacokinetics Including Clinical Applications, 5th edition, American Pharmaceutical Assoc., Washington, D C.

[1579] It is expected that the trispecific antigen-binding protein encoded on a circRNA molecule of Example 23 has improved pharmacokinetic parameters such as an increase in elimination half-time as compared to proteins lacking a half-life extension domain.

### Example 39

[1580] Cytotoxicity of the Trispecific Antigen-Binding Protein

[1581] The trispecific antigen-binding protein encoded on a circRNA molecule of Example 23 is evaluated in vitro on its mediation of T cell dependent cytotoxicity to GPC-3+ target cells.

[1582] Fluorescence labeled GPC3 target cells are incubated with isolated PBMC of random donors or T-cells as effector cells in the presence of the trispecific antigen-binding protein of Example 23. After incubation for 4 h at 37° C. in a humidified incubator, the release of the fluorescent dye from the target cells into the supernatant is determined in a spectrofluorimeter. Target cells incubated without the trispecific antigen-binding protein of Example 23 and target cells totally lysed by the addition of saponin at the end of the incubation serve as negative and positive controls, respectively.

[1583] Based on the measured remaining living target cells, the percentage of specific cell lysis is calculated according to the following formula: [1-(number of living targets(sample)/number of living targets(spontaneous))] x 100%. Sigmoidal dose response curves and EC50 values are calculated by non-linear regression/4-parameter logistic fit using the GraphPad Software. The lysis values obtained for a given antibody concentration are used to calculate sigmoidal dose-response curves by 4 parameter logistic fit analysis using the Prism software.

### Example 40

[1584] Synthesis of Ionizable Lipids

### 40.1 Synthesis of ((3-(2-methyl-1H-imidazol-1-yl)propyl)azanediyl)bis(hexane-6,l-diyl) bis(2-hexyldecanoate)(Lipid 10a-27) and ((3-(1H-imidazol-1-yl)propyl)azanediyl)bis(hexane-6,1-diyl) bis(2-hexyldecanoate)) (Lipid 10a-26)

[1585] In a 100 mL round bottom flask connected with condenser, 3-(1H-imidazol-1-yl)propan-1-amine (100 mg, 0.799 mmol) or 3-(2-methyl-1H-imidazol-1-yl)propan-1-amine (0.799 mmol), 6-bromohexyl 2-hexyldecanoate (737.2 mg, 1.757 mmol), potassium carbonate (485 mg, 3.515 mmol) and potassium iodide (13 mg, 0.08 mmol) were mixed in acetonitrile (30 mL), and the reaction mixture was heated to 80° C. for 48 h. The mixture was cooled to room temperature and was filtered through a pad of Celite. The filtrate was diluted with ethyl acetate. After washing with water, brine and dried over anhydrous sodium sulfate. The solvent was evaporated and the crude residue was purified by flash chromatography (SiO₂: CH₂Cl₂=100% to 10% of methanol in CH₂Cl₂) and colorless oil product was obtained (92 mg, 15%). Molecular formula of ((3-(1H-imidazol-1-yl)propyl)azanediyl)bis(hexane-6,1-diyl) bis(2-hexyldecanoate)) is C₅₀H₉₅N₃O₄ and molecular weight (M_{w}) is 801.7.

[1586] Reaction scheme for synthesis of ((3-(1H-imidazol-1-yl)propyl)azanediyl)bis(hexane-6,1-diyl) bis(2-hexyldecanoate)) (Lipid 10a-26).

[chemical structure]

[1587] Characterization of Lipid 10a-26 was performed by LC-MS. FIG. 27A-C shows characterization of Lipid 10a-26. FIG. 27A shows the proton NMR observed for Lipid 10a-26. FIG. 27B is a representative LC/MS trace for Lipid 10a-26 with total ion and UV chromatograms shown.

### 40.2 Synthesis of Lipid 22-S14

### 40.2.1 Synthesis of 2-(tetradecylthio)ethan-1-ol

[1588] To a mixture of 2-sulfanylethanol (5.40 g, 69.11 mmol, 4.82 mL, 0.871 eq) in acetonitrile (200 mL) was added 1-Bromotetradecane(22 g, 79.34 mmol, 23.66 mL, 1 eq) and potassium carbonate (17.55 g, 126.95 mmol, 1.6 eq) at 25° C. The reaction mixture was warmed to 40° C. and stirred for 12 hr. TLC (ethyl acetate/petroleum ether=25/1, R_{f}=0.3, stained by I2) showed the starting material was consumed completely and a new main spot was generated. The reaction mixture was filtered and the filter cake was washed with acetonitrile (50 mL) and then the filtrate was concentrated under vacuum to get a residue which was purified by column on silica gel (ethyl acetate/petroleum ether=1/100 to 1/25) to afford 2-(tetradecylthio)ethan-1-ol (14 g, yield 64.28%) as a white solid.

[1589] ¹H NMR (ET36387-45-P1A, 400 MHz, CHLOROFORM-d) δ 0.87-0.91 (m, 3H) 1.27 (s, 20H) 1.35-1.43 (m, 2H) 1.53-1.64 (m, 2H) 2.16 (br s, 1H) 2.49-2.56 (m, 2H) 2.74 (t, J=5.93 Hz, 2H) 3.72 (br d, J=4.89 Hz, 2H). FIG. 28 shows corresponding Nuclear Magnetic Resonance (NMR) spectrum.

### 40.2.2 Synthesis of 2-(tetradecylthio)ethyl acrylate

[1590] To a solution of 2-(tetradecylthio)ethan-1-ol (14 g, 51.00 mmol, 1 eq) in dichloromethane (240 mL) was added triethylamine (7.74 g, 76.50 mmol, 10.65 mL, 1.5 eq) and prop-2-enoyl chloride (5.54 g, 61.20 mmol, 4.99 mL, 1.2 eq) dropwise at 0° C. under nitrogen. The reaction mixture was warmed to 25° C. and stirred for 12 hr. TLC (ethyl acetate/petroleum ether=25/1, Rf=0.5, stained by 12) showed the starting material was consumed completely and a new main spot was generated. The reaction solution was concentrated under vacuum to get crude which was purified by column on silica gel (ethyl acetate/petroleum ether=1/100 to 1/25) to afford 2-(tetradecylthio)ethyl acrylate (12 g, yield 71.61%) as a colorless oil.

[1591] ¹H NMR (ET36387-49-P1A, 400 MHz, CHLOROFORM-d) δ 0.85-0.93 (m, 3H) 1.26 (s, 19H) 1.35-1.43 (m, 2H) 1.53-1.65 (m, 2H) 2.53-2.62 (m, 2H) 2.79 (t, J=7.03 Hz, 2H) 4.32 (t, J=7.03 Hz, 2H) 5.86 (dd, J=10.39, 1.47 Hz, 1H) 6.09-6.19 (m, 1H) 6.43 (dd, J=17.30, 1.41 Hz, 1H). FIG. 29 shows corresponding Nuclear Magnetic Resonance (NMR) spectrum.

### 40.2.3 Synthesis of bis(2-(tetradecylthio)ethyl) 3,3′-((3-(2-methyl-1H-imidazol-1-yl)propyl)azanediyl)dipropionate (Lipid 22-S14)

[1592] A flask was charged with 3-(2-methyl-1H-imidazol-1-yl)propan-1-amine (300 mg, 2.16 mmol) and 2-(tetradecylthio)ethyl acrylate (1.70 g, 5.17 mmol). The neat reaction mixture was heated to 80° C. and stirred for 48 hr. TLC (ethyl acetate, R^{f}=0.3, stained by 12, one drop ammonium hydroxide added) showed the starting material was consumed completely and a new main spot was formed. The reaction mixture was diluted with dichloromethane (4 mL) and purified by column on silica gel (petroleum ether/ethyl acetate=3/1 to 0/1, 0.1% ammonium hydroxide added) to get bis(2-(tetradecylthio)ethyl) 3,3′-((3-(2-methyl-1H-imidazol-1-yl)propyl)azanediyl)dipropionate (501 mg, yield 29.1%) as colorless oil.

[1593] ¹H NMR (ET36387-51-P1A, 400 MHz, CHLOROFORM-d) δ 0.87 (t, J=6.73 Hz, 6H) 1.25 (s, 40H) 1.33-1.40 (m, 4H) 1.52-1.61 (m, 4H) 1.81-1.90 (m, 2H) 2.36 (s, 3H) 2.39-2.46 (m, 6H) 2.53 (t, J=7.39 Hz, 4H) 2.70-2.78 (m, 8H) 3.84 (t, J=7.17 Hz, 2H) 4.21 (t, J=6.95 Hz, 4H) 6.85 (s, 1H) 6.89 (s, 1H). FIG. 30 shows corresponding Nuclear Magnetic Resonance (NMR) spectrum.

### 40.3 Synthesis of bis(2-(tetradecylthio)ethyl) 3,3′-((3-(1H-imidazol-1-yl)propyl)azanediyl)dipropionate (Lipid 93-S14)

[1594] A flask was charged with 3-(1H-imidazol-1-yl)propan-1-amine (300 mg, 2.40 mmol, 1 eq) and 2-(tetradecylthio)ethyl acrylate (1.89 g, 5.75 mmol, 2.4 eq). The neat reaction mixture was heated to 80° C. and stirred for 48 hr. TLC (ethyl acetate, R_{f}=0.3, stained by 12, one drop ammonium hydroxide added) showed the starting material was consumed completely and a new main spot was formed. The reaction mixture was diluted with dichloromethane (4 mL) and purified by column on silica gel (petroleum ether/ethyl acetate=1/20-0/100, 0.1% ammonium hydroxide added) to get bis(2-(tetradecylthio)ethyl) 3,3′-((3-(1H-imidazol-1-yl)propyl)azanediyl)dipropionate (512 mg, yield 27.22%) as colorless oil.

[1595] ¹H NMR (ET36387-54-P1A, 400 MHz, CHLOROFORM-d) δ 0.89 (t, J=6.84 Hz, 6H) 1.26 (s, 40H) 1.34-1.41 (m, 4H) 1.58 (br t, J=7.50 Hz, 4H) 1.92 (t, J=6.62 Hz, 2H) 2.36-2.46 (m, 6H) 2.55 (t, J=7.50 Hz, 4H) 2.75 (q, J=6.84 Hz, 8H) 3.97 (t, J=6.95 Hz, 2H) 4.23 (t, J=6.95 Hz, 4H) 6.95 (s, 1H) 7.06 (s, 1H) 7.51 (s, 1H). FIG. 31 shows corresponding Nuclear Magnetic Resonance (NMR) spectrum.

### 40.4 Synthesis of heptadecan-9-yl 8-((3-(2-methyl-1H-imidazol-1-yl)propyl)(8-(nonyloxy)-8-oxooctyl)amino)octanoate (Lipid 10a-54)

### 40.4.1 Synthesis of nonyl 8-bromooctanoate (3)

[chemical structure]

[1597] To a mixture of 8-bromooctanoic acid (2) (18.6 g, 83.18 mmol) and nonan-1-ol (1) (10 g, 69.32 mmol) in CH₂Cl₂ (500 mL) was added DMAP (1.7 g, 13.86 mmol), DIPEA (48 mL, 277.3 mmol) and EDC (16 g, 83.18 mmol). The reaction was stirred at room temperature overnight. After concentration of the reaction mixture, the crude residue was dissolved in ethyl acetate (500 mL), washed with 1N HCl, sat. NaHCO₃, water and Brine. The organic layer was dried over anhydrous Na₂SO₄. The solvent was evaporated and the crude residue was purified by flash chromatography (SiO₂: Hexane=100% to 30% of EtOAc in Hexane) and colorless oil product 3 was obtained (9 g, 37%).

### 40.4.2 Synthesis of heptadecan-9-yl 8-bromooctanoate (5)

[chemical structure]

[1599] To a mixture of 8-bromooctanoic acid (2) (10 g, 44.82 mmol) and heptadecan-9-ol (4) (9.6 g, 37.35 mmol) in CH₂Cl₂ (300 mL) was added DMAP (900 mg, 7.48 mmol), DIPEA (26 mL, 149.7 mmol) and EDC (10.7 g, 56.03 mmol). The reaction was stirred at room temperature overnight. After concentration of the reaction mixture, the crude residue was dissolved in ethyl acetate (300 mL), washed with 1N HCl, sat. NaHCO₃, water and Brine. The organic layer was dried over anhydrous Na₂SO₄. The solvent was evaporated and the crude residue was purified by flash chromatography (SiO₂: Hexane=100% to 30% of EtOAc in Hexane) and colorless oil product 5 was obtained (5 g, 29%).

[1600] ¹H NMR (300 MHz, CDCl₃): δ ppm 4.86 (m, 1H), 3.39 (t, J=7.0 Hz, 2H), 2.27 (t, J=7.6 Hz, 2H), 1.84 (m, 2H), 1.62 (m, 2H), 1.5-1.4 (m, 8H), 1.35-1.2 (m, 26H) 0.87 (t, J=6.7 Hz, 6H).

### 40.4.3 Synthesis of heptadecan-9-yl 8-((3-(2-methyl-1H-imidazol-1-yl)propyl)amino)octanoate (7)

[chemical structure]

[1602] In a 100 mL round bottom flask connected with condenser, heptadecan-9-yl 8-bromooctanoate (5) (860 mg, 1.868 mmol) and 3-(2-methyl-1H-imidazol-1-yl)propan-1-amine (6) (1.3 g, 9.339 mmol) were mixed in ethanol (10 mL). The reaction mixture was heated to reflux overnight. MS (APCI) showed the expected product. The mixture was cooled to room temperature and concentrated. The crude residue was purified by flash chromatography (SiO₂: CH₂Cl₂=100% to 10% of methanol+1% NH₄OH in CH₂Cl₂) and colorless oil product 7 was obtained (665 mg, 69%).

### 40.4.4 Synthesis of heptadecan-9-yl 8-((3-(2-methyl-1H-imidazol-1-yl)propyl)(8-(nonyloxy)-8-oxooctyl)amino)octanoate (Lipid 10a-54)

[chemical structure]

[1604] In a 100 mL round bottom flask connected with condenser, heptadecan-9-yl 8-((3-(2-methyl-1H-imidazol-1-yl)propyl)amino)octanoate (7) (665 mg, 1.279 mmol) and nonyl 8-bromooctanoate (3) (536 mg, 1.535 mmol) were mixed in ethanol (10 mL), then DIPEA (0.55 mL, 3.198 mmol) was added. The reaction mixture was heated to reflux overnight. Both MS (APCI) and TLC (10% MeOH+1% NH₄OH in CH₂Cl₂) showed the product and some unreacted starting material. The mixture was cooled to room temperature and concentrated. The crude residue was purified by flash chromatography (SiO₂: CH₂Cl₂=100% to 10% of methanol+1% NH₄OH in CH₂C₁₂) and colorless oil was obtained (170 mg, 17%).

### 40.5 Synthesis of heptadecan-9-yl 8-((3-(1H-imidazol-1-yl)propyl)(8-(nonyloxy)-8-oxooctyl)amino)octanoate (Lipid 10a-53)

[chemical structure]

[1606] Lipid 10a-53 is synthesized according to the scheme above. Reaction conditions are identical to Lipid 10a-54 with the exception of 3-(1H-imidazol-1-yl)propan-1-amine as the imidazole amine.

### 40.6 Synthesis of Heptadecan-9-yl 8-((3-(1H-imidazol-1-yl)propyl)(8-(nonyloxy)-8-oxooctyl)amino)octanoate (Lipid 10a-45)

### 40.6.1 Synthesis of heptadecan-9-yl 8-bromooctanoate (3)

[chemical structure]

[1608] To a mixture of 8-bromooctanoic acid (2) (10 g, 44.82 mmol) and heptadecan-9-ol (1) (9.6 g, 37.35 mmol) in CH₂Cl₂ (300 mL) was added DMAP (900 mg, 7.48 mmol), DIPEA (26 mL, 149.7 mmol) and EDC (10.7 g, 56.03 mmol). The reaction was stirred at room temperature overnight. After concentration of the reaction mixture, the crude residue was dissolved in ethyl acetate (300 mL), washed with 1N HCl, sat. NaHCO₃, water and Brine. The organic layer was dried over anhydrous Na₂SO₄. The solvent was evaporated and the crude residue was purified by flash chromatography (SiO₂: Hexane=100% to 30% of EtOAc in Hexane) and colorless oil product 3 was obtained (5 g, 29%).

[1609] ¹H NMR (300 MHz, CDCl₃): δ ppm 4.86 (m, 1H), 3.39 (t, J=7.0 Hz, 2H), 2.27 (t, J=7.6 Hz, 2H), 1.84 (m, 2H), 1.62 (m, 2H), 1.5-1.4 (m, 8H), 1.35-1.2 (m, 26H) 0.87 (t, J=6.7 Hz, 6H).

### 40.6.2 Synthesis of heptadecan-9-yl 8-((3-(1H-imidazol-1-yl)propyl)amino)octanoate (6)

[chemical structure]

[1611] In a 100 mL round bottom flask connected with condenser, heptadecan-9-yl 8-bromooctanoate (3) (1 g, 2.167 mmol) and 3-(1H-imidazol-1-yl)propan-1-amine (4) (1.3 mL, 10.83 mmol) were mixed in ethanol (10 mL). The reaction mixture was heated to reflux overnight. MS (APCI) showed the expected product. The mixture was cooled to room temperature and concentrated. The crude residue was purified by flash chromatography (SiO₂: CH₂Cl₂=100% to 10% of methanol+1% NH₄OH in CH₂Cl₂) and colorless oil product 6 was obtained (498 mg, 45%).

[1612] ¹H NMR (300 MHz, CDCl₃): δ ppm 7.47 (s, 1H), 7.04 (s, 1H), 6.91 (s, 1H), 4.85 (m, 1H), 4.03 (t, J=7.0 Hz, 2H), 2.56 (dd, J=14.5, 7.4 Hz, 4H), 2.27 (t, J=7.4 Hz, 2H), 1.92 (m, 2H), 1.60 (m, 2H), 1.48 (m, 6H), 1.30-1.20 (m, 31H), 0.86 (t, J=6.6 Hz, 6H). MS (APCI+): 506.4 (M+1).

### 40.6.3 Synthesis of nonyl 8-bromooctanoate (9)

[chemical structure]

[1614] To a mixture of 8-bromooctanoic acid (2) (18.6 g, 83.18 mmol) and nonan-1-ol (8) (10 g, 69.32 mmol) in CH₂Cl₂ (500 mL) was added DMAP (1.7 g, 13.86 mmol), DIPEA (48 mL, 277.3 mmol) and EDC (16 g, 83.18 mmol). The reaction was stirred at room temperature overnight. After concentration of the reaction mixture, the crude residue was dissolved in ethyl acetate (500 mL), washed with 1N HCl, sat. NaHCO₃, water and Brine. The organic layer was dried over anhydrous Na₂SO₄. The solvent was evaporated and the crude residue was purified by flash chromatography (SiO₂: Hexane=100% to 30% of EtOAc in Hexane) and colorless oil product 9 was obtained (9 g, 37%).

[1615] ¹H NMR (300 MHz, CDCl₃): δ ppm 4.05 (t, J=7.0 Hz, 2H), 3.39 (t, J=7.0 Hz, 2H), 2.29 (t, J=7.6 Hz, 2H), 1.84 (m, 2H), 1.62-1.56 (m, 6H), 1.40-1.20 (m, 16H), 0.87 (t, J=6.7 Hz, 3H).

### 40.6.4 Synthesis of heptadecan-9-yl 8-((3-(1H-imidazol-1-yl)propyl)(8-(nonyloxy)-8-oxooctyl)amino)octanoate

[chemical structure]

[1617] In a 100 mL round bottom flask connected with condenser, heptadecan-9-yl 8-((3-(1H-imidazol-1-yl)propyl)amino)octanoate (6) (242 mg, 0.478 mmol) and nonyl 8-bromooctanoate 9 (200 mg, 0.574 mmol) were mixed in ethanol (10 mL), then DIPEA (0.2 mL, 1.196 mmol) was added. The reaction mixture was heated to reflux overnight. Both MS (APCI) and TLC (10% MeOH+1% NH4OH in CH2Cl2) showed the product and some unreacted starting material. The mixture was cooled to room temperature and concentrated. The crude residue was purified by flash chromatography (SiO₂: CH₂Cl₂=100% to 10% of methanol+1% NH₄OH in CH₂Cl₂) and colorless oil was obtained (35 mg, 10%).

[1618] ¹H NMR (300 MHz, CDCl₃): δ ppm 7.46 (s, 1H), 7.05 (s, 1H), 6.90 (s, 1H), 4.85 (m, 1H), 4.04 (t, J=6.6 Hz, 2H), 4.01 (t, J=6.6 Hz, 2H), 2.38 (m, 6H), 2.27 (t, J=3.8 Hz, 4H), 1.89 (m, 2H), 1.60-1.58 (m, 12H), 1.48 (m, 6H), 1.30-1.20 (m, 47H), 0.87 (t, J=7.1 Hz, 9H). MS (APCI+): 774.6 (M+1).

### 40.7 Synthesis of Heptadecan-9-yl 8-((3-(2-methyl-1H-imidazol-1-yl)propyl)(8-(nonyloxy)-8-oxooctyl)amino)octanoate (Lipid 10a-46)

[chemical structure]

[chemical structure]

[chemical structure]

[1620] Lipid 10a-46 is synthesized according to the scheme above. Reaction conditions are identical to Lipid 10a-45 with the exception of 3-(2-Methyl-1H-imidazol-1-yl)propan-1-amine as the imidazole amine.

[1621] ¹H NMR (300 MHz, CDCl₃): δ ppm 6.89 (s, 1H), 6.81 (s, 1H), 4.86 (m, 1H), 4.04 (t, J=6.8 Hz, 2H), 3.85 (t, J=7.4 Hz, 2H), 2.38-2.36 (m, 9H), 2.28 (m, 4H), 1.82 (m, 2H), 1.72-1.56 (m, 12H), 1.48 (m, 4H), 1.30-1.20 (m, 46H), 0.86 (t, J=6.6 Hz, 9H). MS (APCI+): 789.7 (M+1).

### 40.8 Synthesis of Heptadecan-9-yl 8-((3-(1H-imidazol-1-yl)propyl)(8-oxo-8-(undecan-3-yloxy)octyl)amino)octanoate (Lipid 10a-137)

### 40.8.1 Synthesis of heptadecan-9-yl 8-bromooctanoate (3)

[chemical structure]

[1623] To a mixture of 8-bromooctanoic acid (2) (10 g, 44.82 mmol) and heptadecan-9-ol (1) (9.6 g, 37.35 mmol) in CH2Cl2 (300 mL) was added DMAP (900 mg, 7.48 mmol), DIPEA (26 mL, 149.7 mmol) and EDC (10.7 g, 56.03 mmol). The reaction was stirred at room temperature overnight. After concentration of the reaction mixture, the crude residue was dissolved in ethyl acetate (300 mL), washed with 1N HCl, sat. NaHCO₃, water and Brine. The organic layer was dried over anhydrous Na₂SO₄. The solvent was evaporated and the crude residue was purified by flash chromatography (SiO₂: Hexane=100% to 30% of EtOAc in Hexane) and colorless oil product 3 was obtained (5 g, 29%).

[1624] 1H NMR (300 MHz, CDCl₃): δ ppm 4.86 (m, 1H), 3.39 (t, J=7.0 Hz, 2H), 2.27 (t, J=7.6 Hz, 2H), 1.84 (m, 2H), 1.62 (m, 2H), 1.5-1.4 (m, 8H), 1.35-1.2 (m, 26H) 0.87 (t, J=6.7 Hz, 6H).

### 40.8.2 Synthesis of heptadecan-9-yl 8-((3-(H-imidazol-1-yl)propyl)amino)octanoate (6)

[chemical structure]

[1626] In a 100 mL round bottom flask connected with condenser, heptadecan-9-yl 8-bromooctanoate (3) (1 g, 2.167 mmol) and 3-(1H-imidazol-1-yl)propan-1-amine (4) (1.3 mL, 10.83 mmol) were mixed in ethanol (10 mL). The reaction mixture was heated to reflux overnight. MS (APCI) showed the expected product. The mixture was cooled to room temperature and concentrated. The crude residue was purified by flash chromatography (SiO₂: CH₂Cl₂=100% to 10% of methanol+1% NH₄OH in CH₂Cl₂) and colorless oil product 6 was obtained (498 mg, 45%).

[1627] ¹H NMR (300 MHz, CDCl₃): δ ppm 7.47 (s, 1H), 7.04 (s, 1H), 6.91 (s, 1H), 4.85 (m, 1H), 4.03 (t, J=7.0 Hz, 2H), 2.56 (dd, J=14.5, 7.4 Hz, 4H), 2.27 (t, J=7.4 Hz, 2H), 1.92 (m, 2H), 1.60 (m, 2H), 1.48 (m, 6H), 1.30-1.20 (m, 31H), 0.86 (t, J=6.6 Hz, 6H). MS (APCI+): 506.4 (M+1).

### 40.8.3 Synthesis of undecan-3-ol (11)

[chemical structure]

[1629] To a mixture of nonanal (10) (5 g, 35.2 mmol), in anhydrous THF (100 mL) at 0° C. ice-water bath was dropwise added ethylmagnesium bromide (47 mL, 42.2 mmol, 0.9M in THF). The reaction was stirred at room temperature overnight. The reaction was quenched with ice and diluted with ethyl acetate (500 mL), washed with 1N HCl, sat. NaHCO₃, water and Brine. The organic layer was dried over anhydrous Na₂SO₄. The solvent was evaporated and the crude residue was purified by flash chromatography (SiO₂: Hexane=100% to 50% of EtOAc in Hexane) and colorless oil product 11 was obtained (4 g, 66%).

[1630] ¹H NMR (300 MHz, CDCl₃): δ ppm 3.52 (m, 1H), 1.56-1.3 (m, 4H), 1.3-1.20 (m, 12H), 0.93 (t, J=7.4 Hz, 3H), 0.87 (t, J=7.4 Hz, 3H).

### 40.8.4 Synthesis of undecan-3-yl 8-bromooctanoate (12)

[chemical structure]

[1632] To a mixture of 8-bromooctanoic acid (2) (6.2 g, 27.9 mmol) and undecan-3-ol (11) (4 g, 23.2 mmol) in CH₂Cl₂ (100 mL) was added DMAP (567.2 mg, 4.64 mmol), DIPEA (16.2 mL, 92.9 mmol) and EDC (6.7 g, 34.8 mmol). The reaction was stirred at room temperature overnight. After concentration of the reaction mixture, the crude residue was dissolved in ethyl acetate (500 mL), washed with 1N HCl, sat. NaHCO₃, water and Brine. The organic layer was dried over anhydrous Na₂SO₄. The solvent was evaporated and the crude residue was purified by flash chromatography (SiO₂: Hexane=100% to 30% of EtOAc in Hexane) and colorless oil product 12 was obtained (7.3 g, 83%).

[1633] ¹H NMR (300 MHz, CDCl₃): δ ppm 4.80 (m, 1H), 3.39 (t, J=6.8 Hz, 2H), 2.28 (t, J=7.7 Hz, 2H), 1.84 (m, 2H), 1.6-1.35 (m, 8H), 1.35-1.2 (m, 16H), 0.87 (t, J=7.4 Hz, 6H).

### 40.8.4 Synthesis of heptadecan-9-yl 8-((3-(1H-imidazol-1-yl)propyl)(8-(nonyloxy)-8-oxooctyl)amino)octanoate

[chemical structure]

[1635] In a 100 mL round bottom flask connected with condenser, heptadecan-9-yl 8-((3-(1H-imidazol-1-yl)propyl)amino)octanoate (6) (242 mg, 0.478 mmol) and undecan-3-yl 8-bromooctanoate (12) (200 mg, 0.574 mmol) were mixed in ethanol (10 mL), then DIPEA (0.2 mL, 1.196 mmol) was added. The reaction mixture was heated to reflux overnight. Both MS (APCI) and TLC (10% MeOH+1% NH₄OH in CH₂Cl₂) showed the product and some unreacted starting material. The mixture was cooled to room temperature and concentrated. The crude residue was purified by flash chromatography (SiO₂: CH₂Cl₂=100% to 10% of methanol+1% NH₄OH in CH₂Cl₂) and colorless oil was obtained (35 mg, 10%).

[1636] ¹H NMR (300 MHz, CDCl₃): δ ppm 7.45 (s, 1H), 7.04 (s, 1H), 6.90 (s, 1H), 4.82 (m, 2H), 3.97 (t, J=6.8 Hz, 2H), 2.35 (m, 6H), 2.27 (t, J=3.8 Hz, 4H), 1.89 (m, 2H), 1.60-1.48 (m, 14H), 1.30-1.20 (m, 50H), 0.87 (m, 12H). MS (APCI+): 802.8

### 40.9 Synthesis of Heptadecan-9-yl 8-((3-(2-methyl-1H-imidazol-1-yl)propyl)(8-(nonyloxy)-8-oxooctyl)amino)octanoate (Lipid 10a-138)

[chemical structure]

[chemical structure]

[chemical structure]

[1638] Lipid 10a-138 is synthesized according to the scheme above. Reaction conditions are identical to Lipid 10a-137 with the exception of 3-(2-Methyl-1H-imidazol-1-yl)propan-1-amine as the imidazole amine.

[1639] ¹H NMR (300 MHz, CDCl₃): δ ppm 6.89 (s, 1H), 6.81 (s, 1H), 4.82 (m, 2H), 3.86 (t, J=7.1 Hz, 2H), 2.38-2.3 (m, 9H), 2.27 (t, J=3.8 Hz, 4H), 1.84 (m, 2H), 1.60-1.37 (m, 14H), 1.30-1.20 (m, 50H), 0.87 (m, 12H). MS (APCI+): 816.8 (M+1).

### 40.10 Synthesis of (((2-(2-Methyl-1H-imidazol-1-yl)ethyl)azanediyl)bis(hexane-6,1-diyl) bis(2-hexyldecanoate (Lipid 10a-139)

### 40.10.1 Synthesis of 6-bromohexyl 2-hexyldecanoate (3)

[chemical structure]

[1641] To a mixture of 2-hexyldecanoic acid (1) (102 g, 0.398 mol) and 6-bromo-1-hexanol (2) (60 g, 0.331 mol) in CH2Cl2 (1 L) was added DMAP (8.1 g, 66 mmol), DIPEA (230 mL, 1.325 mol) and EDC (76 g, 0.398 mol). The reaction was stirred at room temperature overnight. After concentration of the reaction mixture, the crude residue was dissolved in ethyl acetate (1 L), washed with 1N HCl, sat. NaHCO₃, water and Brine. The organic layer was dried over anhydrous Na₂SO₄. The solvent was evaporated and the crude residue was purified by flash chromatography (SiO₂: Hexane=100% to 30% of EtOAc in Hexane) and colorless oil product 3 was obtained (67 g, 48%).

[1642] ¹H NMR (300 MHz, CDCl₃): δ ppm 4.06 (t, J=6.6 Hz, 2H), 3.4 (t, J=6.8 Hz, 2H), 2.3 (m, 1H), 1.86 (m, 2H), 1.64 (m, 2H), 1.5-1.4 (m, 2H), 1.35-1.2 (m, 26H) 0.87 (t, J=6.7 Hz, ⁶H)

### 40.10.2 Synthesis of 6-((3-(1H-imidazol-1-yl)butyl)amino)hexyl 2-hexyldecanoate (7a)

[chemical structure]

[1644] In a 100 mL round bottom flask connected with condenser, 6-bromohexyl 2-hexyldecanoate (3) (1.2 g, 2.87 mmol) and 3-(1H-imidazol-1-yl)butan-1-amine (7) (2 g, 14.37 mmol) were mixed in ethanol (20 mL). The reaction mixture was heated to reflux overnight. MS (APCI) showed the expected product. The mixture was cooled to room temperature and concentrated. The crude residue was purified by flash chromatography (SiO₂: CH₂Cl₂=100% to 10% of methanol+1% NH₄OH in CH₂Cl₂) and colorless oil product 7a was obtained (626 mg, 46%).

[1645] ¹H NMR (300 MHz, CDCl₃): δ ppm 7.51 (s, 1H), 7.05 (s, 1H), 6.93 (s, 1H), 4.35 (m, 1H), 4.04 (t, J=6.6 Hz, 2H), 2.6-2.4 (m, 4H), 2.29 (m, 1H), 1.94 (td, J=14, 6.8 Hz, 2H), 1.64-1.56 (m, 4H), 1.47 (s, 3H), 1.42-1.20 (m, 29H), 0.86 (m, 6H). MS (APCI+): 478.8 (M+1)

### 40.10.2 Synthesis of ((2-(2 Methyl-1H-imidazol-1-yl)ethyl)azanediyl)bis(hexane-6,1-diyl) bis(2-hexyldecanoate

[chemical structure]

[1647] In a 100 mL round bottom flask connected with condenser, 6-((3-(1H-imidazol-1-yl)butyl)amino)hexyl 2-hexyldecanoate (7a) (626 mg, 1.31 mmol) and 6-bromohexyl 2-hexyldecanoate (3) (550 mg, 1.31 mmol) were mixed in ethanol (20 mL), then DIPEA (0.6 mL, 3.276 mmol) was added. The reaction mixture was heated to reflux overnight. Both MS (APCI) and TLC (10% MeOH+1% NH₄OH in CH₂Cl₂) showed the product and unreacted starting material 7a. The mixture was cooled to room temperature and concentrated. The crude residue was purified by flash chromatography (SiO₂: CH₂Cl₂=100% to 10% of methanol+1% NH₄OH in CH₂Cl₂) and the obtained product was further purified by C₁₈ reverse phase chromatography (H₂O=95% to 0.1% TFA in CH₃CN=100%) colorless oil (TFA salt) was obtained (140 mg, 13%).

[1648] ¹H-NMR (300 MHz, CDCl₃): δ 6.87 (s, 1H), 6.83 (s, 1H), 4.05 (t, J=6.7 Hz, 4H), 3.84 (t, J=6.9 Hz, 2H), 2.66 (t, J=6.9 Hz, 2H), 2.45-2.20 (m, 6H), 2.37 (s, 3H), 1.65-1.50 (m, 8H), 1.5-1.1 (m, 56H), 0.86 (t, J=6.5 Hz, 12H). MS (APCI+): 802.6 (M+1).

### 40.11 Synthesis of (((1-Methyl-1H-imidazol-2-yl)methyl)azanediyl)bis(hexane-6,1-diyl) bis(2-hexyldecanoate) (Lipid 10a-130)

[chemical structure]

[1650] Lipid 10a-130 is synthesized according to the scheme above. Reaction conditions are identical to Lipid 10a-139 with the exception of 3-(1H-imidazol-1-yl)butyl amine as the imidazole amine.

### 40.12 Synthesis of (((1-Methyl-1H-imidazol-2-yl)methyl)azanediyl)bis(hexane-6,1-diyl) bis(2-hexyldecanoate) (Lipid 10a-128)

[chemical structure]

[1652] Lipid 10a-128 is synthesized according to the scheme above. Reaction conditions are identical to Lipid 10a-139 with the exception of 1-Methyl-1H-imidazol-2-yl)methyl amine as the imidazole amine.

[1653] ¹H-NMR (300 MHz, CDCl₃): δ 6.89 (d, J=1.4 Hz, 1H), 6.81 (d, J=1.4 Hz, 1H), 4.03 (t, J=6.7 Hz, 4H), 3.68 (s, 3H), 3.62 (s, 2H), 2.45-2.20 (m, 6H), 1.65-1.50 (m, 8H), 1.5-1.35 (m, 8H), 1.35-1.10 (m, 48H), 0.86 (t, J=6.5 Hz, 12H). MS (APCI+): 787.6 (M+1).

### Example 41

[1654] Lipid Nanoparticle Formulation with Circular RNA

[1655] Lipid Nanoparticles (LNPs) were formed using a Precision Nanosystems Ignite instrument with a ‘NextGen’ mixing chamber. Ethanol phase contained ionizable Lipid 10a-26, DSPC, Cholesterol, and DSPE-PEG 2000 (Avanti Polar Lipids Inc.) at a weight ratio of 16:1:4:1 or 62:4:33:1 molar ratio was combined with an aqueous phase containing circular RNA and 25 mM sodium acetate buffer at pH 5.2. A 3:1 aqueous to ethanol mixing ratio was used. The formulated LNP then were dialyzed in 1 L of water and exchanged 2 times over 18 hours. Dialyzed LNPs were filtered using 0.2 μm filter. Prior to in vivo dosing, LNPs were diluted in PBS. LNP sizes were determined by dynamic light scattering. A cuvette with 1 mL of 20 μg/mL LNPs in PBS (pH 7.4) was measured for Z-average using the Malvern Panalytical Zetasizer Pro. The Z-average and polydispersity index were recorded.

### 41.1 Formulation of Lipids 10a-26 and 10a-27

[1656] Lipid Nanoparticles (LNPs) were formed using a Precision Nanosystems Ignite instrument with a ‘NextGen’ mixing chamber. Ethanol phase contained ionizable Lipid 10a-26 or Lipid 10a-27, DOPE, Cholesterol, and DSPE-PEG 2000 (Avanti Polar Lipids Inc.) at a weight ratio of 16:1:4:1 or 62:4:33:1 molar ratio was combined with an aqueous phase containing circular RNA and 25 mM sodium acetate buffer at pH 5.2. A 3:1 aqueous to ethanol mixing ratio was used. The formulated LNPs were then dialyzed in 1 L of water and exchanged 2 times over 18 hours. Dialyzed LNPs were filtered using 0.2 μm filter. Prior to in vivo dosing, LNPs were diluted in PBS. LNP sizes were determined by dynamic light scattering. A cuvette with 1 mL of 20 μg/mL LNPs in PBS (pH 7.4) was measured for Z-average using the Malvern Panalytical Zetasizer Pro. The Z-average and polydispersity index were recorded.

### 41.2 Formulation of Lipids 10a-53 and 10a-54

[1657] Lipid Nanoparticles (LNPs) were formed using a Precision Nanosystems Ignite instrument with a ‘NextGen’ mixing chamber. Ethanol phase contained ionizable Lipid 10a-53 or 10a-54, DOPE, Cholesterol, and DSPE-PEG 2000 (Avanti Polar Lipids Inc.) at a molar ratio of 50:10:38.5:1.5 was combined with an aqueous phase containing circular RNA and 25 mM sodium acetate buffer at pH 5.2. A 3:1 aqueous to ethanol mixing ratio was used. The formulated LNPs were then dialyzed in IL of 1x PBS and exchanged 2 times over 18 hours. Dialyzed LNPs were filtered using 0.2 μm filter. Prior to in vivo dosing, LNPs were diluted in PBS. LNP sizes were determined by dynamic light scattering. A cuvette with 1 mL of 20 μg/mL LNPs in PBS (pH 7.4) was measured for Z-average using the Malvern Panalytical Zetasizer Pro. The Z-average and polydispersity index were recorded.

[1658] LNP zeta potential was measured using the Malvern Panalytical Zetasizer Pro. A mixture containing 200 μL of the particle solution in water and 800 μL of distilled RNAse-free water with a final particle concentration of 400 μg/mL was loaded into a zetasizer capillary cell for analysis.

[1659] RNA encapsulation was determined using a Ribogreen assay. Nanoparticle solutions were diluted in tris-ethylenediaminetetraacetic acid (TE) buffer at a theoretical circRNA concentration of 2 μg/mL. Standard circRNA solutions diluted in TE buffer were made ranging from 2 μg/mL to 0.125 μg/mL. The particles and standards were added to all wells and a second incubation was performed (37° C. at 350 rpm for 3 minutes). Fluorescence was measured using a SPECTRAmax® GEMINI XS microplate spectrofluorometer. The concentration of circular RNA in each particle solution was calculated using the standard curve. The encapsulation efficiency was calculated from the ratio of circRNA detected between lysed and unlysed particles.

TABLE 22a
Characterization of LNPs

| | | | Encapsulation | Zeta Data |
|---|---|---|---|---|
| Ionizable Lipid | Size (nm) | PDI | Efficiency (%) | Potential (mV) |
| 22-S14 | 88 | 0.09 | 96 | 3.968 |
| 93-S14 | 119 | 0.02 | 96 | −6.071 |
| Lipid 10a-26 | 86 | 0.08 | 92 | −15.24 |

TABLE 22b
Characterization of LNPs

| Ionizable Lipid | Z-Average (nm) | PDI | RNA Entrapment (%) |
|---|---|---|---|
| 22-S14 | 64 | 0.05 | 97 |
| 93-S14 | 74 | 0.04 | 95 |
| Lipid 10a-26 | 84 | 0.04 | 96 |

### Example 42

[1660] In Vivo Analysis

[1661] Female CD-1 or female c57BL/6J mice ranging from 22-25 g were dosed at 0.5 mg/kg RNA intravenously. Six hours after injection, mice were injected intraperitoneally with 200 μL of D-luciferin at 15 mg/mL concentration. 5 minutes after injection, mice were anesthetized using isoflurane, and placed inside the IVIS Spectrum In Vivo Imaging System (Perkin Elmer) with dorsal side up. Whole body total IVIS flux of Lipids 22-514, 93-514, Lipid 10a-26 is presented in FIG. 32A. Post 10 minutes injection, mice were scanned for luminescence. Mice were euthanized and organs were extracted within 25 minutes of luciferin injection to scan for luminescence in liver, spleen, kidneys, lungs, and heart. Images (FIGS. 33A-B, 34A-B, 35A-B) were analyzed using Living Images (Perkin Elmer) software. Regions of interest were drawn to obtain flux and average radiance and analyzed for biodistribution of protein expression (FIG. 32A-B).

[1662] FIG. 32A illustrates the increased whole-body total flux observed from luciferase circRNA with Lipid 10a-26 LNPs compared to LNPs made with lipids 22-S14 and 93-S14. FIG. 32B shows the ex vivo IVIS analysis of tissues further highlighting the increased overall expression with Lipid 10a-26 while maintaining the desired spleen to liver ratios observed with lipids 22-S14 and 93-S14 despite the significant structural changes designed to improve expression. These data highlight the improvements afforded by Lipid 10a-26 compared to previously reported lipids.

[1663] Similar analysis as described above was also performed with circRNA encapsulated in LNPs formed with Lipid 10b-15 or Lipid 10a-53 or 10a-54. FIGS. 36A-C show the ex vivo IVIS analysis of tissues, respectively highlighting the overall expression with Lipid 10b-15, 10a-53, and 10a-54 while maintaining the desired spleen to liver ratios despite the significant structural changes designed to improve expression. FIG. 36D shows the results for PBS control. These data demonstrates the improvements afforded by Lipids 10b-15, 10a-53, and 10a-54 compared to previously reported lipids such as 93-S14 and 22-514.

### Example 43

[1664] Delivery of Luciferase

[1665] Human peripheral blood mononuclear cells (PBMCs) (Stemcell Technologies) were transfected with lipid nanoparticles (LNP) encapsulating firefly luciferase (f.luc) circular RNA and examined for luciferase expression. PBMCs from two different donors were incubated in vitro with five different LNP compositions, containing circular RNA encoding for firefly luciferase (200 ng), at 37° C. in RPMI, 2% human serum, IL-2 (10 ng/mL), and 50 uM BME. PBMCs incubated without LNP were used as a negative control. After 24 hours, the cells were lysed and analyzed for firefly luciferase expression based on bioluminescence (Promega BrightGlo).

[1666] Representative data are presented in FIGS. 37A and 37B, showing that that the tested LNPs are capable of delivering circular RNA into primary human immune cells resulting in protein expression.

### Example 44

[1667] In Vitro Delivery of Green Fluorescent Protein (GFP) or Chimeric Antigen Receptor (CAR)

[1668] Human PBMCs (Stemcell Technologies) were transfected with LNP encapsulating GFP and examined by flow cytometry. PBMCs from five different donors (PBMC A-E) were incubated in vitro with one LNP composition, containing circular RNA encoding either GFP or CD19-CAR (200 ng), at 37° C. in RPMI, 2% human serum, IL-2 (10 ng/mL), and 50 uM BME. PBMCs incubated without LNP were used as a negative control. After 24, 48, or 72 hours post-LNP incubation, cells were analyzed for CD3, CD19, CD56, CD14, CD11b, CD45, fixable live dead, and payload (GFP or CD19-CAR).

[1669] Representative data are presented in FIGS. 38A and 38B, showing that the tested LNP is capable of delivering circular RNA into primary human immune cells resulting in protein expression.

### Example 45

[1670] Multiple IRES Variants can Mediate Expression of Murine CD19 CAR In Vitro

[1671] Multiple circular RNA constructs, encoding anti-murine CD19 CAR, contains unique IRES sequences and were lipotransfected into 1C1C7 cell lines. Prior to lipotransfection, 1C1C7 cells are expanded for several days in complete RPMI Once the cells expanded to appropriate numbers, 1C1C7 cells were lipotransfected (Invitrogen RNAiMAX) with four different circular RNA constructs. After 24 hours, 1C1C7 cells were incubated with His-tagged recombinant murine CD19 (Sino Biological) protein, then stained with a secondary anti-His antibody. Afterwards, the cells were analyzed via flow cytometry.

[1672] Representative data are presented in FIGS. 39, showing that IRES sourced from the indicated virus (apodemus agrarius picornavirus, caprine kobuvirus, parabovirus, and salivirus) are capable of driving expression of an anti-mouse CD19 CAR in murine T cells.

### Example 46

[1673] Murine CD19 CAR Mediates Tumor Cell Killing In Vitro

[1674] Circular RNA encoding anti-mouse CD19 CAR were electroporated into murine T cells to evaluate CAR-mediated cytotoxicity. For electroporation, T cells were electroporated with circular RNA encoding anti-mouse CD19 CAR using ThermoFisher's Neon Transfection System then rested overnight. For the cytotoxicity assay, electroporated T cells were co-cultured with Fluc+ target and non-target cells at 1:1 ratio in complete RPMI containing 10% FBS, IL-2 (10 ng/mL), and 50 uM BME and incubated overnight at 37° C. Cytotoxicity was measured using a luciferase assay system 24 hours post-co-culture (Promega Brightglo Luciferase System) to detect lysis of Fluc+ target and non-target cells. Values shown are calculated relative to the untransfected mock signal.

[1675] Representative data are presented in FIG. 40, showing that an anti-mouse CD19 CAR expressed from circular RNA is functional in murine T cells in vitro.

### Example 47

[1676] Functional Depletion of B Cells with a Lipid Encapsulated Circular RNA Encoding Murine CD19 CAR

[1677] C₅₇BL/6J mice were injected with LNP formed with Lipid 10b-15, encapsulating circular RNA encoding anti-murine CD19 CAR. As a control, Lipid 10b-15 encapsulating circular RNA encoding firefly luciferase (f.Luc) were injected in different group of mice. Female C57BL.6J, ranging from 20-25 g, were injected intravenously with 5 doses of 0.5 mg/kg of LNP, every other day. Between injections, blood draws were analyzed via flow cytometry for fixable live/dead, CD45, TCRvb, B220, CD11b, and anti-murine CAR. Two days after the last injection, spleens were harvested and processed for flow cytometry analysis. Splenocytes were stained with fixable live/dead, CD45, TCRvb, B220, CD11b, NK1.1, F4/80, CD11c, and anti-murine CAR. Data from mice injected with anti-murine CD19 CAR LNP were normalized to mice that received f.Luc LNP.

[1678] Representative data are presented in FIGS. 41A, 41B, and 41C, showing that an anti-mouse CD19 CAR expressed from circular circRNA delivered in vivo with LNPs is functional in murine T cells in vivo.

### Example 48

[1679] CD19 CAR Expressed from Circular RNA has Higher Yield and Greater Cytotoxic Effect Compared to that Expressed from mRNA

[1680] Circular RNA encoding encoding anti-CD19 chimeric antigen antigen receptor, which includes, from N-terminus to C-terminus, a FMC63-derived scFv, a CD8 transmembrane domain, a 4-1BB costimulatory domain, and a CD3(intracellular domain, were electroporated into human peripheral T cells to evaluate surface expression and CAR-mediated cytotoxicity. For comparison, circular RNA-electroporated T cells were compared to mRNA-electroporated T cells in this experiment. For electroporation, CD3+ T cells were isolated from human PBMCs using commercially available T cell isolation kits (Miltenyi Biotec) from donor human PBMCs. After isolation, T cells were stimulated with anti-CD3/anti-CD28 (Stemcell Technologies) and expanded over 5 days at 37° C. in complete RPMI containing 10% FBS, IL-2 (10 ng/mL), and 50 uM BME. Five days post stimulation, T cells were electroporated with circular RNA encoding anti-human CD19 CAR using ThermoFisher's Neon Transfection System and then rested overnight. For the cytotoxicity assay, electroporated T cells were co-cultured with Fluc+ target and non-target cells at 1:1 ratio in complete RPMI containing 10% FBS, IL-2 (10 ng/mL), and 50 uM BME and incubated overnight at 37° C. Cytotoxicity was measured using a luciferase assay system 24 hours post-co-culture (Promega Brightglo Luciferase System) to detect lysis of Fluc+ target and non-target cells. Furthermore, an aliquot of electroporated T cells were taken and stained for live dead fixable staining, CD3, CD45, and chimeric antigen receptors (FMC63) at the day of analysis.

[1681] Representative data are presented in FIGS. 42 and 43. FIGS. 42A and 42B show that an anti-human CD19 CAR expressed from circular RNA is expressed at higher levels and longer than an anti-human CD19 CAR expressed from linear mRNA. FIGS. 43A and 43B show that an anti-human CD19 CAR expressed from circular RNA is exerts a greater cytotoxic effect relative a to anti-human CD19 CAR expressed from linear mRNA.

### Example 49

[1682] Functional Expression of Two CARs from a Single Circular RNA

[1683] Circular RNA encoding chimeric antigen receptors were electroporated into human peripheral T cells to evaluate surface expression and CAR-mediated cytotoxicity. The purpose of this study is to evaluate if circular RNA encoding for two CARs can be stochastically expressed with a 2A (P2A) or an IRES sequence. For electroporation, CD3+ T cells were commercially purchased (Cellero) and stimulated with anti-CD3/anti-CD28 (Stemcell Technologies) and expanded over 5 days at 37° C. in complete RPMI containing 10% FBS, IL-2 (10 ng/mL), and 50 uM BME. Four days post stimulation, T cells were electroporated with circular RNA encoding anti-human CD19 CAR, anti-human CD19 CAR-2A-anti-human BCMA CAR, and anti-human CD19 CAR-IRES-anti-human BCMA CAR using ThermoFisher's Neon Transfection System then rested overnight. For the cytotoxicity assay, electroporated T cells were co-cultured with Fluc+K562 cells expressing human CD19 or BCMA antigens at 1:1 ratio in complete RPMI containing 10% FBS, IL-2 (10 ng/mL), and 50 uM BME and incubated overnight at 37° C. Cytotoxicity was measured using a luciferase assay system 24 hours post-co-culture (Promega BrightGlo Luciferase System) to detect lysis of Fluc+ target cells.

[1684] Representative data are presented in FIG. 44, showing that two CARs can be functionally expressed from the same circular RNA construct and exert cytotoxic effector function.

### Example 50

[1685] In Vivo Circular RNA Transfection Using Cre Reporter Mice

[1686] Circular RNAs encoding Cre recombinase (Cre) are encapsulated into lipid nanoparticles as previously described. Female, 6-8 week old B6.Cg-Gt(ROSA)26Sortm9(CAG-tdTomato)Hze/J (Ai9) mice were dosed with lipid nanoparticles at 0.5 mg/kg RNA intravenously. Fluorescent tdTomato protein was transcribed and translated in Ai9 mice upon Cre recombination, meaning circular RNAs have been delivered to and translated in tdTomato+ cells. After 48 hr, mice were euthanized and the spleens were harvested, processed into a single cell suspension, and stained with various fluorophore-conjugated antibodies for immunophenotyping via flow cytometry.

[1687] FIG. 45A shows representative FACS plots with frequencies of tdTomato expression in various spleen immune cell (CD45+, live) subsets, including total myeloid (CD11b+), B cells (CD19+), and T cells (TCR-B+) following treatment with LNPs formed with Lipid 10a-27 or 10a-26 or Lipid 10b-15. Ai9 mice injected with PBS represented background tdTomato fluorescence. FIG. 45B quantifies the proportion of myeloid cells, B cells, and T cells expressing tdTomato (mean+std. dev., n=3), which is equivalent to the proportion of each cell population which has been successfully transfected with Cre circular RNA. LNPs made with Lipids 10a-27 and 10a-26 exhibit significantly higher myeloid and T cell transfection compared with Lipid 93-S14, highlighting the improvements conferred by lipid structural modifications.

[1688] FIG. 45C illustrates the proportion of additional splenic immune cell populations expressing tdTomato with Lipids 10a-27 and 10a-26 (mean+std. dev., n=3), which also include NK cells (NKp46+, TCR-B−), classical monocytes (CD11b+, Ly-6G-, Ly-6C_hi), nonclassical monocytes (CD11b+, Ly-6G-, Ly-6C_lo), neutrophils (CD11b+, Ly-6G+), and dendritic cells (CD11c+, MHC-II+). These experiments demonstrate that LNPs made with Lipids 10a-27 and 10a-26 and Lipid 10b-15 are effective at delivering circular RNAs to many splenic immune cell subsets in mice and lead to successful protein expression from the circular RNA in those cells.

### Example 51

### Example 51A: Built-In polyA Sequences and Affinity-Purification to Produce Immue-Silent Circular RNA

[1689] PolyA sequences (20-30 nt) were inserted into the 5′ and 3′ ends of the RNA construct (precursor RNA with built-in polyA sequences in the introns). See, for example, FIG. 97A. Precursor RNA and introns can alternatively be polyadenylated post-transcriptionally using, e.g., E coli. polyA polymerase or yeast polyA polymerase, which requires the use of an additional enzyme.

[1690] Circular RNA in this example was circularized by in vitro transcription (IVT) and affinity-purified by washing over a commercially available oligo-dT resin to selectively remove polyA-tagged sequences (including free introns and precursor RNA) from the splicing reaction. See, for example, FIG. 98. The IVT was performed with a commercial IVT kit (New England Biolabs) or a customerized IVT mix (Orna Therapeutics), containing guanosine monophosphate (GMP) and guanosine triphosphate (GTP) at different ratios (GMP:GTP=8, 12.5, or 13.75). In some embodiments, GMP at a high GMP:GTP ratio may be preferentially included as the first nucleotide, yielding a majority of monophosphate-capped precursor RNAs. As a comparison, the circular RNA product was alternatively purified by the treatment with Xrn1, Rnase R, and Dnase I (enzyme purification). See, for example, FIG. 100.

[1691] Immunogenicity of the circular RNAs prepared using the affinity purification or enzyme purification process were then assessed. Briefly, the prepared circular RNAs were transfected into A549 cells. After 24 hours, the cells were lysed and interferon beta-1 induction relative to mock samples was measured by qPCR. 3p-hpRNA, a triphosphorylated RNA, was used as a positive control.

[1692] FIGS. 46B and 46C and FIGS. 99A and 99B show that the negative selection affinity purification removes non-circular products from splicing reactions when polyA sequences (e.g., SEQ ID NO: 3778) are included on elements that are removed during splicing and present in unspliced precursor molecules. FIG. 46D shows circular RNAs prepared with tested IVT conditions and purification methods are all immunoquiescent. These results suggest the negative selection affinity purification is equivalent or superior to enzyme purification for circular RNA purification and that customized circular RNA synthesis conditions (IVT conditions) may reduce the reliance on GMP excess to achieve maximal immunoquiescence.

### Example 51B: Dedicated Binding Site and Affinity-Purification for Circular RNA Production

[1693] Instead of polyA tags, one can include specifically design sequences (DBS, dedicated binding site). See, for example, FIG. 47A.

[1694] Instead of a polyA tag, a dedicated binding site (DBS), such as a specifically designed complementary oligonucleotide that can bind to a resin, may be used to selectively deplete precursor RNA and free introns. In this example, DBS sequences (30 nt) were inserted into the 5′ and 3′ ends of the precursor RNA, such as TATAATTCTACCCTATTGAGGCATTGACTA (3667), shown in FIG. 47A. RNA was transcribed and the transcribed product was washed over a custom complementary oligonucleotide linked to a resin.

[1695] FIGS. 47B and 47C demonstrates that including the designed DBS sequence in elements that are removed during splicing enables the removal of unspliced precursor RNA and free intron components in a splicing reaction, via negative affinity purification.

### Example 51C: Production of a Circular RNA Encoding Dystrophin

[1696] A 12kb 12,000 nt circular RNA encoding dystrophin was produced by in vitro transcription of RNA precursors followed by enzyme purification using a mixture of Xrn1, DNase 1, and RNase R to degrade remaining linear components. FIG. 48 shows that the circular RNA encoding dystrophin was successfully produced.

### Example 51D: Negative Selection Affinity-Purification of Circular RNA

[1697] Affinity sequences are added to precursor RNAs, and circular RNA is produced by in vitro transcription (IVT), as described in Examples 51A and 51B. Oligonucleotides comprising a sequence that is 100% complementary to the affinity sequences are conjugated to a resin, or a commercially available resin conjugated to oligonucleotides complementary to the affinity sequences is obtained. The IVT reaction mixture may be directly added to the resin. Alternatively, the IVT reaction solution is buffer exchanged into binding buffer, such as a Tris buffer, comprising greater than 1 mM one or more monovalent salts, such as NaCl or KCl, or the one or more monovalent salts are simply added to the IVT reaction mixture before the IVT reaction mixture is added to the resin. Circular RNA that does not comprise an affinity sequence is then affinity-purified by washing the solution comprising linear RNA and circular RNA over the resin. The solution may be heated during this process in order to denature aberrantly hybridized sequences. The eluent from the beads is collected and buffer exchanged into water or storage buffer comprising 1 mM sodium citrate, pH 6.5, using a filtration threshold of 10-300 kDa.

### Example 52

[1698] 5′ Spacer Between 3′ Intron Fragment and the IRES Improves Circular RNA Expression

[1699] Expression level of purified circRNAs with different 5′ spacers between the 3′ intron fragment and the IRES in Jurkat cells were compared. Briefly, luminescence from secreted Gaussia luciferase in supernatant was measured 24 hours after electroporation of 60,000 cells with 250ng of each RNA.

[1700] Additionally, stability of purified circRNAs with different 5′ spacers between the 3′ intron fragment and the IRES in Jurkat cells were compared. Briefly, luminescence from secreted Gaussia luciferase in supernatant was measured over 2 days after electroporation of 60,000 cells with 250ng of each RNA and normalized to day 1 expression.

[1701] The results are shown in FIGS. 49A and 49B, indicating that adding a spacer can enhance IRES function and the importance of sequence identity and length of the added spacer. A potential explanation is that the spacer is added right before the IRES and likely functions by allowing the IRES to fold in isolation from other structured elements such as the intron fragments.

### Example 53

[1702] This example describes deletion scanning from 5′ or 3′ end of the caprine kobuvirus IRES. IRES borders are generally poorly characterized and require empirical analysis, and this example can be used for locating the core functional sequences required for driving translation. Briefly, circular RNA constructs were generated with truncated IRES elements operably linked to a gaussia luciferase coding sequence. The truncated IRES elements had nucleotide sequences of the indicated lengths removed from the 5′ or 3′ end. Luminescence from secreted gaussia luciferase in supernatant was measured 24 and 48 hours after electroporation of primary human T cells with RNA. Stability of expression was calculated as the ratio of the expression level at the 48-hour time point relative to that at the 24-hour time point.

[1703] As shown in FIG. 50, deletion of more than 40 nucleotides from the 5′ end of the IRES reduced expression and disrupted IRES function. Stability of expression was relatively unaffected by the truncation of the IRES element but expression level was substantially reduced by deletion of 141 nucleotides from the 3′ end of the IRES, whereas deletion of 57 or 122 nucleotides from the 3′ end had a positive impact on the expression level.

[1704] It was also observed that deletion of the 6-nucleotide pre-start sequence reduced the expression level of the luciferase reporter. Replacement of the 6-nucleotide sequence with a classical kozak sequence (GCCACC) did not have a significant impact but at least maintained expression.

### Example 54

[1705] This example describes modifications (e.g., truncations) of selected IRES sequences, including Caprine Kobuvirus (CKV) IRES, Parabovirus IRES, Apodemus Picornavirus (AP) IRES, Kobuvirus SZAL6 IRES, Crohivirus B (CrVB) IRES, CVB3 IRES, and SAFV IRES. The sequences of the IRES elements are provided in SEQ ID NOs: 348-389. Briefly, circular RNA constructs were generated with truncated IRES elements operably linked to a gaussia luciferase coding sequence. HepG2 cells were transfected with the circular RNAs. Luminescence in the supernatant was assessed 24 and 48 hours after transfection. Stability of expression was calculated as the ratio of the expression level at the 48-hour time point relative to that at the 24-hour time point.

[1706] As shown in FIG. 51, truncations had variable effects depending on the identity of the IRES, which may depend on the initiation mechanism and protein factors used for translation, which often differs between IRESs. 5′ and 3′ deletions can be effectively combined, for example, in the context of CKV IRES. Addition of a canonical Kozak sequence in some cases significantly improved expression (as in SAFV, Full vs Full+K) or diminished expression (as in CKV, 5d40/3d122 vs 5d40/3d122+K).

### Example 55

[1707] This example describes modifications of CK-739, AP-748, and PV-743 IRES sequences, including mutations altative translation initiation sites. Briefly, circular RNA constructs were generated with modified IRES elements operably linked to a gaussia luciferase coding sequence. Luminescence from secreted gaussia luciferase in supernatant was measured 24 and 48 hours after transfection of 1C1C7 cells with RNA.

[1708] CUG was the most commonly found alternative start site but many others were also characterized. These triplets can be present in the IRES scanning tract prior to the start codon and can affect translation of correct polypeptides. Four alternative start site mutations were created, with the IRES sequences provided in SEQ ID NOs: 378-380. As shown in FIG. 52, mutations of alternative translation initiation sites in the CK-739 IRES affected translation of correct polypeptides, positively in some instances and negatively in other instances. Mutation of all the alternative translation initiation sites reduced the level of translation.

[1709] Alternative Kozak sequences, 6 nucleotides before start codon, can also affect expression levels. The 6-nucleotide sequence upstream of the start codon were gTcacG, aaagtc, gTcacG, gtcatg, gcaaac, and acaacc, respectively, in CK-739 IRES and Sample Nos. 1-5 in the “6 nt Pre-Start” group. As shown in FIG. 52, substitution of certain 6-nucleotide sequences prior to the start codon affected translation.

[1710] It was also observed that 5′ and 3′ terminal deletions in AP-748 and PV-743 IRES sequences reduced expression. However, in the CK-739 IRES, which had a long scanning tract, translation was relatively unaffected by deletions in the scanning tract.

### Example 56

[1711] This example describes modifications of selected IRES sequences by inserting 5′ and/or 3′ untranslated regions (UTRs) and creating IRES hybrids. Briefly, circular RNA constructs were generated with modified IRES elements operably linked to a gaussia luciferase coding sequence. Luminescence from secreted gaussia luciferase in supernatant was measured 24 and 48 hours after transfection of HepG2 cells with RNA.

[1712] IRES sequences with UTRs inserted are provided in SEQ ID NOs: 390-401. As shown in FIG. 53, insertion of 5′ UTR right after the 3′ end of the IRES and before the start codon slightly increased the translation from Caprine Kobuvirus (CK) IRES but in some instances abrogated translation from Salivirus SZ1 IRES. Insertion of 3′ UTR right after the stop cassette had no impact on both IRES sequences.

[1713] Hybrid CK IRES sequences are provided in SEQ ID NOs: 390-401. CK IRES was used as a base, and specific regions of the CK IRES were replaced with similar-looking structures from other IRES sequences, for example, SZ1 and AV (Aichivirus). As shown in FIG. 53, certain hybrid synthetic IRES sequences were functional, indicating that hybrid IRES can be constructed using parts from distinct IRES sequences that show similar predicted structures while deleting these structures completely abrogates IRES function.

### Example 57

[1714] This example describes modifications of circular RNAs by introducing stop codon or cassette variants. Briefly, circular RNA constructs were generated with IRES elements operably linked to a gaussia luciferase coding sequence followed by variable stop codon cassettes, which included a stop codon in each frame and two stop codons in the reading frame of the gaussia luciferase coding sequence. 1C1C7 cells were transfected with the circular RNAs. Luminescence in supernatant was assessed 24 and 48 hours after transfection.

[1715] The sequences of the stop codon cassettes are set forth in SEQ ID NOs: 3600-3606. As shown in FIG. 54, certain stop codon cassettes improved expression levels, although they had little impact on expression stability. In particular, a stop cassette with two frame 1 (the reading frame of the gaussia luciferase coding sequence) stop codons, the first being TAA, followed by a frame 2 stop codon and a frame 3 stop codon, is effective for promoting functional translation.

### Example 58

[1716] This example describes modifications of circular RNAs by inserting 5′ UTR variants. Briefly, circular RNA constructs were generated with IRES elements with 5′ UTR variants inserted between the 3′ end of the IRES and the start codon, the IRES being operably linked to a gaussia luciferase coding sequence. 1C1C7 cells were transfected with the circular RNAs. Luminescence in supernatant was assessed 24 and 48 hours after transfection.

[1717] The sequences of the 5′ UTR variants are set forth in SEQ ID NOs: 3596-3599. As shown in FIG. 55, a CK IRES with a canonical Kozak sequence (UTR4) was more effective when a 36-nucleotide unstructured/low GC spacer sequence was added (UTR2), suggesting that the GC-rich Kozak sequences may interfere with core IRES folding. Using a higher-GC/structured spacer with a kozak sequence did not show the same benefit (UTR3), possibly due to interference with IRES folding by the spacer itself. Mutating the kozak sequence to gTcacG (UTR1) enhanced translation to the same level as the Kozak+spacer alternative without the need for a spacer.

### Example 59

[1718] This example describes the impact of miRNA target sites in circular RNAs on expression levels. Briefly, circular RNA constructs were generated with IRES elements operably linked to a human erythropoietin (hEPO) coding sequence, where 2 tandem miR-122 target sites were inserted into the construct. miR-122-expressing Huh7 cells were transfected with the circular RNAs. hEPO expression in supernatant was assessed 24 and 48 hours after transfection by sandwich ELISA.

[1719] As shown in FIG. 56, the hEPO expression level was obrogated where the miR-122 target sites were inserted into the circular RNA. This result demonstrates that expression from circular RNA can be regulated by miRNA. As such, cell type- or tissue-specific expression can be achieved by incorporating target sites of the miRNAs expressed in the cell types in which expression of the recombinant protein is undesirable.

### Example 60

[1720] This example shows transfection of human tumor cells by LNPs in vitro. SupT1 cells (a human T cell tumor line) and MV4-11 cells (a human macrophage tumor line) were plated at 100,000 cells/well and 100,000 cells/well, respectively, in a 96-well plate overnight. Then, LNPs containing circRNA coding for Firefly Luciferase (FLuc) were added to the cells at 200 ng RNA/well. After 24-hour incubation, luminescence was quantified using the Bright-Glo Luciferase Assay System (Promega) according to manufacturer's instructions and background luminescence from cells not treated with LNP was subtracted. FIG. 57 quantifies the measured Firefly luminescence, indicating that LNPs comprising Lipid 10a-27 (10a-27 (4.5D) LNP, see Example 70) or Lipid 10a-26 (10a-26 (4.5D) LNP, see Example 70) can transfect and express circRNA in both human T cell and macrophage tumor lines in vitro. 10a-27 (4.5D) LNP resulted in higher luminescence than 10a-26 (4.5D) LNP showing that levels of transfection of LNPs to human tumor cells can be affected by formulation.

### Example 61

[1721] This example shows transfection of primary human activated T cells in vitro. Primary human T cells from independent donors were stimulated with aCD3/aCD28 and allowed to proliferate for 6 days in the presence of human serum and IL-2. Then, 100,000 cells were plated in a 96 well plate and LNPs containing circRNA coding for Firefly Luciferase (FLuc) were added to the cells at 200 ng RNA/well with or without Apolipoprotein E3 (ApoE3). After 24-hour incubation, luminescence was quantified using the Bright-Glo Luciferase Assay System (Promega) according to manufacturer's instructions and background luminescence from cells not treated with LNPs was subtracted. FIG. 58 shows the measured Firefly luminescence across 4 independent donors, demonstrating that all LNPs tested transfect primary human T cells in vitro. LNPs containing Lipid 10a-27 generally produced higher luminescence than those containing Lipid 10a-26. Furthermore, the addition of ApoE3 generally increased the expression of luciferase more for 10a-27 (5.7A) and 10a-26 (5.7A) (average of 4.4-fold and 9.3-fold across 4 donors, respectively) compared to 10a-27 (4.5D) and 10a-26 (4.5D) (3.1-fold and 2.6-fold, respectively). This suggests that the helper lipid, PEG lipid, and ionizable lipid:phosphate ratio all contribute to the ApoE-dependence of different formulations made with the same ionizable lipids. (See Example 70 for LNP formulation procedure, e.g., for 10a-27 (5.7A), 10a-26 (5.7A), 10a-27 (4.5D), and 10a-26 (4.5D) LNPs.)

### Example 62

[1722] This example shows that different tail chemistries of LNPs result in different uptake mechanisms into T cells. To quantify the percent of human T cells expressing circRNA, LNPs containing eGFP circRNA were added to activated primary human T cells (prepared as described above in Example 61) at 200 ng RNA/well with or without ApoE3. After 24-hour incubation, cells were analyzed by flow cytometry and the percentage of live, GFP+ T cells was quantified. FIG. 59 graphs the % GFP+ T cells for 2 independent donors, with 5-10% of cells being GFP+ for LNP contatining Lipid 10a-27 (10a-27 (4.5D) LNP, see Example 70) and for LNP containing Lipid 10a-46 (10a-46 (5.7A) LNP, see Example 70). Although ApoE3 addition resulted in increased transfection for 10a-27 (4.5D) LNP, it did not appear to increase transfection for 10a-46 (5.7A) LNP, suggesting the different tail chemistries between Lipids 10a-27 and 10a-46 may mediate different uptake mechanisms into T cells.

### Example 63

[1723] This example describes immune cell expression of Cre in a Cre reporter mouse model.

[1724] Ai9 mice (B6.Cg-Gt(ROSA)₂₆Sortm9(CAG-tdTomato)Hze/J, female, 6-8 weeks, n=3 per group) were injected i.v. with 0.5 mg/kg Cre circRNA LNPs or PBS. Ai9 mice transcribe and translate the fluorescent reporter tdTomato upon Cre recombination; meaning cells which are tdTomato+ have successfully been transfected with Cre circRNA. After 48 hours, mice were euthanized and their spleens were collected and manually processed into single cell suspensions. The splenocytes were stained for dead cells (LiveDead Fixable Aqua, Thermo) and with anti-mouse antibodies (TCR-B chain, BV421, H57-597; CD45, BV711, 30-F11; CD11b, BV785, ICRF44; NKp46, AF647, 29A1.4; CD19, APC/750, 6D5; TruStain FcX, 93; all antibodies from Biolegend) at 1:200 ratio. Flow cytometry was performed using an Attune Nxt Flow Cytometer (Thermo).

[1725] The percent of tdTomato+ cells in splenic myeloid cells (CD11b+), B cells (CD19+), and T cells (TCR-B+) is presented in FIG. 60. Lipid 10a-27 and Lipid 10a-46 differ only by their tail chemistries, and formulations made with Lipid 10a-27 transfect significantly more splenic immune cells than those made with Lipid 10a-46. Additionally, 10a-27 (4.5D) LNP (see Example 70) formulated with Cre circRNA transfected approximately twice as many T cells than those formulated with Cre linear mRNA, suggesting that circRNA may result in improved protein expression in splenic T cells compared to linear mRNA.

TABLE 23
Characterization of LNPs

| | Z-Average | | RNA Encapsulation |
|---|---|---|---|
| Formulation | (nm) | PDI | Efficiency (%) |
| 10a-27 (4.5D), Study 1 | 65 | 0.07 | 96 |
| 10a-26 (4.5D), Study 1 | 74 | 0.06 | 94 |
| 10a-27 (4.5D), with mCre, | 75 | 0.05 | 93 |
| Study 1 | | | |
| 10a-46 (5.7A), Study 2 | 86 | 0.01 | 94 |

### Example 64

[1726] This example shows immune cell expression of mOX40L circRNA in wildtype mice.

[1727] C57BL/6 mice (female, 6-8 weeks, n=3 or 4 per group) were injected intravenously with 0.5 mg/kg mOX40L circRNA LNPs or PBS. After 24 hours, mice were euthanized and their spleens were collected and manually processed into single cell suspensions. Splenocytes were stained for dead cells (LiveDead Fixable Aqua, Thermo) and with anti-mouse antibodies (TCR-B chain, PacBlue, H57-597; CD11b, FITC, ICRF44; B220, PE, RA3-6B2; CD45, PerCP, 30-F11; mOX40L, AF647, RM134L; NK1.1, APC/750, PK136; TruStain FcX, 93; all antibodies from Biolegend) at 1:200. Flow cytometry was performed using an Attune NxT Flow Cytometer (Thermo).

[1728] The percent of mOX40L+ cells in splenic myeloid (CD11b+), T cells (TCR-B+), and NK cells (NK1.1+) is presented in FIG. 61. Notably, significantly different transfection efficiencies are observed between the same formulations injected intravenously in different buffers (hypotonic PBS, isotonic PBS, and isotonic TBS). 10a-27 4.5D LNP in hypotonic PBS results in approximately 14% myeloid cell transfection, 6% T cell transfection, and 21% NK cell transfection in the spleen. Of the formulations injected in isotonic buffer, 10a-27 DSPC 5.7A LNP demonstrates myeloid, T cell, and NK cell transfection in the spleen (9%, 3%, and 8%, respectively). (See Example 70 for LNP formulation procedure, e.g., for 10a-27 (4.5D) LNP and 10a-27 DSPC (5.7A) LNP.)

TABLE 24
Characterization of LNPs

| | | | RNA Encapsulation |
|---|---|---|---|
| Formulation | Z-Average (nm) | PDI | Efficiency (%) |
| 10a-27 (4.5D) | 63 | 0.02 | 93 |
| 10a-26 (4.5D) | 67 | 0.07 | 94 |
| 10a-27 DSPC (5.7A) | 82 | 0.05 | 96 |

### Example 65

[1729] This example shows single dose escalation of mOX40L circRNA-LNPs in wildtype mice. [1118] 57BL/6 mice (female, 6-8 weeks, n=3 per group) were injected intravenously with 1 mg/kg or 3 mg/kg mOX40L circRNA LNPs or buffer control. After 24 hours, mice were euthanized and their spleens were collected and manually processed into single cell suspensions. Splenocytes were stained for dead cells (LiveDead Fixable Blue, Thermo) and stained with anti-mouse antibodies (TCR-B chain, BV421, H57-597; CD19, BV605, 6D5; CD45, BV711, 30-F11; CD11b, BV785, ICRF44; CD11c, FITC, N418; CD8a, PerCP, 53-6.7; mOX40L, PE, RM134L; NKp46, AF647, 29A1.4; CD4, APC/750, GK1.5; TruStain FcX, 93; all antibodies from Biolegend) at 1:200. Flow cytometry was performed using a BD FACSSymphony flow cytometer.

[1730] The percent of mOX40L+ cells in splenic T cells (all TCR-B+), CD4+ T cells (TCR-B+, CD4+), CD8+ T cells (TCR-B+, CD8a+), B cells (CD19+), NK cells (NKp46+), dendritic cells (CD11c+), and other myeloid cells (CD11b+, CD11c−) are shown in FIG. 62A and FIG. 62B, with corresponding mouse weight change after 24 hours shown in FIG. 62C. A dose-dependent increase in immune cell subset transfection is observed across 1 mg/kg and 3 mg/kg for all groups, with the exception of 10a-27 (4.5D) LNP 1x PBS group. At the 3 mg/kg dose, three different LNPs (10a-27 (4.5D) in TBS, 10a-26 (4.5D) in PBS, and 10a-27 DSPC (5.7A) in TBS; see Example 70 for formulation procedures) achieve 10-20% mOX40L transfection in splenic T cells, with similar transfection rates observed among CD4+ and CD8+ subsets. These three formulations also result in approximately 20% B cell, 60-70% dendritic cell, 60-70% NK cell, and 30-40% other myeloid cell mOX40L transfection in the spleen at 3 mg/kg. These three formulations lead to only minor (0-3%) mouse weight loss at 24 hours at the 3 mg/kg single dose with no reported clinical observations.

TABLE 25
Characterization of LNPs

| | | | RNA Encapsulation |
|---|---|---|---|
| Formulation | Z-Average (nm) | PDI | Efficiency (%) |
| 10a-27 (4.5D) | 76 | 0.06 | 91 |
| 10a-26 (4.5D) | 67 | 0.01 | 88 |
| 10a-27 DSPC (5.7A) | 77 | 0.01 | 93 |

### Example 66

[1731] This example shows circRNA-LNP CAR-mediated B cell depletion in mice.

[1732] C57BL/6 mice (female, 6-8 weeks, n=5 per group) were injected intravenously with 0.5 mg/kg aCD19-CAR circRNA LNPs or control FLuc circRNA LNPs on Days 0, 2, 5, 7, and 9. On Days −1, 1, 8 and 12, submandibular bleeds were performed to collect blood. 30 μL of blood was lysed with ACK lysis buffer and washed with MACS buffer to isolate immune cells. On Day 12, mice were euthanized and their spleens were collected and manually processed into single cell suspensions. To assess the frequency of B cells in the blood and spleen, these single cell suspensions were stained for dead cells (LiveDead Fixable Aqua, Thermo) and stained with anti-mouse antibodies (TCR-B chain, PacBlue, H57-597; CD11b, FITC, ICRF44; B220, PE, RA3-6B2; CD45, PerCP, 30-F11; TruStain FcX, 93; all antibodies from Biolegend) at 1:200. Flow cytometry was performed using an Attune NxT Flow Cytometer (Thermo).

[1733] FIG. 63A quantifies the B cell depletion observed in this study, as defined by percentage of B220+ B cells of live, CD45+ immune cells. The B cell depletion in the aCD19-CAR circRNA LNP group was compared to its respective FLuc circRNA LNP control on Days 8 and 12 (for blood) and Day 12 (for spleen). In the blood, aCD19-CAR 10a-27 (4.5D) and 10a-26 (4.5D) LNPs resulted in approximately 28% and 17% reductions, respectively, in % B220+ of live CD45+ at Day 8 compared to FLuc control. In the spleen, aCD19-CAR 10a-27 (4.5D) and 10a-26 (4.5D) LNPs resulted in approximately 5% and 9% reductions in % B220+ of live CD45+ at Day 12 compared to FLuc control as shown in FIG. 63B. In all, these results suggest that CAR-mediated B cell depletion is occurring in mice treated with aCD19-CAR circRNA LNPs for Lipid 10a-27 (4.5D) and Lipid 10a-26 (4.5D).

[1734] In addition, FIG. 63C shows the percent weight gain of mice in this study. There was not significant weight loss on average from the 10a-27 4.5D or 10a-26 4.5D LNP treated mice (5×0.5 mg/kg over 9 days), suggesting that these LNPs may be well-tolerated in mice at this dose and schedule.

TABLE 26
Characterization of LNPs

| | Z-Average | | RNA Encapsulation |
|---|---|---|---|
| Formulation | (nm) | PDI | Efficiency (%) |
| 10a-27 (4.5D), oLuc | 65 | 0.03 | 93 |
| 10a-27 (4.5D), oaCD19-CAR | 74 | 0.02 | 96 |
| 10a-26 (4.5D), oLuc | 71 | 0.04 | 91 |
| 10a-26, (4.5D), oaCD19-CAR | 71 | 0.04 | 93 |

### Example 67

[1735] LNP and Circular RNA Construct Containing Anti-CD19 CAR Reduces B Cells in the Blood and Spleen In Vivo.

[1736] Circular RNA constructs encoding an anti-CD19 CAR expression were encapsulated within lipid nanoparticles as described above. For comparison, circular RNAs encoding luciferase expression were encapsulated within separate lipid nanoparticle.

[1737] C57BL/6 mice at 6 to 8 weeks old were injected with either LNP solution every other day for a total of 4 LNP injections within each mouse. 24 hours after the last LNP injection, the mice's spleen and blood were harvested, stained, and analyzed via flow cytometry. As shown in FIG. 64A and FIG. 64B, mice containing LNP-circular RNA constructs encoding an anti-CD19 CAR led to a statistically significant reduction in CD19+ B cells in the peripheral blood and spleen compared to mice treated with LNP-circular RNA encoding a luciferase.

### Example 68

[1738] IRES Sequences Contained within Circular RNA Encoding CARs Improves CAR Expressions and Cytotoxicity of T-Cells.

[1739] Activated murine T-cells were electroporated with 200ng of circular RNA constructs containing a unique IRES and a murine anti-CD19 1D3(CAR expression sequence. The IRES contained in these constructs were derived either in whole or in part from a Caprine Kobuvirus, Apodemus Picornavirus, Parabovirus, or Salivirus. A Caprine Kobuvirus derived IRES was additionally codon optimized. As a control, a circular RNA containing a wild-type zeta mouse CAR with no IRES was used for comparison. The T-cells were stained for the CD-19 CAR 24 hours post electroporation to evaluate for surface expression and then co-cultured with A20 Fluc target cells. The assay was then evaluated for cytotoxic killing of the Fluc+A20 cells 24 hours after co-culture of the T-cells with the target cells.

[1740] As seen in FIGS. 65A, 65B, 65C, and 66, the unique IRES were able to increase the frequency that the T-cells expressed the CAR protein and level of CAR expression on the surface of the cells. The increase frequency of expression of the CAR protein and level of CAR expression on the surface of cells lead to an improved anti-tumor response.

### Example 69

[1741] Cytosolic and Surface Proteins Expressed from Circular RNA Construct in Primary Human T-Cells.

[1742] Circular RNA construct contained either a sequence encoding for a fluorescent cytosolic reporter or a surface antigen reporter. Fluorescent reporters included green fluorescent protein, mCitrine, mWasabi, Tsapphire. Surface reporters included CD52 and Thy1.1^{bio}. Primary human T-cells were activated with an anti-CD3/anti-CD28 antibody and electroporated 6 days post activation of the circular RNA containing a reporter sequence. T-cells were harvested and analyzed via flow cytometry 24 hours post electroporation. Surface antigens were stained with commercially available antibodies (e.g., Biolegend, Miltenyi, and BD).

[1743] As seen in FIG. 67A and FIG. 67B, cytosolic and surface proteins can be expressed from circular RNA encoding the proteins in primary human T-cells.

### Example 70

[1744] Circular RNAs Containing Unique IRES Sequences have Improved Translation Expression Over Linear mRNA.

[1745] Circular RNA constructs contained a unique IRES along with an expression sequence for Firefly luciferase (FLuc).

[1746] Human T-cells from 2 donors were enriched and stimulated with anti-CD3/anti-CD28 antibodies. After several days of proliferation, activated T cells were harvested and electroporated with equal molar of either mRNA or circular RNA expressing FLuc payloads. Various IRES sequences, including those derived from Caprine Kobuvirus, Apodemus Picornavirus, and Parabovirus, were studied to evaluate expression level and durability of the payload expression across 7 days. Across the 7 days, the T-cells were lysed with Promega Brightglo to evaluate for bioluminsences.

[1747] As shown in FIGS. 68C, 68D, 68E, 68F, and 68G, the presence of an IRES within a circular RNA can increase translation and expression of a cytosolic protein by orders of magnitude and can improve expression compared to linear mRNA. This was found consistent across multiple human T-cell donors.

### Example 71

### Example 71A: LNP-Circular RNA Encoding Anti-CD19 Mediates Human T-Cell Killing of K562 Cells

[1748] Circular RNA constructs contained a sequence encoding for anti-CD19 antibodies. Circular RNA constructs were then encapsulated within a lipid nanoparticle (LNP).

[1749] Human T-cells were stimulated with anti-CD3/anti-CD28 and left to proliferate up to 6 says. At day 6, LNP-circular RNA and ApoE3 (1 μg/mL) were co-cultured with the T-cells to mediate transfection. 24 hours later, Fluc+K562 cells were electroporated with 200ng of circular RNA encoding anti-CD19 antibodies and were later co-cultured at day 7. 48 hours post co-culture, the assay was assessed for CAR expression and cytotoxic killing of K562 cells through Fluc expression.

[1750] As shown in FIG. 69A and FIG. 69B, there is T-cell expression of anti-CD19 CAR from the LNP-mediated delivery of a CAR in vitro to T-cells and its capability to lyse tumor cells in a specific, antigen dependent manner in engineered K562 cells.

### Example 71B: LNP-Circular RNA Encoding Anti-BCMA Antibody Mediates Human T-Cell Killing of K562 Cells

[1751] Circular RNA constructs contained a sequence encoding for anti-BCMA antibodies. Circular RNA constructs were then encapsulated within a lipid nanoparticle (LNP).

[1752] Human T-cells were stimulated with anti-CD3/anti-CD28 and left to proliferate up to 6 says. At day 6, LNP-circular RNA and ApoE3 (1 μg/mL) were co-cultured with the T-cells to mediate transfection. 24 hours later, Fluc+K562 cells were electroporated with 200ng of circular RNA encoding anti-BCMA antibodies and were later co-cultured at day 7. 48 hours post co-culture, the assay was assessed for CAR expression and cytotoxic killing of K562 cells through Fluc expression.

[1753] As shown in FIG. 69B, there is T-cell expression of BCMA CAR from the LNP-mediated delivery of a CAR in vitro to T-cells and its capability to lyse tumor cells in a specific, antigen dependent manner in engineered K562 cells.

### Example 72

[1754] Anti-CD19 CAR T-Cells Exhibit Anti-Tumor Activity In Vitro.

[1755] Human T-cells were activated with anti-CD3/anti-CD28 and electroporated once with 200ng of anti-CD19 CAR-expressing circular RNA. Electroporated T-cells were co-cultured with FLuc+ Nalm6 target cells and non-target Fluc+K562 cells to evaluate CAR-mediated killing. After 24 hours post co-culture, the T-cells were lysed and examined for remanent FLuc expression by target and non-target cells to evaluate expression and stability of expression across 8 days total.

[1756] As shown in FIGS. 70A and 70B, T-cells express circular RNA CAR constructs in specific, antigen-dependent manner. Results also shows improved cytotoxicity of circular RNAs encoding CARs compared to linear mRNA encoding CARs and delivery of a functional surface receptor.

### Example 73

[1757] Effective LNP Transfection of Circular RNA Mediated with ApoE3

[1758] Human T-cells were stimulated with anti-CD3/anti-CD28 and left to proliferate up to 6 days. At day 6, lipid nanoparticle (LNP) was and circular RNA expressing green fluorescence protein solution with or without ApoE3 (1 μg/mL) were co-cultured with the T-cells. 24 hours later, the T-cells were stained for live/dead T-cells and the live T-cells were analyzed for GFP expression on a flow cytometer.

[1759] As shown by FIGS. 71A, 71B, 71C, 72D, and 71E, efficient LNP transfection can be mediated by ApoE3 on activated T-cells, followed by significant payload expression. These results were exhibited across multiple donors.

### Example 74

### Example 74A: Lipid Nanoparticle Formulation Procedure

[1760] A Zetasizer Nano ZS (Malvern Instruments Ltd, Malvern, Worcestershire, UK) can be used to determine the particle size, the polydispersity index (PDI) and the zeta potential of the transfer vehicle compositions in 1×PBS in determining particle size and 15 mM PBS in determining zeta potential.

[1761] Ultraviolet-visible spectroscopy can be used to determine the concentration of a therapeutic and/or prophylactic (e.g., RNA) in transfer vehicle compositions. 100 μL of the diluted formulation in 1×PBS is added to 900 μL of a 4:1 (v/v) mixture of methanol and chloroform. After mixing, the absorbance spectrum of the solution is recorded, for example, between 230 nm and 330 nm on a DU 800 spectrophotometer (Beckman Coulter, Beckman Coulter, Inc., Brea, CA). The concentration of therapeutic and/or prophylactic in the transfer vehicle composition can be calculated based on the extinction coefficient of the therapeutic and/or prophylactic used in the composition and on the difference between the absorbance at a wavelength of, for example, 260 nm and the baseline value at a wavelength of, for example, 330 nm.

[1762] For transfer vehicle compositions including RNA, a QUANT-IT™ RIBOGREEN® RNA assay (Invitrogen Corporation Carlsbad, CA) can be used to evaluate the encapsulation of RNA by the transfer vehicle composition. The samples are diluted to a concentration of approximately 5 μg/mL or 1 μg/mL in a TE buffer solution (10 mM Tris-HCl, 1 mM EDTA, pH 7.5). 50 μL of the diluted samples are transferred to a polystyrene 96 well plate and either 50 μL of TE buffer or 50 μL of a 2-4% Triton X-100 solution is added to the wells. The plate is incubated at a temperature of 37° C. for 15 minutes. The RIBOGREEN® reagent is diluted 1:100 or 1:200 in TE buffer, and 100 μL of this solution is added to each well. The fluorescence intensity can be measured using a fluorescence plate reader (Wallac Victor 1420 Multilablel Counter; Perkin Elmer, Waltham, MA) at an excitation wavelength of, for example, about 480 nm and an emission wavelength of, for example, about 520 nm. The fluorescence values of the reagent blank are subtracted from that of each of the samples and the percentage of free RNA is determined by dividing the fluorescence intensity of the intact sample (without addition of Triton X-100) by the fluorescence value of the disrupted sample (caused by the addition of Triton X-100).

### Example 74B: RNA Encapsulation, Total Flux, and Percent Expression In Vitro for Ionizable Lipid:DOPE:Cholesterol:DSPE-PEG(2000) Formulation Ratio of 62:4:33:1

[1763] Lipid nanoparticles were formulated using Lipid 10a-27, 10a-26, 10a-46, or 10a-45 in a ionizable lipid:DOPE:cholesterol:DSPE-PEG(2000) formulation ratio of 62:4:33:1 mol, and encapsulate the RNA molecule at a lipid-nitrogen-to-phosphate ratio (N:P) of 4.5. Expression of the RNA was present in all formulations. There was a greater total flux and percent expression within the spleen as shown in FIGS. 72A and 72B respectively.

| | | | | Ionizable lipid:Helper | Z- | | RNA |
|---|---|---|---|---|---|---|---|
| | Ionizable | Helper | | lipid:Cholesterol:PEG- | Average | | Encapsulation |
| Formulation | lipid | lipid | PEG-lipid | lipid (mol %) | (nm) | PDI | Efficiency (%) |
| 10a-27 | Lipid | DOPE | DSPE- | 62:4:33:1 | 71 | 0.02 | 94 |
| (4.5D) | 10a-27 | | PEG(2000) | | | | |
| 10a-26 | Lipid | DOPE | DSPE- | 62:4:33:1 | 71 | 0.04 | 92 |
| (4.5D) | 10a-26 | | PEG(2000) | | | | |
| 10a-46 | Lipid | DOPE | DSPE- | 62:4:33:1 | 110 | 0.1 | 93 |
| (4.5D) | 10a-26 | | PEG(2000) | | | | |
| 10a-45 | Lipid | DOPE | DSPE- | 62:4:33:1 | 157 | 0.13 | 83 |
| (4.5D) | 10a-25 | | PEG(2000) | | | | |

### Example 74C: RNTA Encapsulation, Total Flux, and Percent Expression In Vitro for Ionizable Lipid:DOPE:Cholesterol:DMG-PEG(2000) Formulation Ratio of 50:10:38.5:1.5

[1764] Lipid nanoparticles were formulated using Lipid 10a-46 or 10a-45 in a ionizable lipid:DOPE:cholesterol:DMG-PEG(2000) formulation ratio of 50:10:38.5:1.5 mol, and encapsulate the RNA molecule at a lipid-nitrogen-to-phosphate ratio (N:P) of 5.7. Expression of the RNA was present in all formulations. There was a greater total flux and percent expression within the spleen as shown in FIGS. 72C and 72D respectively.

| | | | | Ionizable | Z- | | RNA |
|---|---|---|---|---|---|---|---|
| | Ionizable | Helper | | lipid:DOPE:Cholesterol:PEG- | Average | | Encapsulation |
| Formulation | lipid | lipid | PEG-lipid | lipid (mol %) | (nm) | PDI | Efficiency (%) |
| 10a-45 (5.7A) | Lipid | DOPE | DMG- | 50:10:38.5:1.5 | 74 | 0.04 | 95 |
| | 10a-45 | | PEG(2000) | | | | |
| 10a-46 (5.7A) | Lipid | DOPE | DMG- | 50:10:38.5:1.5 | 84 | 0.04 | 96 |
| | 10a-46 | | PEG(2000) | | | | |

### Example 741: RbA Encapsulation, Total Flux, and Percent Expression In Vitro for Ionizable Lipid:DOPE:Cholesterol:DMG-PEG(2000) Formulation Ratio of 50:10:38.5:1.5 or for Ionizable Lipid: DSPCPcholesterol:C₁₄-PEG(2000) Formulation Ratio 35:16:46.2.5

[1765] Lipid nanoparticles were formulated using Lipid 10a-45 or 10-a-46 in an ionizable lipid:DOPE:cholesterol:DMG-PEG(2000) formulation ratio of 50:10:38.5:1.5 mol % or in an ionizable lipid: DSPC:cholesterol:C₁₄-PEG(2000) formulation ratio of 35:16:46.2.5 mol, and encapsulate the RNA molecule at a lipid-nitrogen-to-phosphate ratio (N:P) of 5.7 or 4.5. Expression of the RNA was present in all formulations. There was a greater total flux and percent expression within the spleen as shown in FIGS. 72E and 72F respectively.

| | | | | Ionizable lipid:Helper | Z- | | RNA |
|---|---|---|---|---|---|---|---|
| | Ionizable | Helper | | lipid:Cholesterol:PEG- | Average | | Encapsulation |
| Formulation | lipid | lipid | PEG-lipid | lipid (mol %) | (nm) | PDI | Efficiency (%) |
| 10a-45 DSPC | Lipid | DSPC | C₁₄- | 35:16:46.2.5 | 56 | 0.22 | 94 |
| (5.7E) | 10a-45 | | PEG(2000) | | | | |
| 10a-46 DSPC | Lipid | DSPC | C₁₄- | 35:16:46.2.5 | 68 | 0.02 | 95 |
| (5.7E) | 10a-46 | | PEG(2000) | | | | |
| 10a-46 | Lipid | DOPE | DMG- | 50:10:38.5:1.5 | 91 | 0.13 | 93 |
| (4.5A) | 10a-46 | | PEG(2000) | | | | |
| 10a-46 | Lipid | DOPE | DMG- | 50:10:38.5:1.5 | 76 | 0.06 | 93 |
| (5.7A) | 10a-46 | | PEG(2000) | | | | |

### Example 74E: RNTA Encapsulation, Total Flux, and Percent Expression In Vitro for Ionizable Lipid:DOPE:Cholesterol:DSPE-PEG(2000) Formulation Ratio of 62:4:33:1 or for Ionizable Lipid:DSPC:Cholesterol:DMG-PEG(2000) Formulation Ratio of 50:10:38.5:1.5

[1766] Lipid nanoparticles were formulated using Lipid 10a-26 or 10a-27 in a ionizable lipid:DOPE:cholesterol:DSPE-PEG(2000) formulation ratio of 62:4:33:1 mol % o (encapsulating the RNA molecule at a N:P ratio of 4.5) or ionizable lipid:DSPC:cholesterol:DMG-PEG(2000) formulation ratio of 50:10:38.5:1.5 mol % o (encapsulating the RNA molecule at a N:P ratio of 5.7). Expression of the RNA was present in all formulations. There was a greater total flux and percent expression within the spleen as shown in FIGS. 72G and 72H respectively.

| | | | | Ionizable lipid:Helper | Z- | | RNA |
|---|---|---|---|---|---|---|---|
| | Ionizable | Helper | | lipid:Cholesterol:PEG- | Average | | Encapsulation |
| Formulation | lipid | lipid | PEG-lipid | lipid (mol %) | (nm) | PDI | Efficiency (%) |
| 10a-27 | Lipid | DOPE | DSPE- | 62:4:33:1 | 82 | 0.06 | 94 |
| (4.5D) | 10a-27 | | PEG(2000) | | | | |
| 10a-26 | Lipid | DOPE | DSPE- | 62:4:33:1 | 68 | 0.08 | 91 |
| (4.5D) | 10a-26 | | PEG(2000) | | | | |
| 10a-27 DSPC | Lipid | DSPC | DMG- | 50:10:38.5:1.5 | 79 | 0.06 | 96 |
| (5.7A) | 10a-27 | | PEG(2000) | | | | |
| 10a-26 DSPC | Lipid | DSPC | DMG- | 50:10:38.5:1.5 | 79 | 0.05 | 93 |
| (5.7A) | 10a-26 | | PEG(2000) | | | | |

### Example 74F: RNA Encapsulation, Total Flux, and Percent Expression In Vitro for Ionizable Lipid:DOPE:Cholesterol:DMG-PEG(2000) Formulation Ratio of 50:10:38.5:1.5

[1767] Lipid nanoparticles were formulated using Lipid 10a-26, 10a-27, or 10a-130 and/or Lipid

[1768] 3-III-1 (represented by

[chemical structure]

in a ionizable lipid:DSPC:cholesterol:DMG-PEG(2000) formulation ratio of 50:10:38.5:1.5 mol %, and encapsulate the RNA molecule at a N:P ratio of 5.7. Expression of the RNA was present in all formulations. There was a greater total flux and percent expression within the liver as shown in FIGS. 721 and 72J respectively.

[1769] TNS and the particle's pKₐ was also calculated. 5 μL of 60 μg/mL 2-(p-toluidino) naphthalene-6-sulfonic acid (TNS) and 5 μL of 30 μg of RNA/mL lipid nanoparticles were added in to wells with HEPES buffer ranging from pH 2-12. The mixture was then shaken at room temperature for 5 minutes, and read for fluorescence (excitation 322 nm, emission 431 nm) using a plate reader. The inflection point of the fluorescence signal was calculated to determine the particle's pKₐ.

| | | | | Ionizable lipid:Helper | Z- | | | | |
|---|---|---|---|---|---|---|---|---|---|
| | Ionizable | Helper | | lipid:Cholesterol:PEG- | Average | | EE | Conc. | |
| Formulation | lipid | lipid | PEG-lipid | lipid (mol %) | (nm) | PDI | (%) | (ug/mL) | pKa |
| 10a-27/III-1 | Lipid 10a-27/ | DOPE | DMG- | 50:10:38.5:1.5 | 74 | 0 | 96 | 55.8 | 7.4 |
| (5.7A) | Lipid 3-III- | | PEG(2000) | | | | | | |
| | 1 3:1 ratio | | | | | | | | |
| 10a-27III-1 | Lipid 10a-27/ | DOPE | DMG- | 50:10:38.5:1.5 | 85 | 0.1 | 93 | 51.9 | 6.3 |
| (5.7A) | Lipid 3-III- | | PEG(2000) | | | | | | |
| | 11:3 ratio | | | | | | | | |
| 10a-26/III-1 | Lipid 10a-26/ | DOPE | DMG- | 50:10:38.5:1.5 | 87 | 0.1 | 94 | 51.7 | 6.8 |
| (5.7A) | Lipid 3-III- | | PEG(2000) | | | | | | |
| | 13:1 ratio | | | | | | | | |
| 10a-26/III-1 | Lipid 10a-26/ | DOPE | DMG- | 50:10:38.5:1.5 | 97 | 0.1 | 90 | 53.1 | 6.2 |
| (5.7A) | Lipid 3-III- | | PEG(2000) | | | | | | |
| | 11:3 ratio | | | | | | | | |
| 10a-130 | Lipid 10a- | DOPE | DMG- | 50:10:38.5:1.5 | 60 | 0.1 | 89 | 53.8 | 6.7 |
| (5.7A) | 130 | | PEG(2000) | | | | | | |

### Example 74G: RNTA Encapsulation, Total Flux, and Percent Expression In Vitro for Ionizable Lipid:DOPE:Cholesterol:DSPE-PEG(2000) Formulation Ratio of 62:4:33:1 or for Ionizable Lipid:DSPC:Cholesterol:DMG-PEG(2000) Formulation Ratio of 50:10:38.5:1.5

[1770] Lipids nanoparticles were formulated using Lipid 10a-139 in a ionizable lipid:DOPE:cholesterol:DSPE-PEG(2000) formulation ratio of 62:4:33:1 mol % (encapsulating the RNA molecule at a N:P ratio of 4.5) or ionizable lipid:DOPE:cholesterol:DMG-PEG(2000) formulation ratio of 50:10:38.5:1.5 mol % o (encapsulating the RNA molecule at a N:P ratio of 5.7). Expression of the RNA was present in all formulations. There was a greater total flux and percent expression within the liver as shown in FIGS. 72K and 72L respectively.

| | | | | Ionizable lipid:Helper | Z- | | |
|---|---|---|---|---|---|---|---|
| | Ionizable | Helper | | lipid:Cholesterol:PEG- | Average | | EE |
| Formulation | lipid | lipid | PEG-lipid | lipid (mol %) | (nm) | PDI | (%) |
| 10a-139 | Lipid 10a- | DOPE | DSPE- | 62:4:33:1 | 93 | 0.01 | 79 |
| (4.5D) | 139 | | PEG(2000) | | | | |
| 10a-139 | Lipid 10a- | DSPC | DMG- | 50:10:38.5:1.5 | 122 | 0.02 | 95 |
| (5.7A) | 139 | | PEG(2000) | | | | |

### Example 75

[1771] This example illustrates expression of SARS-CoV2 spike protein expression in vitro. Circular RNA encoding SARS-CoV2 stabilized spike protein was transfected into 293 cells using MessengerMax Transfection Reagent. 24 hours after transfection, the 293 cells were stained with a CR3022 anti-spike primary antibody and APC-labeled secondary antibody.

[1772] FIG. 73A shows circularization efficiency of roughly 4.5kb SARS-Cov2 stabilized spike protein-encoding RNA resulting from an in vitro transcription reaction. FIG. 73B and FIG. 73C show SARS-CoV2 stabilized spike protein expression on 293 cells after the circular RNA transfection with MessengerMax Transfection Reagent relative to mock transfected cells.

[1773] FIG. 77A and FIG. 77B show SARS-CoV2 stabilized spike protein expression by percentage of cells and gMFI on 293 cells after transfection of a panel of circular RNAs, containing variable IRES sequences, codon optimized coding regions, and stabilized SARS-CoV2 spike proteins, using MessengerMax Transfection Reagent. FIG. 77C shows the relationship between MFI and percentage.

### Example 76

[1774] This example shows in vivo cytokine response after IV injection of 0.2 mg/kg circRNA preparations encapsulated in a lipid nanoparticle formulation. circRNA splicing reactions synthesized with GTP as a precursor RNA initiator and splicing nucleotide incited greater cytokine responses than purified circRNA and linear m1ω-mRNA due to the presence of triphosphorylated 5′ termini in the splicing reaction. Levels of IL-10, IL-6, IL-10, IL-12p70, RANTES, TNFα were measured from blood drawn 6 hours following intravenous injection of the LNP-formulated circRNA preparation. Mice injected with PBS were used as a control.

[1775] As seen in FIG. 74, circRNA splicing reactions synthesized with GTP as a precursor RNA initiator and splicing nucleotide incite greater cytokine responses than purified circRNA and linear m1ψ-mRNA due to the presence of triphosphorylated 5′ termini in the splicing reaction.

### Example 77

[1776] This example illustrates intramuscular delivery of varying doses of lipid nanoparticle containing circular RNAs. Mice were dosed with either 0.1p g, 1 μg, or 10 μg of circRNA formulated in lipid nanoparticles. Whole body IVIS imagine was conducted at 6 hours following an injection of luciferin (FIG. 75A and FIG. 75B). Ex vivo IVIS imaging was conducted at 24-hour. Flux values for liver, quad, and calf are shown in FIG. 75C. FIG. 76B and FIG. 76C show that the expression of the circular RNA is present in the muscle tissue of the mice.

### Example 78

[1777] This example illustrates expression of multiple circular RNAs in LNP formulations. Circular RNA constructs encoding either hEPO or fLuc were dosed in a single and mixed set of LNPs. hEPO concentration in the serum (FIG. 76A) and total flux by IVIS imaging (FIG. 76B) was determined. The results show that the circular RNA hEPO or fLuc constructs individually formulated or co-formulated expressed protein efficiently.

### Example 79

### Example 79A: Hepatocyte plating and culture

[1778] Primary human hepatocytes (PHH), primary mouse hepatocytes (PMH), primary cynomolgus monkey hepatocytes (PCH) were thawed and resuspended in hepatocyte thawing medium (Xenotech, cat #K8600/K8650) followed by centrifugation. The supernatant was discarded, and the pelleted cells were resuspended in hepatocyte plating medium (Xenotech, cat #K8200). Cells were counted via hemocytometer and plated on Bio-coat collagen-I coated 96-well plates at a density of 25,000 cells/well for PHH, 25,000 cells/well for PMH, and 50,000 cells/well for PCH in 100 uL of plating media. Plated cells were allowed to settle and adhere for 6 hours in a tissue culture incubator at 37° C. and 5% CO₂ atmosphere. After incubation cells were checked for monolayer formation after which the plating media was aspirated and replaced with 100ul of culture media (Xenotech, cat #K8300). Media was replaced every 24 hours for the duration of the experiment.

### Example 79B: In Vitro Screening of LNP Formulated Circular RNA Encoding Firefly Luciferase in Primary Human, Mouse, and Cynomolgus Monkey Hepatocytes

[1779] A circular RNA construct comprising a TIE and a coding element encoding for firefly luciferase was produced and transfected into LNPs. Various concentrations of LNPs formulated with the circularized RNA (oRNA) were diluted in hepatocyte media supplemented with 3% fetal bovine serum (FBS) (ThermoFisher, cat #A3160401). Media was aspirated from the cells prior to addition of 100 uL of LNP/FBS/media mixture to the cells.

[1780] Luciferase activity was detected in primary human (FIG. 90A), mouse (FIG. 90B), and cynomolgus monkey (FIG. 90C) hepatocyte. 24 hours post-transfection plates were removed from the incubator and allowed to equilibrate to room temperature for 15 mins. A volume of 100 μL of Firefly Luciferase one-step glow assay working solution (Pierce, cat #16196) was added to each well. The plate was placed on a microplate shaker (ThermoFisher, cat #S72050) and mixed at 300 rpm for 3 min. Post-mixing, the plate was allowed to incubate at room temperature for 10 min. Luminescence was read using a Varioskan or Bio-Tek Cytation5 instrument.

[1781] As seen in FIG. 90A, FIG. 90B, and FIG. 90C, TIE containing circular RNAs are capable of driving firefly luciferase protein expression in primary hepatocytes from multiple species in a dose-dependent manner when transfected in vitro with an LNP.

### Example 79C: In Vitro Screening of LNP Formulated Circular RNA Encoding Firefly Luciferase in Multiple Primary Human Hepatocyte Donors

[1782] A circular RNA construct comprising a TIE and a coding element encoding for firefly luciferase was produced and transfected into LNPs. Various concentrations of LNPs formulated with the circularized RNA (oRNA) were diluted in hepatocyte media supplemented with 3% fetal bovine serum (FBS) (ThermoFisher, cat #A3160401). Media was aspirated from the cells prior to addition of 100ul of LNP/FBS/media mixture to the cells.

[1783] Luciferase activity was detected in primary human (FIG. 91A), mouse (FIG. 91B), and cynomolgus monkey (FIG. 91C) hepatocyte. 24 hours post-transfection plates were removed from the incubator and allowed to equilibrate to room temperature for 15 mins. A volume of 100 μL of Firefly Luciferase one-step glow assay working solution (Pierce, cat #16196) was added to each well. The plate was placed on a microplate shaker (ThermoFisher, cat #S72050) and mixed at 300 rpm for 3 min. Post-mixing, the plate was allowed to incubate at room temperature for 10 min. Luminescence was read using a Varioskan or Bio-Tek Cytation5 instrument.

[1784] As seen in FIG. 91A, FIG. 91B, and FIG. 91C, TIE containing circular RNAs are capable of driving firefly luciferase protein expression in primary hepatocytes from multiple human donors in a dose-dependent manner when transfected in vitro with an LNP.

### Example 80

[1785] In Vitro Expression of LNP Formulated with Circular RNA Encoding for GFP in Multiple Human Cell Models.

[1786] A circular RNA construct was produced comprising a TIE and coding element encoding for a GFP protein. LNP were formulated with the circular RNA construct. Then various concentrations of the LNP containing the circular RNA construct were diluted in hepatocyte media supplemented with 3% fetal bovine (FBS) (ThermoFisher, cat #A3160401). Media was aspirated from the cells prior to addition of 100ul of LNP/FBS/media mixture to the cells.

[1787] HeLa (human cervical adenocarcinoma; ATCC, cat #CCL-2), HEK293 (human embryonic kidney; ATCC, cat #CRL-1573), and HUH7 (human liver hepatocellular carcinoma; JCRB, cat #JCRB0403) were transfected as previously described with LNP formulated oRNAs. Twenty-four hours post-transfection, the media was removed and the cells were trypsinized. The trypsinized cells were neutralized with PBS supplemented with 10% FBS, harvested, and transferred to a tube. The tube was centrifuged to pellet the cells and the supernatant was aspirated. The pellet was stored at −80° C. prior to lysis. For lysis the cells were thawed on ice and were lysed with 100 L/well RIPA buffer (Boston Bio Products, Cat. BP-115) plus freshly added 1 mM DTT, and 250 U/mL Benzonase (EMD Millipore, cat #71206-3), and protease inhibitor mixture consisting of complete protease inhibitor cocktail (Sigma, cat #11697498001). Cells were kept on ice for 30 minutes at which time NaCl (1M final concentration) was added. Cell lysates were thoroughly mixed and retained on ice for 30 min. The whole cell extracts (WCE) were centrifuged to pellet debris. A Bradford assay (Bio-Rad, cat #500-0001) was used to assess protein content of the lysates. The Bradford assay procedure was completed according to the manufacturer's protocol. Extracts were stored at −20° C. prior to use. Western blots were performed to assess GFP protein levels. Whole cell extract lysates were mixed with Laemmli buffer and denatured at 95° C. for 10 min. Western blots were run using the NuPage system on 4-12% Bis-Tris gels (ThermoFisher, cat #NPO335BOX) according to the manufacturer's protocol followed by wet transfer onto 0.45 m nitrocellulose membrane (ThermoFisher, cat #LC2001). After transfer membranes were rinsed thoroughly with water and stained with Ponceau S solution (Boston Bio Products, cat #ST-180) to confirm complete and even transfer. Blots were blocked using 5% Dry Milk in TBS for 30 minutes on a lab rocker at room temperature. Blots were rinsed with 1×TBST (Boston BioProducts, cat #IBB-180) and probed with mouse dylight 680-tagged anti-GFP monoclonal antibody (ThermoFisher, cat #MA515256D680) at 1:1,000 in 1×TBST. Anti-3-actin or GAPDH was used as a loading control (ThermoFisher, cat #AM4302/AM4300) at 1:4,000 in 1×TBST and incubated simultaneously with the GFP primary antibody. Blots were sealed in a bag and kept overnight at 4° C. on a lab rocker. After incubation, blots were rinsed 3 times for 5 minutes each in 1×TBST and probed with mouse secondary antibodies (ThermoFisher, cat #PI35519) at 1:25,000 each in 1×TBST for 30 minutes at room temperature. After incubation, blots were rinsed 3 times for 5 minutes each in 1×TBST. Blots were visualized and analyzed using a Licor Odyssey system.

[1788] As shown in FIG. 92, TIE-containing circular RNA is capable of expressing GFP protein in diverse human cell lines (e.g., HeLa, HEK293, and HUH7 cells) in a dose dependent manner when transfected in vitro with an LNP.

### Example 81

[1789] In Vitro Expression of LNP Formulated with Circular RNA Encoding for GFP in Primary Human Hepatocytes.

[1790] A circular RNA construct was produced comprising a TIE and coding element encoding for a GFP protein. Various concentrations of LNP containing circularized RNA (oRNA) were diluted in hepatocyte media supplemented with 3% fetal bovine serum (FBS) (ThermoFisher, cat #A3160401). Media was aspirated from the cells prior to addition of 100 μL of LNP/FBS/media mixture to the cells.

[1791] Primary human hepatocytes (PHH) were thawed and resuspended in hepatocyte thawing medium (Xenotech, cat #K8600/K8650) followed by centrifugation. The supernatant was discarded, and the pelleted cells were resuspended in hepatocyte plating medium (Xenotech, cat #K8200). Cells were counted via hemocytometer and plated on Bio-coat collagen-I coated 96-well plates at a density of 25,000 cells/well for PHH, 25,000 cells/well for PMH, and 50,000 cells/well for PCH in 100ul of plating media. Plated cells were allowed to settle and adhere for 6 hours in a tissue culture incubator at 37° C. and 5% CO₂ atmosphere. After incubation cells were checked for monolayer formation after which the plating media was aspirated and replaced with 100ul of culture media (Xenotech, cat #K8300). Media was replaced every 24 hours for the duration of the experiment.

[1792] Primary human hepatocytes were transfected as previously described with LNP formulated oRNAs. Twenty-four hours post-transfection, the media was removed and the cells were trypsinized. The trypsinized cells were neutralized with PBS supplemented with 10% FBS, harvested, and transferred to a tube. The tube was centrifuged to pellet the cells and the supernatant was aspirated. The pellet was stored at −80° C. prior to lysis. For lysis the cells were thawed on ice and were lysed with 100 L/well RIPA buffer (Boston Bio Products, Cat. BP-115) plus freshly added 1 mM DTT, and 250 U/ml Benzonase (EMD Millipore, cat #71206-3), and protease inhibitor mixture consisting of complete protease inhibitor cocktail (Sigma, cat #11697498001). Cells were kept on ice for 30 minutes at which time NaCl (1M final concentration) was added. Cell lysates were thoroughly mixed and retained on ice for 30 min. The whole cell extracts (WCE) were centrifuged to pellet debris. A Bradford assay (Bio-Rad, cat #500-0001) was used to assess protein content of the lysates. The Bradford assay procedure was completed according to the manufacturer's protocol. Extracts were stored at −20° C. prior to use. Western blots were performed to assess GFP protein levels. Whole cell extract lysates were mixed with Laemmli buffer and denatured at 95° C. for 10 min. Western blots were run using the NuPage system on 4-12% Bis-Tris gels (ThermoFisher, cat #NPO335BOX) according to the manufacturer's protocol followed by wet transfer onto 0.45 m nitrocellulose membrane (ThermoFisher, cat #LC2001). After transfer membranes were rinsed thoroughly with water and stained with Ponceau S solution (Boston Bio Products, cat #ST-180) to confirm complete and even transfer. Blots were blocked using 5% Dry Milk in TBS for 30 minutes on a lab rocker at room temperature. Blots were rinsed with 1×TBST (Boston BioProducts, cat #IBB-180) and probed with mouse dylight 680-tagged anti-GFP monoclonal antibody (ThermoFisher, cat #MA515256D680) at 1:1,000 in 1×TBST. Anti-3-actin or GAPDH was used as a loading control (ThermoFisher, cat #AM4302/AM4300) at 1:4,000 in 1×TBST and incubated simultaneously with the GFP primary antibody. Blots were sealed in a bag and kept overnight at 4° C. on a lab rocker. After incubation, blots were rinsed 3 times for 5 minutes each in 1×TBST and probed with mouse secondary antibodies (ThermoFisher, cat #PI35519) at 1:25,000 each in 1×TBST for 30 minutes at room temperature. After incubation, blots were rinsed 3 times for 5 minutes each in 1×TBST. Blots were visualized and analyzed using a Licor Odyssey system.

[1793] As shown in the western blot in FIG. 93, circular RNAs containing a TIE is capable of successfully encoding a GFP protein in primary human hepatocytes when transfected in vivo with an LNP.

### Example 82

[1794] In Vitro Expression of Firefly Luciferase in Circular RNA Encoding Firefly Luciferase in Mouse Myoblast and Primary Human Skeletal Muscle Myoblast Cells Using Lipofectamine.

[1795] A circular RNA construct comprising a TIE and coding element encoding firefly luciferase protein.

[1796] Primary human skeletal muscle (HSkM) cells (Lonza, cat #20TL356514) were thawed in a 37° C. water bath and plated at recommended seeding density (3,000 to 5,000 per cm²) in SkGM-2 BulletKit growth media (Lonza, cat #CC-3245) and allowed to grow overnight. Cells were detached using ReagentPack subculture reagents (Lonza, cat #CC-5034) and plated on tissue culture grade 96-well plates at recommended seeding density and allowed to grow overnight in a tissue culture incubator at 37° C. and 5% CO₂ atmosphere or to 70-80% confluency with growth media changed every 2 days.

[1797] For one 96-well plate reaction, 0.3 μL of Lipofectamine-3000 transfection reagent (Lipo3K) (ThermoFisher, cat #L3000015) was mixed with 5 μL Opti-MEM reduced serum media (ThermoFisher, cat #51985091). In a separate tube, per reaction, firefly luciferase (f.luc) oRNA (at 10-200ng) was combined with 5 μL Opti-MEM and 0.2 μL P3000TM enhancer reagent (ThermoFisher, cat #L3000015). Equal volumes of Lipo3K/Opti-MEM mix was combined with oRNA/Opti-MEM mix and incubated at room temperature for 15 min. The Lipo3K/oRNA mixture was added to each well to be transfected and placed in a tissue culture incubator at 37° C. and 5% CO₂ atmosphere for 24 hours.

[1798] After 24 hours, the transfection plates were removed from the incubator and allowed to equilibrate to room temperature for 15 minutes. A volume of 100 μL of firefly luciferase one-step glow assay working solution (Pierce, cat #16196) was added to each well. The plate was placed on a microplate shaker (ThermoFisher, cat #S72050) and mixed at 300 rpm for 3 minutes. Post-mixing, the plate was allowed to incubate at room temperature for 10 minutes. Luminescence was read using a Varioskan or Bio-Tek Cytation5 instrument.

[1799] As shown in FIG. 94A and FIG. 94B, circular RNAs comprising a TIE is capable of driving firefly luciferase protein expression in myoblasts from different species in a dose-dependent manner when transfected in vitro with lipofectamine.

### Example 83

[1800] In Vitro Expression of Firefly Luciferase in Circular RNA Encoding Firefly Luciferase in Differentiated Primary Human Skeletal Muscles Myotubes

[1801] A circular RNA construct comprising a TIE and coding element encoding firefly luciferase protein.

[1802] Primary human skeletal muscle (HSkM) cells (Lonza, cat #20TL356514) were thawed in a 37° C. water bath and plated at recommended seeding density (3,000 to 5,000 per cm²) in SkGM-2 BulletKit growth media (Lonza, cat #CC-3245) and allowed to grow overnight. Cells were detached using ReagentPack subculture reagents (Lonza, cat #CC-5034) and plated on tissue culture grade 96-well plates at recommended seeding density and allowed to grow overnight in a tissue culture incubator at 37° C. and 5% CO₂ atmosphere or to 70-80% confluency with growth media changed every 2 days. Once cells reached 70-80% confluency, growth media was removed, cells were washed twice in 1×PBS (Gibco, cat #10010023) and changed to differentiation media consisting of F-10 (1×) (Gibco, cat #11550-043) supplemented with 2% Horse Serum (Gibco, cat #26050088) and 1% Pen-Strep (Gibco, cat #15140-122). Media was changed daily for 5 to 6 days until nearly all myoblasts had fused to form myotubes.

[1803] For one 96-well plate reaction, 0.3 μL of Lipofectamine-3000 transfection reagent (Lipo3K) (ThermoFisher, cat #L3000015) was mixed with Sul Opti-MEM reduced serum media (ThermoFisher, cat #51985091). In a separate tube, per reaction, firefly luciferase (f.luc) oRNA (at 10-200ng) was combined with 5 μL Opti-MEM and 0.2 μL P3000TM enhancer reagent (ThermoFisher, cat #L3000015). Equal volumes of Lipo3K/Opti-MEM mix was combined with oRNA/Opti-MEM mix and incubated at room temperature for 15 min. The Lipo3K/oRNA mixture was added to each well to be transfected and placed in a tissue culture incubator at 37° C. and 5% CO₂ atmosphere for 24 hours.

[1804] After 24 hours, transfection plates were removed from the incubator and allowed to equilibrate to room temperature for 15 minutes. A volume of 100 μL of Firefly Luc one-step glow assay working solution (Pierce, cat #16196) was added to each well. The plate was placed on a microplate shaker (ThermoFisher, cat #S72050) and mixed at 300 rpm for 3 minutes. Post-mixing, the plate was allowed to incubate at room temperature for 10 minutes. Luminescence was read using a Varioskan or Bio-Tek Cytation5 instrument.

[1805] As shown in FIG. 95A and FIG. 95B, a circular RNA comprising a TIE is capable of driving firefly luciferase protein expression in primary muscles cells through differentiated states (e.g., in myoblast and differentiated myotubes) in multiple human donors in a dose-dependent manner when transfected in vitro with lipofectamine.

### Example 83

[1806] Cell-Free In Vitro Translation of Circular RNAs Containing TIEs

[1807] A cell-free rabbit reticulocyte in vitro translation assay (Promega, cat #L4540) was completed to characterize protein products from various RNA templates. Both linear mRNA and circular oRNA templates were used in the assay and reaction components were assembled according to the manufacturer's protocol. Prior to assay, RNA templates were denatured at 65° C. for 3 minutes and immediately cooled on ice. All reaction components were assembled on ice. Flexi Rabbit Reticulocyte kit components, complete amino acid mixture (Promega, cat #L5061), RNAsin TIEuclease inhibitor (Promega, cat #N2111), and transcend tRNA (Promega, cat #L5061) were added to denatured RNA templates. The reaction was vortexed to mix and incubated at 30° C. for 60 minutes and then placed on ice.

[1808] The reaction mixture was added to 1x sample buffer (ThermoFisher, cat #NP0007) and heated at 70° C. for 15 minutes. The denatured protein sample was loaded onto 4-12% Bis-Tris gels (ThermoFisher, cat #NPO335BOX). Gel electrophoresis was completed, and the gel was wet transferred onto 0.45 m nitrocellulose membrane (ThermoFisher, cat #LC2001). Post-transfer, the membrane was blocked for 1 hour with rocking in freshly made TBS with 0.5% Tween-20 (Boston Bioproducts Inc Cat #IBB-180). The membrane was incubated for 45 min with rocking with streptavidin-AP (Promega, cat #V5591) at a 1:2,500 dilution. The membrane was rinsed with four cycles of: twice with TBST and twice with deionized water for 1 min per rinse. The membrane was incubated with Western Blue substrate (Promega, cat #S3841) for 45 minutes and the membrane was rinsed in water and scanned on a LICOR Odyssey CLx imaging system.

[1809] As shown in FIG. 96A and FIG. 96B, a circular RNA comprising a TIE is capable of driving protein expression in a cell-free lysate, independent of any cell type. FIG. 96A illustrates expression of firefly luciferase from a linear or circular RNA input. FIG. 96B illustrates expression of human and mouse ATP7B proteins with different codon optimization (co) approaches compared to wild-type native sequence (WT). The codon optimized-circular RNAs expressing ARP7B protein and the circular RNA expressing firefly luciferase shoed protein full-length protein expression.

### Example 84

[1810] TIE Selection Methodology

[1811] Putative TIEs were identified for activity assessment from sequences in GenBank. Briefly, R1boviria and Unclassified Virus sequences greater than 1kb in length were identified. 5′ and intergenic UTRs were extracted based on putative CDS start and end sites with a minimum length cutoff of 250 nt. Reverse sequences were also collected for negative sense CDS annotations. For genuses not expected to contain TIE sequences, a few noncoding regions per genus were selected at random. Duplicates, >10 nt repeat-containing sequences, sequences with both XbaI and BamHI sites, and low-quality sequences (non acgt) were culled, then sequences were clustered through CDHit with an 80% sequence similarity cutoff for clustering; representative sequences from each cluster were selected for further study. For unclassified sequences or sequences expected to contain a TIE, all 5′ and intergenic UTRs were selected; duplicates, >10 nt repeat-containing sequences, sequences with both XbaI and BamHI sites, and low-quality sequences (non acgt) were culled, then sequences were clustered through CDHit with a 95% (low risk, known IRESs) sequence similarity cutoff for clustering; representative sequences from each cluster were selected for further study. For both strategies, sequences shorter than 300 nt or unable to be synthesized due to sequence complexity were eliminated.

### Example 85

### Example 85A: TIE Activity in Primary Human T Cells

[1812] Nucleic acid sequences containing putative TIEs were inserted into a circular RNA (oRNA) construct prior to the start codon of a gaussia luciferase reporter sequence. oRNA containing the TIE was synthesized and purified. Purified oRNA was formulated into lipid nanoparticles. LNP-oRNA was transfected into T cells in vitro. Supernatant was harvested and replaced 24 and 48 hours after transfection, and gaussia luciferase expression from oRNA was determined using a coelenterazine-containing detection reagent and luminometer. Higher luminescence at 24 hours indicates higher TIE function. Higher luminescence at 48 hours relative to 24 hours indicates higher oRNA stability due to TIE function.

### Example 85B: TIE Activity in Primary Human Hepatocytes

[1813] Nucleic acid sequences containing putative TIEs were inserted into a circular RNA (oRNA) construct prior to the start codon of a gaussia luciferase reporter sequence. oRNA containing the TIE was synthesized and purified. Purified oRNA was formulated into lipid nanoparticles. LNP-oRNA was transfected into hepatocytes in vitro. Supernatant was harvested and replaced 24 and 48 hours after transfection, and gaussia luciferase expression from oRNA was determined using a coelenterazine-containing detection reagent and luminometer. Higher luminescence at 24 hours indicates higher TIE function. Higher luminescence at 48 hours relative to 24 hours indicates higher oRNA stability due to TIE function.

### Example 85C: TIE Activity in Primary Human Myotubes

[1814] Nucleic acid sequences containing putative TIEs were inserted into a circular RNA (oRNA) construct prior to the start codon of a gaussia luciferase reporter sequence. oRNA containing the TIE was synthesized and purified. Purified oRNA was formulated into lipid nanoparticles. LNP-oRNA was transfected into human myotubes in vitro. Supernatant was harvested and replaced 24 and 48 hours after transfection, and gaussia luciferase expression from oRNA was determined using a coelenterazine-containing detection reagent and luminometer. Higher luminescence at 24 hours indicates higher TIE function. Higher luminescence at 48 hours relative to 24 hours indicates higher oRNA stability due to TIE function.

### Example 86

[1815] TIE Tissue Tropism

[1816] Select TIE-containing oRNAs were formulated into LNPs. LNP-oRNAs were transfected into T cells, hepatocytes, and myotubes. Supernatant was harvested and replaced 24 and 48 hours after transfection, and gaussia luciferase expression from oRNA was determined using a coelenterazine-containing detection reagent and luminometer. Higher luminescence at 24 hours indicates higher TIE function. Higher luminescence at 48 hours relative to 24 hours may indicate higher oRNA stability due to TIE function. TIE activity was compared between cell types and differences resulting from TIE tissue preference were noted. Differences may be a result of the TIE engaging proteins that show tissue-specific expression and promoting enhanced translation initiation, degradation, or stability.

### Example 86

### Example 86A: TIE Deletion Scanning

[1817] Select TIE sequences with progressive deletions from either the 5′ end or 3′ end of the TIE were inserted into a circular RNA (oRNA) construct prior to the start codon of a gaussia luciferase reporter sequence. oRNA containing the TIE variant was synthesized and purified. Purified oRNA was formulated into lipid nanoparticles. LNP-oRNA was transfected into human primary T cells. Supernatant was harvested and replaced 24 and 48 hours after transfection, and gaussia luciferase expression from oRNA was determined using a coelenterazine-containing detection reagent and luminometer. Higher luminescence at 24 hours indicates higher TIE function. Higher luminescence at 48 hours relative to 24 hours may indicate higher oRNA stability due to TIE function. Expression or stability impairment due to progressive deletions identifies the core functional unit of the TIE.

### Example 86B: TIE Variant Generation and Identification

[1818] Select TIE-containing oRNA synthesis plasmids were subjected to error-prone PCR to introduce random mutations into the PCR product. PCR product was used as a template for oRNA synthesis. Purified oRNA was formulated into LNPs and transfected into primary human T cells. Polysome fractions were harvested from T cells at 6, 24, 48, and 72 hours post-transfection by HPLC. RNA associated with each polysome fraction was extracted from polysome fractions and sequenced by NGS. TIE mutation enrichment in each polysome fraction at each time point was analyzed to identify mutations that 1) maintain or improve translation activity from the TIE and/or 2) improve stability of the oRNA.

### Example 86C: TIE Single and Multi-Variant Validation

[1819] Nucleic acid sequences containing putative beneficial TIE mutations from example 6 alone or in combination were inserted into a circular RNA (oRNA) construct prior to the start codon of a gaussia luciferase reporter sequence. oRNA containing the TIE variant was synthesized and purified. Purified oRNA was formulated into lipid nanoparticles. LNP-oRNA was transfected into human primary T cells. Supernatant was harvested and replaced 24 and 48 hours after transfection, and gaussia luciferase expression from oRNA was determined using a coelenterazine-containing detection reagent and luminometer. Higher luminescence at 24 hours indicates higher TIE function. Higher luminescence at 48 hours relative to 24 hours indicates higher oRNA stability due to TIE function.

### Example 87

### Example 87A: Selection of Eukaryotic TIEs

[1820] Selection of eukaryotic TIEs. Putative eukaryotic TIEs were identified using several databases. TIEs selected include sequences 40-1578 nucleotides in length and may or may not contain identified modification (m6A) sites.

### Example 87B: TIEs Containing Modified Nucleotides (m6A)

[1821] Nucleic acid sequences containing putative TIEs were inserted into a circular RNA (oRNA) construct preceding the coding region of a gaussia luciferase reporter sequence. oRNAs were synthesized with a titration of modified nucleotide. Purified oRNA was formulated into lipid nanoparticles. LNP-oRNAs were transfected into T cells, hepatocytes, and myotubes. Supernatant was harvested and replaced 24 and 48 hours after transfection, and gaussia luciferase expression from oRNA was determined using a coelenterazine-containing detection reagent and luminometer. Higher luminescence of modified nucleotide containing TIEs at 24 hours indicates necessity for modification for enhanced function. Higher luminescence at 48 hours relative to 24 hours indicates modified nucleotide containing TIEs enhance stability of oRNA.

### Example 88

[1822] Expression of TIEs in Cells Undergoing Oxidative and/or Hypoxic Stress

[1823] Nucleic acid sequences containing putative TIEs were inserted into a circular RNA (oRNA) construct preceding the coding region of a gaussia luciferase reporter sequence. Purified oRNA was formulated into lipid nanoparticles. Hepatocytes were treated with hydrogen peroxide to induce oxidative stress or CoCl₂ to induce hypoxic stress. LNP-oRNA was transfected into hepatocytes (under hypoxic stress, oxidative stress, or untreated) in vitro. Supernatant was harvested and replaced 24 and 48 hours after transfection, and gaussia luciferase expression from oRNA was determined using a coelenterazine-containing detection reagent and luminometer. Higher luminescence at 24 hours indicates higher TIE function. Higher luminescence at 48 hours relative to 24 hours may indicate higher oRNA stability due to TIE function.

### Example 89

[1824] Aptamer as a TIE

[1825] Nucleic acid sequences containing aptamers against translation initiation factors (ie eIF4E, eIF4G, eIF4a) were inserted into a circular RNA (oRNA) construct preceding the coding region of a gaussia luciferase reporter sequence. Purified oRNA was formulated into lipid nanoparticles. LNP-oRNAs were transfected into hepatocytes. Supernatant was harvested and replaced 24 and 48 hours after transfection, and gaussia luciferase expression from oRNA was determined using a coelenterazine-containing detection reagent and luminometer. Higher luminescence at 24 hours indicates higher TIE function. Higher luminescence at 48 hours relative to 24 hours may indicate higher oRNA stability due to TIE function.

### Example 90

[1826] Tandem TIEs

[1827] Select combinations of viral, eukaryotic, and/or aptamer TIEs were inserted into a circular RNA (oRNA) construct preceding the coding region of a gaussia luciferase reporter sequence. oRNAs were synthesized with a titration of modified nucleotide. Purified oRNA was formulated into lipid nanoparticles. LNP-oRNAs were transfected into T cells, hepatocytes, and myotubes. Supernatant was harvested and replaced 24 and 48 hours after transfection, and gaussia luciferase expression from oRNA was determined using a coelenterazine-containing detection reagent and luminometer. Higher luminescence of constructs containing multiple TIEs at 24 hours indicates a synergy of TIEs. Higher luminescence at 48 hours relative to 24 hours may indicate having multiple TIEs in one construct enhance stability of oRNA.

### Example 91

### Example 91A: Coding Aptamers to Enhance Cap-Independent Translation

[1828] Certain aptamers that bind to eIF4E, eIF4a, and other translation initiators are known to inhibit translation by forcing the proteins to adopt a non-functional conformation. Nucleic acid sequences containing aptamers against translation initiation factors (ie eIF4E, eIF4a) were inserted into a circular RNA (oRNA) construct preceding a functional TIE and the coding region of a gaussia luciferase reporter sequence. Purified oRNA was formulated into lipid nanoparticles. LNP-oRNAs were transfected into hepatocytes. Supernatant was harvested and replaced 24 and 48 hours after transfection, and gaussia luciferase expression from oRNA was determined using a coelenterazine-containing detection reagent and luminometer. Higher luminescence at 24 hours indicates a preference for cap-independent translation. Higher luminescence at 48 hours relative to 24 hours indicates higher oRNA stability due to inhibition of cap-dependent translation.

### Example 91B: Coding Aptamers to Enhance Cap-Independent Translation

[1829] Cotransfection of oRNA and aptamers. Certain aptamers that bind to eIF4E, eIF4a, and other translation initiators are known to inhibit translation by forcing the proteins to adopt a non-functional conformation. Nucleic acid sequences containing aptamers against translation initiation factors (ie eIF4E, eIF4a) were co-transfected with a circular RNA (oRNA) containing a TIE and the coding region of a gaussia luciferase reporter. Purified aptamer and oRNA were formulated into lipid nanoparticles together. LNP-oRNAs were transfected into hepatocytes. Supernatant was harvested and replaced 24 and 48 hours after transfection, and gaussia luciferase expression from oRNA was determined using a coelenterazine-containing detection reagent and luminometer. Higher luminescence at 24 hours indicates a preference for cap-independent translation. Higher luminescence at 48 hours relative to 24 hours may indicate higher oRNA stability due to inhibition of cap-dependent translation.

### Example 92

[1830] Immunogenicity of circular RNAs was assessed. Induction of RIG-1 and IFNB1 RNA expressions, markers of immune stimulation, was measured using RT-cPCR following transfection of the cells with various RNA preparations. All RNA preparations except for the commercially available 3phpRNA were produced using in vitro transcription (IVT) and circularization of RNA comprising an Anabaena permuted intron, GLuc reading frame, strong homology arms, 5′ and 3′ spacers, and a CVB3 IRES. In both HeLa cells (FIG. 101A) and A594 cells (FIG. 101B), the highest levels of RIG-1 and IFNB1 were induced by the IVT reaction product prepared in the absence of excess GMP and by the positive control 3phpRNA.

### Example 93

[1831] IRES Selection and Screening

[1832] Roughly 3,000 potential internal ribosome entry site (IRES) sequence candidates were computationally identified from viral untranslated regions in partial and complete viral sequence available in the art (e.g., Genbank). Each DNA template was cloned to include of the IRES sequences from Table_A_IRES. Exemplary constructs included a 5′ enhanced intron element, a 5′ enhanced exon element, a punitive IRES, a coding element encoding Gaussia Luciferase, a 3′ enhanced exon element, and a 3′ enhanced intron element. Engineered circular RNA (oRNA) was generated from the DNA template by in vitro transcription (IVT); and oRNA was subsequently purified from non-circular RNA components of the IVT reaction.

[1833] Purified oRNA was nanoprecipitated with lipids to form LNP-oRNA constructs. LNPs were formulated first by creating empty lipid nanoparticles using a Precision Nanosystems Ignite instrument with a “NextGen” mixing chamber. Ethanol phase contained Lipid 39 from Table 10b, DSPC, cholesterol, and DMG-PEG 2000 (Avanti Polar Lipids, Inc., Alabaster, AL) at a molar ratio of 45:9:44:2 was combined with 50 mM sodium acetate buffer at pH 4.5. A 3:1 aqueous to ethanol mixing ratio was used. The empty LNPs were then dialyzed in 1 L of 1x PBS and exchanged 2 times over 18 hours. Dialyzed empty LNPs were then mixed with a final circular RNA concentration of 40 ug/mL in 50 mM sodium acetate buffer at pH 4.5. A 3:1 aqueous to empty lipid nanoparticle mixing ratio was used. The LNPs final ionizable lipid to RNA phosphate ratio was at 6.0.

[1834] Primary human skeletal myotubes, primary human hepatocytes, and activated primary human T cells were treated with formulated LNP-oRNA in triplicate. Protein expression in supernatant was assessed by luminescence measurements 48 hours following transfection. Table 27 provides the protein expression and stability measurements for the screening. Measured numbers are normalized to a control (caprine kobuvirus IRES) and represented as a fold change.

(SEQ ID NO: 3777)
Control (caprine kobuvirus IRES)
gtggccacgcccgggccaccgatacttcccttcactcctt
cgggactgttggggaggaacacaacagggctcccctgttt
tcccattccttcccccttttcccaaccccaaccgccgtat
ctggtggcggcaagacacacgggtctttccctctaaagca
caattgtgtgtgtgtcccaggtcctcctgcgtacggtgcg
ggagtgctcccacccaactgttgtaagcctgtccaacgcg
tcgtcctggcaagactatgacgtcgcatgttccgctgcgg
atgccgaccgggtaaccggttccccagtgtgtgtagtgcg
atcttccaggtcctcctggttggcgttgtccagaaactgc
ttcaggtaagtggggtgtgcccaatccctacaaaggttga
ttctttcaccaccttaggaatgctccggaggtaccccagc
aacagctgggatctgaccggaggctaattgtctacgggtg
gtgtttcctttttcttttcacacaactctactgcGTacaa
ctcactgactatccacttgctctgTcacG

TABLE 27
Expression and functional stability screening of IRES

| | [Mod] | | [Mod] |
|---|---|---|---|
| SEQ | Fold | [Mod] T | PHH |
| ID | Change | Fold | Fold |
| NO | Myo | Change | Change |
| 97 | 0.260167 | 0.353177 | 1.163467 |
| 98 | 0.290648 | 0.677026 | 0.78802 |
| 99 | 0.163908 | 0.27666 | 1.020326 |
| 100 | 0.495163 | 0.48261 | 1.22777 |
| 101 | 0.533025 | 0.852995 | 1.370347 |
| 102 | 0.044695 | 0.030995 | 0.514093 |
| 103 | 0.045577 | 0.039508 | 0.647085 |
| 104 | 0.076071 | 0.168841 | 0.774536 |
| 105 | 0.249558 | 0.329006 | 0.642043 |
| 106 | 0.352419 | 0.648041 | 1.09325 |
| 107 | 0.287896 | 0.937122 | 1.119079 |
| 109 | 0.249157 | 0.626121 | 0.853308 |
| 110 | 0.242425 | 0.513277 | 0.717483 |
| 111 | 0.222321 | 0.465065 | 0.786969 |
| 112 | 0.371086 | 0.636962 | 0.807476 |
| 113 | 0.317071 | 0.43731 | 0.827882 |
| 114 | 0.05835 | 0.068124 | 0.789812 |
| 115 | 0.050735 | 0.046932 | 0.425032 |
| 116 | 0.039211 | 0.030739 | 0.529925 |
| 117 | 0.042734 | 0.046123 | 0.425775 |
| 118 | 0.154586 | 0.456184 | 0.666903 |
| 119 | 0.198021 | 0.987593 | 0.62119 |
| 120 | 0.275525 | 0.701885 | 0.489288 |
| 121 | 0.627572 | 1.028933 | 0.997696 |
| 122 | 0.388602 | 0.8876 | 0.832163 |
| 123 | 0.039714 | 0.030111 | 0.638047 |
| 125 | 0.382696 | 0.641754 | 0.649185 |
| 126 | 0.057929 | 0.06647 | 0.645602 |
| 127 | 0.293568 | 0.685807 | 0.674465 |
| 128 | 0.489317 | 0.583675 | 1.021214 |
| 129 | 0.053695 | 0.089454 | 0.668895 |
| 130 | 0.040577 | 0.060757 | 0.572842 |
| 131 | 0.039511 | 0.033359 | 0.53476 |
| 132 | 0.039977 | 0.031182 | 0.564324 |
| 133 | 0.039326 | 0.030041 | 0.541046 |
| 134 | 0.046625 | 0.052943 | 0.46727 |
| 136 | 0.047864 | 0.042316 | 0.428555 |
| 138 | 0.372287 | 0.637832 | 0.615651 |
| 139 | 0.059696 | 0.097316 | 0.520599 |
| 140 | 0.16008 | 0.399455 | 0.715372 |
| 141 | 0.040253 | 0.031062 | 0.546956 |
| 142 | 0.038521 | 0.027425 | 0.46798 |
| 143 | 0.03901 | 0.032654 | 0.420921 |
| 145 | 0.03927 | 0.026297 | 0.635934 |
| 146 | 0.043229 | 0.034645 | 0.587329 |
| 147 | 0.042637 | 0.036624 | 0.559359 |
| 148 | 0.039126 | 0.029094 | 0.736827 |
| 149 | 0.039186 | 0.028926 | 0.711791 |
| 150 | 0.03864 | 0.027048 | 0.514678 |
| 151 | 0.037309 | 0.026948 | 0.493258 |
| 152 | 0.038449 | 0.026258 | 0.615534 |
| 153 | 0.038341 | 0.025876 | 0.695107 |
| 154 | 0.0402 | 0.0304 | 0.722679 |
| 155 | 0.038723 | 0.027351 | 0.586864 |
| 156 | 0.038511 | 0.027142 | 0.627475 |
| 157 | 0.039049 | 0.027127 | 0.731503 |
| 158 | 0.038048 | 0.027701 | 0.672155 |
| 159 | 0.038668 | 0.025816 | 0.61191 |
| 160 | 0.039335 | 0.026247 | 0.5674 |
| 161 | 0.038824 | 0.025876 | 0.492452 |
| 162 | 0.038216 | 0.023393 | 0.575165 |
| 163 | 0.038264 | 0.027191 | 0.52053 |
| 164 | 0.038197 | 0.026151 | 0.524974 |
| 165 | 0.037817 | 0.026532 | 0.561699 |
| 166 | 0.038844 | 0.026828 | 0.575901 |
| 167 | 0.038524 | 0.025708 | 0.69976 |
| 168 | 0.038788 | 0.025543 | 0.731934 |
| 169 | 0.039231 | 0.027338 | 0.432891 |
| 170 | 0.037986 | 0.022969 | 0.541642 |
| 171 | 0.038154 | 0.027212 | 0.582587 |
| 172 | 0.037112 | 0.026558 | 0.639476 |
| 173 | 0.037335 | 0.026078 | 0.504809 |
| 174 | 0.037049 | 0.025905 | 0.577144 |
| 175 | 0.037822 | 0.025498 | 0.530502 |
| 177 | 0.038266 | 0.026051 | 0.561219 |
| 178 | 0.039045 | 0.027092 | 0.500802 |
| 179 | 0.037153 | 0.026609 | 0.50571 |
| 180 | 0.038755 | 0.028951 | 0.487148 |
| 181 | 0.037539 | 0.025831 | 0.659122 |
| 182 | 0.03747 | 0.025334 | 0.496612 |
| 183 | 0.038763 | 0.025478 | 0.768879 |
| 184 | 0.043604 | 0.030907 | 0.689648 |
| 185 | 0.039562 | 0.027297 | 0.687583 |
| 186 | 0.039007 | 0.026413 | 0.665244 |
| 187 | 0.038049 | 0.026641 | 0.587503 |
| 188 | 0.037709 | 0.026875 | 0.671188 |
| 189 | 0.037762 | 0.027089 | 0.52406 |
| 190 | 0.03731 | 0.026211 | 0.418576 |
| 191 | 0.038235 | 0.02599 | 0.484504 |
| 192 | 0.039939 | 0.027233 | 0.483419 |
| 194 | 0.020192 | 0.00648 | 0.519074 |
| 195 | 0.019531 | 0.006334 | 0.376436 |
| 196 | 0.019542 | 0.00641 | 0.498646 |
| 197 | 0.019244 | 0.006324 | 0.402627 |
| 198 | 0.018573 | 0.006291 | 0.419065 |
| 199 | 0.019198 | 0.006785 | 0.34161 |
| 200 | 0.019364 | 0.00696 | 0.385662 |
| 201 | 0.020124 | 0.006802 | 0.336954 |
| 202 | 0.019957 | 0.006958 | 0.433697 |
| 203 | 0.019453 | 0.006298 | 0.462718 |
| 204 | 0.019494 | 0.006471 | 0.441202 |
| 205 | 0.019442 | 0.006373 | 0.629439 |
| 206 | 0.018867 | 0.006885 | 0.374898 |
| 207 | 0.01914 | 0.006134 | 0.460931 |
| 208 | 0.018981 | 0.006092 | 0.433478 |
| 209 | 0.019624 | 0.006283 | 0.410556 |
| 210 | 0.019591 | 0.007049 | 0.588881 |
| 211 | 0.019397 | 0.006595 | 0.542165 |
| 212 | 0.019568 | 0.00626 | 0.532913 |
| 213 | 0.018989 | 0.006333 | 0.547859 |
| 214 | 0.01915 | 0.006268 | 0.425401 |
| 216 | 0.019187 | 0.006268 | 0.524257 |
| 217 | 0.019397 | 0.006238 | 0.390937 |
| 218 | 0.019339 | 0.006206 | 0.494667 |
| 219 | 0.018624 | 0.00708 | 0.490922 |
| 220 | 0.019181 | 0.006335 | 0.474431 |
| 221 | 0.019256 | 0.006244 | 0.457017 |
| 222 | 0.019112 | 0.006315 | 0.449704 |
| 223 | 0.01928 | 0.006732 | 0.413984 |
| 224 | 0.019162 | 0.006106 | 0.445024 |
| 225 | 0.019165 | 0.006185 | 0.408971 |
| 226 | 0.018975 | 0.006285 | 0.510492 |
| 227 | 0.019522 | 0.007133 | 0.437234 |
| 228 | 0.019859 | 0.006494 | 0.570592 |
| 229 | 0.019454 | 0.006315 | 0.473748 |
| 230 | 0.018871 | 0.006278 | 0.51804 |
| 231 | 0.019655 | 0.006844 | 0.511603 |
| 232 | 0.019285 | 0.006225 | 0.565024 |
| 233 | 0.019316 | 0.006211 | 0.442953 |
| 235 | 0.019002 | 0.007102 | 0.395003 |
| 236 | 0.018841 | 0.006315 | 0.509341 |
| 237 | 0.019316 | 0.006327 | 0.318761 |
| 238 | 0.019395 | 0.007836 | 0.596039 |
| 239 | 0.019249 | 0.006356 | 0.413194 |
| 241 | 0.019155 | 0.006661 | 0.275657 |
| 242 | 0.019203 | 0.006108 | 0.443553 |
| 243 | 0.019402 | 0.006124 | 0.451916 |
| 244 | 0.018854 | 0.007129 | 0.467265 |
| 245 | 0.019175 | 0.006401 | 0.543468 |
| 246 | 0.019056 | 0.007055 | 0.4824 |
| 247 | 0.018824 | 0.006353 | 0.484173 |
| 248 | 0.019655 | 0.006175 | 0.368398 |
| 249 | 0.01946 | 0.006185 | 0.396805 |
| 250 | 0.019 | 0.006117 | 0.480145 |
| 252 | 0.01904 | 0.007513 | 0.39182 |
| 253 | 0.018899 | 0.006977 | 0.575079 |
| 254 | 0.019338 | 0.006347 | 0.526008 |
| 255 | 0.019193 | 0.006255 | 0.287479 |
| 256 | 0.019022 | 0.006292 | 0.433444 |
| 257 | 0.01915 | 0.006647 | 0.428502 |
| 258 | 0.019567 | 0.006018 | 0.468423 |
| 259 | 0.019534 | 0.006067 | 0.58953 |
| 260 | 0.019436 | 0.007053 | 0.357243 |
| 261 | 0.019714 | 0.006449 | 0.480901 |
| 262 | 0.018951 | 0.006418 | 0.40858 |
| 263 | 0.019192 | 0.006212 | 0.560046 |
| 264 | 0.019612 | 0.006356 | 0.552301 |
| 265 | 0.019321 | 0.006195 | 0.401567 |
| 266 | 0.019369 | 0.006648 | 0.604516 |
| 267 | 0.019151 | 0.006684 | 0.464703 |
| 268 | 0.018286 | 0.007032 | 0.4753 |
| 269 | 0.01937 | 0.006374 | 0.5176 |
| 270 | 0.019261 | 0.006259 | 0.499406 |
| 271 | 0.019395 | 0.00619 | 0.412264 |
| 272 | 0.018911 | 0.006199 | 0.421016 |
| 274 | 0.019303 | 0.006349 | 0.455375 |
| 276 | 0.019357 | 0.006325 | 0.376791 |
| 278 | 0.019529 | 0.006257 | 0.583499 |
| 279 | 0.019217 | 0.006392 | 0.4111 |
| 281 | 0.019185 | 0.006136 | 0.587463 |
| 282 | 0.019681 | 0.006236 | 0.688522 |
| 283 | 0.020003 | 0.006456 | 0.361814 |
| 284 | 0.021001 | 0.008113 | 0.463016 |
| 285 | 0.019166 | 0.006828 | 0.350735 |
| 286 | 0.019521 | 0.006951 | 0.480012 |
| 287 | 0.019513 | 0.006754 | 0.469042 |
| 288 | 0.018469 | 0.006294 | 0.484396 |
| 289 | 0.019434 | 0.006129 | 0.551443 |
| 290 | 0.019277 | 0.006906 | 0.508385 |
| 291 | 0.021833 | 0.009489 | 0.384556 |
| 293 | 0.01252 | 0.006427 | 0.356902 |
| 294 | 0.011884 | 0.006276 | 0.322886 |
| 295 | 0.012392 | 0.00627 | 0.447166 |
| 297 | 0.012283 | 0.00621 | 0.567064 |
| 298 | 0.012177 | 0.006287 | 0.464133 |
| 299 | 0.012284 | 0.006151 | 0.348391 |
| 300 | 0.012339 | 0.006071 | 0.502548 |
| 301 | 0.012495 | 0.007116 | 0.35649 |
| 302 | 0.01222 | 0.006362 | 0.411845 |
| 303 | 0.012195 | 0.006278 | 0.26423 |
| 304 | 0.012215 | 0.006262 | 0.552091 |
| 305 | 0.01249 | 0.006788 | 0.42767 |
| 306 | 0.012402 | 0.006165 | 0.371097 |
| 307 | 0.012281 | 0.006139 | 0.520864 |
| 308 | 0.012497 | 0.00617 | 0.397038 |
| 309 | 0.012793 | 0.006274 | 0.245538 |
| 310 | 0.012404 | 0.006334 | 0.348876 |
| 311 | 0.012122 | 0.006441 | 0.294773 |
| 312 | 0.012249 | 0.006229 | 0.325353 |
| 313 | 0.012563 | 0.006174 | 0.365834 |
| 314 | 0.012287 | 0.006596 | 0.462958 |
| 315 | 0.012275 | 0.006142 | 0.298952 |
| 316 | 0.012716 | 0.007565 | 0.34122 |
| 317 | 0.012291 | 0.006397 | 0.309566 |
| 318 | 0.012115 | 0.006393 | 0.329808 |
| 319 | 0.01227 | 0.008317 | 0.304387 |
| 320 | 0.012221 | 0.006647 | 0.328903 |
| 321 | 0.012186 | 0.007163 | 0.399922 |
| 322 | 0.015035 | 0.031123 | 0.376798 |
| 323 | 0.012308 | 0.006096 | 0.237291 |
| 324 | 0.01192 | 0.006316 | 0.405807 |
| 325 | 0.012466 | 0.00625 | 0.493302 |
| 328 | 0.012498 | 0.00643 | 0.514255 |
| 329 | 0.012432 | 0.006216 | 0.374611 |
| 330 | 0.012053 | 0.006128 | 0.420442 |
| 331 | 0.012416 | 0.006082 | 0.375976 |
| 332 | 0.01236 | 0.006301 | 0.525602 |
| 333 | 0.012418 | 0.006263 | 0.410027 |
| 334 | 0.011605 | 0.006186 | 0.411457 |
| 335 | 0.011728 | 0.006232 | 0.357123 |
| 336 | 0.012106 | 0.006323 | 0.380811 |
| 337 | 0.012118 | 0.006278 | 0.325981 |
| 338 | 0.012218 | 0.006206 | 0.377091 |
| 339 | 0.012209 | 0.006258 | 0.32511 |
| 340 | 0.012372 | 0.006041 | 0.380202 |
| 341 | 0.012382 | 0.00629 | 0.480572 |
| 342 | 0.011896 | 0.006308 | 0.348783 |
| 343 | 0.01204 | 0.006332 | 0.37449 |
| 344 | 0.011928 | 0.006417 | 0.471347 |
| 345 | 0.01169 | 0.006267 | 0.36332 |
| 346 | 0.012345 | 0.006259 | 0.366717 |
| 347 | 0.012182 | 0.006163 | 0.363674 |
| 348 | 0.012163 | 0.00616 | 0.444482 |
| 349 | 0.012659 | 0.006222 | 0.317343 |
| 350 | 0.01182 | 0.006202 | 0.590775 |
| 351 | 0.011972 | 0.006135 | 0.408389 |
| 352 | 0.011885 | 0.006384 | 0.34904 |
| 353 | 0.011969 | 0.006398 | 0.336116 |
| 354 | 0.012428 | 0.006564 | 0.404646 |
| 355 | 0.012092 | 0.006308 | 0.299465 |
| 356 | 0.012409 | 0.006126 | 0.356694 |
| 357 | 0.012519 | 0.006278 | 0.390957 |
| 358 | 0.011963 | 0.006349 | 0.303741 |
| 359 | 0.012077 | 0.006261 | 0.334388 |
| 360 | 0.012007 | 0.006365 | 0.350437 |
| 361 | 0.012282 | 0.007154 | 0.317387 |
| 362 | 0.012469 | 0.007445 | 0.472965 |
| 363 | 0.012436 | 0.006211 | 0.393245 |
| 364 | 0.012106 | 0.006298 | 0.499986 |
| 365 | 0.012805 | 0.009062 | 0.426256 |
| 366 | 0.01212 | 0.006302 | 0.373071 |
| 367 | 0.01206 | 0.006217 | 0.396929 |
| 368 | 0.011994 | 0.006227 | 0.438247 |
| 369 | 0.011901 | 0.006318 | 0.340287 |
| 370 | 0.012341 | 0.007446 | 0.356303 |
| 371 | 0.012601 | 0.006237 | 0.447917 |
| 372 | 0.012511 | 0.007461 | 0.304352 |
| 373 | 0.012419 | 0.006273 | 0.445464 |
| 374 | 0.012212 | 0.006298 | 0.325297 |
| 375 | 0.012262 | 0.006342 | 0.253124 |
| 376 | 0.01206 | 0.00625 | 0.506673 |
| 377 | 0.012314 | 0.006239 | 0.391603 |
| 378 | 0.011869 | 0.006468 | 0.357757 |
| 380 | 0.013014 | 0.007118 | 0.33064 |
| 381 | 0.014152 | 0.007984 | 0.444288 |
| 382 | 0.012422 | 0.006289 | 0.366077 |
| 383 | 0.012649 | 0.0065 | 0.360518 |
| 384 | 0.012302 | 0.006376 | 0.350175 |
| 385 | 0.012345 | 0.006215 | 0.391858 |
| 386 | 0.012388 | 0.006074 | 0.51586 |
| 387 | 0.012519 | 0.007024 | 0.397167 |
| 388 | 0.013891 | 0.00748 | 0.425872 |
| 391 | 0.00426 | 0.025652 | 1.07762 |
| 392 | 0.004221 | 0.024819 | 0.967405 |
| 393 | 0.004402 | 0.026185 | 1.490273 |
| 395 | 0.004363 | 0.024306 | 1.116184 |
| 396 | 0.004078 | 0.025204 | 1.218613 |
| 397 | 0.004141 | 0.025195 | 1.186671 |
| 399 | 0.004058 | 0.025739 | 1.164329 |
| 400 | 0.004405 | 0.026216 | 0.849372 |
| 401 | 0.004166 | 0.025629 | 1.02162 |
| 402 | 0.004116 | 0.025377 | 1.037716 |
| 403 | 0.004734 | 0.028736 | 1.197277 |
| 404 | 0.004247 | 0.025532 | 0.859999 |
| 405 | 0.004301 | 0.025699 | 0.866291 |
| 406 | 0.004319 | 0.025744 | 1.453868 |
| 407 | 0.00439 | 0.026383 | 0.93497 |
| 408 | 0.00535 | 0.032252 | 0.865951 |
| 409 | 0.004149 | 0.025932 | 0.961605 |
| 410 | 0.004251 | 0.025634 | 1.117515 |
| 411 | 0.004339 | 0.025073 | 1.08764 |
| 412 | 0.004524 | 0.025372 | 0.873893 |
| 413 | 0.004216 | 0.025102 | 1.007087 |
| 414 | 0.004159 | 0.025802 | 0.964101 |
| 415 | 0.004389 | 0.025762 | 0.882981 |
| 416 | 0.004232 | 0.024642 | 1.018017 |
| 417 | 0.004211 | 0.025603 | 0.850283 |
| 418 | 0.004341 | 0.025106 | 0.846304 |
| 419 | 0.004202 | 0.024844 | 1.080883 |
| 420 | 0.004135 | 0.024946 | 0.97078 |
| 422 | 0.004459 | 0.025873 | 1.058666 |
| 423 | 0.004274 | 0.025787 | 1.226844 |
| 424 | 0.004383 | 0.024211 | 0.850711 |
| 425 | 0.004319 | 0.025464 | 0.973357 |
| 426 | 0.004226 | 0.025422 | 0.838836 |
| 427 | 0.004226 | 0.025762 | 0.973639 |
| 428 | 0.004161 | 0.025186 | 0.86052 |
| 429 | 0.004196 | 0.02512 | 1.028343 |
| 430 | 0.004215 | 0.0256 | 1.062937 |
| 431 | 0.00421 | 0.025733 | 1.00445 |
| 433 | 0.004741 | 0.027408 | 0.950117 |
| 434 | 0.004318 | 0.025754 | 1.092758 |
| 435 | 0.004428 | 0.025757 | 1.018609 |
| 436 | 0.004163 | 0.02512 | 0.727576 |
| 437 | 0.004243 | 0.025229 | 0.780294 |
| 438 | 0.00418 | 0.026218 | 1.039505 |
| 439 | 0.004887 | 0.026537 | 1.117939 |
| 440 | 0.005189 | 0.028072 | 0.889784 |
| 441 | 0.004272 | 0.025361 | 0.836717 |
| 442 | 0.004524 | 0.02738 | 0.921425 |
| 443 | 0.004218 | 0.025148 | 1.162762 |
| 444 | 0.004237 | 0.024847 | 0.728786 |
| 445 | 0.004293 | 0.025134 | 1.175772 |
| 446 | 0.005773 | 0.02595 | 0.999823 |
| 447 | 0.004274 | 0.025853 | 1.006288 |
| 448 | 0.004344 | 0.02546 | 0.863958 |
| 449 | 0.004346 | 0.025705 | 0.920647 |
| 450 | 0.004326 | 0.025476 | 0.816123 |
| 451 | 0.004237 | 0.025069 | 0.846299 |
| 452 | 0.005257 | 0.025596 | 0.800487 |
| 453 | 0.007428 | 0.026513 | 1.037012 |
| 454 | 0.004303 | 0.024553 | 0.94302 |
| 455 | 0.010434 | 0.037939 | 0.690676 |
| 456 | 0.007299 | 0.027948 | 1.099247 |
| 457 | 0.004251 | 0.025526 | 0.872239 |
| 458 | 0.004302 | 0.025162 | 1.050254 |
| 459 | 0.004217 | 0.025242 | 0.856808 |
| 460 | 0.004174 | 0.02491 | 0.771856 |
| 461 | 0.004283 | 0.023773 | 0.825394 |
| 462 | 0.004232 | 0.026042 | 1.06574 |
| 463 | 0.00424 | 0.02602 | 0.834992 |
| 464 | 0.004112 | 0.026109 | 1.215674 |
| 465 | 0.004229 | 0.025226 | 0.796978 |
| 466 | 0.004197 | 0.024889 | 1.287377 |
| 467 | 0.005177 | 0.025637 | 0.884542 |
| 469 | 0.00431 | 0.025306 | 1.013611 |
| 470 | 0.004249 | 0.025992 | 0.811355 |
| 471 | 0.004548 | 0.027775 | 0.99103 |
| 473 | 0.005266 | 0.027614 | 0.841048 |
| 474 | 0.005181 | 0.025263 | 1.045863 |
| 475 | 0.004214 | 0.024591 | 1.055417 |
| 476 | 0.004585 | 0.024957 | 0.96854 |
| 477 | 0.005587 | 0.026272 | 1.177024 |
| 478 | 0.005441 | 0.028445 | 0.988752 |
| 479 | 0.004717 | 0.027028 | 0.856542 |
| 480 | 0.004527 | 0.026333 | 0.732261 |
| 481 | 0.004189 | 0.026134 | 1.042274 |
| 482 | 0.004308 | 0.025592 | 1.144538 |
| 483 | 0.004232 | 0.025486 | 0.988084 |
| 484 | 0.005422 | 0.026264 | 0.930135 |
| 486 | 0.010488 | 0.036814 | 0.400608 |
| 487 | 0.009352 | 0.035227 | 0.398473 |
| 488 | 0.011628 | 0.039565 | 0.371609 |
| 489 | 0.010104 | 0.036386 | 0.522603 |
| 490 | 0.010243 | 0.035054 | 0.428049 |
| 491 | 0.009427 | 0.034974 | 0.456625 |
| 492 | 0.009978 | 0.034961 | 0.578826 |
| 493 | 0.017268 | 0.035854 | 0.439093 |
| 494 | 0.011939 | 0.036741 | 0.564414 |
| 495 | 0.009874 | 0.035139 | 0.393693 |
| 496 | 0.009436 | 0.033925 | 0.438625 |
| 499 | 0.017365 | 0.040412 | 0.408489 |
| 500 | 0.010443 | 0.035109 | 0.376297 |
| 501 | 0.098725 | 0.035501 | 0.705679 |
| 502 | 0.009362 | 0.036715 | 0.497175 |
| 503 | 0.010364 | 0.039033 | 0.408634 |
| 504 | 0.01097 | 0.034864 | 0.429402 |
| 505 | 0.011296 | 0.045354 | 0.444601 |
| 506 | 0.009332 | 0.034205 | 0.450232 |
| 507 | 0.009893 | 0.052264 | 0.571042 |
| 508 | 0.009472 | 0.034109 | 0.533749 |
| 510 | 0.010046 | 0.035326 | 0.405723 |
| 511 | 0.009439 | 0.03423 | 0.345853 |
| 512 | 0.009106 | 0.034492 | 0.364057 |
| 513 | 0.013017 | 0.036592 | 0.399432 |
| 514 | 0.029114 | 0.157091 | 0.665907 |
| 515 | 0.009588 | 0.035852 | 0.430589 |
| 516 | 0.01053 | 0.034159 | 0.347145 |
| 517 | 0.011616 | 0.049112 | 0.479119 |
| 518 | 0.010441 | 0.034833 | 0.526338 |
| 519 | 0.012705 | 0.03856 | 0.465362 |
| 520 | 0.036111 | 0.066426 | 0.601134 |
| 521 | 0.009721 | 0.035602 | 0.5263 |
| 522 | 0.009626 | 0.034174 | 0.411501 |
| 523 | 0.010243 | 0.034049 | 0.461773 |
| 524 | 0.009466 | 0.03404 | 0.450292 |
| 525 | 0.009484 | 0.035115 | 0.428652 |
| 526 | 0.034651 | 0.049443 | 0.470629 |
| 527 | 0.010225 | 0.035086 | 0.474979 |
| 528 | 0.01019 | 0.0345 | 0.559636 |
| 529 | 0.0097 | 0.044281 | 0.512486 |
| 531 | 0.011152 | 0.035546 | 0.358218 |
| 532 | 0.017782 | 0.037115 | 0.476891 |
| 533 | 0.010199 | 0.033963 | 0.420376 |
| 534 | 0.009483 | 0.035329 | 0.29936 |
| 535 | 0.90231 | 0.680855 | 0.881043 |
| 537 | 0.010176 | 0.034227 | 0.547417 |
| 539 | 0.009638 | 0.034846 | 0.4356 |
| 540 | 0.00967 | 0.035308 | 0.379571 |
| 541 | 0.020438 | 0.064563 | 0.553054 |
| 542 | 0.0096 | 0.035474 | 0.46663 |
| 543 | 0.010103 | 0.036928 | 0.391608 |
| 544 | 0.031817 | 0.071379 | 0.405136 |
| 545 | 0.011419 | 0.044632 | 0.471581 |
| 546 | 0.009434 | 0.034118 | 0.633882 |
| 547 | 0.009671 | 0.034574 | 0.37907 |
| 548 | 0.009753 | 0.03389 | 0.425888 |
| 549 | 0.009679 | 0.034543 | 0.416178 |
| 550 | 0.010414 | 0.035565 | 0.382037 |
| 551 | 0.009573 | 0.034555 | 0.569187 |
| 553 | 0.010895 | 0.037061 | 0.452852 |
| 554 | 0.0252 | 0.106556 | 0.399393 |
| 556 | 0.009499 | 0.034102 | 0.463958 |
| 557 | 0.016537 | 0.050391 | 0.406694 |
| 558 | 0.029851 | 0.098052 | 0.422865 |
| 559 | 0.240194 | 0.948046 | 0.755382 |
| 560 | 0.023732 | 0.142099 | 0.410883 |
| 561 | 0.009951 | 0.034656 | 0.525667 |
| 562 | 0.023838 | 0.071971 | 0.547672 |
| 563 | 0.029476 | 0.233222 | 0.518497 |
| 564 | 0.009775 | 0.033845 | 0.432675 |
| 565 | 0.014326 | 0.034722 | 0.462568 |
| 567 | 0.062129 | 0.223441 | 0.412738 |
| 568 | 0.010126 | 0.035292 | 0.406865 |
| 569 | 0.010231 | 0.035076 | 0.671012 |
| 570 | 0.010125 | 0.035003 | 0.480816 |
| 571 | 0.010039 | 0.034758 | 0.495482 |
| 572 | 0.010531 | 0.045745 | 0.522281 |
| 573 | 0.025354 | 0.034962 | 0.419466 |
| 574 | 0.243552 | 0.556199 | 0.762058 |
| 575 | 0.015572 | 0.035785 | 0.437496 |
| 576 | 0.013035 | 0.038805 | 0.531242 |
| 577 | 0.032586 | 0.079404 | 0.417157 |
| 578 | 0.02313 | 0.063316 | 0.474352 |
| 579 | 0.065246 | 0.302516 | 0.543815 |
| 581 | 0.354729 | 0.62217 | 1.144543 |
| 582 | 0.033618 | 0.058613 | 0.615124 |
| 583 | 0.308377 | 0.394948 | 0.932255 |
| 585 | 0.006337 | 0.020183 | 0.315108 |
| 586 | 0.163191 | 0.081969 | 0.381663 |
| 587 | 0.005108 | 0.023774 | 0.224587 |
| 588 | 0.021841 | 0.05963 | 0.370248 |
| 589 | 0.046721 | 0.333438 | 0.27475 |
| 590 | 0.090307 | 0.279891 | 0.29317 |
| 591 | 0.028787 | 0.07838 | 0.325743 |
| 592 | 0.005702 | 0.020121 | 0.306412 |
| 593 | 0.0099 | 0.046476 | 0.246072 |
| 594 | 0.015627 | 0.043937 | 0.215799 |
| 595 | 0.004629 | 0.019544 | 0.251833 |
| 596 | 0.046096 | 0.243097 | 0.24242 |
| 597 | 0.724998 | 0.981484 | 0.844379 |
| 598 | 0.026838 | 0.114469 | 0.289663 |
| 599 | 0.005828 | 0.019718 | 0.257416 |
| 600 | 0.005909 | 0.019865 | 0.251511 |
| 601 | 0.00614 | 0.020424 | 0.288905 |
| 602 | 0.005997 | 0.020776 | 0.216972 |
| 603 | 0.004669 | 0.019593 | 0.244223 |
| 604 | 0.008771 | 0.03346 | 0.323606 |
| 605 | 0.006624 | 0.020724 | 0.274329 |
| 606 | 0.005853 | 0.020382 | 0.242918 |
| 607 | 0.007747 | 0.021643 | 0.255363 |
| 608 | 0.005712 | 0.019678 | 0.221593 |
| 609 | 0.256073 | 0.504568 | 0.599603 |
| 610 | 0.005913 | 0.020199 | 0.199839 |
| 611 | 0.00447 | 0.019293 | 0.258074 |
| 612 | 0.005724 | 0.019734 | 0.360177 |
| 613 | 0.005694 | 0.019843 | 0.280102 |
| 614 | 0.005742 | 0.019885 | 0.286104 |
| 615 | 0.005705 | 0.019587 | 0.226829 |
| 616 | 0.006013 | 0.020573 | 0.266788 |
| 617 | 0.035272 | 0.094008 | 0.237734 |
| 618 | 0.026309 | 0.025971 | 0.242108 |
| 619 | 0.004687 | 0.020401 | 0.240359 |
| 620 | 0.00571 | 0.019825 | 0.218814 |
| 621 | 0.006001 | 0.020668 | 0.280146 |
| 622 | 0.082002 | 0.273485 | 0.335066 |
| 623 | 0.006029 | 0.020465 | 0.261982 |
| 624 | 0.140559 | 0.424388 | 0.42443 |
| 625 | 0.005826 | 0.019866 | 0.264531 |
| 626 | 0.051468 | 0.032244 | 0.306101 |
| 627 | 0.075104 | 0.276951 | 0.298932 |
| 628 | 0.005997 | 0.022048 | 0.26821 |
| 629 | 0.034034 | 0.401114 | 0.435605 |
| 630 | 0.011946 | 0.027566 | 0.254444 |
| 631 | 0.005914 | 0.020147 | 0.288981 |
| 632 | 0.037385 | 0.026122 | 0.362523 |
| 633 | 0.005826 | 0.019832 | 0.356419 |
| 634 | 0.010026 | 0.030547 | 0.206994 |
| 635 | 0.01508 | 0.04919 | 0.264614 |
| 636 | 0.296551 | 1.260655 | 0.610765 |
| 637 | 0.032124 | 0.375722 | 0.306647 |
| 638 | 0.005896 | 0.021846 | 0.271964 |
| 639 | 0.018881 | 0.148987 | 0.215144 |
| 640 | 0.018015 | 0.131161 | 0.288994 |
| 641 | 0.032334 | 0.02755 | 0.409355 |
| 642 | 0.067149 | 0.273403 | 0.35373 |
| 643 | 0.094609 | 0.53261 | 0.4944 |
| 644 | 0.006418 | 0.02472 | 0.231759 |
| 645 | 0.131335 | 0.734794 | 0.553125 |
| 646 | 0.029427 | 0.344127 | 0.390884 |
| 647 | 0.023863 | 0.136043 | 0.300959 |
| 650 | 0.010281 | 0.03014 | 0.242733 |
| 651 | 0.007994 | 0.028947 | 0.25194 |
| 652 | 0.15318 | 0.627023 | 0.43527 |
| 653 | 0.118823 | 0.69422 | 0.40527 |
| 654 | 0.105353 | 0.646828 | 0.388119 |
| 656 | 0.006783 | 0.02363 | 0.269316 |
| 657 | 0.307363 | 1.189775 | 0.605584 |
| 658 | 0.142732 | 0.450462 | 0.421859 |
| 659 | 0.22685 | 0.512994 | 0.582274 |
| 660 | 0.088314 | 0.402555 | 0.524885 |
| 661 | 0.180276 | 0.439707 | 0.530249 |
| 662 | 0.010698 | 0.060157 | 0.272901 |
| 663 | 0.161736 | 0.431703 | 0.609228 |
| 664 | 0.104153 | 0.348438 | 0.502663 |
| 665 | 0.509021 | 0.807128 | 0.717144 |
| 666 | 0.474224 | 0.60482 | 0.829418 |
| 667 | 0.04441 | 0.198916 | 0.289447 |
| 668 | 0.072205 | 0.466606 | 0.40305 |
| 669 | 0.026334 | 0.185174 | 0.304685 |
| 670 | 0.108713 | 0.572116 | 0.361198 |
| 671 | 0.054216 | 0.293384 | 0.286724 |
| 672 | 0.089022 | 0.461053 | 0.683679 |
| 673 | 0.052496 | 0.22393 | 0.290818 |
| 674 | 0.242917 | 0.426446 | 0.671781 |
| 675 | 0.020806 | 0.100778 | 0.254393 |
| 676 | 0.120498 | 0.594332 | 0.557211 |
| 677 | 0.083653 | 0.221249 | 0.399649 |
| 678 | 0.006713 | 0.026074 | 0.284843 |
| 679 | 0.012988 | 0.238136 | 0.251857 |
| 680 | 0.939588 | 1.168014 | 0.89748 |
| 682 | 0.116101 | 0.51627 | 0.411418 |
| 683 | 0.091835 | 0.41856 | 0.330861 |
| 684 | 0.269272 | 0.956985 | 0.388996 |
| 685 | 0.068553 | 0.420129 | 0.219238 |
| 686 | 0.118729 | 0.627236 | 0.408928 |
| 687 | 0.109438 | 0.486295 | 0.332833 |
| 688 | 0.136059 | 0.604523 | 0.382106 |
| 689 | 0.029476 | 0.230011 | 0.246326 |
| 690 | 0.713106 | 1.287446 | 0.527058 |
| 691 | 0.237497 | 0.831741 | 0.595391 |
| 692 | 0.223793 | 1.114774 | 0.464139 |
| 693 | 0.271839 | 2.152616 | 0.674694 |
| 694 | 0.05139 | 0.613276 | 0.240255 |
| 695 | 0.327666 | 1.036856 | 0.542561 |
| 696 | 0.098363 | 0.604772 | 0.25928 |
| 697 | 0.375897 | 0.957958 | 0.549728 |
| 698 | 0.026512 | 0.225899 | 0.241871 |
| 699 | 0.497694 | 1.50769 | 0.574673 |
| 700 | 0.288469 | 0.915024 | 0.510727 |
| 701 | 0.437509 | 1.020715 | 0.734873 |
| 702 | 0.046205 | 0.476705 | 0.190078 |
| 703 | 0.122863 | 0.83862 | 0.282447 |
| 704 | 0.147205 | 0.901082 | 0.301388 |
| 705 | 0.223074 | 0.853951 | 0.40577 |
| 706 | 0.008438 | 0.033092 | 0.191812 |
| 707 | 0.394494 | 0.997947 | 0.843619 |
| 708 | 0.186993 | 1.051411 | 0.468843 |
| 709 | 0.108893 | 0.601642 | 0.210326 |
| 710 | 0.091753 | 0.734575 | 0.237951 |
| 711 | 0.345755 | 1.159082 | 0.385849 |
| 712 | 0.115713 | 0.513471 | 0.287018 |
| 713 | 0.122493 | 0.686785 | 0.347889 |
| 714 | 0.191872 | 0.830288 | 0.567754 |
| 715 | 0.016321 | 0.055715 | 0.200218 |
| 716 | 0.020481 | 0.530732 | 0.198959 |
| 717 | 0.039274 | 0.234164 | 0.199885 |
| 718 | 0.344223 | 1.062216 | 0.47539 |
| 719 | 0.034917 | 0.299112 | 0.221854 |
| 720 | 0.149534 | 0.777313 | 0.356745 |
| 721 | 0.35108 | 1.01378 | 0.464163 |
| 722 | 0.234439 | 0.884539 | 0.353844 |
| 723 | 0.0088 | 0.035731 | 0.175315 |
| 724 | 0.302881 | 1.254204 | 0.495122 |
| 725 | 0.05075 | 0.39608 | 0.275113 |
| 726 | 0.081523 | 0.495768 | 0.301285 |
| 727 | 0.043541 | 0.247525 | 0.249821 |
| 728 | 0.33696 | 1.546341 | 0.460674 |
| 729 | 0.359043 | 1.008995 | 0.546047 |
| 730 | 0.097955 | 0.496152 | 0.329261 |
| 731 | 0.072919 | 0.443675 | 0.274429 |
| 732 | 0.015001 | 0.060524 | 0.182808 |
| 733 | 0.453244 | 1.410075 | 0.629982 |
| 734 | 0.342572 | 1.700432 | 0.413281 |
| 735 | 0.012613 | 0.050176 | 0.182816 |
| 736 | 0.016461 | 0.063952 | 0.182823 |
| 738 | 0.482005 | 1.605961 | 0.567678 |
| 739 | 0.58218 | 1.397435 | 0.754253 |
| 740 | 0.029093 | 0.051791 | 0.207152 |
| 741 | 0.349249 | 1.283688 | 0.511103 |
| 742 | 0.04606 | 0.482528 | 0.221214 |
| 743 | 0.141882 | 0.376925 | 2.230581 |
| 744 | 0.254656 | 0.939146 | 0.493241 |
| 745 | 0.015338 | 0.058975 | 0.213153 |
| 746 | 0.340833 | 0.962798 | 0.521323 |
| 747 | 0.701684 | 1.619727 | 0.658665 |
| 748 | 0.442992 | 1.472323 | 0.774321 |
| 749 | 0.196686 | 0.71019 | 0.441595 |
| 750 | 0.00964 | 0.038536 | 0.188239 |
| 751 | 0.360595 | 1.364262 | 0.554156 |
| 752 | 0.32576 | 1.182967 | 0.622747 |
| 753 | 0.066818 | 0.928007 | 0.240297 |
| 754 | 0.017628 | 0.16402 | 0.222692 |
| 755 | 0.237297 | 1.072629 | 0.451982 |
| 756 | 0.178168 | 1.009049 | 0.452329 |
| 757 | 0.012459 | 0.041059 | 0.194411 |
| 758 | 0.007271 | 0.030828 | 0.157203 |
| 759 | 0.031242 | 0.159577 | 0.186227 |
| 761 | 0.043353 | 0.146524 | 0.225515 |
| 762 | 0.007574 | 0.030242 | 0.208583 |
| 763 | 0.008587 | 0.032455 | 0.1986 |
| 764 | 0.008102 | 0.033408 | 0.169696 |
| 765 | 0.008951 | 0.03922 | 0.17488 |
| 766 | 0.018024 | 0.295069 | 0.205724 |
| 767 | 0.124411 | 0.768264 | 0.418591 |
| 768 | 0.008208 | 0.036795 | 0.183375 |
| 769 | 0.036346 | 0.37833 | 0.238709 |
| 770 | 0.279379 | 1.535747 | 0.723481 |
| 771 | 0.643475 | 0.520238 | 0.45387 |
| 772 | 0.014665 | 0.047355 | 0.166823 |
| 773 | 0.468419 | 2.022633 | 0.735404 |
| 774 | 0.362808 | 1.622526 | 0.436049 |
| 775 | 0.008859 | 0.038937 | 0.134732 |
| 776 | 0.311065 | 0.985297 | 0.574464 |
| 777 | 0.039862 | 0.065683 | 0.181863 |
| 779 | 0.123206 | 0.450318 | 0.697269 |
| 780 | 0.006814 | 0.029606 | 0.249389 |
| 781 | 0.009967 | 0.031473 | 0.286858 |
| 782 | 0.777497 | 1.325239 | 0.830948 |
| 783 | 0.587889 | 1.292049 | 1.019843 |
| 784 | 0.387894 | 0.821784 | 0.97539 |
| 786 | 0.120025 | 0.185762 | 0.380872 |
| 787 | 0.235698 | 0.942409 | 1.240669 |
| 788 | 0.336218 | 1.269178 | 0.957619 |
| 789 | 0.01732 | 0.096762 | 0.304029 |
| 791 | 0.617079 | 1.629033 | 1.466181 |
| 792 | 0.185997 | 0.704769 | 0.536405 |
| 793 | 0.877167 | 1.831368 | 1.454354 |
| 794 | 0.009408 | 0.076964 | 0.311169 |
| 795 | 0.099921 | 0.429592 | 0.632075 |
| 796 | 0.094809 | 0.536362 | 0.432216 |
| 797 | 0.244954 | 0.482612 | 0.621421 |
| 798 | 0.017916 | 0.084297 | 0.371982 |
| 799 | 0.012818 | 0.047289 | 0.29833 |
| 800 | 0.011675 | 0.13481 | 0.297163 |
| 801 | 0.099266 | 0.273608 | 0.403125 |
| 802 | 0.367887 | 1.18793 | 0.85394 |
| 803 | 0.006742 | 0.027036 | 0.289538 |
| 804 | 0.059456 | 0.162059 | 0.353715 |
| 805 | 0.01413 | 0.033509 | 0.294557 |
| 806 | 0.518086 | 1.610542 | 0.760268 |
| 807 | 0.022595 | 0.066194 | 0.294225 |
| 808 | 0.459064 | 1.277287 | 1.042237 |
| 810 | 0.012544 | 0.05468 | 0.274167 |
| 811 | 0.151174 | 0.538166 | 0.417778 |
| 812 | 0.006597 | 0.025521 | 0.283047 |
| 813 | 0.00961 | 0.027888 | 0.286255 |
| 814 | 0.048257 | 0.855988 | 0.357851 |
| 815 | 0.008921 | 0.03568 | 0.252635 |
| 816 | 0.39553 | 1.021138 | 0.918671 |
| 817 | 0.123764 | 0.912411 | 0.462477 |
| 818 | 0.007052 | 0.060048 | 0.259581 |
| 820 | 0.595672 | 0.572794 | 2.367059 |
| 821 | 0.027009 | 0.077125 | 0.292614 |
| 822 | 0.006996 | 0.035426 | 0.27968 |
| 823 | 0.61953 | 2.009281 | 0.808006 |
| 824 | 0.078118 | 0.029309 | 0.329722 |
| 825 | 0.038471 | 0.505871 | 0.321534 |
| 826 | 0.214307 | 1.236203 | 0.710454 |
| 827 | 0.187119 | 1.091001 | 0.678169 |
| 828 | 0.008155 | 0.032836 | 0.286114 |
| 829 | 0.043091 | 0.374192 | 0.385331 |
| 830 | 0.227057 | 0.993627 | 0.956788 |
| 831 | 0.111249 | 0.782791 | 0.514752 |
| 832 | 0.007741 | 0.034744 | 0.240929 |
| 833 | 0.148308 | 1.302523 | 0.621108 |
| 834 | 0.050544 | 0.635099 | 0.432155 |
| 835 | 0.107654 | 0.475431 | 0.419748 |
| 836 | 0.332776 | 1.197718 | 0.712195 |
| 837 | 0.007024 | 0.02723 | 0.249139 |
| 839 | 0.541139 | 1.487877 | 1.280705 |
| 840 | 0.434719 | 1.514761 | 1.27396 |
| 841 | 0.268407 | 1.048218 | 0.711256 |
| 842 | 0.258458 | 1.028083 | 0.818548 |
| 843 | 0.211266 | 0.691019 | 1.864166 |
| 846 | 0.14662 | 0.821729 | 1.1122 |
| 847 | 0.386867 | 1.568454 | 0.669131 |
| 848 | 0.080316 | 0.56734 | 0.850772 |
| 849 | 0.25383 | 1.721732 | 0.602704 |
| 850 | 0.526909 | 1.78363 | 0.891613 |
| 851 | 0.116222 | 0.76078 | 0.77039 |
| 852 | 0.206702 | 0.560921 | 1.415325 |
| 853 | 0.238304 | 1.081284 | 0.677935 |
| 854 | 0.053709 | 0.430447 | 0.580549 |
| 855 | 0.218825 | 0.941552 | 0.664315 |
| 856 | 0.101452 | 0.224533 | 0.577448 |
| 857 | 0.417144 | 0.902022 | 1.306233 |
| 858 | 0.03876 | 0.729869 | 0.32705 |
| 859 | 0.007745 | 0.034045 | 0.25266 |
| 860 | 0.008348 | 0.045165 | 0.274574 |
| 861 | 0.594983 | 1.639781 | 1.271579 |
| 862 | 0.900769 | 1.57937 | 1.004981 |
| 863 | 0.537996 | 1.331377 | 1.261956 |
| 864 | 0.388698 | 0.891772 | 1.285634 |
| 865 | 0.264661 | 1.079879 | 0.864063 |
| 866 | 0.06028 | 0.22964 | 0.478783 |
| 867 | 0.239258 | 0.716616 | 0.710261 |
| 868 | 0.008279 | 0.030116 | 0.264729 |
| 870 | 0.345182 | 0.941026 | 1.084312 |
| 871 | 0.381332 | 0.702232 | 1.235897 |
| 872 | 0.007184 | 0.0288 | 0.280018 |
| 873 | 0.011191 | 0.037242 | 0.285839 |
| 874 | 0.149494 | 0.617071 | 1.476994 |
| 875 | 0.172408 | 0.907391 | 0.867952 |
| 876 | 0.462175 | 1.088865 | 1.306636 |
| 878 | 0.010338 | 0.034189 | 0.216719 |
| 879 | 0.004925 | 0.019286 | 0.108567 |
| 881 | 0.005183 | 0.020939 | 0.088123 |
| 882 | 0.005094 | 0.020658 | 0.090945 |
| 883 | 0.005435 | 0.022801 | 0.085715 |
| 884 | 0.150855 | 0.669518 | 0.216276 |
| 885 | 0.352227 | 0.729722 | 0.522431 |
| 886 | 0.00519 | 0.04764 | 0.094334 |
| 887 | 0.006618 | 0.067628 | 0.098385 |
| 888 | 0.689507 | 1.833727 | 0.663895 |
| 889 | 0.192102 | 1.196074 | 0.344485 |
| 890 | 0.348046 | 1.61085 | 0.692815 |
| 891 | 0.080898 | 0.580847 | 0.200646 |
| 892 | 0.044425 | 0.718329 | 0.121203 |
| 893 | 0.382721 | 0.843293 | 0.376432 |
| 894 | 0.068781 | 0.640743 | 0.21479 |
| 896 | 0.014415 | 0.055218 | 0.107079 |
| 897 | 0.00687 | 0.027706 | 0.094585 |
| 898 | 0.286212 | 1.357183 | 0.357932 |
| 899 | 0.297653 | 1.1528 | 0.302755 |
| 900 | 0.327981 | 0.932419 | 0.386499 |
| 901 | 0.010727 | 0.05943 | 0.088041 |
| 902 | 0.350484 | 1.180504 | 0.40489 |
| 903 | 0.374566 | 1.622565 | 0.396166 |
| 904 | 0.166397 | 1.049689 | 0.320325 |
| 905 | 0.136541 | 0.817688 | 0.362347 |
| 906 | 0.291429 | 1.325833 | 0.396889 |
| 907 | 0.347797 | 1.267447 | 0.541789 |
| 908 | 0.034779 | 0.467747 | 0.163031 |
| 909 | 0.164487 | 0.350343 | 0.141732 |
| 910 | 0.265078 | 0.886219 | 0.407203 |
| 911 | 0.220201 | 0.717038 | 0.423402 |
| 912 | 0.186388 | 0.85741 | 0.362314 |
| 913 | 0.518467 | 1.762848 | 0.547938 |
| 914 | 0.40602 | 1.766605 | 0.454544 |
| 915 | 0.163459 | 1.042566 | 0.26138 |
| 916 | 0.296433 | 1.092387 | 0.371475 |
| 917 | 0.635553 | 1.261914 | 0.549559 |
| 918 | 0.291057 | 1.006901 | 0.474071 |
| 919 | 0.413799 | 1.246473 | 0.564896 |
| 920 | 0.179531 | 1.451147 | 0.495419 |
| 921 | 0.178932 | 1.285129 | 0.41161 |
| 923 | 0.317288 | 1.146979 | 0.387911 |
| 924 | 0.273164 | 0.914613 | 0.414757 |
| 925 | 0.19808 | 0.725391 | 0.296935 |
| 926 | 0.009777 | 0.035042 | 0.100935 |
| 927 | 0.436574 | 1.262457 | 0.683576 |
| 928 | 0.183262 | 0.813709 | 0.402288 |
| 929 | 0.094365 | 0.787482 | 0.213812 |
| 930 | 0.009025 | 0.063975 | 0.099171 |
| 931 | 0.032034 | 0.095047 | 0.131713 |
| 932 | 0.429418 | 1.050149 | 0.621605 |
| 933 | 0.0172 | 0.052524 | 0.099638 |
| 934 | 0.632772 | 1.169765 | 0.781487 |
| 935 | 0.253132 | 1.3481 | 0.278776 |
| 936 | 0.170298 | 1.000176 | 0.277753 |
| 937 | 0.15824 | 0.84717 | 0.442072 |
| 938 | 0.20538 | 0.88334 | 0.432407 |
| 939 | 0.224863 | 0.999881 | 0.380371 |
| 940 | 0.006178 | 0.021918 | 0.089462 |
| 941 | 0.011284 | 0.066173 | 0.115573 |
| 942 | 0.173491 | 0.708929 | 0.733394 |
| 943 | 0.189128 | 1.089849 | 0.316464 |
| 944 | 0.090245 | 0.422225 | 0.480858 |
| 946 | 0.230236 | 0.894889 | 0.396333 |
| 947 | 0.257151 | 0.909063 | 0.325964 |
| 948 | 0.170075 | 0.588195 | 0.260671 |
| 949 | 0.187726 | 0.806307 | 0.331384 |
| 950 | 0.22905 | 0.942413 | 0.603096 |
| 951 | 0.397644 | 0.841753 | 0.3522 |
| 952 | 0.049028 | 0.367599 | 0.253907 |
| 953 | 0.147509 | 0.791804 | 0.804695 |
| 954 | 0.16991 | 0.798194 | 0.475492 |
| 955 | 0.264691 | 0.591625 | 0.406549 |
| 957 | 0.148218 | 0.602345 | 0.46558 |
| 958 | 0.204506 | 0.863187 | 0.592641 |
| 959 | 0.255224 | 1.064249 | 0.774381 |
| 961 | 0.156063 | 1.110527 | 0.516403 |
| 962 | 0.212997 | 1.217959 | 0.365859 |
| 963 | 0.0211 | 0.144681 | 0.150198 |
| 964 | 0.489565 | 1.57383 | 0.615012 |
| 965 | 0.251985 | 0.770085 | 0.522089 |
| 966 | 0.55303 | 0.923252 | 0.527881 |
| 967 | 0.374958 | 1.224169 | 0.526617 |
| 968 | 0.07674 | 0.128785 | 0.431369 |
| 969 | 0.186199 | 0.698537 | 0.472067 |
| 970 | 0.161868 | 0.595542 | 0.889933 |
| 971 | 0.057774 | 0.497863 | 0.206401 |
| 972 | 0.089708 | 0.555687 | 0.328706 |
| 974 | 0.4611 | 1.588992 | 0.988689 |
| 975 | 0.501721 | 1.70434 | 0.729741 |
| 976 | 0.468553 | 1.572864 | 0.520521 |
| 977 | 0.465145 | 1.349452 | 0.80622 |
| 978 | 0.060567 | 1.227042 | 0.179786 |
| 980 | 0.649997 | 2.424418 | 0.991253 |
| 981 | 0.675473 | 1.395536 | 0.799773 |
| 982 | 0.493201 | 1.634458 | 0.836638 |
| 983 | 0.6355 | 4.406334 | 0.657997 |
| 984 | 0.622337 | 2.861176 | 0.393731 |
| 985 | 0.247394 | 1.921413 | 0.406224 |
| 986 | 0.098809 | 1.089629 | 0.184354 |
| 987 | 0.47511 | 2.42364 | 0.361921 |
| 988 | 0.364262 | 1.773289 | 0.713466 |
| 989 | 0.751797 | 1.903482 | 0.467399 |
| 992 | 0.251144 | 1.61049 | 0.379502 |
| 993 | 0.209284 | 1.691842 | 0.44776 |
| 994 | 0.34175 | 2.039731 | 0.798924 |
| 995 | 0.560565 | 3.12071 | 0.388763 |
| 996 | 0.407642 | 3.358356 | 0.353555 |
| 997 | 0.930576 | 2.730102 | 0.497813 |
| 998 | 0.325541 | 2.234049 | 0.512623 |
| 999 | 0.37115 | 2.362841 | 0.625508 |
| 1000 | 0.200748 | 2.565779 | 0.285251 |
| 1001 | 0.101767 | 1.532869 | 0.325446 |
| 1002 | 0.334714 | 3.270477 | 0.575591 |
| 1003 | 0.294501 | 2.785205 | 0.192242 |
| 1004 | 0.42759 | 3.329744 | 0.366353 |
| 1005 | 0.658112 | 2.554948 | 0.265405 |
| 1006 | 0.657566 | 1.865741 | 1.037788 |
| 1007 | 0.428267 | 2.664938 | 0.294918 |
| 1008 | 0.123986 | 1.595956 | 0.302035 |
| 1009 | 0.274442 | 2.817702 | 0.287299 |
| 1010 | 0.238204 | 3.007669 | 0.358667 |
| 1011 | 0.329633 | 2.440677 | 0.33232 |
| 1012 | 0.374152 | 3.023523 | 0.243111 |
| 1013 | 0.040086 | 0.407359 | 0.097212 |
| 1014 | 0.650383 | 2.577328 | 0.702306 |
| 1015 | 0.556326 | 3.822954 | 0.220832 |
| 1016 | 0.286549 | 2.359215 | 0.398523 |
| 1017 | 0.391716 | 5.493401 | 0.257803 |
| 1018 | 0.232929 | 2.135935 | 0.649378 |
| 1019 | 0.28219 | 2.371224 | 0.266729 |
| 1020 | 0.51863 | 2.875937 | 0.340747 |
| 1021 | 0.330813 | 1.726956 | 0.254804 |
| 1022 | 0.017793 | 0.063328 | 0.09479 |
| 1023 | 0.632422 | 5.001505 | 0.355245 |
| 1024 | 0.18462 | 1.771516 | 0.207356 |
| 1025 | 0.252709 | 2.019318 | 0.193805 |
| 1026 | 0.266125 | 3.425025 | 0.244887 |
| 1027 | 0.333355 | 2.88353 | 0.287246 |
| 1028 | 0.279444 | 1.656027 | 0.326932 |
| 1029 | 0.757301 | 2.168554 | 0.177607 |
| 1030 | 0.787768 | 3.103594 | 0.962656 |
| 1031 | 0.485323 | 3.727265 | 0.678268 |
| 1032 | 0.152334 | 1.921508 | 0.428204 |
| 1033 | 0.10525 | 1.592774 | 0.153351 |
| 1034 | 0.017448 | 0.092714 | 0.088247 |
| 1035 | 0.32027 | 2.717977 | 0.197946 |
| 1036 | 0.315469 | 1.59956 | 0.232083 |
| 1037 | 0.583145 | 2.318094 | 0.166805 |
| 1039 | 0.347433 | 2.874902 | 0.471893 |
| 1040 | 0.142964 | 1.920848 | 0.351992 |
| 1042 | 0.202209 | 2.100867 | 0.315035 |
| 1044 | 0.349521 | 2.320673 | 0.253838 |
| 1045 | 0.210983 | 0.761205 | 0.187876 |
| 1046 | 0.090748 | 0.371038 | 0.186849 |
| 1048 | 0.066928 | 0.667905 | 0.236017 |
| 1049 | 0.019242 | 0.114164 | 0.097972 |
| 1051 | 0.317465 | 2.158948 | 0.221567 |
| 1053 | 0.034762 | 0.16757 | 0.098127 |
| 1054 | 1.115094 | 3.572908 | 0.107919 |
| 1055 | 0.426255 | 2.279363 | 0.875474 |
| 1056 | 0.35721 | 2.140493 | 0.659378 |
| 1058 | 0.55246 | 3.14052 | 0.533825 |
| 1059 | 0.282424 | 1.535033 | 0.458698 |
| 1060 | 0.508811 | 3.071866 | 0.445119 |
| 1061 | 0.525733 | 2.601345 | 0.545443 |
| 1062 | 0.723702 | 1.828112 | 0.521941 |
| 1063 | 0.699279 | 2.002368 | 1.090698 |
| 1064 | 0.488057 | 1.746524 | 0.694956 |
| 1065 | 0.525503 | 2.352257 | 0.927797 |
| 1066 | 0.718979 | 3.256654 | 0.939838 |
| 1067 | 0.491483 | 1.809573 | 0.745394 |
| 1068 | 1.179541 | 3.74017 | 0.467877 |
| 1069 | 0.680638 | 2.4638 | 0.562974 |
| 1071 | 0.209584 | 0.500858 | 0.031699 |
| 1072 | 0.427886 | 1.498126 | 0.045503 |
| 1074 | 0.225285 | 0.934492 | 0.092819 |
| 1075 | 0.137715 | 0.599395 | 0.037514 |
| 1076 | 0.218044 | 1.024494 | 0.018691 |
| 1077 | 0.357504 | 1.710835 | 0.077848 |
| 1078 | 0.446448 | 1.518153 | 0.329426 |
| 1079 | 0.068825 | 0.57375 | 0.014851 |
| 1080 | 0.003884 | 0.019354 | 0.011699 |
| 1081 | 0.132094 | 0.892676 | 0.083692 |
| 1082 | 0.11434 | 0.923226 | 0.056705 |
| 1083 | 0.048631 | 0.398633 | 0.030346 |
| 1084 | 0.09557 | 0.924719 | 0.027728 |
| 1085 | 0.319794 | 0.776496 | 0.0123 |
| 1086 | 0.841477 | 2.348773 | 0.384012 |
| 1087 | 0.52158 | 1.199952 | 0.055537 |
| 1088 | 0.078823 | 0.411586 | 0.028465 |
| 1089 | 0.00343 | 0.019524 | 0.010609 |
| 1090 | 0.003436 | 0.019498 | 0.011946 |
| 1091 | 0.102675 | 0.821406 | 0.058983 |
| 1092 | 0.106604 | 0.815445 | 0.072592 |
| 1093 | 0.058575 | 0.476647 | 0.055827 |
| 1094 | 0.582942 | 1.352039 | 0.521226 |
| 1095 | 0.274994 | 0.998033 | 0.05091 |
| 1096 | 0.135482 | 0.659134 | 0.082443 |
| 1097 | 0.092301 | 0.934711 | 0.104868 |
| 1098 | 0.128824 | 1.226146 | 0.0726 |
| 1099 | 0.053711 | 0.584595 | 0.057494 |
| 1100 | 0.06731 | 0.735897 | 0.070774 |
| 1101 | 0.112476 | 0.815231 | 0.062219 |
| 1102 | 0.415663 | 1.212428 | 0.079545 |
| 1103 | 0.412005 | 1.754218 | 0.07277 |
| 1104 | 0.094334 | 0.470474 | 0.097149 |
| 1105 | 0.028017 | 0.537236 | 0.024877 |
| 1106 | 0.053871 | 0.742137 | 0.06444 |
| 1107 | 0.095169 | 1.103475 | 0.065829 |
| 1108 | 0.093046 | 0.820538 | 0.035385 |
| 1109 | 0.057641 | 0.482332 | 0.044518 |
| 1110 | 0.455043 | 1.55682 | 0.197962 |
| 1111 | 0.383534 | 1.350223 | 0.034935 |
| 1112 | 0.069077 | 0.719701 | 0.057509 |
| 1113 | 0.039422 | 0.485263 | 0.043295 |
| 1114 | 0.067072 | 0.91085 | 0.025613 |
| 1115 | 0.039005 | 0.503229 | 0.02457 |
| 1116 | 0.033876 | 0.323061 | 0.033704 |
| 1117 | 0.064028 | 0.56885 | 0.033787 |
| 1118 | 0.250182 | 0.508475 | 0.021224 |
| 1119 | 0.37371 | 0.826558 | 0.089181 |
| 1120 | 0.090101 | 0.592721 | 0.06047 |
| 1121 | 0.059672 | 1.02895 | 0.070457 |
| 1122 | 0.02492 | 0.538694 | 0.02872 |
| 1125 | 0.122305 | 0.680083 | 0.045805 |
| 1126 | 0.463398 | 1.267668 | 0.085815 |
| 1127 | 0.238281 | 1.080024 | 0.095938 |
| 1128 | 0.073365 | 0.521087 | 0.063778 |
| 1129 | 0.031089 | 0.393886 | 0.022686 |
| 1130 | 0.093374 | 0.767258 | 0.115614 |
| 1131 | 0.079149 | 0.574318 | 0.048331 |
| 1132 | 0.074191 | 0.643954 | 0.023463 |
| 1133 | 0.062971 | 0.480284 | 0.031931 |
| 1134 | 0.216714 | 2.20506 | 0.132402 |
| 1135 | 0.256515 | 0.844706 | 0.057365 |
| 1136 | 0.10945 | 0.887249 | 0.110266 |
| 1137 | 0.029429 | 0.352312 | 0.033672 |
| 1138 | 0.100706 | 0.864622 | 0.084684 |
| 1139 | 0.068952 | 0.846332 | 0.073941 |
| 1140 | 0.088214 | 0.797631 | 0.063666 |
| 1141 | 0.060094 | 0.359254 | 0.051047 |
| 1142 | 0.449206 | 1.015907 | 0.520133 |
| 1143 | 0.015059 | 0.08374 | 0.013579 |
| 1144 | 0.021431 | 0.415068 | 0.029096 |
| 1145 | 0.065197 | 0.376581 | 0.059013 |
| 1146 | 0.091757 | 0.625511 | 0.054384 |
| 1147 | 0.069289 | 0.534903 | 0.093464 |
| 1148 | 0.09357 | 0.984551 | 0.073067 |
| 1149 | 0.087768 | 0.722494 | 0.041795 |
| 1150 | 0.371622 | 1.089698 | 0.054021 |
| 1151 | 0.2795 | 0.947429 | 0.047765 |
| 1152 | 0.107195 | 0.384755 | 0.042152 |
| 1153 | 0.170766 | 0.881601 | 0.079923 |
| 1154 | 0.165804 | 1.199739 | 0.082085 |
| 1155 | 0.133725 | 0.619659 | 0.096667 |
| 1156 | 0.083408 | 0.615919 | 0.018728 |
| 1157 | 0.005065 | 0.022682 | 0.011868 |
| 1158 | 0.279768 | 0.567474 | 0.470594 |
| 1159 | 0.366023 | 1.092993 | 0.087006 |
| 1160 | 0.27576 | 0.987157 | 0.055226 |
| 1161 | 0.00888 | 0.211542 | 0.013514 |
| 1162 | 0.321948 | 1.123212 | 0.077234 |
| 1163 | 0.238473 | 0.676024 | 0.108033 |
| 1164 | 0.174887 | 0.553471 | 0.031922 |
| 1165 | 0.362907 | 1.060364 | 0.105512 |
| 1167 | 0.440301 | 3.41734 | |
| 1168 | 2.269595 | 6.148748 | |
| 1169 | 1.81238 | 4.676323 | |
| 1170 | 0.205013 | 0.821177 | |
| 1171 | 1.757897 | 3.916135 | |
| 1172 | 1.485171 | 1.939494 | |
| 1173 | 0.294994 | 0.522214 | |
| 1174 | 0.375652 | 1.011377 | |
| 1175 | 0.751857 | 4.08474 | |
| 1176 | 0.543517 | 3.338898 | |
| 1177 | 1.544519 | 7.245177 | |
| 1178 | 0.736878 | 2.629057 | |
| 1179 | 0.686547 | 2.072089 | |
| 1180 | 0.237255 | 0.98724 | |
| 1182 | 0.654624 | 1.237891 | |
| 1183 | 0.909645 | 4.061809 | |
| 1184 | 0.544952 | 2.024292 | |
| 1185 | 0.147863 | 1.25923 | |
| 1186 | 0.434429 | 1.954991 | |
| 1187 | 0.505786 | 3.505564 | |
| 1188 | 0.406861 | 2.548182 | |
| 1189 | 0.4624 | 2.051662 | |
| 1190 | 0.071895 | 0.226536 | |
| 1191 | 0.02375 | 0.087245 | |
| 1192 | 1.717893 | 7.465639 | |
| 1193 | 0.542623 | 4.373519 | |
| 1194 | 0.354838 | 3.577394 | |
| 1195 | 0.259933 | 3.12244 | |
| 1196 | 0.215423 | 2.052223 | |
| 1197 | 0.526893 | 2.109184 | |
| 1198 | 0.822275 | 1.940819 | |
| 1199 | 2.037406 | 9.409115 | |
| 1200 | 1.095359 | 5.130504 | |
| 1201 | 0.157644 | 0.731059 | |
| 1202 | 0.230264 | 1.923086 | |
| 1204 | 0.044579 | 0.913551 | |
| 1206 | 0.511955 | 1.209704 | |
| 1207 | 0.046192 | 0.162052 | |
| 1208 | 0.026908 | 0.124359 | |
| 1209 | 0.281822 | 3.216097 | |
| 1210 | 0.220147 | 2.427366 | |
| 1211 | 0.111229 | 1.298379 | |
| 1213 | 0.141412 | 0.865279 | |
| 1214 | 0.15488 | 0.459765 | |
| 1215 | 0.997818 | 3.321803 | |
| 1216 | 1.025901 | 4.406269 | |
| 1217 | 0.260845 | 2.930463 | |
| 1218 | 0.345315 | 3.143776 | |
| 1219 | 0.305255 | 1.957145 | |
| 1220 | 0.172212 | 1.168102 | |
| 1221 | 0.248967 | 0.814305 | |
| 1222 | 0.03732 | 0.119114 | |
| 1223 | 1.247387 | 3.024953 | |
| 1224 | 0.024175 | 0.081463 | |
| 1225 | 0.057454 | 0.455597 | |
| 1226 | 0.361586 | 4.237747 | |
| 1227 | 0.15804 | 1.518132 | |
| 1228 | 0.015375 | 0.056146 | |
| 1229 | 0.444241 | 1.249649 | |
| 1230 | 0.649691 | 1.15827 | |
| 1232 | 0.378509 | 0.925671 | |
| 1233 | 0.325411 | 2.625939 | |
| 1234 | 0.206621 | 2.051787 | |
| 1235 | 0.019165 | 0.09314 | |
| 1236 | 0.118642 | 1.658952 | |
| 1237 | 0.017709 | 0.057603 | |
| 1238 | 0.015895 | 0.043364 | |
| 1239 | 0.025104 | 0.079453 | |
| 1240 | 0.361175 | 2.493372 | |
| 1242 | 0.325351 | 1.821619 | |
| 1243 | 0.411323 | 2.267424 | |
| 1244 | 0.262681 | 1.368943 | |
| 1245 | 0.209877 | 1.009418 | |
| 1246 | 0.689115 | 0.935799 | |
| 1247 | 1.206727 | 3.45224 | |
| 1248 | 0.997846 | 3.186952 | |
| 1249 | 1.03331 | 4.151541 | |
| 1250 | 0.526962 | 1.830667 | |
| 1251 | 0.038789 | 0.160427 | |
| 1252 | 0.529876 | 1.476753 | |
| 1253 | 0.148526 | 0.512689 | |
| 1254 | 0.171619 | 0.496272 | |
| 1255 | 1.440028 | 4.650389 | |
| 1256 | 1.246323 | 3.526473 | |
| 1257 | 1.630471 | 3.27436 | |
| 1258 | 1.175351 | 3.563138 | |
| 1259 | 0.846546 | 1.714691 | |
| 1260 | 1.043862 | 0.869917 | |
| 1261 | 0.290872 | 0.44244 | |
| 1263 | 0.493679 | 0.657699 | 1.716926 |
| 1264 | 0.298742 | 0.443995 | 1.012966 |
| 1265 | 0.378744 | 0.471388 | 1.244712 |
| 1266 | 0.211218 | 0.327944 | 0.97188 |
| 1267 | 0.17315 | 0.41676 | 1.57404 |
| 1268 | 0.213092 | 0.396399 | 1.097609 |
| 1269 | 0.227781 | 0.372048 | 1.433456 |
| 1270 | 0.004499 | 0.018835 | 1.068802 |
| 1271 | 0.180553 | 0.407587 | 1.83541 |
| 1272 | 0.394666 | 0.599394 | 1.66783 |
| 1273 | 0.281898 | 0.489728 | 1.50982 |
| 1274 | 0.243913 | 0.319871 | 0.788908 |
| 1275 | 0.262209 | 0.4805 | 3.95034 |
| 1276 | 0.378342 | 0.610004 | 1.467933 |
| 1277 | 0.273883 | 0.469937 | 1.070136 |
| 1278 | 0.315846 | 0.734033 | 0.89974 |
| 1279 | 0.189246 | 0.354251 | 6.159851 |
| 1280 | 0.388472 | 0.494888 | 1.410746 |
| 1281 | 0.00514 | 0.020652 | 0.591781 |
| 1282 | 0.289013 | 0.482967 | 2.197797 |
| 1283 | 0.053841 | 0.067338 | 0.927451 |
| 1284 | 0.570301 | 0.633162 | 2.538618 |
| 1285 | 0.255977 | 0.464247 | 1.400939 |
| 1286 | 0.003738 | 0.01781 | 0.498459 |
| 1287 | 0.422493 | 0.771168 | 1.722777 |
| 1288 | 0.373076 | 0.512993 | 1.52444 |
| 1289 | 0.003707 | 0.017964 | 0.668949 |
| 1290 | 0.02527 | 0.048054 | 0.658627 |
| 1291 | 0.010359 | 0.025134 | 0.65155 |
| 1292 | 0.018398 | 0.043801 | 0.757339 |
| 1293 | 0.01987 | 0.051117 | 0.725236 |
| 1294 | 0.010602 | 0.029974 | 0.799556 |
| 1295 | 0.008196 | 0.027605 | 0.669465 |
| 1296 | 0.062396 | 0.233757 | 1.952551 |
| 1298 | 0.003269 | 0.017718 | 0.60053 |
| 1302 | 0.003654 | 0.017971 | 0.669614 |
| 1453 | 0.029035 | 0.074756 | 1.361452 |
| 1456 | 0.070888 | 0.141499 | 1.733833 |
| 1457 | 0.005302 | 0.02091 | 0.86533 |
| 1458 | 0.022487 | 0.056128 | 0.69949 |
| 1459 | 0.041481 | 0.10652 | 1.298416 |
| 1460 | 0.178585 | 0.283471 | 1.592463 |
| 1461 | 0.003819 | 0.018816 | 0.634444 |
| 1462 | 0.089803 | 0.219634 | 2.496717 |
| 1463 | 0.367361 | 0.489496 | 3.718475 |
| 1465 | 0.05509 | 0.079253 | 0.882252 |
| 1466 | 0.125624 | 0.195771 | 1.647541 |
| 1467 | 0.104653 | 0.186069 | 1.135532 |
| 1468 | 0.036721 | 0.09977 | 0.954748 |
| 1469 | 0.12058 | 0.220731 | 1.105286 |
| 1470 | 0.107829 | 0.199233 | 0.937104 |
| 1471 | 0.112351 | 0.216795 | 1.247919 |
| 1472 | 0.229734 | 0.29791 | 1.053188 |
| 1473 | 0.005236 | 0.020279 | 0.786991 |
| 1474 | 0.094218 | 0.183605 | 2.872396 |
| 1475 | 0.103852 | 0.178429 | 2.934125 |
| 1476 | 0.032997 | 0.071639 | 1.468191 |
| 1477 | 0.004763 | 0.019988 | 0.744601 |
| 1479 | 0.004862 | 0.02006 | 0.646639 |
| 1480 | 0.062493 | 0.120887 | 1.421179 |
| 1482 | 0.063512 | 0.117236 | 1.02612 |
| 1483 | 0.003687 | 0.018638 | 0.806893 |
| 1485 | 0.002923 | 0.016326 | 0.810278 |
| 1486 | 0.003046 | 0.016492 | 0.639067 |
| 1487 | 0.002997 | 0.016251 | 0.874065 |
| 1488 | 0.002931 | 0.015913 | 0.718561 |
| 1489 | 0.00278 | 0.016262 | 0.945829 |
| 1490 | 0.003396 | 0.017309 | 0.839493 |
| 1491 | 0.002835 | 0.016415 | 0.616515 |
| 1492 | 0.00337 | 0.017996 | 0.87573 |
| 1493 | 0.002838 | 0.016276 | 0.706791 |
| 1494 | 0.002936 | 0.016453 | 0.886075 |
| 1496 | 0.003021 | 0.016335 | 0.634456 |
| 1497 | 0.002921 | 0.016072 | 0.841508 |
| 1498 | 0.002932 | 0.016361 | 0.582778 |
| 1499 | 0.002819 | 0.017478 | 0.948983 |
| 1500 | 0.003006 | 0.017306 | 0.604048 |
| 1501 | 0.002807 | 0.016489 | 0.785628 |
| 1502 | 0.002769 | 0.015804 | 0.755524 |
| 1503 | 0.002882 | 0.016466 | 0.819839 |
| 1504 | 0.003412 | 0.016569 | 0.709579 |
| 1505 | 0.003997 | 0.017625 | 0.888899 |
| 1506 | 0.00289 | 0.017248 | 0.894677 |
| 1507 | 0.002795 | 0.01699 | 0.79213 |
| 1508 | 0.002911 | 0.016103 | 0.775025 |
| 1509 | 0.002935 | 0.016148 | 0.746427 |
| 1510 | 0.002847 | 0.016713 | 0.598686 |
| 1511 | 0.002895 | 0.016502 | 0.768356 |
| 1512 | 0.003954 | 0.017185 | 0.677016 |
| 1514 | 0.002815 | 0.027933 | 0.931244 |
| 1515 | 0.002933 | 0.027695 | 0.651567 |
| 1516 | 0.002785 | 0.026655 | 0.652685 |
| 1517 | 0.002783 | 0.027738 | 0.565322 |
| 1518 | 0.002828 | 0.026694 | 0.631511 |
| 1519 | 0.002834 | 0.027337 | 0.66479 |
| 1520 | 0.003453 | 0.028188 | 0.710203 |
| 1521 | 0.002992 | 0.026775 | 0.61482 |
| 1522 | 0.003072 | 0.028592 | 0.83538 |
| 1523 | 0.003473 | 0.028775 | 0.571612 |
| 1524 | 0.002805 | 0.027075 | 0.704035 |
| 1525 | 0.003615 | 0.030549 | 0.735642 |
| 1526 | 0.002812 | 0.027292 | 0.770641 |
| 1527 | 0.00283 | 0.026705 | 0.696095 |
| 1528 | 0.002794 | 0.026616 | 0.600694 |
| 1529 | 0.002883 | 0.026458 | 0.557503 |
| 1530 | 0.002978 | 0.028069 | 0.812791 |
| 1532 | 0.002984 | 0.027308 | 0.532545 |
| 1533 | 0.00285 | 0.02682 | 0.563657 |
| 1534 | 0.002846 | 0.02764 | 0.746323 |
| 1536 | 0.002799 | 0.027063 | 0.751124 |
| 1537 | 0.002812 | 0.02665 | 0.629611 |
| 1538 | 0.002753 | 0.026783 | 0.503323 |
| 1539 | 0.002909 | 0.027333 | 0.504615 |
| 1540 | 0.002819 | 0.027702 | 0.694792 |
| 1541 | 0.002759 | 0.02709 | 0.560466 |
| 1542 | 0.002733 | 0.027285 | 0.651773 |
| 1543 | 0.002765 | 0.026253 | 0.573015 |
| 1544 | 0.002706 | 0.027092 | 0.654941 |
| 1545 | 0.002874 | 0.026632 | 0.714128 |
| 1546 | 0.00294 | 0.027778 | 0.636466 |
| 1548 | 0.00279 | 0.028079 | 0.706656 |
| 1549 | 0.002731 | 0.027168 | 0.522207 |
| 1550 | 0.002677 | 0.027476 | 0.696415 |
| 1551 | 0.002816 | 0.027408 | 0.60935 |
| 1552 | 0.002864 | 0.027019 | 0.564324 |
| 1553 | 0.00289 | 0.027219 | 0.656982 |
| 1554 | 0.002904 | 0.027245 | 0.709589 |
| 1555 | 0.002857 | 0.027357 | 0.770251 |
| 1556 | 0.002779 | 0.027449 | 0.600841 |
| 1557 | 0.002804 | 0.027851 | 0.819866 |
| 1558 | 0.002822 | 0.027061 | 0.698614 |
| 1559 | 0.002789 | 0.026908 | 0.526565 |
| 1560 | 0.002867 | 0.02696 | 0.567773 |
| 1561 | 0.002954 | 0.026183 | 0.535325 |
| 1562 | 0.002832 | 0.028297 | 0.591001 |
| 1563 | 0.002851 | 0.026715 | 0.518507 |
| 1564 | 0.002773 | 0.027867 | 0.574878 |
| 1565 | 0.002829 | 0.027062 | 0.707218 |
| 1566 | 0.002787 | 0.027944 | 0.60274 |
| 1567 | 0.002789 | 0.026836 | 0.681669 |
| 1568 | 0.002819 | 0.026247 | 0.679288 |
| 1569 | 0.00288 | 0.026881 | 0.755689 |
| 1570 | 0.002853 | 0.026701 | 0.743775 |
| 1571 | 0.002811 | 0.027011 | 0.525869 |
| 1572 | 0.00285 | 0.027158 | 0.513429 |
| 1573 | 0.002801 | 0.027285 | 0.801479 |
| 1574 | 0.00283 | 0.026694 | 0.625502 |
| 1575 | 0.002879 | 0.026776 | 0.59054 |
| 1576 | 0.002797 | 0.026677 | 0.838621 |
| 1577 | 0.003048 | 0.027552 | 0.622979 |
| 1578 | 0.002889 | 0.027386 | 0.598139 |
| 1579 | 0.002955 | 0.027358 | 0.491017 |
| 1580 | 0.002857 | 0.026945 | 0.435188 |
| 1581 | 0.002782 | 0.02785 | 0.477584 |
| 1582 | 0.00277 | 0.026769 | 0.585209 |
| 1583 | 0.002882 | 0.027091 | 0.705566 |
| 1584 | 0.002823 | 0.026051 | 0.588066 |
| 1585 | 0.003011 | 0.02627 | 0.645734 |
| 1586 | 0.002783 | 0.027931 | 0.509146 |
| 1587 | 0.002834 | 0.027194 | 0.594226 |
| 1588 | 0.002788 | 0.027098 | 0.522658 |
| 1589 | 0.002909 | 0.027134 | 0.76665 |
| 1590 | 0.002772 | 0.026947 | 0.590476 |
| 1592 | 0.002841 | 0.026809 | 0.671333 |
| 1593 | 0.002895 | 0.026378 | 0.470406 |
| 1594 | 0.00308 | 0.026761 | 0.571625 |
| 1595 | 0.00292 | 0.026874 | 0.592748 |
| 1596 | 0.002734 | 0.02666 | 0.615701 |
| 1597 | 0.00288 | 0.026918 | 0.694078 |
| 1598 | 0.002796 | 0.028141 | 0.728341 |
| 1599 | 0.003183 | 0.027135 | 0.584021 |
| 1600 | 0.003303 | 0.02835 | 0.463076 |
| 1601 | 0.003179 | 0.02638 | 0.376498 |
| 1602 | 0.004066 | 0.027302 | 0.787392 |
| 1603 | 0.003293 | 0.027454 | 0.565816 |
| 1604 | 0.002846 | 0.02701 | 0.748421 |
| 1605 | 0.005887 | 0.032685 | 0.622649 |
| 1606 | 0.002889 | 0.02704 | 0.56754 |
| 1607 | 0.002831 | 0.026806 | 0.743947 |
| 1608 | 0.002965 | 0.027359 | 0.760013 |
| 1609 | 0.00396 | 0.027561 | 0.674454 |
| 1611 | 0.008586 | 0.075287 | 0.257982 |
| 1612 | 0.009539 | 0.076797 | 0.197109 |
| 1613 | 0.008018 | 0.072467 | 0.231769 |
| 1614 | 0.012023 | 0.075871 | 0.172221 |
| 1615 | 0.008328 | 0.071072 | 0.220705 |
| 1616 | 0.012023 | 0.075453 | 0.25357 |
| 1617 | 0.012384 | 0.075749 | 0.189438 |
| 1618 | 0.009907 | 0.074134 | 0.228244 |
| 1621 | 0.007789 | 0.070227 | 0.245667 |
| 1622 | 0.008908 | 0.072407 | 0.245921 |
| 1623 | 0.011175 | 0.077951 | 0.188074 |
| 1624 | 0.008036 | 0.069872 | 0.246323 |
| 1625 | 0.011073 | 0.074178 | 0.233123 |
| 1626 | 0.012397 | 0.076047 | 0.205037 |
| 1627 | 0.01196 | 0.082003 | 0.236073 |
| 1628 | 0.008087 | 0.073661 | 0.162851 |
| 1629 | 0.009228 | 0.071361 | 0.1983 |
| 1630 | 0.00787 | 0.068021 | 0.252184 |
| 1632 | 0.008463 | 0.070379 | 0.220109 |
| 1633 | 0.008069 | 0.070751 | 0.186138 |
| 1634 | 0.010343 | 0.072986 | 0.210934 |
| 1635 | 0.009638 | 0.077485 | 0.263883 |
| 1636 | 0.008719 | 0.074615 | 0.259029 |
| 1637 | 0.008512 | 0.073437 | 0.167086 |
| 1638 | 0.007929 | 0.072165 | 0.163977 |
| 1639 | 0.007868 | 0.07025 | 0.216269 |
| 1640 | 0.010217 | 0.075129 | 0.212716 |
| 1641 | 0.009846 | 0.072375 | 0.229234 |
| 1642 | 0.008044 | 0.072899 | 0.146821 |
| 1643 | 0.007903 | 0.073916 | 0.202451 |
| 1644 | 0.007997 | 0.072045 | 0.2269 |
| 1645 | 0.008005 | 0.071968 | 0.225724 |
| 1646 | 0.007868 | 0.072947 | 0.218694 |
| 1647 | 0.007874 | 0.07009 | 0.204347 |
| 1648 | 0.008126 | 0.072838 | 0.231684 |
| 1649 | 0.007985 | 0.07098 | 0.217341 |
| 1650 | 0.00805 | 0.073491 | 0.157452 |
| 1651 | 0.008583 | 0.074894 | 0.221222 |
| 1652 | 0.00782 | 0.073647 | 0.23366 |
| 1653 | 0.007727 | 0.072533 | 0.274822 |
| 1654 | 0.007898 | 0.072049 | 0.19207 |
| 1655 | 0.007809 | 0.072421 | 0.239521 |
| 1656 | 0.00814 | 0.070844 | 0.233632 |
| 1657 | 0.008044 | 0.069952 | 0.173161 |
| 1658 | 0.008147 | 0.070865 | 0.114916 |
| 1659 | 0.008054 | 0.070011 | 0.234503 |
| 1660 | 0.008051 | 0.073257 | 0.209313 |
| 1661 | 0.008006 | 0.073666 | 0.220585 |
| 1662 | 0.007882 | 0.072722 | 0.194041 |
| 1663 | 0.0079 | 0.07183 | 0.209789 |
| 1664 | 0.008074 | 0.069676 | 0.185531 |
| 1665 | 0.00878 | 0.071074 | 0.21086 |
| 1666 | 0.007895 | 0.071838 | 0.244376 |
| 1668 | 0.008053 | 0.072861 | 0.253493 |
| 1669 | 0.007873 | 0.073223 | 0.198109 |
| 1670 | 0.007816 | 0.068945 | 0.206857 |
| 1671 | 0.007989 | 0.071814 | 0.303432 |
| 1672 | 0.008207 | 0.073024 | 0.222844 |
| 1673 | 0.008259 | 0.0722 | 0.255081 |
| 1674 | 0.008145 | 0.071765 | 0.197578 |
| 1675 | 0.008243 | 0.07316 | 0.202955 |
| 1676 | 0.008121 | 0.07247 | 0.197388 |
| 1677 | 0.008023 | 0.071901 | 0.24222 |
| 1678 | 0.008907 | 0.074766 | 0.187839 |
| 1679 | 0.007883 | 0.072372 | 0.198258 |
| 1680 | 0.008303 | 0.07202 | 0.20641 |
| 1681 | 0.008051 | 0.068996 | 0.172375 |
| 1682 | 0.008184 | 0.073282 | 0.285672 |
| 1684 | 0.008361 | 0.072729 | 0.170928 |
| 1685 | 0.008716 | 0.074393 | 0.222029 |
| 1686 | 0.008059 | 0.071129 | 0.196348 |
| 1687 | 0.007953 | 0.070337 | 0.21236 |
| 1688 | 0.008643 | 0.070881 | 0.227238 |
| 1689 | 0.007905 | 0.069917 | 0.19241 |
| 1690 | 0.008127 | 0.072187 | 0.219756 |
| 1691 | 0.007958 | 0.073297 | 0.230226 |
| 1692 | 0.00806 | 0.069949 | 0.25326 |
| 1693 | 0.008331 | 0.073454 | 0.232442 |
| 1694 | 0.00995 | 0.07389 | 0.245006 |
| 1695 | 0.00813 | 0.070796 | 0.208166 |
| 1696 | 0.00828 | 0.070973 | 0.196401 |
| 1697 | 0.008427 | 0.070372 | 0.211389 |
| 1698 | 0.010244 | 0.071351 | 0.23418 |
| 1699 | 0.008127 | 0.071392 | 0.186818 |
| 1700 | 0.011627 | 0.078038 | 0.216352 |
| 1701 | 0.008158 | 0.071674 | 0.235836 |
| 1702 | 0.008405 | 0.072728 | 0.214028 |
| 1703 | 0.00931 | 0.072866 | 0.24933 |
| 1704 | 0.00834 | 0.06923 | 0.178878 |
| 1705 | 0.00998 | 0.07348 | 0.262106 |
| 1707 | 0.004095 | 0.007786 | 0.905391 |
| 1708 | 0.00319 | 0.007636 | 0.918093 |
| 1710 | 0.003179 | 0.007381 | 0.810737 |
| 1711 | 0.003206 | 0.007316 | 0.948158 |
| 1712 | 0.003223 | 0.007633 | 0.992454 |
| 1713 | 0.003147 | 0.007825 | 1.018484 |
| 1714 | 0.003156 | 0.007799 | 1.011062 |
| 1715 | 0.003144 | 0.007846 | 1.03755 |
| 1716 | 0.003126 | 0.007534 | 0.995065 |
| 1717 | 0.003303 | 0.008123 | 0.95218 |
| 1718 | 0.003174 | 0.007598 | 0.739364 |
| 1720 | 0.003107 | 0.007531 | 0.963791 |
| 1721 | 0.003184 | 0.007393 | 0.642433 |
| 1722 | 0.003234 | 0.007679 | 1.087014 |
| 1723 | 0.003183 | 0.007625 | 0.746413 |
| 1725 | 0.003166 | 0.00732 | 0.983384 |
| 1726 | 0.003192 | 0.007532 | 0.92262 |
| 1727 | 0.003216 | 0.007484 | 0.718343 |
| 1728 | 0.003213 | 0.00725 | 0.952505 |
| 1729 | 0.003225 | 0.007421 | 0.911589 |
| 1730 | 0.003281 | 0.007498 | 0.995307 |
| 1731 | 0.003053 | 0.007481 | 0.950875 |
| 1732 | 0.00316 | 0.007479 | 0.757397 |
| 1733 | 0.003214 | 0.007451 | 0.940672 |
| 1734 | 0.003219 | 0.007427 | 0.893661 |
| 1735 | 0.003254 | 0.007528 | 0.836399 |
| 1737 | 0.003227 | 0.007374 | 0.911326 |
| 1738 | 0.003214 | 0.007477 | 1.002511 |
| 1739 | 0.00327 | 0.008719 | 0.956423 |
| 1740 | 0.003147 | 0.007789 | 1.00538 |
| 1741 | 0.003279 | 0.007904 | 0.975752 |
| 1742 | 0.003162 | 0.007423 | 1.22881 |
| 1743 | 0.003139 | 0.007692 | 0.743436 |
| 1744 | 0.003205 | 0.007379 | 0.772479 |
| 1745 | 0.003182 | 0.007429 | 1.079506 |
| 1747 | 0.003253 | 0.0075 | 0.816336 |
| 1748 | 0.003362 | 0.008459 | 0.998276 |
| 1749 | 0.003015 | 0.007458 | 0.936332 |
| 1750 | 0.003212 | 0.008153 | 0.859119 |
| 1752 | 0.003259 | 0.007776 | 0.978627 |
| 1753 | 0.00325 | 0.007387 | 0.786866 |
| 1754 | 0.003162 | 0.006997 | 1.003224 |
| 1755 | 0.003259 | 0.007394 | 0.925965 |
| 1756 | 0.00318 | 0.007571 | 1.096225 |
| 1758 | 0.003337 | 0.007882 | 0.985142 |
| 1759 | 0.003418 | 0.008082 | 0.953122 |
| 1760 | 0.003232 | 0.007565 | 0.769634 |
| 1761 | 0.003209 | 0.007716 | 0.826567 |
| 1762 | 0.003197 | 0.007352 | 0.743692 |
| 1763 | 0.003236 | 0.007511 | 1.040475 |
| 1764 | 0.003251 | 0.007572 | 1.383275 |
| 1765 | 0.003257 | 0.013774 | 0.819945 |
| 1766 | 0.003138 | 0.007452 | 0.976752 |
| 1767 | 0.003206 | 0.007674 | 0.936511 |
| 1768 | 0.003234 | 0.008193 | 0.717088 |
| 1769 | 0.003178 | 0.007449 | 0.913192 |
| 1771 | 0.003187 | 0.007352 | 0.941054 |
| 1772 | 0.005576 | 0.019795 | 0.767377 |
| 1773 | 0.003294 | 0.012787 | 0.583382 |
| 1774 | 0.003183 | 0.007692 | 0.809862 |
| 1775 | 0.003131 | 0.007429 | 1.000089 |
| 1776 | 0.003174 | 0.007465 | 0.908376 |
| 1777 | 0.003238 | 0.00771 | 1.13952 |
| 1778 | 0.003232 | 0.007417 | 0.854898 |
| 1779 | 0.003218 | 0.007322 | 0.736095 |
| 1780 | 0.003511 | 0.008457 | 0.949085 |
| 1781 | 0.003302 | 0.009751 | 0.834468 |
| 1782 | 0.003093 | 0.007604 | 0.813662 |
| 1783 | 0.003061 | 0.007604 | 0.894994 |
| 1784 | 0.003161 | 0.007326 | 0.70474 |
| 1785 | 0.003225 | 0.007357 | 0.699541 |
| 1786 | 0.003164 | 0.007261 | 0.794668 |
| 1787 | 0.00315 | 0.007418 | 0.964931 |
| 1788 | 0.003283 | 0.007843 | 0.946281 |
| 1789 | 0.003291 | 0.007593 | 0.936091 |
| 1790 | 0.003761 | 0.00877 | 0.886762 |
| 1791 | 0.003112 | 0.007642 | 0.918008 |
| 1792 | 0.003268 | 0.007666 | 0.703354 |
| 1793 | 0.003133 | 0.007455 | 0.842638 |
| 1794 | 0.003159 | 0.007349 | 0.728775 |
| 1795 | 0.003246 | 0.007273 | 0.745148 |
| 1796 | 0.003613 | 0.007904 | 0.628593 |
| 1797 | 0.00427 | 0.008685 | 0.659605 |
| 1798 | 0.003091 | 0.007893 | 0.885414 |
| 1799 | 0.003119 | 0.007443 | 1.016389 |
| 1801 | 0.005041 | 0.009766 | 0.788892 |
| 1802 | 0.003799 | 0.009741 | 0.970487 |
| 1803 | 0.003191 | 0.007455 | 0.811591 |
| 1804 | 0.003256 | 0.007526 | 0.980185 |
| 1806 | 0.007832 | 0.015298 | 0.668837 |
| 1808 | 0.002099 | 0.00239 | 0.713927 |
| 1809 | 0.003792 | 0.004621 | 0.798598 |
| 1810 | 0.002017 | 0.002054 | 0.778629 |
| 1811 | 0.001935 | 0.002012 | 0.827105 |
| 1812 | 0.001955 | 0.002041 | 0.652207 |
| 1813 | 0.002017 | 0.002107 | 1.07398 |
| 1814 | 0.001992 | 0.00212 | 0.938161 |
| 1815 | 0.002057 | 0.002093 | 0.672235 |
| 1816 | 0.002067 | 0.002143 | 0.813551 |
| 1817 | 0.001993 | 0.00201 | 0.666663 |
| 1818 | 0.001943 | 0.002032 | 1.177111 |
| 1819 | 0.002001 | 0.002046 | 0.840791 |
| 1820 | 0.00202 | 0.002025 | 0.821089 |
| 1821 | 0.010528 | 0.014897 | 1.05278 |
| 1822 | 0.001978 | 0.002002 | 0.847594 |
| 1823 | 0.002033 | 0.002129 | 0.923411 |
| 1824 | 0.001995 | 0.002089 | 0.931098 |
| 1825 | 0.001951 | 0.002044 | 0.72614 |
| 1826 | 0.001901 | 0.002026 | 0.969977 |
| 1827 | 0.002017 | 0.002057 | 1.124311 |
| 1828 | 0.002003 | 0.002006 | 0.621247 |
| 1829 | 0.002024 | 0.002243 | 0.826881 |
| 1830 | 0.001924 | 0.001957 | 0.830188 |
| 1831 | 0.002058 | 0.002061 | 1.08971 |
| 1832 | 0.002021 | 0.002227 | 0.99019 |
| 1833 | 0.001961 | 0.002 | 1.043679 |
| 1834 | 0.001997 | 0.002049 | 1.079505 |
| 1835 | 0.002924 | 0.036425 | 0.9315 |
| 1836 | 0.002051 | 0.002049 | 0.764385 |
| 1837 | 0.001987 | 0.002013 | 0.939205 |
| 1838 | 0.001986 | 0.002074 | 0.945167 |
| 1839 | 0.00206 | 0.002081 | 0.757964 |
| 1840 | 0.001961 | 0.002069 | 0.963668 |
| 1841 | 0.001918 | 0.001952 | 0.824621 |
| 1842 | 0.001947 | 0.00206 | 0.828898 |
| 1844 | 0.002009 | 0.002099 | 0.812678 |
| 1845 | 0.001913 | 0.002007 | 0.924997 |
| 1846 | 0.002008 | 0.002012 | 1.067461 |
| 1847 | 0.002012 | 0.002021 | 0.910096 |
| 1848 | 0.002014 | 0.002092 | 1.070281 |
| 1849 | 0.00198 | 0.002053 | 1.115724 |
| 1850 | 0.00196 | 0.002017 | 0.780307 |
| 1851 | 0.001999 | 0.002057 | 0.88249 |
| 1852 | 0.001974 | 0.002022 | 0.630003 |
| 1853 | 0.00197 | 0.001976 | 0.893397 |
| 1854 | 0.002051 | 0.002022 | 0.767922 |
| 1855 | 0.002001 | 0.002064 | 1.128736 |
| 1856 | 0.002104 | 0.002101 | 1.08652 |
| 1857 | 0.001954 | 0.002061 | 0.814235 |
| 1858 | 0.001944 | 0.002018 | 0.855267 |
| 1859 | 0.001923 | 0.002007 | 1.245303 |
| 1860 | 0.001933 | 0.002022 | 0.820898 |
| 1861 | 0.001984 | 0.001993 | 0.92614 |
| 1862 | 0.002019 | 0.002032 | 1.0456 |
| 1863 | 0.002124 | 0.002046 | 0.904399 |
| 1864 | 0.002036 | 0.002068 | 0.957025 |
| 1865 | 0.001969 | 0.002058 | 0.878785 |
| 1866 | 0.001941 | 0.002003 | 0.88721 |
| 1867 | 0.001968 | 0.002036 | 0.765442 |
| 1868 | 0.002326 | 0.002549 | 0.633458 |
| 1869 | 0.002028 | 0.002049 | 0.630945 |
| 1870 | 0.002011 | 0.002052 | 1.044067 |
| 1871 | 0.002039 | 0.002032 | 0.858321 |
| 1872 | 0.002073 | 0.002103 | 0.894575 |
| 1874 | 0.00194 | 0.002077 | 0.741909 |
| 1876 | 0.002012 | 0.002203 | 0.77563 |
| 1877 | 0.002166 | 0.00293 | 0.909265 |
| 1878 | 0.002203 | 0.003175 | 0.764486 |
| 1879 | 0.002076 | 0.002159 | 0.870865 |
| 1880 | 0.002123 | 0.00211 | 0.974287 |
| 1882 | 0.001971 | 0.00206 | 1.194054 |
| 1883 | 0.001965 | 0.00198 | 0.850391 |
| 1884 | 0.001983 | 0.00208 | 0.739432 |
| 1885 | 0.004432 | 0.006831 | 0.921387 |
| 1886 | 0.001964 | 0.002047 | 0.905673 |
| 1887 | 0.002128 | 0.002131 | 0.970315 |
| 1888 | 0.00216 | 0.002141 | 0.900712 |
| 1889 | 0.001985 | 0.00209 | 0.904929 |
| 1890 | 0.002027 | 0.002135 | 0.942252 |
| 1891 | 0.001943 | 0.002032 | 1.031348 |
| 1892 | 0.001968 | 0.002051 | 0.673121 |
| 1894 | 0.002064 | 0.002078 | 1.215602 |
| 1895 | 0.002657 | 0.002895 | 0.952559 |
| 1897 | 0.004208 | 0.004197 | 0.877243 |
| 1898 | 0.001943 | 0.002098 | 0.720743 |
| 1899 | 0.001911 | 0.002064 | 0.771716 |
| 1900 | 0.001992 | 0.002012 | 1.042259 |
| 1902 | 0.002111 | 0.002087 | 0.877153 |
| 1903 | 0.002066 | 0.002106 | 1.055068 |
| 1904 | 0.003184 | 0.003144 | 1.09739 |
| 1909 | 0.002055 | 0.003948 | 0.847157 |
| 1912 | 0.00224 | 0.004186 | 0.742941 |
| 1914 | 0.002728 | 0.006378 | 1.015755 |
| 1915 | 0.002104 | 0.003971 | 1.11464 |
| 1916 | 0.002013 | 0.00378 | 0.838864 |
| 1917 | 0.002152 | 0.003877 | 0.908892 |
| 1919 | 0.002163 | 0.003718 | 0.800267 |
| 1921 | 0.002207 | 0.003959 | 0.605339 |
| 1922 | 0.002089 | 0.004028 | 0.664389 |
| 1923 | 0.002035 | 0.003926 | 0.807267 |
| 1924 | 0.002045 | 0.003803 | 0.75616 |
| 1925 | 0.002024 | 0.003787 | 0.78207 |
| 1926 | 0.002081 | 0.004003 | 0.919381 |
| 1927 | 0.002087 | 0.0039 | 0.87094 |
| 1928 | 0.002169 | 0.003842 | 0.85592 |
| 1929 | 0.002196 | 0.003892 | 1.04674 |
| 1930 | 0.002059 | 0.004072 | 0.758699 |
| 1931 | 0.002018 | 0.003893 | 0.935624 |
| 1932 | 0.00212 | 0.003782 | 0.741426 |
| 1935 | 0.002149 | 0.003827 | 0.781431 |
| 1936 | 0.002114 | 0.003987 | 0.983047 |
| 1939 | 0.002105 | 0.003927 | 1.012539 |
| 1940 | 0.002102 | 0.003894 | 0.972949 |
| 1943 | 0.002208 | 0.003969 | 0.819485 |
| 1944 | 0.002129 | 0.003932 | 0.90291 |
| 1949 | 0.002939 | 0.028633 | 0.702177 |
| 1951 | 0.00213 | 0.003953 | 0.756432 |
| 1954 | 0.002084 | 0.003994 | 0.716999 |
| 1955 | 0.002082 | 0.003928 | 0.924112 |
| 1956 | 0.002151 | 0.004369 | 0.83182 |
| 1959 | 0.002066 | 0.003906 | 0.943132 |
| 1960 | 0.002082 | 0.003897 | 0.845987 |
| 1962 | 0.002068 | 0.004065 | 0.677381 |
| 1964 | 0.002309 | 0.005092 | 0.691221 |
| 1965 | 0.002145 | 0.004599 | 1.02379 |
| 1966 | 0.002096 | 0.003928 | 0.821807 |
| 1967 | 0.002135 | 0.004049 | 0.784332 |
| 1969 | 0.00258 | 0.004963 | 0.869906 |
| 1970 | 0.002402 | 0.005499 | 0.802557 |
| 1971 | 0.003555 | 0.00803 | 0.915366 |
| 1972 | 0.002123 | 0.004341 | 1.002436 |
| 1973 | 0.002093 | 0.004195 | 0.739287 |
| 1974 | 0.002264 | 0.004213 | 1.090771 |
| 1975 | 0.00213 | 0.004172 | 0.890328 |
| 1976 | 0.002854 | 0.00629 | 1.03609 |
| 1977 | 0.0022 | 0.003857 | 0.750837 |
| 1978 | 0.002184 | 0.006424 | 0.789674 |
| 1979 | 0.00218 | 0.004072 | 1.041609 |
| 1980 | 0.002089 | 0.003918 | 0.742203 |
| 1981 | 0.002022 | 0.00393 | 0.802623 |
| 1983 | 0.00211 | 0.00387 | 0.823111 |
| 1985 | 0.00238 | 0.005063 | 0.920921 |
| 1987 | 0.002096 | 0.003989 | 0.820149 |
| 1988 | 0.002196 | 0.004207 | 0.733845 |
| 1993 | 0.002629 | 0.004548 | 0.923992 |
| 1994 | 0.003546 | 0.013836 | 0.780026 |
| 1996 | 0.00246 | 0.004831 | 0.793669 |
| 1998 | 0.005897 | 0.010175 | 0.864774 |
| 1999 | 0.002493 | 0.004889 | 0.91103 |
| 2001 | 0.003035 | 0.009213 | 0.760895 |
| 2004 | 0.009008 | 0.051959 | 0.315777 |
| 2006 | 0.007683 | 0.047495 | 0.479879 |
| 2007 | 0.00815 | 0.046714 | 0.350549 |
| 2009 | 0.007773 | 0.047424 | 0.356192 |
| 2010 | 0.008014 | 0.048727 | 0.376383 |
| 2011 | 0.007678 | 0.050682 | 0.388038 |
| 2012 | 0.007658 | 0.048585 | 0.40471 |
| 2013 | 0.00776 | 0.046273 | 0.269896 |
| 2014 | 0.007967 | 0.048251 | 0.353403 |
| 2015 | 0.008137 | 0.046658 | 0.338498 |
| 2016 | 0.007733 | 0.04596 | 0.356733 |
| 2017 | 0.007571 | 0.045682 | 0.396185 |
| 2018 | 0.007836 | 0.047143 | 0.396857 |
| 2019 | 0.008556 | 0.049704 | 0.356688 |
| 2020 | 0.007647 | 0.047487 | 0.406455 |
| 2021 | 0.007659 | 0.046888 | 0.36344 |
| 2022 | 0.007575 | 0.046464 | 0.411014 |
| 2023 | 0.008 | 0.046656 | 0.392491 |
| 2024 | 0.007671 | 0.046704 | 0.343154 |
| 2026 | 0.008452 | 0.049376 | 0.408859 |
| 2027 | 0.007698 | 0.046912 | 0.328525 |
| 2028 | 0.007683 | 0.046616 | 0.339399 |
| 2029 | 0.007666 | 0.046757 | 0.297973 |
| 2030 | 0.007675 | 0.046508 | 0.435685 |
| 2031 | 0.008134 | 0.04519 | 0.411958 |
| 2032 | 0.007675 | 0.045703 | 0.307964 |
| 2033 | 0.007603 | 0.046911 | 0.368773 |
| 2034 | 0.007487 | 0.046125 | 0.42095 |
| 2035 | 0.007824 | 0.048172 | 0.297846 |
| 2036 | 0.007336 | 0.048153 | 0.42074 |
| 2037 | 0.008092 | 0.047712 | 0.309579 |
| 2038 | 0.007771 | 0.046713 | 0.372379 |
| 2039 | 0.008147 | 0.047807 | 0.46323 |
| 2041 | 0.007752 | 0.046575 | 0.519016 |
| 2042 | 0.007808 | 0.047418 | 0.427933 |
| 2043 | 0.007841 | 0.048971 | 0.487233 |
| 2044 | 0.007751 | 0.04791 | 0.502666 |
| 2045 | 0.007997 | 0.04765 | 0.425789 |
| 2046 | 0.007681 | 0.047159 | 0.387429 |
| 2047 | 0.008297 | 0.04738 | 0.434821 |
| 2048 | 0.00876 | 0.04945 | 0.444633 |
| 2049 | 0.007392 | 0.046997 | 0.359452 |
| 2050 | 0.008459 | 0.051214 | 0.257893 |
| 2051 | 0.007739 | 0.048823 | 0.379033 |
| 2052 | 0.007651 | 0.047708 | 0.301475 |
| 2055 | 0.008096 | 0.046365 | 0.286331 |
| 2056 | 0.007633 | 0.045501 | 0.321644 |
| 2057 | 0.007723 | 0.04781 | 0.286926 |
| 2058 | 0.007596 | 0.047326 | 0.35697 |
| 2059 | 0.007819 | 0.048191 | 0.328469 |
| 2060 | 0.007522 | 0.049484 | 0.346836 |
| 2062 | 0.007728 | 0.04874 | 0.437359 |
| 2064 | 0.007614 | 0.047857 | 0.346887 |
| 2065 | 0.007718 | 0.04734 | 0.320753 |
| 2066 | 0.007861 | 0.048273 | 0.33439 |
| 2067 | 0.007787 | 0.048374 | 0.360579 |
| 2068 | 0.007899 | 0.047923 | 0.438593 |
| 2069 | 0.007997 | 0.047566 | 0.294398 |
| 2070 | 0.007618 | 0.047015 | 0.368413 |
| 2071 | 0.008211 | 0.047051 | 0.398477 |
| 2072 | 0.007816 | 0.045952 | 0.291645 |
| 2073 | 0.00744 | 0.047558 | 0.416445 |
| 2074 | 0.007748 | 0.047678 | 0.31422 |
| 2075 | 0.007821 | 0.049202 | 0.410995 |
| 2076 | 0.007579 | 0.048504 | 0.35862 |
| 2077 | 0.007606 | 0.048341 | 0.336701 |
| 2078 | 0.007833 | 0.047621 | 0.430521 |
| 2079 | 0.008881 | 0.04708 | 0.367176 |
| 2080 | 0.007632 | 0.046431 | 0.401737 |
| 2081 | 0.007585 | 0.047886 | 0.328978 |
| 2082 | 0.00782 | 0.048005 | 0.42346 |
| 2084 | 0.007872 | 0.048572 | 0.374299 |
| 2085 | 0.007508 | 0.048884 | 0.363426 |
| 2086 | 0.007641 | 0.04778 | 0.455748 |
| 2087 | 0.007576 | 0.046705 | 0.394438 |
| 2089 | 0.007588 | 0.050455 | 0.512216 |
| 2091 | 0.007914 | 0.049272 | 0.348157 |
| 2092 | 0.008757 | 0.085812 | 0.387008 |
| 2093 | 0.007033 | 0.04869 | 0.543809 |
| 2094 | 0.007412 | 0.048193 | 0.462981 |
| 2095 | 0.007785 | 0.048394 | 0.378497 |
| 2096 | 0.00808 | 0.04793 | 0.422319 |
| 2097 | 0.007585 | 0.052485 | 0.339995 |
| 2098 | 0.007722 | 0.077927 | 0.360082 |
| 2101 | 0.003196 | 0.02074 | 0.711343 |
| 2102 | 0.003171 | 0.019613 | 0.932187 |
| 2103 | 0.003015 | 0.019345 | 0.66012 |
| 2105 | 0.003183 | 0.019557 | 0.922989 |
| 2106 | 0.00304 | 0.019249 | 0.610898 |
| 2107 | 0.003086 | 0.020481 | 0.726218 |
| 2108 | 0.003083 | 0.01979 | 0.699435 |
| 2109 | 0.003083 | 0.019528 | 0.595743 |
| 2110 | 0.003043 | 0.01985 | 0.811218 |
| 2111 | 0.003105 | 0.019319 | 0.486517 |
| 2112 | 0.003041 | 0.018937 | 0.51889 |
| 2113 | 0.00304 | 0.019069 | 0.468082 |
| 2114 | 0.003108 | 0.018998 | 0.482694 |
| 2115 | 0.00313 | 0.019507 | 0.554585 |
| 2116 | 0.003166 | 0.020002 | 0.7362 |
| 2118 | 0.003188 | 0.01935 | 0.596176 |
| 2119 | 0.003134 | 0.019993 | 0.637627 |
| 2120 | 0.003081 | 0.019437 | 0.678214 |
| 2121 | 0.003146 | 0.019336 | 0.60839 |
| 2122 | 0.003065 | 0.019235 | 0.499429 |
| 2124 | 0.003203 | 0.019847 | 0.557828 |
| 2125 | 0.003239 | 0.02001 | 0.552858 |
| 2126 | 0.003195 | 0.019259 | 0.656 |
| 2127 | 0.003154 | 0.019186 | 0.483088 |
| 2129 | 0.003119 | 0.019051 | 0.620213 |
| 2130 | 0.003123 | 0.019615 | 0.424395 |
| 2134 | 0.003217 | 0.019331 | 0.536501 |
| 2135 | 0.003065 | 0.019226 | 0.52152 |
| 2137 | 0.003178 | 0.018652 | 0.698231 |
| 2138 | 0.003168 | 0.019197 | 0.587975 |
| 2140 | 0.003216 | 0.019528 | 0.625389 |
| 2141 | 0.00316 | 0.019709 | 0.682383 |
| 2142 | 0.003241 | 0.019746 | 0.516585 |
| 2143 | 0.00322 | 0.019625 | 0.613552 |
| 2144 | 0.003175 | 0.018746 | 0.700146 |
| 2145 | 0.003151 | 0.019352 | 0.390091 |
| 2146 | 0.003246 | 0.019676 | 0.504855 |
| 2147 | 0.00315 | 0.018806 | 0.691577 |
| 2148 | 0.00327 | 0.020065 | 0.647184 |
| 2149 | 0.003318 | 0.019742 | 0.593045 |
| 2150 | 0.003295 | 0.019112 | 0.545147 |
| 2151 | 0.003222 | 0.019324 | 0.623487 |
| 2153 | 0.003163 | 0.019031 | 0.622529 |
| 2154 | 0.003097 | 0.019212 | 0.412396 |
| 2155 | 0.003183 | 0.018864 | 0.628595 |
| 2157 | 0.003208 | 0.019445 | 0.512846 |
| 2158 | 0.00328 | 0.020175 | 0.608198 |
| 2159 | 0.00605 | 0.027206 | 0.523008 |
| 2160 | 0.003294 | 0.019204 | 0.60676 |
| 2161 | 0.003175 | 0.019186 | 0.58493 |
| 2162 | 0.003073 | 0.018774 | 0.676172 |
| 2163 | 0.003213 | 0.026017 | 0.717037 |
| 2164 | 0.003146 | 0.019228 | 0.629069 |
| 2165 | 0.003177 | 0.019712 | 0.651398 |
| 2166 | 0.015226 | 0.067595 | 0.77104 |
| 2168 | 0.003259 | 0.019199 | 0.709717 |
| 2169 | 0.003096 | 0.019088 | 0.552215 |
| 2170 | 0.003193 | 0.019073 | 0.843088 |
| 2171 | 0.003203 | 0.018715 | 0.663203 |
| 2173 | 0.003078 | 0.018872 | 0.596725 |
| 2174 | 0.003215 | 0.019295 | 0.586757 |
| 2175 | 0.003355 | 0.020379 | 0.591717 |
| 2176 | 0.00331 | 0.020075 | 0.621581 |
| 2178 | 0.003288 | 0.019762 | 0.563754 |
| 2179 | 0.023311 | 0.108889 | 0.634632 |
| 2180 | 0.003154 | 0.018821 | 0.582331 |
| 2181 | 0.003174 | 0.019114 | 0.467664 |
| 2182 | 0.003295 | 0.019446 | 0.780908 |
| 2183 | 0.003253 | 0.01977 | 0.567795 |
| 2184 | 0.003242 | 0.020002 | 0.791142 |
| 2185 | 0.003168 | 0.019575 | 0.775637 |
| 2186 | 0.003096 | 0.018948 | 0.568767 |
| 2187 | 0.003259 | 0.019195 | 0.523207 |
| 2188 | 0.003153 | 0.019022 | 0.565014 |
| 2189 | 0.003154 | 0.019989 | 0.535538 |
| 2190 | 0.003524 | 0.019646 | 0.64781 |
| 2191 | 0.004391 | 0.020707 | 0.675903 |
| 2192 | 0.00296 | 0.020679 | 0.695385 |
| 2193 | 0.00312 | 0.019868 | 0.56865 |
| 2194 | 0.003186 | 0.020148 | 0.67523 |
| 2195 | 0.003131 | 0.019043 | 0.529032 |
| 2196 | 0.003166 | 0.020125 | 0.702299 |
| 2197 | 0.003391 | 0.019802 | 0.716997 |
| 2198 | 0.007135 | 0.025543 | 0.647545 |
| 2200 | 0.006172 | 0.047972 | 0.218144 |
| 2201 | 0.006242 | 0.04465 | 0.132477 |
| 2202 | 0.00613 | 0.045688 | 0.181752 |
| 2203 | 0.006068 | 0.046964 | 0.152828 |
| 2204 | 0.005921 | 0.046084 | 0.14141 |
| 2205 | 0.006157 | 0.046238 | 0.191263 |
| 2206 | 0.006136 | 0.046016 | 0.190921 |
| 2207 | 0.005964 | 0.047186 | 0.153246 |
| 2208 | 0.006177 | 0.047117 | 0.155879 |
| 2210 | 0.006352 | 0.043635 | 0.146858 |
| 2211 | 0.006108 | 0.044772 | 0.155641 |
| 2212 | 0.006024 | 0.045543 | 0.142517 |
| 2213 | 0.005939 | 0.046344 | 0.143164 |
| 2214 | 0.006222 | 0.04614 | 0.192484 |
| 2215 | 0.006083 | 0.047678 | 0.16743 |
| 2216 | 0.006163 | 0.053998 | 0.13437 |
| 2217 | 0.006135 | 0.045467 | 0.137485 |
| 2218 | 0.006112 | 0.046402 | 0.156384 |
| 2219 | 0.006181 | 0.046612 | 0.162334 |
| 2220 | 0.006096 | 0.050543 | 0.162733 |
| 2221 | 0.006186 | 0.047334 | 0.152158 |
| 2222 | 0.006075 | 0.047502 | 0.194765 |
| 2223 | 0.006029 | 0.046467 | 0.137691 |
| 2224 | 0.006314 | 0.055065 | 0.20807 |
| 2226 | 0.006294 | 0.045913 | 0.209723 |
| 2227 | 0.006684 | 0.046979 | 0.190792 |
| 2228 | 0.006095 | 0.04607 | 0.165137 |
| 2229 | 0.006403 | 0.052747 | 0.16783 |
| 2231 | 0.006318 | 0.047325 | 0.120074 |
| 2232 | 0.006136 | 0.047645 | 0.154048 |
| 2233 | 0.008079 | 0.057783 | 0.168608 |
| 2234 | 0.006343 | 0.048289 | 0.130913 |
| 2238 | 0.006235 | 0.046307 | 0.168547 |
| 2239 | 0.006246 | 0.046488 | 0.140553 |
| 2241 | 0.006379 | 0.054148 | 0.24124 |
| 2242 | 0.006455 | 0.047961 | 0.131922 |
| 2243 | 0.006337 | 0.046456 | 0.186051 |
| 2244 | 0.006203 | 0.045602 | 0.125512 |
| 2245 | 0.006499 | 0.057369 | 0.154019 |
| 2246 | 0.006248 | 0.056398 | 0.149261 |
| 2247 | 0.006307 | 0.046397 | 0.228139 |
| 2248 | 0.006168 | 0.047874 | 0.112137 |
| 2249 | 0.006196 | 0.046805 | 0.155686 |
| 2250 | 0.00895 | 0.054401 | 0.183022 |
| 2251 | 0.00639 | 0.045554 | 0.169424 |
| 2252 | 0.006125 | 0.046755 | 0.150411 |
| 2253 | 0.00622 | 0.053633 | 0.191924 |
| 2254 | 0.006108 | 0.046631 | 0.13209 |
| 2255 | 0.00633 | 0.04723 | 0.135853 |
| 2256 | 0.006144 | 0.061456 | 0.112837 |
| 2257 | 0.006404 | 0.047664 | 0.179404 |
| 2258 | 0.00629 | 0.04559 | 0.115119 |
| 2259 | 0.006517 | 0.047495 | 0.139756 |
| 2260 | 0.006178 | 0.046241 | 0.166521 |
| 2261 | 0.006256 | 0.047309 | 0.21795 |
| 2262 | 0.006307 | 0.046961 | 0.155011 |
| 2263 | 0.006309 | 0.046877 | 0.215311 |
| 2264 | 0.00632 | 0.047891 | 0.153035 |
| 2265 | 0.006283 | 0.058641 | 0.211202 |
| 2266 | 0.006381 | 0.047328 | 0.134896 |
| 2267 | 0.006567 | 0.045783 | 0.135634 |
| 2269 | 0.006447 | 0.046908 | 0.133405 |
| 2270 | 0.006417 | 0.04824 | 0.139725 |
| 2271 | 0.00618 | 0.046553 | 0.166047 |
| 2272 | 0.006225 | 0.047393 | 0.160067 |
| 2273 | 0.006276 | 0.047685 | 0.170297 |
| 2274 | 0.00624 | 0.04688 | 0.198238 |
| 2275 | 0.006534 | 0.046315 | 0.157348 |
| 2276 | 0.007069 | 0.047997 | 0.152782 |
| 2277 | 0.009026 | 0.05061 | 0.196609 |
| 2278 | 0.014832 | 0.067865 | 0.14616 |
| 2279 | 0.006428 | 0.046196 | 0.131052 |
| 2280 | 0.006224 | 0.046989 | 0.145311 |
| 2281 | 0.006154 | 0.047328 | 0.14968 |
| 2282 | 0.006248 | 0.046031 | 0.150055 |
| 2283 | 0.006174 | 0.047343 | 0.163964 |
| 2284 | 0.008235 | 0.4302 | 0.20482 |
| 2285 | 1.795726 | 2.705619 | 0.273225 |
| 2286 | 0.008775 | 0.050342 | 0.1587 |
| 2287 | 0.00631 | 0.047599 | 0.134257 |
| 2288 | 0.006544 | 0.046959 | 0.161388 |
| 2289 | 0.008183 | 0.050593 | 0.141202 |
| 2290 | 0.006064 | 0.048815 | 0.175503 |
| 2291 | 0.00618 | 0.046271 | 0.152712 |
| 2292 | 0.007016 | 0.048265 | 0.181027 |
| 2293 | 0.008176 | 0.049316 | 0.164933 |
| 2294 | 0.006486 | 0.048746 | 0.152462 |
| 2295 | 0.006359 | 0.047944 | 0.131901 |
| 2296 | 0.00722 | 0.04902 | 0.134938 |
| 2299 | 0.001841 | 0.021836 | 0.688111 |
| 2300 | 0.086641 | 0.166328 | 0.690494 |
| 2301 | 0.001849 | 0.020911 | 0.564046 |
| 2302 | 0.001837 | 0.020036 | 0.674931 |
| 2303 | 0.001843 | 0.020641 | 0.808588 |
| 2304 | 0.001836 | 0.020295 | 0.58194 |
| 2305 | 0.001822 | 0.020215 | 0.654307 |
| 2306 | 0.002438 | 0.022581 | 0.736907 |
| 2307 | 0.00178 | 0.021066 | 0.620358 |
| 2308 | 0.001832 | 0.020095 | 0.668554 |
| 2309 | 0.00178 | 0.019898 | 0.763666 |
| 2310 | 0.003472 | 0.020626 | 0.667713 |
| 2311 | 0.001796 | 0.019725 | 0.588065 |
| 2312 | 0.001799 | 0.020161 | 0.680887 |
| 2313 | 0.001785 | 0.020109 | 0.751756 |
| 2314 | 0.001785 | 0.020767 | 0.734117 |
| 2315 | 0.001731 | 0.021027 | 0.575685 |
| 2316 | 0.001777 | 0.020545 | 0.621465 |
| 2317 | 0.001726 | 0.020462 | 0.635235 |
| 2319 | 0.001783 | 0.019558 | 0.623992 |
| 2320 | 0.001783 | 0.019848 | 0.456169 |
| 2321 | 0.001819 | 0.019947 | 0.557319 |
| 2322 | 0.001816 | 0.020314 | 0.849308 |
| 2323 | 0.001812 | 0.021185 | 0.5437 |
| 2324 | 0.002117 | 0.021167 | 0.623834 |
| 2325 | 0.001774 | 0.020086 | 0.705615 |
| 2326 | 0.001762 | 0.020397 | 0.609166 |
| 2327 | 0.001838 | 0.019555 | 0.516895 |
| 2328 | 0.001819 | 0.019407 | 0.566088 |
| 2329 | 0.001846 | 0.020255 | 0.675583 |
| 2330 | 0.001822 | 0.020372 | 0.658319 |
| 2331 | 0.00183 | 0.020907 | 0.712729 |
| 2332 | 0.001716 | 0.020645 | 0.633101 |
| 2333 | 0.001761 | 0.020053 | 0.496843 |
| 2334 | 0.001795 | 0.020116 | 0.470328 |
| 2335 | 0.001973 | 0.019994 | 0.69908 |
| 2336 | 0.002355 | 0.021316 | 0.639826 |
| 2337 | 0.002071 | 0.019995 | 0.717695 |
| 2338 | 0.003361 | 0.022952 | 0.608106 |
| 2339 | 0.002512 | 0.022295 | 0.934816 |
| 2340 | 0.001872 | 0.02124 | 0.653365 |
| 2341 | 0.001758 | 0.020188 | 0.628362 |
| 2342 | 0.00179 | 0.020031 | 0.430364 |
| 2343 | 0.00225 | 0.021727 | 0.620708 |
| 2344 | 0.487092 | 1.242389 | 0.705218 |
| 2346 | 0.62511 | 0.991799 | 0.755326 |
| 2347 | 0.007601 | 0.031311 | 0.516649 |
| 2348 | 0.003801 | 0.024391 | 0.44802 |
| 2349 | 0.001763 | 0.020418 | 0.710152 |
| 2352 | 0.001967 | 0.020354 | 0.674644 |
| 2353 | 0.002343 | 0.020885 | 0.451139 |
| 2354 | 0.005892 | 0.03064 | 0.7194 |
| 2355 | 0.002628 | 0.021243 | 0.487594 |
| 2356 | 0.002016 | 0.021037 | 0.615679 |
| 2357 | 0.002143 | 0.021701 | 0.386956 |
| 2358 | 0.00212 | 0.021198 | 0.829166 |
| 2359 | 0.001791 | 0.020172 | 0.544619 |
| 2360 | 0.001856 | 0.020163 | 0.486583 |
| 2361 | 0.001901 | 0.019958 | 0.530139 |
| 2362 | 0.001879 | 0.020308 | 0.653006 |
| 2363 | 0.001922 | 0.020067 | 0.590144 |
| 2364 | 0.001837 | 0.02092 | 0.592571 |
| 2365 | 0.001792 | 0.020929 | 0.551517 |
| 2366 | 0.001791 | 0.020276 | 0.562391 |
| 2367 | 0.001762 | 0.020237 | 0.490932 |
| 2368 | 0.001774 | 0.019958 | 0.581639 |
| 2369 | 0.002441 | 0.023886 | 0.442913 |
| 2370 | 0.001851 | 0.019744 | 0.597586 |
| 2371 | 0.001833 | 0.019874 | 0.780994 |
| 2372 | 0.001836 | 0.020828 | 0.624654 |
| 2373 | 0.002203 | 0.0221 | 0.648313 |
| 2374 | 0.001781 | 0.02029 | 0.477161 |
| 2375 | 0.001758 | 0.019773 | 0.487119 |
| 2376 | 0.001766 | 0.019771 | 0.526721 |
| 2377 | 0.001848 | 0.019724 | 0.617253 |
| 2379 | 0.001845 | 0.020022 | 0.490031 |
| 2380 | 0.001881 | 0.020903 | 0.584369 |
| 2381 | 0.329765 | 0.386006 | 0.504277 |
| 2382 | 0.002171 | 0.020794 | 0.601362 |
| 2383 | 0.001822 | 0.020056 | 0.529306 |
| 2384 | 0.001781 | 0.019899 | 0.518998 |
| 2385 | 0.002162 | 0.020271 | 0.525008 |
| 2386 | 0.001834 | 0.019886 | 0.548855 |
| 2387 | 0.002131 | 0.020496 | 0.494099 |
| 2388 | 0.002937 | 0.022063 | 0.622276 |
| 2390 | 0.001843 | 0.021049 | 0.592485 |
| 2392 | 0.001773 | 0.020597 | 0.495091 |
| 2394 | 0.001773 | 0.020237 | 0.601764 |
| 2395 | 0.001806 | 0.020086 | 0.558798 |
| 2396 | 0.001807 | 0.02021 | 0.456341 |
| 2397 | 0.002983 | 0.022137 | 0.664263 |
| 2399 | 0.002032 | 0.028561 | 0.419347 |
| 2400 | 0.001953 | 0.02732 | 0.539873 |
| 2401 | 0.001912 | 0.027274 | 0.638418 |
| 2402 | 0.001914 | 0.026898 | 0.523509 |
| 2403 | 0.001954 | 0.027389 | 0.678695 |
| 2404 | 0.001977 | 0.027124 | 0.765805 |
| 2405 | 0.00211 | 0.030541 | 0.701647 |
| 2406 | 0.00247 | 0.029078 | 0.813564 |
| 2407 | 0.002076 | 0.027414 | 0.698683 |
| 2408 | 0.001925 | 0.028973 | 0.656613 |
| 2409 | 0.002188 | 0.027465 | 0.541032 |
| 2410 | 0.001926 | 0.025909 | 0.545951 |
| 2411 | 0.00194 | 0.026781 | 0.754864 |
| 2412 | 0.00382 | 0.039591 | 0.762652 |
| 2413 | 0.002162 | 0.027084 | 0.685745 |
| 2414 | 0.002494 | 0.029168 | 0.594618 |
| 2415 | 0.002268 | 0.029022 | 0.768169 |
| 2416 | 0.001922 | 0.026555 | 0.470209 |
| 2417 | 0.002127 | 0.027122 | 0.636734 |
| 2418 | 0.001951 | 0.026994 | 0.650385 |
| 2419 | 0.001945 | 0.027143 | 0.883213 |
| 2420 | 0.002209 | 0.02794 | 0.572425 |
| 2421 | 0.003578 | 0.031521 | 0.65348 |
| 2422 | 0.4597 | 1.118984 | 0.742345 |
| 2423 | 0.002036 | 0.027481 | 0.594989 |
| 2424 | 0.001912 | 0.026795 | 0.566853 |
| 2425 | 0.002128 | 0.027336 | 0.616199 |
| 2426 | 0.004274 | 0.035029 | 0.701308 |
| 2427 | 0.002039 | 0.026637 | 0.688343 |
| 2428 | 0.002025 | 0.026834 | 0.482521 |
| 2430 | 0.002201 | 0.027234 | 0.454862 |
| 2431 | 0.002645 | 0.028863 | 0.606143 |
| 2432 | 0.002137 | 0.027883 | 0.73667 |
| 2433 | 0.001911 | 0.026777 | 0.764379 |
| 2434 | 0.002656 | 0.031144 | 0.654025 |
| 2435 | 0.357958 | 1.054187 | 0.789014 |
| 2436 | 0.002408 | 0.027834 | 0.652141 |
| 2437 | 0.002128 | 0.029482 | 0.589591 |
| 2438 | 0.002046 | 0.027328 | 0.6305 |
| 2439 | 0.002126 | 0.027527 | 0.702897 |
| 2441 | 0.001931 | 0.027353 | 0.554509 |
| 2442 | 0.00194 | 0.026835 | 0.748374 |
| 2443 | 0.00206 | 0.027504 | 0.580563 |
| 2444 | 0.002454 | 0.030028 | 0.562538 |
| 2445 | 0.002479 | 0.027979 | 0.691218 |
| 2446 | 0.002005 | 0.026464 | 0.592756 |
| 2447 | 0.00209 | 0.02736 | 0.67768 |
| 2448 | 0.00215 | 0.027489 | 0.746934 |
| 2449 | 0.001919 | 0.027314 | 0.63539 |
| 2450 | 0.001947 | 0.026788 | 0.971937 |
| 2451 | 0.002047 | 0.027081 | 0.714018 |
| 2452 | 0.00199 | 0.026765 | 0.687724 |
| 2453 | 0.002001 | 0.026884 | 0.675106 |
| 2454 | 0.002043 | 0.026814 | 0.578459 |
| 2455 | 0.002485 | 0.027898 | 0.62214 |
| 2456 | 0.003114 | 0.03194 | 0.536157 |
| 2457 | 0.002044 | 0.028064 | 0.672813 |
| 2458 | 0.015881 | 0.100316 | 0.627601 |
| 2460 | 0.00195 | 0.026811 | 0.61264 |
| 2461 | 0.001936 | 0.027321 | 0.614411 |
| 2462 | 0.001952 | 0.026879 | 0.570422 |
| 2463 | 0.001996 | 0.026846 | 0.724248 |
| 2464 | 0.003014 | 0.029551 | 0.681079 |
| 2465 | 0.851106 | 1.519622 | 0.556387 |
| 2466 | 0.001875 | 0.027585 | 0.573732 |
| 2467 | 0.001914 | 0.026865 | 0.584638 |
| 2468 | 0.001951 | 0.026667 | 0.76513 |
| 2469 | 0.001935 | 0.026646 | 0.483364 |
| 2470 | 0.001927 | 0.027128 | 0.708523 |
| 2471 | 0.002115 | 0.027369 | 0.645251 |
| 2472 | 0.002277 | 0.02739 | 0.83229 |
| 2473 | 0.003074 | 0.029112 | 0.868278 |
| 2474 | 0.001898 | 0.031517 | 0.628315 |
| 2475 | 0.001888 | 0.025737 | 0.488711 |
| 2476 | 0.001895 | 0.026321 | 0.539154 |
| 2477 | 0.001942 | 0.02957 | 0.540224 |
| 2478 | 0.001972 | 0.026698 | 0.560129 |
| 2479 | 0.002055 | 0.026361 | 0.588692 |
| 2480 | 0.002449 | 0.029257 | 0.564031 |
| 2481 | 0.002188 | 0.027339 | 0.617131 |
| 2482 | 0.001929 | 0.027532 | 0.647844 |
| 2483 | 0.001901 | 0.026611 | 0.505461 |
| 2484 | 0.001911 | 0.026331 | 0.632902 |
| 2485 | 0.001935 | 0.026733 | 0.781338 |
| 2486 | 0.00232 | 0.028127 | 0.762296 |
| 2487 | 0.002045 | 0.029716 | 0.555858 |
| 2488 | 0.002322 | 0.027239 | 0.655834 |
| 2489 | 0.003042 | 0.02839 | 0.619313 |
| 2490 | 0.001901 | 0.027794 | 0.675581 |
| 2491 | 0.001867 | 0.026896 | 0.63697 |
| 2492 | 0.001957 | 0.027113 | 0.720652 |
| 2493 | 0.00211 | 0.02692 | 0.928346 |
| 2494 | 0.001976 | 0.02681 | 0.505157 |
| 2496 | 0.005512 | 0.03457 | 0.661025 |
| 2498 | 0.001855 | 0.021094 | 1.26703 |
| 2499 | 0.001794 | 0.019382 | 1.205979 |
| 2500 | 0.001798 | 0.019209 | 1.194211 |
| 2501 | 0.001855 | 0.019647 | 1.175705 |
| 2502 | 0.001805 | 0.01951 | 1.05585 |
| 2503 | 0.001854 | 0.01969 | 0.740211 |
| 2504 | 0.001802 | 0.019108 | 1.169167 |
| 2505 | 0.001803 | 0.020364 | 1.044078 |
| 2507 | 0.001816 | 0.019238 | 0.826173 |
| 2508 | 0.0018 | 0.019457 | 0.747832 |
| 2509 | 0.001814 | 0.018725 | 0.764182 |
| 2510 | 0.001788 | 0.018705 | 0.961773 |
| 2511 | 0.001811 | 0.019187 | 1.002978 |
| 2512 | 0.00184 | 0.019337 | 0.951505 |
| 2513 | 0.001795 | 0.0198 | 0.784969 |
| 2514 | 0.001806 | 0.019423 | 1.155331 |
| 2515 | 0.001819 | 0.019277 | 0.899568 |
| 2516 | 0.001783 | 0.018727 | 0.906725 |
| 2517 | 0.001767 | 0.018491 | 1.156806 |
| 2518 | 0.001826 | 0.018843 | 0.984126 |
| 2519 | 0.001827 | 0.018971 | 1.106655 |
| 2520 | 0.001856 | 0.019129 | 0.981249 |
| 2521 | 0.001863 | 0.019361 | 0.815735 |
| 2522 | 0.001753 | 0.019788 | 0.683346 |
| 2523 | 0.00179 | 0.018958 | 0.763397 |
| 2524 | 0.001774 | 0.019189 | 0.99147 |
| 2525 | 0.001796 | 0.019005 | 1.173316 |
| 2526 | 0.00239 | 0.022053 | 0.703461 |
| 2527 | 0.001839 | 0.018912 | 0.926152 |
| 2528 | 0.002235 | 0.020166 | 0.849943 |
| 2529 | 0.001833 | 0.019542 | 1.169762 |
| 2531 | 0.001757 | 0.019516 | 0.804991 |
| 2532 | 0.001791 | 0.019332 | 0.97138 |
| 2533 | 0.00183 | 0.018744 | 0.932083 |
| 2534 | 0.001829 | 0.018966 | 0.603137 |
| 2535 | 0.001825 | 0.019067 | 0.775401 |
| 2536 | 0.001839 | 0.019239 | 1.005791 |
| 2537 | 0.001837 | 0.019027 | 0.742716 |
| 2538 | 0.00184 | 0.019119 | 1.025351 |
| 2539 | 0.001786 | 0.019252 | 1.038877 |
| 2540 | 0.001818 | 0.019031 | 1.121716 |
| 2541 | 0.001778 | 0.018762 | 0.803414 |
| 2542 | 0.00183 | 0.01897 | 0.935541 |
| 2543 | 0.001856 | 0.018641 | 0.779233 |
| 2544 | 0.001832 | 0.018997 | 0.936523 |
| 2545 | 0.001818 | 0.019351 | 0.785605 |
| 2546 | 0.001855 | 0.019618 | 1.078452 |
| 2547 | 0.001753 | 0.019425 | 0.952274 |
| 2548 | 0.001801 | 0.019016 | 0.883621 |
| 2549 | 0.001932 | 0.019884 | 0.963362 |
| 2550 | 0.001852 | 0.019493 | 0.756811 |
| 2551 | 0.001811 | 0.018994 | 0.735339 |
| 2552 | 0.001829 | 0.018641 | 0.751335 |
| 2553 | 0.001842 | 0.019264 | 0.734602 |
| 2555 | 0.001803 | 0.019524 | 0.791215 |
| 2556 | 0.001808 | 0.019326 | 1.234156 |
| 2557 | 0.001817 | 0.019034 | 0.844118 |
| 2559 | 0.0018 | 0.019361 | 0.832718 |
| 2560 | 0.001849 | 0.018958 | 1.108257 |
| 2561 | 0.001875 | 0.019191 | 0.924327 |
| 2562 | 0.00183 | 0.019757 | 0.913942 |
| 2563 | 0.001766 | 0.019449 | 1.039711 |
| 2564 | 0.001761 | 0.019642 | 0.975257 |
| 2565 | 0.001822 | 0.018907 | 0.875283 |
| 2566 | 0.001827 | 0.018953 | 0.804406 |
| 2567 | 0.00182 | 0.01881 | 0.84509 |
| 2568 | 0.001815 | 0.018919 | 0.949194 |
| 2569 | 0.00187 | 0.018963 | 0.839079 |
| 2570 | 0.001859 | 0.019606 | 0.843373 |
| 2571 | 0.001771 | 0.019425 | 0.664874 |
| 2572 | 0.001861 | 0.019316 | 0.807564 |
| 2573 | 0.001825 | 0.018896 | 1.142032 |
| 2574 | 0.001799 | 0.018916 | 0.733867 |
| 2575 | 0.001848 | 0.018948 | 0.764302 |
| 2576 | 0.001862 | 0.0189 | 0.934422 |
| 2578 | 0.001938 | 0.019715 | 0.942217 |
| 2579 | 0.001762 | 0.019242 | 0.986229 |
| 2580 | 0.001771 | 0.01972 | 0.75995 |
| 2581 | 0.001846 | 0.019138 | 0.813534 |
| 2582 | 0.001812 | 0.018893 | 1.03767 |
| 2583 | 0.001829 | 0.019116 | 0.974132 |
| 2584 | 0.001881 | 0.019667 | 0.850391 |
| 2585 | 0.002575 | 0.020133 | 1.050868 |
| 2586 | 0.002919 | 0.020784 | 0.982573 |
| 2587 | 0.001816 | 0.019662 | 0.675518 |
| 2588 | 0.001816 | 0.019437 | 0.754413 |
| 2589 | 0.001844 | 0.01968 | 0.725135 |
| 2590 | 0.00185 | 0.020018 | 0.754455 |
| 2591 | 0.001831 | 0.019558 | 0.900126 |
| 2593 | 0.001894 | 0.019772 | 0.853028 |
| 2594 | 0.003467 | 0.021701 | 0.877 |

### Example 94

### Expression of CD19-41BBζ, CD19-CD28ζ, HER2-41BBζ, or HER2-CD28ζ Chimeric Antigen Receptors (CARs) Following In Vitro Administration of Circular RNAs Encoding Said CARs

[1835] Human T cells from three unique T cells donors were activated with anti-CD3 or CD28 for three days and set to rest for 24 hours. Engineered circular RNA (oRNA) encoding CD19-41BBζ, CD19-CD28ζ, HER2-41BBζ, or HER2-CD28ζ chimeric antigen receptors (CARs) were electroporated into the human T cells. 24 hours post transfection CAR expression for each of the CARs were measured using fluorescence-activated cell sorting (FACS).

[1836] As seen in FIGS. 102A and 102B, the circular RNA constructs were able to express CAR for each of the different CAR constructs.

### Example 95

### Lysis of Tumor Cells Following In Vitro Transfection of CD19-41BBζ and CD19-CD28ζ Chimeric Antigen Receptors (CARs) and Cytokine Production

[1837] Human T cells were activated with anti-CD3 or CD28 for three days and rested for 24 hours. The cells were then transfected with circular RNAs encoding for mOX40L (positive control), CD19-41BBζ, CD19-CD28ζ, HER2-41BBζ, or HER2-CD28ζ chimeric antigen receptors (CARs) via electroporation. 24 hours post-electroporation, said T cells were cocultured with Nalm6 tumor cells at a 1:1 effector to target (E:T) ratio. Nalm6 killing was measured 24 hours following coculturing of the human T cells with the Nalm6 tumor cells. Coculture supernatants were collect and analyzed using Meso Scale Discovery (MSD) (Agilent Technologies, Santa Clara, CA) for IFN-g and IL-2 expression.

[1838] As seen in FIG. 103A, CD19-41BBζ and CD19-CD28ζ encoding circular RNAs surpassed tumor cell killing to the positive control, mOX40L circular RNAs, and even surpassed HER2-41BBζ and HER2-CD28ζ. The circRNAs encoding CD19-BBζ and CD19-28ζ also surpassed the IFN-g and IL-2 cytokine compared to the circRNAs encoding HER2-41BBζ, HER2-CD28ζ, or mOX40L (FIG. 103B and FIG. 103C). Antigen specific killing was observed at 1:3 effector to target (E:T) ratio following transfection of the circRNAs.

### Example 96

[1839] mOX40L Expression in Blood and Splenic Human T Cells of Humanized Mice Following Intravenous Administration of LNP-circRNA Encoding mOX40L

[1840] NOG mice (1E7 Mouse Hybridoma) were engrafted with human peripheral blood mononuclear cells (hPBMC). 3 weeks later the mice were treated with a single intravenous dose of LNP encapsulating circular RNAs encoding mOx40L at 2 mg/kg. LNP were formulated with ionizable lipid 10b-15 (Table 10b, Lipid 15), 10a-27 (Table 10a, Lipid 27), or 10a-26 (Table 10a, Lipid 26). 24 hours following intravenous administration, splenocytes and peripheral blood cells were isolated and analyzed for T cell expression of mOX40L.

[1841] As seen in FIGS. 104A and 104B, mOX40L was detected in the human T cells of the humanized mice's spleen and peripheral blood for each of the LNP constructs. Expression was higher for all three constructs in the spleen.

### Example 97

### B Cell Aplasia in the Spleen of Humanized Mice Following Intravenous Administration of LNP-circRNA Construct Encoding for an Anti-CD19 CAR

[1842] NOG mice (1E7 Mouse Hybridoma) were engrafted with human peripheral blood mononuclear cells (hPBMC) at 50-60% human engraftment in total. 3 weeks after engraftment, the mice were treated with a single dose of LNPs encapsulating circular RNA encoding anti-CD19 CAR or IXPBS (negative control) at 2 mg/kg. Six days post dosing, splenocytes were isolated and analyzed for the presence of B cells via CD19 expression.

[1843] As seen in FIG. 105, B cell aplasia was present in the humanized mice when comparing the splenocytes of the mice receiving LNP-circRNA constructs (the left of FIG. 105) compared to the splenocytes of the mice receiving the negative control (the right of FIG. 105).

### Example 98

### Nalm6 Killing Following In Vitro Administration of Circular RNA Constructs Encoding Different CARs

[1844] T cells were activated with anti-CD3 or anti-CD28 for three days and rested for 24 hours. The cells were then treated with LNP-circRNAs encoding mOX40L (positive control), CD19-41BBζ, CD19-CD28ζ, HER2-41BBζ, or HER2-CD28ζ chimeric antigen receptors (CARs). LNPs were formulated using ionizable lipid 10b-15 (Table 10b, Lipid 15). Expression of the CARs was measured by fluorescence-activated cell sorting (FACS) to measure the mean fluorescence activity (MFI). T cells were then cocultured with Nalm6 tumor cells. Nalm6 killing was measured the following day.

[1845] 48 hours after co-culturing the T cells with the Nalm6 cells, the effector to target (E:T) ratio was 1:5. As seen in FIG. 106A, percent killing of the Nalm6 tumor cells post administration of the LNP-circRNA constructs was significantly greater for the constructs encoding CD19-CD28(or CD19-41BBζ compared to the constructs encoding HER2-41BBζ, HER2-CD28ζ, or mOX40L (the positive control). FIG. 106B illustrates that circRNAs encoding CD19-28ζCARs has a greater killing of Nalm6 cells than circRNAs encoding CD19-BBζCARs.

### Example 99

[1846] 1E6 (Nalm6-Luc) cells were engrafted into NSG mice. 3 days later, CD3/CD28 treated hPBMCs were engrafted ex vivo. 24 hours post engraftment, the mice were dosed via in vivo administration with LNP encapsulating circular RNA constructs (circular RNAs encoded either CD19-41BBζ CARs, CD19-CD28ζ CARs, HER2-41BBζ CARs, HER2-CD28ζ CARs or mOX40L (positive control)) or PBS (negative control 1) or PBMC (negative control 2)) at 2 mg/kg. All of the LNPs were formulated with ionizable lipid 10b-15 (Table 10b, Lipid 15). The mice were dosed every other day for a total of 5 doses. Nalm6 tumor burden over time was quantified using IVIS imaging.

[1847] As seen in FIG. 107, LNPs formulated with CD19-CD28ζ CARs are more effective in tumor regression than the other CAR or controls (positive or negative).

### INCORPORATION BY REFERENCE

[1848] All publications, patents, and patent applications mentioned in this specification are herein incorporated by reference to the same extent as if each individual publication, patent, or patent application was specifically and individually indicated as being incorporated by reference herein.

The application's sequence listing, which the Patent Office published only in electronic form, follows.

SEQUENCE LISTING (3776 sequences)

SEQ ID NO: 1 - DNA, 367 bp, Human parechovirus 4
  strain R12644/1999/HUN 5' UTR; and polyprotein1
tgaggtgtctgatgaggtgtgggaacttattggaagtgattacttgctgcaaagcatcctattgccagcggatcaacacctggtgacaggtgcccctggggccaaaagccaaggtttaacagaccctctaggattggtttaaacctgagtagtcatggaaaatacttagtacctgccaatttggtaacagtgcaaacactagttgtaaggcccacgaaggatgcccagaaggtacccgtaggtaacaagtgacactgtggatctgatctggggccatctacctctatcttggtgaggtggttaaaaaacgtctagtgggccaaacccaggggggatccctggtttcctttatcataccactatcatt

SEQ ID NO: 2 - DNA, 368 bp, Human parechovirus 1
  strain R2594/1990/HUN 5' UTR; and polyprotein1
tgagacgtctgatgacgtgtgggaacttattggaagtaacaatttgctgcaaagcatcctattgccagcgggtgaacacctggtaacaggtgcctctggggccaaaagccaaggtttaacagaccctctaggattggttaaaacctgaattgttatggaaaatatttagtacctgccaatttggtagtattgcaaacactagttgtacggcccacgaaggatgcccagaaggtacccgaagttaacaagtgacactatggatctgatctggggccaactacctctatcttggtgagttggttaaaaaacgtctagtgggccaaacctgggggggatccccagtttccttttattttatcattgccact

SEQ ID NO: 3 - DNA, 373 bp, Human parechovirus
  isolate 13-51/BE/DE/2013 polyprotein gene,1
tttgtaagacgtctggtgacgtgtgggaacttattggaaataacatattgctgcaaagcatcctattgccagcggaacaacacctggtaacaggtgcctctggggccaaaagccaaggtttaacagaccctctaggattggtttaaaacctgatatgttgtggaagatacttagtacctgttgatctggtagtagtgcaggcactagttgtaaggcccacgaaggatgcccagaaggtacccgtaggtaacaagtgccactatggatctgatctggggccaggtacctctatcttggtgacctggttaaaaaacgtctagtgggccaaacccgggggggatccccggtttctttttattttattaatagcatt

SEQ ID NO: 4 - DNA, 389 bp, Bat pegivirus
  isolate PDB-106 polyprotein gene, complete cds.1
ggcatgggtccactggcgcgctgacgaaggtgcgcgtgctttgtaggcacggtccacaggtgtgcccactaccggtgtgaataagtgggggtctggagcgtcagaccttaaacctagtggtgcctgggatcgcaacgtggctcacgtacgccaacgccgcttaaaaccttcgggacagctatgcgggttgacaatggcagtgaggcgcggcaccgaccgtggatccggaatcggtgtgcgagttccccagtcgctagcccgtaagggcaagcatgggtccccccagctggcgcagcgctacatgcggcaagaggaagaaccttcgggtgacctcggggggaatgtccgttctcaatgagctgaggagcatcgcacggctcgtcgccaag

SEQ ID NO: 5 - DNA, 398 bp, Ferret parechovirus
  isolate MpPeV1 polyprotein gene, complete cds.1
ctacctatcctacttcttgtatatcattctttgctattaagtagggatcccctgctatttgcaggtgtgcttgcagtggagctacacaactgtggccgaggcacggctcgcccccgtgtattaggactcttttgtgccactgttaagcggacgtatgtcagttgagtgatatctcagtgataaaccatgagtacatggtaatcctggcgtggactcattgggacggtatttcctatcccgtagactccttgtagccaggtgggcatgcccaatcacaatggtagcacctctcatgggagtgagggggcctgagttagtactcagtcacacagcctgatagggtagcggctctgctactgaccagcgtctttaaataactgagagctgtttattaacct

SEQ ID NO: 6 - DNA, 419 bp, Bat pegivirus
  isolate PDB-838 polyprotein gene, complete cds.1
gtggtaaatcccggctacggtggatccatgaatagcgtagggtgtgccaccactgctgggtgggacgacgcaggatcaaaggggacggcacggtccacaggtgagccaaccggtgtgaatatggcacgtctttgggcatgacgttaaactgagacgccctgcaggatgacaacatggctgagggttgcggaacgccgcttaaaaccattcgtggacagcgatgcgggttgacaatccgtcctcaggcgtggcggccatattggttggtcgtgtcagttcccttcagggtgcgcttcggcgaagcatggccccccccagctggcgcaggcccacatgcggcaagacgaaaaatccttcgggtgacgtcgggggggattttccctttacctacatgcatgttgttccgtttcggcgcaacc

SEQ ID NO: 7 - DNA, 421 bp, Human parechovirus 1
  isolate 37Chzj76, complete genome.1
tctattagtgagataccacgcttgtggaccttatgctcacacagccatcctctagttagttggtgaggtgtctggtgacgtgtgggaacttaccggaagcattattttgctgtaaggcatccattagccagcggaacaacacctggtaacaggtgcccctggggccaaaagccaaggtttaacagaccctaatggattggttcaaacctggaataatgtggaaggtacttagtacctgccgaactggtagcaatgccaacactagttgtaaggcccacgaaggatgcccagaaggtacccgtaggtaacaagagacactatggatctgatctggggccaactacctctatcttggtgagttggttaaaaaacgtctagtgggccaaacccaggggggatccctggtttcctaatttttact

SEQ ID NO: 8 - DNA, 426 bp, Rodent pestivirus
  isolate RtNn-PestV/HuB2014 polyprotein gene,1
gtataagggatgggatccttgtacatttcatacctctaccgaacagtatttgggagttctttttacctgccgtacagtattgggatttaaacaactaaatgtttacaaatcacgtgtgtggtggcggggatagaccgtgccagcggttgtgtaccagcaatcacaaacaacacgtggactgcaatccaggagagcacctaggtctgttaagttgtgagtacacgacattcgtcaatgagtcagctggtaaggatcacccacctggatactcatgtggacgagggagtttcccaaacagtaacctactctgggggaggggtcccccagagacaatttgtctcaaatatgggataagttggggtgtgctgcctgacagggtctcggctgatagcctggaaagcagtataatatcagttgaattggcat

SEQ ID NO: 9 - DNA, 436 bp, Human parechovirus 6
  strain BNI-67/03 polyprotein gene, complete1
ataattctatcagtgggataccacgcttgtggatcttatgcccacacagccatcctctagtaagtttgtaagacgtctgatgacgtgtgggaacttattggaagtgacattttgctgcaaagcatcctattgccagcggaataacacctggtaacaggtgcctctggggccaaaagccaaggtttaacagaccctttaggattggtgttaacctgaagtgttatggaaaatatttagtacctgctgatttggtagtaatgcaaacactagttgtaaggcccacgaaggatgcccagaaggtacccgtaggtaacaagagacactatggatctgatttggggccaactacctctattaaggtgagttggttaaaaaacgtctagtgggccaaacccaggggggatccctggtttccttttattttactacattcaac

SEQ ID NO: 10 - DNA, 439 bp, Human parechovirus 17
  isolate 27Chzj76, complete genome.1
tgccataactctattagtgagataccatgcttgtggaacttatgctcacacagccatcctctagtaagtttgtaagacgtctggtgacgtgtgggaacttgtgggaatcaatgccttgctgtaaagcatccattagccagcggacaaacacctggtaacaggtgcctctggggccgaaagccaaggtttaacagaccctaatggattggttcaaacctgagacattgtggaacacacttagtacctgctaatctggtagtaatgcaaacactagttgtaaggcccacgaaggatgcccagaaggtacctgtaggtaacaagtgacactatggatctgatctggggccagttacctctatcttggtgaactggttaaaaaacgtctagtgggccaaacccaggggggatccctggtttcctttttattttactagtcatt

SEQ ID NO: 11 - DNA, 441 bp, Human parechovirus 4
  isolate TW-00032-2011 polyprotein gene,1
cataactctattagtgagataccatgcttgtggaccttatgctcacacagccatcctctagtgagtttgcaagacgtctgatgacgtgtgggaacttaatggaaacaatatcttgctataaagcatcttactgccagcggaacaacacctggtgacaggtgcctctggggccaaaagccaaggtttaacagaccctttaagattggttcaaacctgaggtattgtggaaattatttagtacctgccgatttggtagtagtgcaaacactagttgtaaggcccacgaaggatgcccagaaggtacccgtaggtaacatgtgacactatggatctgatctggggccaactacctctatcaaggtgagttggttaaaaaacgtctagtgggccaaacccaggggggatccctggtttcctttatcttatcacacaattatcatt

SEQ ID NO: 12 - DNA, 471 bp, Unknown
  Description of Unknown: Kobuvirus cattle/Kagoshima-1 -22-KoV/2014/JPN genomic RNA, nearly 1 sequence
catccccaatatgttcggtgaggaatgctaccacgtaactattagtgaacccattgactgttctgccctggcaaggctatagagtacagtgttccgctgtggatgccgtcctggtaacaggatccccagtgtgtgtagctgtatgttcaacttcggttgttcacagtccttggtctagcttttagtgaaatggtgtgcgccatatccctacatttgggtgccacctctcaacccctaggaatgctaggaaggtaccccaccctccggtgggatctgatcctaggctaattgtctatggggttgtttccttttcttttcaccactcattactggctcacagattgtttgttgtgttccctgctctctctagctcccaacacggcacacagtctcagccacaccgcctttgcaaacgactaccagatttgtttctttgactcctctgattctcacatcttcactgaaccagac

SEQ ID NO: 13 - DNA, 481 bp, Avihepatovirus sp.
  isolate MW24 genomic sequence.1
gttgggtttacgtaagtattacccaaccctcctttcaacgtctggcccacgatacgggccaccctttcctatctcctctctttccaagtaagatattttattggttaactgacctctgtgcggcacgacaatgatgtggacaagtgttttacttaggtggtttagccagccatttcctcggcaatagcttctaggagaggagaaatggtaggtgcaacctggtaatggttctcctgaaatcgtccagtagggaggatcctcttccagataattgtactgactaggtgaagtagactggactagctgtgaggtccggggccagcattgctataccccctctaatccggcgtggatttccggccattggatagagcttacagctagcagggtattggggtaaccctgttgatccagactcctgataaggggaactgcctgtttcacgacccacctagtataaaatacaggctgtatttatgaa

SEQ ID NO: 14 - DNA, 488 bp, Eel picornavirus 1
  strain F15/05, complete genome.1
cacatggaaagcttttcgcttccatgtttacgcacacactctctttgacaccctgttgtatggtgttaaactacaacatttgtctgtctataatcgtttattttgtttaccctatatgtacccaagtatttgattgcttgactcacataagcatcggtaacccatactgttttatgagctactacctctgctgtctacatacattttatatgaatggtttgagctctgcctcaggatcaaacatggtaacatgttcctttggtcagttagaatcttattgtataatctaaggtgtctattagtacgtagaaagttgtaacacatatggggcctgatagccgctatctctgatggatgtaaggtaaccttctttaggtctgatacattctgcacaggatccaattttcggtgccctgtacgagtgcactcttatgcacgaggacgagatatgctacaacccactgcaaatttaaacccaaactttaaca

SEQ ID NO: 15 - DNA, 509 bp, Burpengary virus
  isolate 1 polyprotein gene, complete cds.1
ctccccccccttccccttcccgagtaggagattggcatgtatgctctacatgcccgattctctcttgctcactctcttaaatcctggtggcggtctcggattaaacatttatgtcgtatctgggatcgtcttacttggtggtaattcctctgttgcctagggacctccggactgccggattaaaggtctcaacagagggcaatgtacaaggaagtcattatacgctaattaagtatttgatgaatgactagtgtgacagggctgaggaactccccccgggtaaccggtgcctcagcgtccgaaagacacgtggataggatccaccctgttatacccagcacgatgtaatagtcaaatacctctgatttgtgtaggatgtataaattgtgcattgtaaattttgggcgtagagatgctccgaaggtaccccgttttacgggatctgatcggaggctaattacccaatgcgccctaaataacttcatataatttctttttctttattcaaa

SEQ ID NO: 16 - DNA, 519 bp, Goose megrivirus
  isolate W18, complete genome.1
ttcgggacactggatgggcgacttggtggggctgccactctatcttgacctttcgttactgactttcggatctctgactcctccttgtctcttgcgtttggtccacggacggactaattggaatgtttactggctaagcctcgttctgaaataccctagccaatgggttgtagtaggatcctggtgtttccattaaacctcttccgaccatagtagctagagttatggctgtgtaggatgtgggtaagaccgctttttgcgtatctcccacaagacaccggattatggatgtgtccgctggataaggctcgaaacctcccaactgaaggtggtgctgaaatattgcaagcctaggttgtgtagaggcaagtagatgcctgccgcgacattcgtcttccgcccttttgggttagtagtgtacctacatggacgtggggctgggaatccccaccttgcataacactggttgatagacctgcggctggtcaagttactatggtataaccagttgaaatggct

SEQ ID NO: 17 - DNA, 519 bp, Ferret kobuvirus
  isolate MpKoV32 polyprotein gene, partial cds.1
accctcttttccggcggcgcaagttcgcgtcgtcgtaagcctggactcccatggtgtacatcggtttccgggcaaatacaagaaccccagttttcctggtaattccttgactgggtcaaagaaataaggaaccagcccctctaacgccagacgagcggctttaaacttgaacttctggcacaatttcttccactaccctttccccaaactcggactgactcactggattttgaccttccccctttgtctgaccactcttttggatctccctccaatatgccggtggtgcctggcggaaaaagcacaagttgtgtgagcaacacccccacaggtctcacggaacggtctgtgcccgcagatctagtacgtgcggatccctggttgcttccactgctcgcctgtgagtagagtaggtgctgggtgtgatgtgtcttcggacacctcgggcatagcattgctcccccgagaatcaagccatcgagatttctctggcctctgaagtcacgcctggacgcgtag

SEQ ID NO: 18 - DNA, 528 bp, Southwest bike trail virus
  isolate cj1516, complete genome.1
gtcaggtggaaggcctgaaaccgatcctacaattggagagtaaccaacatgctcattaacacctcgggctggctcgaaagccggtgttgggcagatggcagggttcttagggtaaatcccggtctgtctggatccggtatagagctggcactggaggtccactgttggcttgctgaagtgctcagaagattgatggacacggtacacaggtttggatgcaccggtgtgaatagcgtcccgtcaggagcgtctgacgttaaactgagtccccctcaacgatcgcaacatgggattgcgtacggacacgccgccaaaacccttcggggacagctatgcgggttgacaagtccagcagtcgcgtggggcctatattgtttaggcctgcgagttccggtttgggggagccgaaaggcagccatgggggtaccaaggcggcgtcgcgctacaggcggcaaggggaaaaatccttcgggtgacccctggtaccatttttccttattgggtgttatgggtgtcggaaacgccacc

SEQ ID NO: 19 - DNA, 528 bp, Human parechovirus 19
  isolate 67Chzj11, complete genome.1
ttgtgtcaaatttgtagtgtttacagtagttgtagcttgcacgacatccttgttctccggttgggctgtggttgcaaaactatttggtcctagtaaattagaagcatcatctgcaactttggttattatttccccgccaacttcattgccagaaataatattattagcttcagtttctacattagacaaggagagagtatccatagcaccagtagcaacattaactaaatccttgatagactccataatggctgtttaaaattaaaagaaaaccagggatcccccttgggattggtttaaacctgaactactatggaagacatttagtacctgccaatttggtagtagtgcaaacactagttgtaaggcccacgaaggatgcccagaaggtacccgtaggtaacaagagacactatggatctgatctggggccaactacctctatcttggtgagttggttagaaaacgtctagtgggccaaacccgggggggatccccggtttcctttatttaataattagattcatt

SEQ ID NO: 20 - DNA, 531 bp, GB virus A
  Hepatitis, strain Alab polyprotein precursor, complete1
gccgggtggaaggcccggaaccgccccaccacctcaactaggtggtaagggtacgtctatcggtccggctggcccgaaaggcggtggatcctgtgtgttagggttcgtaggtggtaaatcccagcacaggtggtaatcgctatagggcaggcttatcccggtgaccgcttccctggatcctggagcgggtcgtggcggcacggtccacaggagtggggcctccggtgtgaataagccctcgtctggagcatcagacgttaaactgagacgtcccgaagagatcggaacgacgccccacgtatggcaacgccgcttaaaacccttcggggacagctatgcgggttgacaatgccagtggggggccgggcccactattgttgtgggctccgagttcctctagggatggccgaaaggcagccatggggccacccaggcggcgccgtgctacaggcggcaaggggaaaaatccttcgggtgaccccgggtggcattccctcccttagcagcatgagtgtggtggtagctgcaacc

SEQ ID NO: 21 - DNA, 537 bp, Human parechovirus 5
  isolate ETH_P9_2016 polyprotein gene, partial1
gatatcatcttgcaataagaagagtggggttaagacgcttaaagcatagagacaattttcttttctaacccacatttatgtggggtggcagatggcgtgccatgactctattagtgagataccacgcttgtggaccttatgctcacacagccatcctctagtaagtttgtgagatgtctgatgacgtgtgggaacttattggaagcaacattttgctgtaaagcatcctattgccagcggaacaacacctggtaacaggtgcctctggggccaaaagccaaggtttaacagaccctttaggattggttcaaacctgaaatgctgtggaaaatatttagtacctgccaatttggtagtaatgcaaacactagttgtaaggcccacgaaggatgcccagaaggtacccgtaggtaacaagtgacactatggatctgatctggggccaaatacctctatcttggtgatttggttaaaaaacgtctagtgggccaaacccaggggggatccctggtttccttttattttataatcgctatt

SEQ ID NO: 22 - DNA, 544 bp, Bovine rhinitis B virus
  strain MexB10 polyprotein gene, partial1
tggcacaccttacctcgaaacaagctcgtccttttgctgtgcaacacagtctgtcctgttacacttgtgacggctcgcgacactgtttgcatagtgaaatcgaccaagacagcaattccaaatggtgaacctcgaacacccaagctggatccgtagctggacatgttagggtaaggaattcctccctggtaacagggaccttactggccaaaagccctgctctttgagcctagcatgttgttgaccccgaactgtccagtttggttagtacagggaattcatttgttgtggttgttcagaactcgacttctagtgagacagcctaaggatgccctccaggtaccctggggtaacaagtgacacccaggatctgaggaggggatcaccctgcgtgatttaaaaaacttctaagctgtcacggtgaccagaggctggcacctttcacttttaccacttctcaattgatcacaaacaaaggaattacgtaattgcagacccacaaactagttacacgagtactgttcttacttttaatacttgttat

SEQ ID NO: 23 - DNA, 546 bp, Human parechovirus 2
  isolate 51Chzj674, complete genome.1
tgccatagagtggaacgtgtctacattgcgaaaatcaggtgtgaaaggcattgttggagcagaagggtgctgagtcaagttagttgtgttgacagttgttgtagcttgtacgacatccttgttttcaggtgttgaagtcgttgcaaaacaatttggtcccagaacattcgatgcatcatcagccactttggttaacatgtcaccaccagctgcattactggggtttgtgatggtctcattaacagtgttgacagtagagtcaattgtcttagtgattccagtagccatatctgcaacacccttgattgtctccatagctgtgaataaaaataaaaggaaaccagggtcccccctggatttggtaaccgtgcttatactagttgtaaggcccacgaaggatgcccagaaggtacccgtaggtaacaagtgacactatggatctgatctggggccaactacctctatcttggtgagttggttaaaaaacgtctagtgggccaaacccaggggggatccctggtttccttttattttatcataatcact

SEQ ID NO: 24 - DNA, 560 bp, GB virus A
  Hepatitis, complete genome.1
gccgggtggaaggcccggaaccgaccctagggtggaacctggatgagggtgtggaagagactcccccatcggtccgaaagctggtggatggcgtgcggcagggttccgcaggtgggtaaatcccggcacgcttggatccggtataggataggtgggagccgaccggtcgaccccggtctggaccaccacggaagcacctgagcccggcggaagccccgtgggcacggtacacaggttgggcctaccggtgtgaataaggccccgtctcgagcggagacgttaaactgagaggtcctggtggatgggaacccggccctgcgtgttggaacgtcgctaaaacccttaggggacaatttccgaccgcgagttggcaaacctagcaggggcgggggcagtaggatggatctccgatctgctcccagttcccaccagggtcgccgtaaggcaagcatggggcccccaagctggcgcggcgctacacgcggcaagaggaagaaccttcgggtgacctctgggggcatgttggcttttcatgatgatgtgtggttgcagctgcaatc

SEQ ID NO: 25 - DNA, 563 bp, Rabovirus A
  strain Wencheng-Rn449 polyprotein gene, complete cds.1
cctcttttcttggcaaataagatggtggaccaaggtcgtctgtagttgtttggaacatttctttctaatgacttatgtcagcggtgaactcacaccgtaactcttctaccctatccccacacttgtggaactaggaggggatgagtgattcaagtaagtactgtcagaatggtgaaaatgatctgattctgaaacatcatggatccatcgtaagatggggctacacgcctgcggaacaacacatggtaacatgtgccccaggggccaaaagccacggtgataggatcacccgtgtagtttgagatcatatcaatgttcatggtctagtaagatgatttgaaatctaactgagctgatggctaactgcttgtcttattgcggcctaaggatgccctgcaggtacctttagataaccttaagagactattgatctgagcaggggccaaggtggtctttcccagccttggttaaaaagcgtctaagccgtggcagggggcgggaggccccctttcctcccaaactttaatattgattgtatggtgacaactgaaagacatagcaca

SEQ ID NO: 26 - DNA, 570 bp, Parechovirus A
  isolate HPeV-1/CMRHP46/CMR/2014 polyprotein gene,1
ctattaactatagccttgtgcctggtccccactagtcgaaggcatcttgcaataagataagtggaataaggacgcttaaagcacaatgaaagttaacttttctaacccacactatggtgtggggtggcagatggcgtgccataactctattagtgagataccacgcttgtggaccttatgctcacacagccatcctctagtaagtttgtaagacgtctggtgacgtgtgggaacttgtgggaatcaatattttgccgtaaggcatccattagccagcggataaaacacctggtaacaggtgcctctggggccaaaagccaaggtttaacagaccctaatggattggttttgaaacctgaaatattgtggaacacacttagtacctgctgatctggtagttatgcaaacactagttgtagggcccacgaaggatgcccagaaggtacccgtaggtaacaagagaaactatggatctgatctggggctgactactcctatctttgtgagtcagttaaaaaacgtctagtgggccaaacccaggggggatccctggtttcctttaattctatc

SEQ ID NO: 27 - DNA, 589 bp, Bovine rhinitis B virus 2
  isolate BRBV_SWE1 polyprotein gene,1
cgggtttgctgctttcacatagtaaagcagatagaggttttgtaatggcgcactttacctcgaaacaagctcgttgttttgctgtgtaacacggtctgtcctgtcacacttgtggcggctcgtgacactgtgcgcatagtgaaatcgaccaagacagcaacttcaaatgatgaacctcgaacacccaagctggatccgtagctggacatgttagggtaaggaattcctccctggtaacagggaccttactggccaaaagccctgctctttgagcctagcatgttgttgaccccgaactgtccagtttggttagtacagggaatttatctgttgtggttgttcagaactcgatttctagtgagacagcctaaggatgccctccaggtaccctggggtaacaagcgacacccaggatctgaggaggggatcaccttgcgtgatttaaaaaacttctaagctgtcacggtgaccagaggctggcacctttcacttttatcacttttaaactgaccacaagcaaaggaattacgtgactacaggctctcaaactagttacacgagtactgtttttacttttgacatttgttgt

SEQ ID NO: 28 - DNA, 591 bp, Human parechovirus
  strain MX polyprotein gene, complete cds.1
caacaaacatctaagacaattacatacaaccttgtacctggtccccaccagtcgaaggcatctagcaataagatgggtggaacaaggatgcttaaagcacaaagacaattaacttttctaacccacaatttattgtggggtggtagatggcgtaccataactctattagtgagataccatgcttgtggatcttatgctcacacagccatcctctagtaagtttgtaaggtgtctgatgatgtgtgggaacttattggaaacaacattctaccgtaaggtatccattagccagcggaacaacacctggtgacaggtgcctctggggccaaaagccaaggtttaacagaccctaatggattggttcaaacctgggatgttgtggaaaatatttagtacctgctgatttggtagcagtgcaaacactagttgtaaggcccacgaaggatgcccagaaggtacccgtaggtaacaagagacactatggatctgatctggggtcaactacctctatcttggtgagttgattaaaaaacgtctagtgggccaaacccaggggggatccctggtttccttttacttatcaaaatgatc

SEQ ID NO: 29 - DNA, 592 bp, Parechovirus A
  isolate LLL, complete genome.1
aatgtaactaacatctaagacaactattttacaaccttgtacctggtctccactggtcgaaggcaacttgcaataagataagtggaatgaagacgcttaaagtacaatgtaagtaatcttttctaatccacaattctgtggagtggcagatggcgtgccataactctaatagtgagataccatacttgtggacctcatgctcacacagccatcctctagtaagtttgtaagacgtctggtgacgtgtgggaacttatgggaatcaatgttttgctgcaaggcatctattagccagcggataaacacctggtaacaggtgcctctggggccaaaagccaaggtttaacagaccctaatagattggtttatacctgaaacattgtggaacatattcagtacctgccgatctggtagtaatgcaaacactagttgtaaggcccacgaaggatgcccagaaggtacccgtaggttacaagggacactatggatctggtctggggctgagtacctctatcttggtgactcagttaaaaagcgtctagtgggccaaacccgggggggatccctggtttcttttattttaatggtcact

SEQ ID NO: 30 - DNA, 592 bp, Human parechovirus 18
  isolate 11Chzj207, complete genome.1
cgtaacaaacatctaagattatcatattaaccccatgcctggtctccattagttgaaggcaacttgcaataaaataagtggaaataagacgcttaaagcatggtgtaagttttcttttctaactcacatcttgtgtggggtggcagatggcgtgccataactctattagtgagataccacacttgtggaccttatgctcacacagccatcctctagtaagcttgtaagacgtctggtgacgtgtgggaacttattggaaacatcattttgctgcaaagcatcctattgccagcggaacaacacctggtaacaggtgcccctggggccaaaagccaaggtttaacagaccctttaggattggttctaaacctgaaatgttgtggaagatatttagtacctaccaatctggtagtattgcaagcactagttgtacggcccacgaaggatgcccagaaggtacccgtaggtaacaagtgacactatggatctgatctggggtcaactacctctatctaggtgagttggttaaaaaacgtctagtgggccaaacccaggggggatccctggtttccttttatcttaaatagtgact

SEQ ID NO: 31 - DNA, 592 bp, Human parechovirus 5
  isolate 44Chzj84, complete genome.1
taacaaacatctaagacaaacaattacgaccttatgcctggtccccaccagtcgaaggcatctagcaataagataggtggaacaaggacgcttaaagcataaagacaataatcttttctaactcacacattggtgtgaggtggcagatggcgtgccataactctaatagtgagataccacgcttgtggaccttatgctcacacagccatcctctagtaagtttgtgaggtgtctgatgacgtgtgggaacttgttggaaatgacagcttgctgcaaagcatcccattgccagcggactaacacctggtaacaggtgcctctggggccaaaagccaaggtttaacagaccctttgggattggttcaaacctgagctgtcatggaagacacttagtacctgctgatttggtagcaatacaaacactagttgtaaggcccacgaaggatgcccagaaggtacccgtaggtaacaagtgacactatagatctgatctggggccggctacctctatcttggtgagtcggttaaaaaacgtctagtgggccaaacccaggggggatccctggtttccttttattttactaatgcaact

SEQ ID NO: 32 - DNA, 593 bp, Parechovirus A
  isolate CSS, complete genome.1
tgtaataatcttagatgtttgttacattaaccccatgcctggtctccactagttgaaggcagcttgcaataaaatgagtggaagcaagacgcttaaagcatggtgtaaattagcttttccagcccacaccttgtgtggggtggcagatggcgtgccataactctattagtgagataccatgcttatggaccttatgctcacacagccatcctctagtaagtttgtgagacgtctggtgacgtgtgggaacttattggaagcaacattttgctgtaaagcatcctattgccagcggaacaacacctggtaacaggtgcctctggggccaaaagccaaggtttagcagaccctttaggattggtttaaaacctgaaatgttgtggaagatacttagtacctaccgatctggtagtagtgcaaacactagttgtaaggcccacgaaggatgcccagaaggtacccgtaggtaacaagagacactatggatctgatctggggccgggtacctctatcttggtgacctggtttaaaaacgtctagtgggccaaacccgggggggatccccggtttccttttattttatcaatgccact

SEQ ID NO: 33 - DNA, 594 bp, Parechovirus A
  isolate HYRS, complete genome.1
actgtaactaacatctaagacaactattatacaaccttgtacctggtccccactagtcgaaggctacttgcaataagataagtggactaaggacgcttaaagtacaatgtaaacaatcttttctaatccacaattttgtggagtggcagatggcgtgccataaccctattagtgagataccacgcttgtggaccttatgctcacacagccatcctctagtaagtttgtgagatgtctggtgatgtgtgggaacttatgggaagtaatgtcttgctgtaaagcatccattagccagcgggtaaacacctggtaacaggtgcctctggggccaaaagccaaggtttaacagaccctaatggattggttcaaacctgggacattgtggaacatacttagtacctgctgatctggtagttatgcaaacactagttgtaaggcccacgaaggatgcccagaaggtacccgtaggtaacaagagacactatggatctgatctggggctgagtacttctatcttagtgactcagttaaaaaacgtctagtgggccaaacccgggggggatccccggtttcctttattttacaactaccatc

SEQ ID NO: 34 - DNA, 595 bp, Parechovirus A
  isolate LGSB, complete genome.1
gcacacacgaaaaggaatgcctgttgcattaaccccatgcctggtctccactagttgaaggcaacttgcaataaaatgagtggaaacaagacgcttaaagcatggtgtaaattaacttttctaacccacaccttgtgtggggtggcagatggcgtgccataactctattagtgagataccacgcttgtggaacttatgctcacacagccatcctctagtaagtttgtgagatgtctggtgacgtgtgggaacttattggaaacaacattttgctgtaaagcatcctattgccagcggaactacacctggtaacaggtgcctctggggccaaaagccaaggtttaacagaccctttaggattggtttaaaacctgaaatgttgtggaagatacttagtacctaccgatctggtagtattgcagacactagttgtaaggcccacgaaggatgcccagaaggtacccgtaggtaacaagagacactatggatctgatctggggccaggtacctctatcttggtgacctggttaaaaaacgtctagtgggccaaacccgggggggatccccggtttcattttgttttaccaatgccact

SEQ ID NO: 35 - DNA, 595 bp, Parechovirus A
  isolate AVSS, complete genome.1
actgtaacaaacatctaagattattgcatgctttaagcgtcttgtttccactagttgaaggcaacttgcaataaaataagtggaaacaagacgcttaaagcatggtgtaagttaacttttctaacccacatctcatgtggggtggcagatggcgtgccataactctattagtgagataccacgcttgtggaccttatgctcacacagccatcctctagtaagtttgtgagacgtctggtgacgtgtgggaacttattggaaacagcattttgctgtaaagcatcctactgccagcggaacaacacctggtaacaggtgcctctggggccaaaagccaaggtttaacagaccctttaggattggtttaaaacctgaaatgttgtggaagatactcagtacctaccgatctggtagtattgcaaacactagttgtagggcccacaaaggatgcccagaaggtacccgtaggttacaagagacactatggatctggtctggggccaggtacctctatctcggtgacctggttaaaaaacgtctagtgggccaaacccgggggggatccccggtttccttttgttttactaatgccatt

SEQ ID NO: 36 - DNA, 596 bp, Parechovirus A
  isolate CBC, complete genome.1
actgtaactaacacctaagcttacatcacagataccctatgcctggtccccaccagtcgaaggcatctagcaataagatgggtggagcaaggacgcttaaagcatagtgttattatgcatttctaactcgtgttcaacacgaggtggcagatggcgtgccataactctattagtgagataccacgcttgtggatcttatgctcacacagccatcctctagtaagcttgcaaggcgtctgatgacgtgtgggaacttattggaaataacagtttgctgcaaagcatcctattgccagcggatcaacacctggtaacaggtgcctctggggccaaaagccaaggtttgacagaccctctaggattggttcatacctgaactgttatggaagatacttagtacctaccaatttggtagttaggcaagcactagttgtaaggcccacgaaggatgcccagaaggtacccgtaggtaacaagtggcactatggatctgatctggggccaactacctctatcctggtgagttggttaaggcatccttcgtgggccaaacccaggggggatccctggtttcctttaaatttaatacaatcaat

SEQ ID NO: 37 - DNA, 597 bp, Parechovirus A
  isolate FNMR, complete genome.1
actgtaactaacatctaagctgatattccagccacctcaaggctggtccccactcgtcgaaggcatctagcaataagataagtggaagaaggatgcttaaagcatagtgttaatatgcatttctaacctgtgattatcacggggtggcagatggcgtgccataactctattagtgagataccacgcttgtggaccttatgctcacacagccatcctctagtaagtttgcaaggcatctgatgacgtgtgggaacttattggaaacaacagtttgctgcaaagcatcctactgccagcggaacaacacctggtaacaggtgcctctggggccaaaagccaaggtttaacagaccctttaggattggttcacacctgaactgttgtgaaagatatttagtacctactgacttggtagttaggcaaacactagttgtaaggcccacgaaggatgcccagaaggtacccgtaggtaacaagagacactatggatctgatctggggccaactaccactatcatggtgagttggttaaaaaacgtcttagtgggccaaacccaggggggatccctggtttccttttactttaatacaatcatt

SEQ ID NO: 38 - DNA, 603 bp, Bovine rhinitis B virus 5
  strain MexB09 polyprotein gene, complete1
tatcattcgaagatgtgcggttttgctgctttcacagagtaaagcagatagaggttctggactggcaaactttacctcgaaacacgcccgttttcctgctgtgttttacagactgtcctgccacacttgtggcggcttgtgacactgtgaacatagtgagaccgaccaagagaacagttccaagtgatgaacaccgaacacctagactggatccgtagctggacatgttagggcaaggatttcccccctggtaacaggagccttgctggccaaaagccccgctctttgagcctagcatgttgtcgaccccggactgtccagtctagttagtacatgggattcacttgtcatggttcttctaaactcggtctctagtgcggcagcctaaggatgccctccaggtaccccggggtaacaagcgacacccgggatctgaggaggggactactttacgtagtttaaaaaacgtctaagctgttacggtgaccagaggctggcacctttcattttttaaaacaaactactgattacaattgaagtgataacggttttacagactttcaaactagtagcacaagtactgttttccaacgcacacatttt

SEQ ID NO: 39 - DNA, 604 bp, Parechovirus A
  isolate HMS, complete genome.1
atcataaccaatacgatttctcattccatctcgaccgcttctaccacctctaccgccacgtcctccacgagcatcaagaaattcacgaaattcatcgagaatgcttaaagcatagtgttagtatgcattcttgatgctcgtggaggacgtggcggtagatggcgtgccataactctatcagggtgataccacgcttgtggatcttatgctcacacagccatcctctagtaagcttgcaaggcgtctgatgacgtgtgggaacttattggaaataacagtttgctgcaaagcatcctattgccagcggatcgacacctggtaacaggtgcctctggggccaaaagccaaggtttaacagaccctctaggattggttcacacctgaactgttatggaaaatacttagtacctaccgatttggtagttgtgcaagcactagttgtagggcccatgaaggatgcccagaaggtacccgtaggtaacaagtgacactatggatctgatctggggccaactacctctatcctggtgagttggttaaaaaacgtctaatgggccaaacccaggggggatccctggtttcctttaaatttactacaaccaat

SEQ ID NO: 40 - DNA, 604 bp, Bovine rhinitis B virus
  strain MexB29 polyprotein gene, partial1
ctgcagatatcaagatgtgcgggtttgctgctttcacagagtaaagcagatagagattttgtattggcacacttaatctcgaaacgcgctcgttctgctgtgtagttcagtctgtcctgtcacacttgtgacggctcgcgacactgtacacatagtgaaaccgaccaagacaaaagcttcaaataatgaacctcgaaatcccaaactggatccgtagctggacatgttagggtaaggaacacccccctggtaacagggaccttactggccaaaagccccgctctttgagcctagcatgttgttgatcccgaactgttcagtttggttagtacagggaatttctttgctgtctttgttcagaactcggtttctagtgagacagcctaaggatgccctccaggtaccccggggtaacaagcgacacccgggatctgaggaggggaccgccccgcgcggtttaaaaaacttctaagctgttgtggtgaccagaggctggcacctttcactttaaaacacttattaactggtcacaaacaaaagaattccgttttacagactttcaaactagttacacaagtactgtttcacttacaacaattgttat

SEQ ID NO: 41 - DNA, 606 bp, Zebrafish picornavirus-1
  strain IDEXX/ZfPV-1/2017/USA, complete1
aaataccctttcccccggagcctcaccggggaccgcctcatggtgacctgctcggtcactactgtggtggtgaacaaatgtctaggacctttcactccaaatccctttcccctttttctacttcttagtacgcctcggctcgctcatccgttgtgtgctcaaactccccttctcctacacccctttcccccccctcccgagtgactcgcacttagtcgtaggtttggtgtctttcaccatttctgtgcctatctatgtgtcctttggatccgccctcgaatgccctctagggtcttctgcgaaagcttgcaaagccgcgccccccctccactgttcttggggaccgtgcgcagccggaacttttgacatttgactgaacagtacagcaatgtagcatgtctcttgtctttgccggttagccctcgtggtcaaactttgtaagttagtacacttaagcactctcctgtggtttctcttgggaccttccaattgtaggaatccttggtatgccttcgaatagggacggacgctctaaatgccccgttcgcgaagtcgacgcctgaatgaccaaggtttttccacctttcctcaaaacccctcttttta

SEQ ID NO: 42 - DNA, 608 bp, Human rhinovirus 10
  complete genome.1
ttaaaactggatccagattgttcccatctggatttcccacgtggagttgtacactattattccggtaattttgtacgccagttttatgtacccccccctgtaacttagaagttttgaacaaggaccaataggcagtaaccacccaggttgctaaaggtcaagcacttctgtttccccggtcaaagttgatatgctccaacagggcaaaaacaactgagatcgttacccgcaaggtgcctacgcaaagcctagtaaccccttgaacgatgtgtggttggtcgttcggctgtaccccacagtagacctggcagatgaggctagatgttccccactggcgacagtgttctagcctgcgtggctgcctgcgcactctctgagtgcgaagccatacatttgacaaggtgtgaagagccccgtgtgctcaccttgagtcctccggcccctgaatgtggctaaccttaaccctgcagctagtacatgcaatccagcatgcagctagtcgtaacgagcaattgcgggacgggaccaactactttgggtgtccgtgtttcactttttccttttatatttgcttatggtgacaatatatagatttatatattgtcacc

SEQ ID NO: 43 - DNA, 608 bp, Human rhinovirus 30
  complete genome.1
ttaaaactggatccaggttgtccccacctggatctcccacagggagtggtactctgttattacggtaactttgtatgccagttttatcctccccacccctatgtaacttagaagttttacataaagaccaataggtagtaatcatccagattacttaaggtcaagcacttctgtttccccggttgatgttgatatgctccaacagggcaaaaacaacagaaatcgttacccgcaaagtgcctacgcaaagcctagtagcactttagaagttgtctggctggtcgctccgccatttcccctggtagacctggcagatgaggctagaaataccccactggcgacagtgttctagcctgcgtggctgcctgcacaccctatgggtgtgaagccatacaatggacaaggtgtgaagagccccgtgtgctcactttgagtcctccggcccctgaatgtggctaaccttaaccctgcagctagggcacacaatccagtgtgtatctagtcgtaatgagcaattgcgggacgggaccaactactttgggtgtccgtgtttctcttttatccttatgtttgcttatggtgacaatatatgaatatatattgacacc

SEQ ID NO: 44 - DNA, 609 bp, Turkey avisivirus
  isolate USA-IN1, complete genome.1
ttgaaagcgaatgtatggccgcatttccacactagtaactagtagtggtatgcggctgtgcattcgctttccccccctctttataggggcggtctttgtatctttactaatttcctacttttctatcatctctttttaaggtagggactaaggtctcctagcccttccccccctgggctttccaggatcaagggggttctaaagctaggccatgtttcctgagcctcatttagtacggagagttagtagtcataaaacatgccagtaaccttctagtgcccaagggtgacagagtggtaacactctccttggggcccgaaaggctagtgggcatagttgttaccaaggaaggggtccccaccccaacctgaactaacagctagaagctcaccttagaagaagtgctggatcccaacatgtcttataatgaaagctcaatggaaaggtgaggagatggaagcatgggggttcactgagtagatgccctgaaggagaaatctgatcaggggcccgtgactatacattaggtaaaccgggtataaaaaccatgaaaggtgacccacaaattttcctttatttttatgttttgttggtgtgaattcaggcaag

SEQ ID NO: 45 - DNA, 610 bp, Livupivirus A1
  strain newt/II-5-Pilis/2014/HUN, complete genome.1
tatctacatggggatccaggctgtatggaatgtctgtcttaacaagcactataccagaaagatccacccaaagtggtgggactgggactgtgaggtgagaaatcccgaaaccagccttctcaagcgtcggacgatctttctgttttagtgaacaccttgccttttaaatggatgacaacaccccttcagcaaatcgcaatctgaaatcccaaaagactgtttagccgaactctggtaatcactccggagaagtaggatacgcagcccctgtggactcttgatttcaggactcaaggtagctagagctggaacttcatggaatgacaaaggaatatatgcacattgtgcgctttcctggccttgtagcccgtcgtgaggatatgtcgttgggaatcgacatcttagtccagtactgcttgatagagtgtcggctggcacagttacctgagaataagtcagttgtacttaacatgaacaaaaaaaataactaccacaactaccacaatctaccaatacttgaattatgctgaatctcgtacagtaaaaacgttccgtggaaggacaagtattgaagtgcggttacatcatccgatacgcgctggatccctca

SEQ ID NO: 46 - DNA, 610 bp, Human parechovirus 1
  isolate TW-01319-2010 polyprotein gene,1
gtcaataaaagcctcaaacgtaacaaacatctaagataactaaacaaaccctatgcctggtctccactattcgaaggcaacttgcaataagaagagtgggcacaagacgcttaaagcatagagagagtttccttttctaacccacgttcgcgtggggtggcagatggcgtgccataactctaatagtgagataccatgcttgtggatcttatgctcacacagccatcctctagtaagtttgtaaggcgtctggtgacgtgtgggaatttattagaagcaacatcgtgctgtaaagcatcctattgccagcggaataacacctggtaacaggtgcctctggggccaaaagccaaggtttaacagaccctctaggattggttttgaacctgcgatgttgtggaaaatatttagtacctgccaatctggtagtcatgcaaacactagttgtaaggcccacgaaggatgcccagaaggtacccgtaggtaacaagagacactatggatctgatctggggccaactacctctatcttggtgagttggttaaaaaacgtctagtgggccaaacccaggggggatccctggtttccttttattttatcaatttcatt

SEQ ID NO: 47 - DNA, 610 bp, Human rhinovirus 32
  strain ATCC VR-1142, complete genome.1
ttaaaactggatccgggttgttcccacccggatctcccacgtggagttgtacactattattacggtaattttgtacgccagttttatatcccttaccccaagtaacttagaagataaacacacagaccaataggaggtggtcatccagatcactaagggtcaagcacttctgtttccccggtcaaggttgatatgctccaacagggcaaaaacagctgagatcattatccgcaaagtgcctacgcaaagcctagtaactacctcgaaagtacttgactggtcgctccgccataccccatggtagacctggcagatgaggctagaaatcccccactggtgacagtgttctagcctgcgtggctgcctgcacaccctttgggtgtgaagccaagtaatggacagggtgtgaagagtcgagtgtgctcactttgagtcctccggcccctgaatgtggctaaccctaaccctgcagctagggcacacaatccagtgtgtatctagtcgtaatgagcaattgcgggatgggaccaactactttgggtgtccgtgtttcttgtttttcatttataattgcttatggtgacaatatatagtattatatattggcgtc

SEQ ID NO: 48 - DNA, 610 bp, Human rhinovirus 2
  complete sequence.1
ttaaaactggatccaggttgttcccacctggatttcccacagggagtggtactctgttattacggtaactttgtacgccagttttatctcccttcccccatgtaacttagaagtttttcacaaagaccaatagccggtaatcagccagattactgaaggtcaagcacttctgtttccccggtcaatgttgatatgctccaacagggcaaaaacaactgcgatcgttaaccgcaaagcgcctacgcaaagcttagtagcatctttgaaatcgtttggctggtcgatccgccatttcccctggtagacctggcagatgaggctagaaataccccactggcgacagtgttctagcctgcgtggctgcctgcacaccctatgggtgtgaagccaaacaatggacaaggtgtgaagagccccgtgtgctcgctttgagtcctccggcccctgaatgtggctaaccttaaccctgcagctagagcacgtaacccaatgtgtatctagtcgtaatgagcaattgcgggatgggaccaactactttgggtgtccgtgtttcactttttcctttatatttgcttatggtgacaatatatacaatatatatattggcacc

SEQ ID NO: 49 - DNA, 612 bp, Human rhinovirus A2
  strain 12L4, complete genome.1
ttaaaactggatccaggttgttcccacctggatctcccatagggagtggtactctgctattacggtagccttgtatgccagttttatctcccctcccccatgtaacttagaagttttacacaaggaccaatagtcggtaatcagccagattactaaaggtcaagcacttctgtttccccggtcaatgctgatatgctccaacagggcaaaaacagcagcgatcgttatccgcaaagcgcctacgcaaagcttagtagcatctccgaaattgtctggttggtcgttccgccattttccccttggtagacctggcagatgaggctagaaataccccactggcgacagtgttctagcctgcgtggctgcctgcacaccctatgggtgtgaagccaaacaatggacaaggtgtgaagagccccgtgtgctcgctttgactcctccggcccctgaatgtggctaaccttaaccctgcagctagagcacgcaaaccagcgtgtttctagtcgtaatgagcaattgcgggatgggaccaactactttgggtgtccgtgtttcactttttctttttatattgcttatggtgacaatatatacatcatatatattgacacc

SEQ ID NO: 50 - DNA, 613 bp, Human rhinovirus 77
  strain ATCC VR-1187, complete genome.1
ttaaaactggatccaggttgttcccacttggatcccccaagaggggtagtactctattattacggtaattttgtacgccagttttatctcccttaccccctttgtaacttagaagatttaaacacagaccaataggcgacgatcatccagatcgtttaaggtcaagcacttctgtttccccggtcaatgctgatatgctctaccagggcaaaaacagtagagatcgttatccgcaaggtgcctacacaaagcttagtaacattttgaagagcatttggttggtcgctcagctattaccccatagtagacctggcagatgaggctagaagttccccactggcgacagtgttcttgcctgcgtggctgcctgcgcactctcatgagtgcgaagccatatgtttgacaaggtgtgaagagccccgtgtgctcaccttgagtcctccggcccctgaatgtggctaaccttaaccctgcagctagtgcatgaaatccatcatgtaactagtcgtaatgagcaattgcgggatgggaccaactactttgggtgtccgtgtttcactttttccttttatatttgcttatggtgacaatatatatagcatatattgacacc

SEQ ID NO: 51 - DNA, 613 bp, Human rhinovirus A25
  strain SC0881, complete genome.1
ataaaactggatccaggttgttcccacctggatctcctacgtggagttgtactctattattccggtaatcttgtacgccagttttatatcccctacccctttgtaacttagaagttaaacacacagaccaataggcggtggctatccaagtcactaatggtcaagcacttctgtttccccggtcaagattgatacgctccaacagggcgaaaacagtcaagatcgttaaccgcaaagtgactacgcaaagcttagtaatgccttgaagagtctatggctggtcgttccgctataaccccctagtagacctggcagatgaggctagaaacaccccactggcaacagtgttctagcctgcgtggctgcctgcacaccctttcgggtgtgaagccatatatttgacaaggtgtgaagagccccgtgtgctcactttgagtcctccggcccctgaatgtggctaaccttaaccctgcagctagcgtatgtaatccaacatattgctagtcgtaatgagcaattgcgggatgggaccaactactttgggtgtccgtgtttcacttttttccttttatttgcttatggtgacaatatatatagtatatatattggcatc

SEQ ID NO: 52 - DNA, 614 bp, Human parechovirus 6
  isolate 71Chzj169, complete genome.1
ggctggttaataaaagcctcaactgtaacaaacatcttaagcaactatagcaaccccatgcctggtctccactagttgaaggcacctagcaataaaatgagtggaaataagacgcttaaagcatggagtaaattttcttttctatcccatattttgtatggggtggcagatggcgtgccataattctattagtgggataccatacttgtggatcttatgcccacacagccatcctctagtaagtttgtaagacgtctggcgatgtgtgggaacttattggaagcaacattttgctgcaaagcatcctactgccagtggaacaacacctggtaacaggtgcccctggggccaaaagccaaggtttaacagaccctttaggattggtattaacctgaaatgttgtggagaatagttagtacctgctgacctggtagtaatgcaaacactagttgtaaggcccacgaaggatgcccagaaggtacccgtaggtaacaagagacactatggatctgatttggggccaactacctctattaaggtgagttggttaaaaaacgtctagtgggccaaacccaggggggatccctggtttcttttattttaccatatctaac

SEQ ID NO: 53 - DNA, 614 bp, Human rhinovirus A21
  isolate rmh001/2013 polyprotein gene, complete1
taaaactggatccaggttgttcccacctggatctcctattgggagttgtactctattattccggtaattttgtacgccagttttatcttccccctccccaattgtaacttagaaggttatcaatacgaccaataggtggtagttagccaaactaccaaaggtcaagcacttctgtttccccggtcaaagttgatatgctccaacagggcaaaaacaactgagatcgttatccgcaaagtgcctacgcaaagcctagtaacacctttgaagatttatggttggtcgttccgctatttcccatagtagacctggcagatgaggctagaaatcccccactggcgacagtgctctagcctgcgtggctgcctgcgcaccccttgggtgcgaagccatacattggacaaggtgtgaagagccccgtgtgctcactttgagtcctccggcccctgaatgtggctaaccttaaccctgcagctagtgcatgtaatccaacatgttgctagtcgtaatgagtaattgcgggacgggaccaactactttgggtgtccgtgtttcactttttccttttaatattgcttatggtgacaatatatatagctatatatattgacacc

SEQ ID NO: 54 - DNA, 614 bp, Human rhinovirus 85
  strain ATCC VR-1195, complete genome.1
ttaaaactggatccaggttgttcccacctggatttcctacatggagttgtactctgttattccggtaaccttgtacgccagttttatatcccttcccccttgcaacttagaagttaagcacgcagaccaataggtggtgattatccaaatcactaacggtcaagcacttctgtttccccggtttaaactgatacgctccaacagggcgaaaacagtgcaaatcgttatccgcaaggtgcctacacaaagcttagtagcgctttggagaatgtgtggttggtcgctcagctataccccctagtagacctggcagatgaggctagaagcaccccactggcgacagtgttctagcctgcgtggctgcctgcacacccttatgggtgtgaagccatacatttgacaaggtgtgaagagccccgtgtgctcactttgagtcctccggcccctgaatgtggctaaccttaaccctgcagctggtgcatgtaatccaacatgttgctagtcgtaatgagcaattgcgggatgggaccaactactttgggtgtccgtgtttcactttttaccttttaatttgcttatggtgacaatatatatacaacatatatattggcatc

SEQ ID NO: 55 - DNA, 614 bp, Human rhinovirus 57
  isolate fs ship#1-hrv-57, complete genome.1
ttaaaactggatccaggttgttcccacctggatctcctacgggagttgtactctgttatttcggtaaccttgtacgccagttttatctcccctcccccaattgtaacttagaagcaatacacaaggaccaataggcagtgattaaccagatcacttaaggtcaagcacttctgtttccccggtctgagttgatatgctctaacagggcaaaaacaagtcagatcgttatccgcaaagtgcctacgcaaagcctagtatcatctttgaaaatgtatggttggtcattccgctgaaccccacagtagacctggcagatgaggctagaaaccccccactggcgacagtgttctagcctgcgtggctgcctgcacacccttatgggtgtgaagccatatatttgacaaggtgtgaagagccccgtgtgctcactttgagtcctccggcccctgaatgtggctaaccctaaccctgcagctagtgcatacaagccagtatgttgctagtcgtaacgagcaattgcgggatgggaccaactactttgggtgtccgtgtttcactttttacctttatactgcttatggtgacaatatatatatagcatatatattgacacc

SEQ ID NO: 56 - DNA, 614 bp, Human rhinovirus 59
  strain 16-J2, complete genome.1
ttaaaactggatccaggttgttcccacctggatctcccaagtggagtggtacactattatcccggtaattttgtacgccagttttataacccctcccccccttgtaacttagaagatgtaaacacagaccaataggtggtaactaaccaagttactaaaggtcaagcacttctgtttccccggctgatattgatatgctccaccagggcaaaaacaatagaagtcgttatccgcaaagtgcctacgcaaagcctagtagcactttagattgtgtatggttggtcgctcagctattccccctagtagacctggcagatgaggctagaaataccccactggtaacagtgttctagcctgcgtggctgcctgcgcaccctttcgggtgcgaagccatatacatgacaaggtgtgaagagccccgtgtgctcactttgagtcctccggctcctgaatgtggctaaccttaaacctgcagccagtgcacataagccaatgtgtagctggtcgtaatgagtaattgcgggatgggaccaactactttggatgtccgtgtttcttgtttttcctttaattttgcttatggtgacaatatatagataatatatattggcatc

SEQ ID NO: 57 - DNA, 617 bp, Picornaviridae sp.
  isolate thr173pic1 genomic sequence.1
gggccccctttccgtccaagtcgcggacgttaaatgcggcacggcagtgcctcggtgctgtcctgctgctagtggcggcaaccctctcccttactgtatgaatgagtttgtgtgaatgaaatccgtgtggatccccagcttttgggtctcaaacagaacacacggtggcggcccatgttccaccatagaggctaccttagtagctttaagtggaatctttgagtgagcaggtatcgcagccgttaaagactggtattcccggtgtagaggcgagcgcaggtaactgcggtctacattgtgtgtgagccagtacccgcaaggggtagctcaaagtggaaacttaaggtgaaccggtaagcgctattgtgacgcatgttggtcccaaggtgcgatgatagacatgttgcgcaggtaccccttaaatgggatctgagcgtaagctaattagtcactgtcgtcgcgctgaccttttctctttgtcttaattattgttaacacaatatcattgtttgttgtgtgtttttgctcgcaaggtcactagcagtcttacttaaaacactcaagacggactttttgtataattcaattagtgcttatttcaattctaccttctacag

SEQ ID NO: 58 - DNA, 618 bp, Human parechovirus 1
  isolate 121Chzj091, complete genome.1
cacgagttagaaatacatactaacactatgctttaagcgtccttgctccactcatcttattgcctggtccccactagtcgaaggtatctagcaataagatgagtggagcaaggacgcttaaagcatagtgttagtatgtatttctaactcgtgttcaacgcgaggtggcagatggcgtgccataactctattagtgagataccacgcttgtggatcttatgctcacacagccatcctctagtaagcttgcaaggcgtctgatgacgtgtgggaacttattggaaataacagtttgctgcaaagcatcctattgccagcggatcaacacctggtaacaggtgcctctggggccaaaagccaaggtttaacagaccctctaggattggttcacacctgaactattatggaagatatttagtacctaccgatttggtagttaggcaagcactagttgtagggcccacgaaggatgcccagaaggtacccgtaggtaacaagtgacactatggatctgatctggggccaactacctctatcctggtgagttggttaaaaaacgtctagtgggccaaacccaggggggatccctggtttccctttaaatttaatacaaccaat

SEQ ID NO: 59 - DNA, 618 bp, Human rhinovirus 11
  complete genome.1
ttcaaactggatccaggttgttcccacctggatctcccacgtggagttgtactctattattccggtaattttgtatgccagttttatctccccttcccttttgtaacttagaagatgaactcaccgaccaataggtggcatttatccagaatgtcaaaggtcaagcaccttctgtttccccggtcaaagttgatatgctccaacagggcaaaaacatctgcgatcgttatccgcaaagcaactacgcaaagcctagtatcacttttgagagtatgtggttggtcgctccactataaacccaatagtagacctggcagatgaggctagaagtcccccactggtaacagtgttctagcctgcgtggctgcctgcgtgcctctggtaggcacgaagccatatatttgacaaggtgtgaagagccccgtgtgcttgctttgagtcctccggcccctgaatgtggctaaccttaaccctgcagctagtgtgcataatccaatgcatggctagtcgtaatgagcaattgcgggatgggaccaactactttgggtgtccgtgtttctcatttttccttttatttgcttatggtgacaatatatataatacatatatattggcatc

SEQ ID NO: 60 - DNA, 620 bp, Picornavirus HK21
  polyprotein gene, complete cds.1
aaacgggaggatcggctttggcttatcctcttaatagtctacaaaactgggctgactggtgggggagctactagatccgggagaggactagttaccccgcgtaacttccctttttgtcactccctccacctaccccttccctgtcccttagactcttaagtaggtgtgcaggcctggccccccggaaatgggcaaatcggacgtttgcgtgtagggtcgttctgaaaggtggggcccactccaccgtagtaggatcttcctgtttcacgtttaaacctctccgggcaggtatcgctagacactaggctgtataggatggcacgcacttaggtttcgcaccttcctagtgcgccaagatcccgcttttgagctcaagtacatggttctttgtaagatgtctaaccagaggaggtggtgctgaaatattgcaagccactctggcgaacgtccactgcattgcctggaacaggctctctagcgccctccactggtagcgcggtggtgggttagtaggatacctatatggacaggggatgcgggaatacccctcactagctagtgactggttgatcgactggcggcggatccagtgatacttgcataatccgcagacttgggag

SEQ ID NO: 61 - DNA, 620 bp, Human parechovirus 5
  strain HPeV5-G001-19, complete genome.1
gggtcggctggtcaataaaagcctcacatataactaacatctaagacaataatgtacaaccttgtgcctggtccccaccggtcgaaggcatctagcagtaagataggtggaacaaggacgcttaaagcacaaagacaacctatttttctaacccgcaaattattgtggggtggtagatggcgtaccataattctactagtgagataccatgcttgtggatcttatgctcacacagccatcctctagtaagtttgcaaggcgtctggtgacgtgtgggaacttattggaaataacatcttgctgcaaggcatccattagccagcggaataacacctggtaacaggtgcctctggggccaaaagccaaggtttagcagaccctaatggattggttcaaacctgggatgttgtggaagatacttagtacctaccgatctggtagcaatgcaaacactagttgtaaggcccacgaaggatgcccagaaggtacccgtaggtaacaagagacactatggatctgatttggggccaactacctctatcctggtgagttggttaaaaaacgtctagtgggccaaacccaggggggatccctggtttcttttacttatcactgtcatt

SEQ ID NO: 62 - DNA, 621 bp, Human rhinovirus 84
  strain ATCC VR-1194, complete genome.1
ttaaaacagcggatgggtatcccaccatccggcccactgggcgtagtacactggtattctgtacctttgtacgcctgtttgccgcccctcccccttttattaccacatttgtggtcgctgcaacgttagaagattttaaagtagtgcaataggaagcatcacaaccagtggtgttatgcacaaacacttctgtttccccggagcgaggtatagacggtccccactgtcaaaagcctttaaccgttatccgccaaccaactacgagacagctagtaatgccctgttctcctgcaaggcgttcgatcagacagatttcccctctgttagtctggtcgatgaggctagaagtaccccacaggtaactgtgttctagcctgcgtggcggccagcccagcttctgctgggacgcctttcaagagacatggtgtgaagactcaattgtgcttggttgtgagtcctccggcccctgaatgcggctaaccttaaacccggatccatgctatgcaaaccagcatagttatggtcgtaatgggcaactctgggatgggaccgactactttgggtgtccgtgtttccatttttactttttgtgtcatttatggttacaattaagttgtaacc

SEQ ID NO: 63 - DNA, 621 bp, Human rhinovirus 20
  strain ATCC VR-1130, complete genome.1
ttaaaactggatccaggttgctcccacctggatctcctacatggagttgtactctattattccggtaattttgtacgccagttttatctccccctacccccttacgtaacttagaagttttacacacaccgaccaataggtggtatttacccaaaataccaaaggtcaagcacttctgttaccccggtcaaaattgatatgctccaccagggcaaaaacaattgcgatcgttatccgcaaagcaactacgcaaagcctagtaccatttttgatgatgtgtggttggtcgttccactatgaacccgatagtagacctggcagatgaggctagaaattccccactggcaacagtgttctagcctgcgtggctgcctgcgtaccccctgtgggtacgaagccatacatttgacaaggtgtgaagagccccgtgtgcttgctttgagtcctccggcccctgaatgtggctaaccttaaccctgcagctagtgtgtacaatccagtacatagctagtcgtaatgagcaattgcgggatgggaccaactactttgggtgtccgtgtttcttgtttttctttcatatttgcttatggtgacaatatatataacacatatattggcacc

SEQ ID NO: 64 - DNA, 625 bp, Bovine rhinitis B virus
  isolate TCH8 polyprotein gene, complete1
gtccagctacggatccagtttagacgttcgaagatgtacggttttgctgctttcacagagtaaagcagatagaggttctggactggcaaactttacctcgaaacacgcccgtttttctgctgtgttttacagactgtcctgccacacttgtggcggcttgtgacactgtgaacatagtgagactgaccaagacaacagtttcaagtggtgaacatcgaacgtctaaactggatccgtagctggacatgttagggcaagggtctcccccctggtaacaggagccttgctggccaaaagccccgctctctgagcctagcatgttgtcgaccccggactgttcagtttagttagtacatgggattcacttgtcatggttcctctgaactcggtctctagtgcggcagcctaaggatgccctccaggtaccccgaggtaacaagcgacactcgggatctgaggaggggactactttacgtggtttaaaaaacgtctaagctgccacggtgaccagaggctggcacctttcactttttaaacacactactgactacaattgaagtgataacggttttacagactttcaaactagttacacaagtactgtttttccaacacacacaatttt

SEQ ID NO: 65 - DNA, 630 bp, Human rhinovirus 37
  complete genome.1
tttaaacagcggatgggtatcccaccatccgacccactgggtgtagtactctggtattttgtacctttgtacgcctgttgttcctaatgtacccaccctaaaacttcctacccaagtaacgttagaagtttcatcaacaagtacaataggaagcatcacatccagtggtgttttgtacaagcacttctgtttccccggagcgaggtataggctgtacccactgccgaaagcctttaaccgttatccgccaaccaactacgtaaaagctagtatcatcatgttttaaaataggcgttcgatcaggtggatcccccctccactagtttggtcgatgaggctaggaactccccacgggtgaccgtgtcctagcctgcgtggcggccaacccagcttctgctgggacgcctttttatggacatggtgtgaagactcgcatgtgcttggttgtgactcctccggcccctgaatgcggctaaccttaaccccggagccctgtgttgcaatccagtaacattagggtcgtaatgagcaatttcgggacgggaccgactactttgggtgtccgtgtttctcatttttcttattattgtcttatggtcacagcatatatataacgtatatactgtgatc

SEQ ID NO: 66 - DNA, 635 bp, Human enterovirus C105
  strain PER153 polyprotein gene, complete1
cccctaggatccactggatgttagtacactggtatcgcggtacctttgtacgcctgttttatatccccttccccgcaactttagaagtatcaaaagtaccgctcaatagccgccacgctcccagtgtggtttcgagcaagcacttctgttttcccggttgcgtcccatatgctgtgcaaacggcaaaaagggacaatatcgttacccgcttgtatactacgggaaacctagtaccgccattgattgtattgagggttgcgctcatcacctttcccggtgtagctcaggctgatgaggctcagaatcccccacaggtaactgtgtctgagcctgcgttggcggcctgccctcgccttatggcgtgggacgctcactacatgacatggtgcgaagagtctactgtgctatacaagagtcctccggcccctgaatgtggataatcctaaccactgatcccacgtacgcaaaccagcgtgtagtgggtcgtaacgcgcaagtcggtggcggaaccgactactttgggtgaccgtgtttcctttattacctattgaatgtttatggtgacaattgtttgattcagttgttaccatttgctacattcaataacctagtgtcaaaccgattgaattgctaca

SEQ ID NO: 67 - DNA, 636 bp, Turdivirus 2
  strain 10717, complete genome.1
cctcggtccctctttccgtcgccgcccacgacgttaaatgcggtgttgtggtgcttaggtgccacaccactgctatttgggtccccctttcccctatatatgtttgtttgtttatttcaatttcttgaggattggcacctccttatgccaaatctaaatcgtggaggatcccaggctttctggtctttaacagaactccacgtccaggtcatagaaactggttggtaggctgcctgagtagtccatttgctagtagtcccttgtgaacagggtggctcccgtttactgctggtattcccggtgtaggtcgccatggtggtaacaccatcctgcattgtgtgtgaaccagtaccgcaaggatagcaaggtatgaacacttgtggacgaaatggtaagtgatcaattcactttcatggccggaaggtcacgtggcaatcatgccacccaggtaccctcctctgggaggatctgagggtgggctaagcagaccctgccatgtggctgaacttttcccttattgttttactttgtaacatttatagttgtgttagtgatttgtgtgttgtgcccttgtgagctatatccagtataagttcgcagctagaagttaatccttcgacatcggctgtattggaa

SEQ ID NO: 68 - DNA, 636 bp, Human parechovirus 1
  strain VEN/2018-23121B, complete genome.1
ccctttcccagccctgagacggctggctaataaaagtctcacctgtaactaacatctaagacaatcatgtataaccttgtgcctggtccccaccagtcgaaagtatcttgcaataagataggtggatcaaggatgcttaaagcacaaagacaattaacttttctaacccacaagttgttgtggggtggtagatggcgtaccataactctactagtgagataccacgcttgtggaccttatgctcacacagccatcctctagtaagtttacaaggcgtctggtgatgtgtgggaacttattggaagcaatattttgccgaaaggcatccattagccagcggaataacacctggtaacaggtgcctctggggccaaaagccaaggtttagcagaccctaatggattggttcaaacctggaatattgtggaaaatatttagtacctacggatctggtagcagtgtaaacactagttgtaaggcccacgaaggatgcccagaaggtacccgtaggtaacaagagacactatggatctgatctggggccagctacctctatcttggtgagttggttaaaaaacgtctagtgggccaaacccaggggggatccctggtttcctttacttaaccgggatcact

SEQ ID NO: 69 - DNA, 636 bp, Human enterovirus C105
  strain USA/OK/2014-19362 polyprotein gene,1
cccctaggatccactggatgtcagtacactggtatcgtggtacctttgtacgcctgttttatacccccttccccgcaactttagaagcatcaaaagcaccgctcaatagtcaccacacccccagtgtggtttcgagcaagcacttctgttttcccggttgcgtcccatatgctgtgcaaacggcaaaaagggacaatatcgttacccgcttgtatactacgggaaacctagtaccaccattgattgtgttgagagttgcgctcatcacctttccccggtgtagctcaggccgatgaggctcagaatcccccacaggtgactgtgtctgagcctgcgttggcggcctgccctcgccttatggcgtgggacgcttgatacatgacatggtgcgaagagtctactgtgctatgcaagagtcctccggcccctgaatgtggctaatcctaaccactgatcccacgcacgcaaaccagtgtgtagtgggtcgtaacgcgcaagtcggtggcggaaccaactactttgggtgaccgtgtttcctttattacttattgaatgtttatggtgacaattgtttgattcagttgttgccattctctacattcatttacccagcatcaaaccaattgaactgttaca

SEQ ID NO: 70 - DNA, 637 bp, Turdivirus 2
  strain 007167, complete genome.1
cctcggtccctctttccgtcgccgcccacgacgttaaatgcggtgctgtggtgcttaggtgccacaccactgcggtttgggttcccctttcccctatatatgtttgtctgtttatttcaaattcttgaggattggcacctccttatgccaaatctaaatcgtggaggatcccaggctttctggtctcaaacagaactccacgtccaggtcataggaactggttagtaggctatttgagtagtccgtttgttagtaatgccttgtgaacagggtggctcccgtttactgctggtattcccggtgcaggttgccgtggtggtgacaccatcctgcattgtgtgtgaaccagtaccgcaaggatagcaaggtatgaacacttatgggtgaaataataagtgactaatccactttcatggccggaaggtcatgtggcaatcatgccacccaggtaccctcttaggaggatctgagggtgggctaagcagaccctgccatgtggctgaaattttctattattttattccataacatttatagctatataggtgttttgtgtgttgtgctctccttttccgagttatttccagtactagttcgcagctagaagtttaactcttcgatatcggctacattggaa

SEQ ID NO: 71 - DNA, 637 bp, Human enterovirus C105
  polyprotein gene, complete cds.1
ttcccacccctaggatccactggatgttagtacactggtatcacggtacctttgtatgcctgttttataacccctcccctgcaactttagaagtatcaaagacactgctcaatagccgccacacctccagtgtggtttcgagcaagcacttctgttctcccggttgcgtcccatatgctgtgcaaacggcaaaaaggggcaatatcgttacccgcttgtatactacgggaaacctagtaccatcattgattgtgttgagggttgcgctcatcacccttccccggtgtagctcaggtcgatgaggctcagaatcccccacaggtgactgtgtctgagcctgcgctggcggcctgccctcgcctcacggcgtgggacgctcaatacatgacatggtgcgaagagtctactgtgctatacaagagtcctccggcccctgaatgtgtcctaaccactgatcccacgtacgcaaaccagtgtatagtgggtcgtaacgcgcaagtcggtggcggaaccaactactttgggtgaccgtgattcccttattacttattgaatgtttatggtgacaattgtttgattcagttgttaccatttaccacattcatcaacctagtgtcaaaccgattaaactgctaca

SEQ ID NO: 72 - DNA, 638 bp, Human parechovirus 2
  strain LPZ04-2008 polyprotein gene, complete1
tctaggagagtccctttcccagccagaggtggctggttaaacaatacctaatgtaacaaaacatctaagactttgtaacccatacctggtctccacccgttgaaggcaactagcaataaaataggtgggcttagacgcttaaagtatggtgtaaacaatcttttctagcctgtgcctagcatagggtggcagatggcgtgccataactctattagtgagataccacacttgtggaccttatgctcacacagccatcctctagtaagtttgtgaggcgtctgatgacgtgtgggaacttattggaaataacagtttgctgaaaagcatctcattgccagcggatcaacacctggtaacaggtgcctctggggccaaaagccaaggtttaacagaccctttgagattggttcaaacctgaattgttatggaaaatatttagtacctgctgatttggtagcaatacaaacactagttgtaaggcccacgaaggatgcccagaaggtacccgtaggtaacaagtgacactatggatctgatttggggccaactacctctatcttggtgagttggttaaaaaacgtctagtgggccaaacccaggggggatccctggttttcttttattgtatcactatcact

SEQ ID NO: 73 - DNA, 644 bp, Human parechovirus 4
  clone V2A polyprotein gene, partial cds.1
ggatagatagtccctttcccagccttgaggcggctggtcaataaaagcctcaaacgtaactaacatctaagaagatttgtaaaccctatgcctggtctccactattcgaaggcaacttgcaataagaagagtggaattaagacgcttaaagcatagtgatagttttcttttctaacccacattcgtgtggggtggcagatggcgtgccataactctaatagtgagataccacacttgtggaccttatgctcacacagccatcctctagtaagtttatgagacgtctggtgacgtgtgggaacttattggaaacaacattttgctgcaaagcatcctattgccagcggaacaacacctggtaacaggtgcctctggggccaaaagccaaggtttgacagaccctttaggattggttctaaacctgaaatgttgtggaaaatatttagtacctgctgatctggtagtaatgtaaacactagttgtaaggcccacgaaggatgcccagaaggtacccgtaggtaacaagtgacactatggatctgatctggggctgactacctctatcttggtgagttggttaaaaaacgtctagtgggccaaacccaggggggatccctggtttcttttattttaacacagctaat

SEQ ID NO: 74 - DNA, 647 bp, Human parechovirus
  strain USA/TN/2015-OB2038, complete genome.1
cttaggagagtccctttcccagccttgaggcggctggccaataaaagcctcaaatgtaacaaacatctaagaagattgtgtggaaccctatgcctggtctccactattcgaaggcagcttgcaataagaagagtggaattaagacgctcaaagcatagagacaattttcttttctaacccatacttgtatggggtggcagatggcgtgccataactctaatagtgagataccatgcttgtggaccttatgctcacacagccatcctctagtaagtttgtgagacgtctggtgacgtgtgggaacttattggaaacaacattttgctgcaaagcatcctattgccagcggaacaacacctggtaacaggtgcctctggggccaaaagccaaggtttaacagaccctttaggattggttctaaacctgaaatgttgtggaagacacttagtacctgccgatctggtagtaatacaaacactagttgtaaggcccacgaaggatgcccagaaggtacccgtaggtaacaagtgacactatggatctgatctggggccaactacctctatcttggtgagttggttaaaaaacgtctagtgggccaaacccaggggggatccctggtttccttttattttatcattactaat

SEQ ID NO: 75 - DNA, 648 bp, Human parechovirus 14
  clone V10C polyprotein gene, partial cds.1
ggaggatagagtccctttcccagccttgaggcggctggtcaataaatgcctcaaatgtaactaacatctaagattaacttagacaaccctatgcctggtctccgctagtcgaaggcgccttgcaataagacgagtggaacaaagacgcttaaagcatagtgaaaatatacatttctaacctgtggcctccacagggtggcagatggcgtgccataactctattagtgagataccacacttgtggaccttatgctcacacagccatcctctagtaagtttgtaagacgtctgatgacgtgtgggaagttattggaagtaacaatttgccgtaaggcatcctagagccagtggattaacacctggtaacaggtgcccctggggccaaaagccaaggtttaacagaccctttaggattggttcaaacctgggttgttatggaagatatttagtacctgctgatttggtagtaatacaaacactagttgtaaggcccacgaaggatgcccagaaggtacccgtaggtaacaagtgacactatggatctgatttggggttgactacctctgtcctggtgagtcaattaaaaaacgtctagtgggccaaacccaggggggatccctggtttccttttattttattacaaccatt

SEQ ID NO: 76 - DNA, 649 bp, Human parechovirus 1
  isolate 450343, complete genome.1
ctctaggagagtccctttcccagccctgaggcggctggtcaataaaagcctcaatcgtaactaacatctaagaatattatttcaaccccatgcctggtctccactagttgaaggcaacttgcaataaaatgagtggaaacaagacgcttaaagcatggtgtaaattaccttttctaacctacactttgtgtggggtggcagatggcgtgccataattctattagtgagataccacgcttgtggaccttatgctcacacagccatcctctagtaagtttgcaagatgtctggtgacgtgtgggaacttattggaaacaacattttgctgcaaagcatcctactgccagcggaataacacctggtgacaggtgcctctggggccaaaagccaaggtttaacagaccctttaggattggttttaaaacctgaaatgttgtggaagatacttagtacctgccgatctggtagtagtgcaaacactagttgtaaggcccacgaaggatgcccagaaggtacccgtaggtaacaagtgacactatggatctgatctggggccaagtacctctatcttggtgacttggttaaaaaacgtctagtgggccaaacccgggggggatccctggtttccttttattttaccaatgccact

SEQ ID NO: 77 - DNA, 651 bp, Human parechovirus 8
  clone V8D polyprotein gene, complete cds.1
ctggaggatagagtccctttcccagccttgaggcggctggtcaataagagcctcaaatgcaacaaacatctaagactattgagaacaaccctgtacctggtccccactagtcgaaggcatctagcaataagatgagtggaatatgggcgcttaaagtacagagtcaatgatcttttctagcctacgcttatgcgtggggtggcagatggcgtgccataaccctattagtgagataccacacttgtggaccttatgctcacacagccatcctccagttagtttgtaagatgtctggtgatgtgtgggaacttgttggaaataacattttgctgtaaggcattcattagccagcggataaaacacctggtaacaggtgcctctggggccaaaagccaaggtttaacagaccctaatgaattggttcaaacctggaatgttatggaagatacttagtacctgctgatctggtagtaatgcaaacactggttgtaaggcccacgaaggatgcccagaaggtacccgcaggtaacaagagacactgtggatctgatctggggctagttgcctctttaaggtgaactagttaaaaaacgtctagtgggccaaacccaggggggatccctggtttcctttattatttgaatgttcatc

SEQ ID NO: 78 - DNA, 653 bp, Human parechovirus 5
  strain CH-ZJ1, complete genome.1
atttgctgagtttctctaggagagtccctttcccagccttgaggtggctggttaataaaacctcaagcgtaactaacatctaagacaaatttatcaaccccatgcctggtccccactagtcgaaagcaacttgcaataagatgagtggaacaaggatgcttaaagcatggtgcaaataaacttttctaacccatttacttggggtggcagatggcgtgccataactctattagtgagataccacgcttgtggaccttatgctcacacagccatcctctagtaagtttgtaagacgtctgatgacgtgtgggaacttattggaatctacaatttgccgaaaggcatcctactgccagcggaacaacacctggtaacaggtgcccctggggccaaaagccaaggtttaacagaccctttaggattggtgaaaacctgaattgtagtggaaaatatttagtacctgctaatttggtagtagtgcaaacactagttgtaaggcccacgaaggatgcccagaaggtacccgtaggtaacaagtgacactatggatctgatctggggctggctacctctatcttggtgagtcggttaaaaaacgtctagtgggccaaacccaggggggatccctggtttccctttatatcattatagct

SEQ ID NO: 79 - DNA, 654 bp, Parechovirus A
  isolate HPeV-1/CMRHP48/CMR/2014 polyprotein gene,1
ttgttacagttgaggcttccctttcccagccctgaggcggctggtcaataaaagcctcaactgtaacaaacacctaagattattacaataaccccatgcctggtctccactagttgaaggcaacttgcaataaaataagtggaaacaagacgcttaaagcatggtgtgaattaacctttctaacctgcactttgtgtggggtggcagatggcgtgccataattctattagtgagataccacgcttgtggaccttatgctcacacagccatcctctagtaagtttgtgagacgtccggtgacgtgtgggaacttattggaaacaacattttgctgcaaagcatcctattgccagcggaataacgcttggtaacaagcgcctctggggccaaaagccaaggtttaacagaccctttaggattggttcggaacctggaatgttgtggaagatacttagtacctgctgatctggtagtaatgcaaacactagttgtaaggcccacgaaggatgcccagaaggtacccgtaggtaacaagtgacactatggatctgatctggggccaggcacctctatcttggtggcctggttaaaaaacgtctagtgggccaaacccgggggggatccccggtttccttttatttgttcaaagtcact

SEQ ID NO: 80 - DNA, 663 bp, Human parechovirus 5
  isolate 174Chzj98, complete genome.1
gtacattagatgcgtcatctgcaactttagtcaataaattacctccaatgtcattaccaacattccctaccttttcactaacacctaagacaacaagtacctatgcctggtctccactattcgaaggcaacttgcaataagaagagtggaattaagacgcttaaagcatagagctagttatcttttctaacccacaaagttttgtggggtggcagatggcgtgccataactctattagtgagataccatgcttgtggatcttatgctcacacagccatcctctagtaagttgataaggtgtctggtgatatgtgggaactcacatgaaccattaatttaccgtaaggtatcctatagccagcggaatcacatctggtgacagatgcctctggggccgaaagccaaggtttaacagaccctataggattggtttcaaaacctgaattgatgtggattgtgtatagtacctgttgatctggtaacagtgtcaacactagttgtaaggcccacgaaggatgcccagaaggtacccgtaggtaacaagtgacactatggatctgatctggggccagctacctctatcatggtgagttggttaaaaaacgtctagtgggccaaacccaggggggatccctggtttccttttacctaatcaaagccact

SEQ ID NO: 81 - DNA, 664 bp, Human parechovirus 1
  isolate 550163, complete genome.1
ccgcattgctgagcttctctaggagagtccctttcccagccttgaggcggctggtcaataaaagcctcaattgtaacaaacacctaagcttatcatacaagccccatgcctggtctccactagtcgaaggcaacttgcaataagatgagtggaaacaagacgcttaaagcatggtgtaaattagcttttctaacccacatattgtgtggggtggcagatggcgtgccataattctattagtgagataccacgcttgtggaccttatgctcacacagccatcctctagtaagtttgtgagacgtctggtgacgtgtgggaacttatcggaaacagtattttgctgcaaagcatcctattgccagcgggacaacacctggtaacaggtgcctctggggccaaaagccaaggtttaacagaccctttaggattggtttaaaacctgaaatattgtggaagatacttagtacctactaatctggtagtagtgcaaacactagttgtaaggcccacgaaggatgcccagaaggtacccgtaggtaacaagtgacactatggatctgatctggggccaggtacctctatcttggtgacctggttaaaaaacgtctagtgggccaagcccgggggggatccccggtttccttttattttatcaatgccact

SEQ ID NO: 82 - DNA, 667 bp, Human parechovirus 1
  strain 16-G10, complete genome.1
gtaataatcttagatgtttgttacagttgaggcttttattgaccagccgcctcagggctgggaaagggactcaactgtaacaaacatctaagattattacattaaccccatgcctggtctccactagttgaaggcaacttgcaataaaatgagtggaaacaagacgcttaaagcatggtgtaaattaattttctaacccacattaagtgtggggtggcagatggcgtgccataactctactagtgagataccatgcttgtggaccttatgctcacacagccatcctctagtaagtttgtgagacgtctggtgacgtgtgggaacttattggaaacaacaccttgctgtaaagcatcctattgccagcggaacaacacctggtaacaggtgcctctggggccaaaagccaaggtttaacagaccctttaggattggttctgaacctgagatgttgcggaagatatttagtacctgccgatctggtagtaatgcaaacactagttgtaaggcccacgaaggatgcccagaaggtacccgtaggtaacaagagacactatggatctgatctggggtcaggtacctctatcttggtgacctggttaaaaaacgtctagtgggccaaacccgggggggatccccggtttccttttactttatcaatgccact

SEQ ID NO: 83 - DNA, 668 bp, Human parechovirus 1
  isolate SH1, complete genome.1
taccccgacttgctgagctcctctaggagagcccctttcccagccttggggcggctggtcaataaaagcctcaaatgtaactaacatctaagatagattataaccaccctatgcctggtccccactagtcgaaagcacctggcaataagacgagtggaataaggacgcttaaagcatagtgttagcatacacttctaacttgtgattttcacaaggtggcagatggcgtgccataactctatcagtgagataccacgcttgtggaccttatgctcacacagccatcctctaataagtttgtaagacgtctgatgacgtgtgggaacttattggaaacaacaatttgctgcaaagcatcctactgccagtggactaacacctggtaacaggtgcccctggggccaaaagccaaggtttaacagaccctttaggattggtatatacctgagttgttgtggaaaatacttagtacctactgatttggtagccggacaaacactagctgtaaggcccacgaaggatgcccagaaggtacccgtaggtaacaagtgacactatggatctgatctggggtcgaccacccctatccaggtgggtcgattaaaaaacgtctagtgggccaaacccaggggggatccctggtttccttttattttatcacagtcact

SEQ ID NO: 84 - DNA, 669 bp, Human parechovirus 5
  gene for polyprotein, genomic RNA, strain1
taccccgacttgctgagcttctctaggagagcccctttcccagccctgaggcggctggtcaataaaagcctcacacgtaactaacatctaagacaatcttatacaaccttgtgcctggtccccaccagtcgaaggcatctagcaataagataggtggaacaaggacgcttaaagcacaaagacaattaacttttctaactcacaatttgttgtggggtggtagatggcgtaccataattctattagtgagataccacgcttgtggaccttatgctcatacagccatcctctagtaagtttgtaaggtgtctggtgatgtgtgggaacttattggaaacaacattttgccgcaaggcatccattagccagcggaataacacctggtaacaggtgcctctggggccaaaagccaaggtttaacagaccctaatggattgatttaaatctggaatgttgtggaatatatttagtacctgctgatctggtagcaatacaaacactagttgtaaggcccacgaaggatgcccagaaggtacccgtaggtaacaagtgacactatggatctgatctggggctggatacctctatcttggtgatccagttaaaaaacgtctagtgggccaaacccaggggggatccctggtttccttttattttattactgccatt

SEQ ID NO: 85 - DNA, 672 bp, Human parechovirus 3
  isolate 651689, complete genome.1
cgtcgggccttataccccgacttgctgagcttctctaggagagtccctttcccagccagaggtggctggtcaaataatacctactgtaactaaacatctaagaaataacaaccacacacctggtctccaccagccgaaagcaactagcaataaggtgggtggatatagacgcttaaagtgtgttgtgcattttcttttctagcctgtgttttacacagggtggcagatggcgtgccataactctaatagtgagataccacgcttgtggaccttatgctcacacagccatcctctagtaagtttgtaagacgtctgatgacgtgtgggaacttgttggaaatagcagtttgctgcaaagcatcccattgccagcggatcaacatctggtgacagatgcctctggggccaaaagccaaggtttaacagaccccttgggattggttcaaacctgaactgctatggaaagcacttagtacctgctgatttggtagtaatgcaaacactagttgtaaggcccacgaaggatgcccagaaggtacccgtaggtaacaagtgacactatggatctgatctggggccaactacttctatctaagtgagttggttaaaaaacgtctagtgggccaaacccaggggggatccctggtttcctctcaattttaaacagtcact

SEQ ID NO: 86 - DNA, 673 bp, Avisivirus AVE052/AsV
  complete genome.1
gagctaatggggtccctatcttcatagccaagatccatagtggctcaggaaatagaggggggttcccagggtggattttccgaatcttagatttcggatatccgccttgggacaccccctttccccagccatgggttaaatggcccttcaccaggttaggtgctgtctaggcttccagtaaagaagtcactcgagctacgaacaaatcctaagagggaatggtggttagccccgtccactgggtgtctttcacccactttcagtggatcaatccaccccaactcccccctctatttcctgagccactatggatcttggctatgaagatagggaccccattagctccagtgccaagggatctcccccctcgtaagaggtgcccttgggcccaaaaggctagttggcaaggtgaagtgaaggaagctgctaacgtggtgaccttaagcggatcctgaagctgaccttggagtgaaaccctattggatggctgcgtgaagttgtggaggtggaaatggagaaagttggccgcttgtgagtagatgcccagaaggcataaggctgatctggggccagtgactataccgttccggtaaacctggtataaaaaccatgaaagcaaacgggttaaatttctctatttttattttctcttactgcagtgactacaggcaaa

SEQ ID NO: 87 - DNA, 674 bp, Human parechovirus 1
  isolate SH401, complete genome.1
ggccttataccccgacttgccgagtttctctaggagagtccctttcccagccgtgaggtggctggtcaataaaaacctcaaatgtaactaacatcaaagaaaaatcactcaaccccatgcctggcccccgctagtcgaaagcaacttgcaataagatgagtggaccaagggcgcttaaagcatggtgtcagcaatcttttctaacccatgtttcacatggggtggcagatggcgtgccataactctattagtgggataccacccttgtggaccttatgcccacacagccatcctctagtaagtttgtatgacgtccgatgacgtgtgggaacttattggaagcaacaatttgccgaaaggcatcctattgccagcggattaacacctggtaacaggtgcccctggggccaaaagccaaggtttaacagaccctttaggattggtttaaacctgaattgttgtggaagatatttagtacctgctgatttggtagtaatgcaaacactagttgtaaggcccacgaaggatgcccagaaggtacccgtaggtaacaagtgacactatggatctgatctggggctgactaccactatcctggtgagtcagttaaaaaacgtctagtgggccaaacccaggggggatccctggtttctttttattttataactgtcaat

SEQ ID NO: 88 - DNA, 677 bp, Human parechovirus 3
  isolate CHW014 polyprotein gene, complete cds.1
ggccgtcgggccttataccccgatttgctgagcttctctaggagagcccttttcccagccagaggtggctggttaaacaatacctattgtaacaaaacatctaagacataacaaccgtacacctggtctccactggccgaaggcaactagcaataaggtaggtgggttcagacgcttaaagtgtgttgtatatattcttttctaacctgtgttttacacagggtggcagatggcgtgccataaccctaatagtgagataccacgcttgtggaccttatgctcacacagccatcctctagtaagtttgtaagacgtctgatgacgtgtgggaacttgttggagataacattttgctgcaaagcatcccattgccagcggatccacatctggtaacagatgcctctggggccaaaagccaaggtttaacagaccctttgggattggttcaaacctgaattgttatggaagacatttagtacctgctgatttggtagtagtgcaaacactagttgtaaggcccacgaaggatgcccagaaggtacccgtaggtaacaagtgacactatggatctgatctggggccaactacctctatctaggtgagttggttaaaaaacgtctagtgggccaaacccaggggggatccctggtttccttttttaaatttgaataatcact

SEQ ID NO: 89 - DNA, 679 bp, Marmot sapelovirus 2
  strain HT6, complete genome.1
gggaaatacggggggggattacccccctcccgtatttccccctgttgcccgggggtagtgaacgatggatctacggatcctttgttcacagggccaaggttcaagcccacttttgtgagaagcatgctttactaggctatgggttgagtggcccataggcaaccctatgaagaggctacactcactacatccgccaacaggcccaggcgtatgtgggcctataagaaatgtacgttcgtccgcttatggtgcctaatccataggcatctaggacaagtacttctgtttccccggtcacgaggaatatgctgtacccacggcagaagccagacatgatcgttacccgactccgaactgtgcgaaacctagtaccttcaagtgaaacagagatcattgatccggggtgaccctgaccccagaaactcatgatgggtgtcgccgttccgacaggggagaccctgggcgtcgccgcgctggcatgagggcccattagggcatgatcaatgcggaccttgaggcgaagagtctagtgcgcttcggtttattcctccaggcccctgaatgcggctaatcctaaccccggagcgtatcacaccaatccaggtgctggtgcgtcgtaatgcgtaagtctgggatggaaccgactactttgggtgtcctgtgtttctaatttctcttg

SEQ ID NO: 90 - DNA, 680 bp, Human parechovirus 1
  isolate K150-93, complete genome.1
cgtcgggccttacaccccgacttgctggacttctctaggagagtccctttcccagccctgaggcggctggtcaataaaagcctcaattgtaacaaacatctaagcttattacaataaccccatgcctggtctccactagttgaaggcaacttgcaataaaatgagtggaaatgagacgcttaaagcatggtgtaaactaacttttctagcccacactttgtgtggggtggcagatggcgtgccataattctaatagtgggataccacgcttgtggaccttatgctcacacagccatcctctagtaagtttgtgtgacgtctggtgacgtgtgggaacttattggaaacaacattttgctgtaaagcatcctattgccagcggaacaacgcctggtaacaggtgcctctggggccaaaagccaaggtttagcagaccctctaggattggtttaaaacctgaaatgttgtggaagatacttagtacctaccgatctggtagtaatgcagacactagttgtaaggcccacgaaggatgcccagaaggtacctgtaggtaacaagcgacactatggatctgatctggggccaggtacctctatcttggtgacctggttaaaaaacgtctagtgggccaaacccgggggggatccccggtttccttttattttatcaatgccact

SEQ ID NO: 91 - DNA, 680 bp, Parechovirus A
  strain NIG13194, complete genome.1
cgtcgggccttataccccgacttgctgagcttctcgaggagagtcccttttccagccctgaggcggctggtcaataagagcctcaatcgtaacgaacatctaagactgtcaaatcaaccctatgcctggtctccactattcgaaggcaactagcaataagaagagtggatcaatagacgcttaaagcatagtgtacgtaaacctttctaacttgtgttatacacaaggtggcagatggcgtgccataattctattagtgagataccacgcttgtggaccttatgctcacacagccatcctctagtaagtttgtaaggtgtctgatgacgtgtgggaacttattggaaataatagtttgctgcaaagcatcctactgccagcggattaacatctggtaacaggtgcctctggggccaaaagccaaggtttaacagaccctttaggattggttcaaacctgaactattatggaagatacttagtacctgctgatttggtaacagtgcaaacactagttgtaaggcccacgaaggatgcccagaaggtacccgtaggtaacaagtgacactatggatctgatctggggctgactacctctatcttggtgagtcagtcaaaaaacgtctagtgggccaaacccaggggggatccctggttttcttttattttatctcttgcaat

SEQ ID NO: 92 - DNA, 681 bp, Human parechovirus 1
  strain KVP6 polyprotein gene, complete cds.1
cgtcgggccttataccccgacttgctgagcttctccaggagagcccctttcccagccctgaggcggctggtcaataaaagcctcatctgtaacaaacatctaagattatgacattaaccccatgcctggtctccactagttgaaggcaacttgcaataaaatgagtgggaacaagacgcttaaagcatggtgtaaatttgcttttctaacccacactttgtgtggggtggcagatggcgtgccataattctattagtgagataccacgcttgtggaccttatgctcacacagccatcctctagtaagttcgtgagatgtctggtgacgtgtgggaacttattggaaacaacattttgctgaaaagcatcctatcgccagcggaacaacacctggtaacaggtgcctctggggccaaaagccaaggtttaacagaccctttaggattggtttaaaacctggaatgttgttgaagatacttagtacctgccgatctggtaatagcacaagcactagttgtaaggcccacgaaggatgcccagaaggtacccgtaggtaacaagtgacactatggacctgatctggggctaggtacctctatcttggtgacctggttaaaaaacgtctagtgggccaaacccgggggggatccccggtttccttttaatttcatcaatgccatt

SEQ ID NO: 93 - DNA, 683 bp, Human parechovirus 5
  strain BR/53/2006 polyprotein gene, complete1
tggccgtcgggccttataccccgacttgctgagtttctctaggagagtccctttcccagccttgaggtggctggtcaataaaaacctcaactgtaactaacatctaagctgattttatagataccccatgcctggtccccactagtcgaaagcacctggcaataagatgagtggaaaagggcgcttaaagcatggtgttagtatacatttctaacctgtgactatcacggggtggcagatggcgtgccataactctattagtgagataccacgcttgtggaccttatgctcacgcagccatcctctagtaagcttgcaaggcgtctgatgacgtgtgggaactaattggaaatgacagtttgctgctaagcatcctattgccagcggatcaacacctggtaacaggtgcctctggggccaaaagccaaggtttaacagaccctttaggattggttcaaacctgaactgttgtggaagattctcagtacctgctaatttggtagttaggcaagcactagttgtaaggcccacgaaggatgcccagaaggtacccgtaggtaacaagtgacactatggatctgatctggggccagctacctctttcatggtgagttggtcaaaaaacgtctagtgggccaaacccaggggggatccctggtttcctttattttatcatagtcatt

SEQ ID NO: 94 - DNA, 692 bp, Human parechovirus 1
  strain 2-B9-TW, complete genome.1
agagcttggccgtcgggccttataccccgacttgctgagcttctctaggagagtccctttcccagccctgaggcggctggtcaataaaagcctcaattgtaacgaacacctaagacgataatgataaccctatgcctggtctccactattcgaaggcaccttgcaataagaagagtgggctcaagacgcttgaagcatagagtgcgttttcttttctaatccacacccatgtggagtggcagatggcgtgccataactctattagtgagataccatgcttgtggaccttatgctcacacagccatcctctagtaagtttgtaagacgtctggtgacgtgtgggaacttattggaaacaacattttgctgtaaagcatcctactgccagcggaacaacacctggtaacaggtgcctctggggccaaaagccaaggtttaatagaccctttaggattggtttaaaacctgaaatgttgtggaaaatatttagtacctgccaatctggtagtaatgcaaacactagttgtaaggcccacgaaggatgcccagaaggtacccgtaggtaacaagagacactatggatctgatctggggccagctacctctatcttggtgagttggttaaaaaacatctagtgggccaaacccaggggggatccctggtttccttttattttacctcaaatactatc

SEQ ID NO: 95 - DNA, 695 bp, Parechovirus A
  strain HPeV-1/RUS/Novosibirsk/NS12-N3567/2012,1
tctcctagagagcttggccgtcgggccttataccccgacttgctgagtttctctaggagagtccctttcccagccttgaggcggctggtcaataaaagcctcaaatataacgaacatctaagacaattaaacataccctatgcctggtctccactattcgaaggcaacttgcaataaggagagtggaattaagacgcttaaagcatggagacagtttccttttctaacccacattagtgtggggtggcagatggcgtgccataactctaatagtgagataccacgcttgtggaccttatgctcacacagccatcctctagtaagtttgcaagacgtctggtgacgtgtgggaacttattggaaacaacattctgctgtaaagcatcctaatgccagcggaacaacacctggtaacaggtgcctctggggccaaaagccaaggtttaacagaccctttgggattggttcaaacctggaatgttgtggaaaatacttagtacctgccgatctggtagtagtgcaaacactagttgtaaggcccacgaaggatgcccagaaggtacccgtaggtaacaagtgacactatggatctgatctggggctggatacctctatcttggtgattcagttaaaaaacgtctagtgggccaaacccaggggggatccctggtttctttttattttataatgtcact

SEQ ID NO: 96 - DNA, 696 bp, Human parechovirus 1
  isolate 164Chzj909, complete genome.1
gaaccattctacaacttctttagcggctttccgtgtttggtttgcaaccttagttgcaaaacatttgaaaacacttggccttgggtcaataaaagcctcaactgtaacaaacatctaagattattacattaaccccatgcctggtctccactagttgaaggcaacttgcaataaaatgagtggaaacaagacgcttaaagcatggtgtaaattaacttttctaacccacattttgtgtggggtggcagatggcgtgccataattctactagtgagataccacgcttgtggaccttatgctcacacagccatcctctagtaagtttgtgagatgtctggtgacgtgtgggaacttattggaaacaacattttgctgtaaagcatcctatcgccagcggaacaacacctggcaacaggtgcctctggggccaaaagccaaggtttaacagaccctttaggattggttttaaaacctgaaatgttgtggaagatacttagtacctgccgatctggtagtaatgcaaacactagttgtaaggcccacgaaggatgtccagaaggtacccgtaggtaacaagtgacactatggatctgatctggagctaggtacctctatcttggtgacctggttaaaaaacgtctagtgggccaaacccgggggggatccccggtttccttttattttatcaatgccaat

SEQ ID NO: 97 - DNA, 696 bp, Human parechovirus 5
  strain CT86-6760, complete genome.1
tcctagagagcttggccgtcgggccttatacccgacttgctgagtttctctaggagagtccctttcccagccctgaggcggctggtcaataaaagcctcaaatgtaactaacatctaagacatttatgattcaaccccatgcctggtccccactagtcgaaagcatctagccataagatgagtggactaaggacgcttaaagcatggagccaacaaccatttctaacccatgttttgcatggggtggcagatggcgtgccataactctactagtgggataccacgcttgtggaccttatgcccacacagccatcctctagtaagtttgtaagacgtctgatgacgtgtgggaaaacactagaaatattaacttgctgtaaagcatcctactgccagcggaatcacatctggtaacagatgcctctggggccaaaagccaaggtttagcagaccctttaggattggttcaatacctgagttaatatggaaagtgcttagtacctgctgacttggtagtagtgcaaacactagttgtatggcccgcgaaggatgcccagaaggtacccgtaggtaacaagtgacactatggatctgatctggggctggatacctctatcttggtgatccagttaaaaaacgtctagcgggccaagcccaggggggatccctggtttccctatttttattattatcact

SEQ ID NO: 98 - DNA, 697 bp, Parechovirus A
  strain HPeV-5/RUS/Novosibirsk/NS12-N3863/2012,1
tctcctagagagcttggccgtcgggccttataccccgacttgctgagcttctctaggagagcccctttcccagccttgaggcggctggtcaataaaagcctcaaacgtaactaacacctaagataaatctcataaccctatgcctggtccccactagtcgaaagcacctagcaataagatgagtggaccatggacgcttaaagcatagtgccaatatacatttctaacctgtggattcccatggggtggcagatggcgtgccataattctattagtgggataccacgcttgtggatcttatgcccacacagccatcctctagtaagtttgtaaggcgtctgatgacgtgtgggaacttatcggaaacaacaatttgctgcaaagcatcctattgccagcggacaaacacctggtaacaggtgcctctggggccaaaagccaaggtttaacagaccctttaggattggttcttacctggattgttgtggaaggtacttagtacctgctgatttggtagttggacaaacactagttgtaaggcccacgaaggatgcccagaaggtacccgtaggtaacaagggacactatggatctgatttggggtcacctacctctatcttggtgaggtgattaaaaagcgtctagtgggccaaacccaggggggatccctggtttccttttattttacacagacact

SEQ ID NO: 99 - DNA, 701 bp, Human parechovirus 3
  strain VGHKS 080217-2013, complete genome.1
ttttgaaaggggtctcctagagagcttggccgtcgggccttataccccgatttgctgagcttctctaggagagcccctttcccagccagaggtggctggcaaaataatacctactgtaacaaaacatctaagatgcaataaccacacacctggtttccactggccgaaggcaactagcaataaggcaggtgggttcagacgcttaaagtgtgttgtaaatattcttttctaacctgtgttctacacagggtggcagatggcgtgccataactctaatagtgagataccacgcttgtggaccttatgctcacacagccatcctctagtaagtttgtaagacgtctgatgacgtgtgggaacttgttggaaataacagtttgctgcaaagcatcccactgccagtggattcacatctggtaacagatgcctctggggccaaaagccaaggtttaacagaccctttgggattggttcaaacctgaactgttatggaagacacttagtacctgctgatttggtagtaatgcaaacactagttgtaaggcccacgaaggatgcccagaaggtacccgtaggtaacaagtgacactatggatctgatctggggccggctacctctatctaggtgagttggttaaaaaacgtctagtgggccaaacccaggggggatccctggtttctttttactttgagtagtcatt

SEQ ID NO: 100 - DNA, 702 bp, Human parechovirus 2
  complete genome.1
tttgaaaggggtctcctagagagcttggccgtcgggccttacaccccgacttgctgagtttctctaggagagtccctttcccagccagaggtggctggtcaaacaataccaaacgtaactaaacatctaagataacatagccctatgcctggtctccaccagttgaaggcatcttgcaataaaatgggtggattaagacgcttaaagcatggagtcaattatcttttctaactagtgatcttcactgggtggcagatggcgtgccataactctattagtgggataccacgctcgtggatcttatgcccacacagccatcctctagtaagtttgcaaggtgtctgatgaggcgtgggaacttattggaaataattacttgctgcgaagcatcctactgccagcggatcaacacctggtaacaggtgcccctggggccaaaagccacggtttaacagaccctttaggattggttaaaacctgagtaattatggaagatacttagtacctaccaacttggtaacagtgcaaacactagttgtaaggcccacgaaggatgcccagaaggtacccgcaggtaacaagagacactgtggatctgatctggggccacctacctctatcctggtgaggtggttaaaaaacgtctagtgggccaaacccaggggggatccctggtttccttattttagtgtaaatgtcatt

SEQ ID NO: 101 - DNA, 705 bp, Human parechovirus 8
  isolate BR/217/2006, complete genome.1
gaaaggggtctcctagagagcttggccgtcgggccttataccccgacttgctgagtttctctaggagagtccctttcccagccctgaggcggctggataataaaggcctcacatgtaacaaacatctaagacaaaataatttgccttgcacctggtccccactagttgaaggcatctagcaataagatgagtggaacaaggacgcttaaagtgcaatgatagttatcttttctaacccactatttatagtggggtggtggatggcgcaccataattctaatagtgagataccacgcttgtggaccttatgctcacacagccatcctctagtaagtttgtgagacgtctggtgacgtgtgggaacttactggaaacaatgctttgccgtaaggctttcattagccagcggaccaccacctggtaacaggtgcctctggggccaaaagccaaggtttaatagaccctaatggaatggttcaaacctggagcattgtggaaagtacttagtacctgctgatctggtagtaatgcaaacactagttgtacggcccacgaaggatgcccagaaggtacccgtaggtaacaagtgacactatggatctgatctggggccaactacctctatcttggtgagttggttaaaaaacgtctagtgggccaaacccaggggggatccctggtttccttttattttactttgtcaat

SEQ ID NO: 102 - DNA, 706 bp, Potamipivirus A
  isolate TSPV, complete genome.1
cttattttataagtttcttgcagttggcctttttcaacgtcgtggctgacgttaaaaagccacaattccacttaccttttaccttttatgtttaatgtttgttagttttgtgatctttaacaaatagatctaaataatttgttggtaaccaatctcggatgtttcggctgcattgtagtttatttatttcattttagttgtaggtggccactacgtcctggaatcatacatggtaacatgtacctcggcggttatccactattacgctaatctaagaatatttaaatgaaaatgtaagtgttacggctgactttgggcctgatagttaaatgctcgcactgacagatagtaccctcctttaggatcgattctgttacatgggatccattttggtgccccactgattcaacctctttgttgaaaaagagttagcatactacaaattttccaaacaaaaaccctttttaatgactacaacttatgattttatgaattttactgctcttgaaaaagatattttgacattgatcgctgtactgtttcagacattcattgcatccatttttgttggctactcctcacaaactcaaaacttttccacacgagaaaccttgtttattgaattttgcctttatattttggaacttgttgttggatttattgtttgcttaattattgacctcacacctgttttaaacactacaat

SEQ ID NO: 103 - DNA, 707 bp, Hepatovirus A
  isolate HAV/Human/CMRHP6/CMR/2014 polyprotein gene,1
ggtctctggagagttccggagtccctcttggaggtccatggtgaggggacctgatacctcaccgccgtttgcctaggctataggctatttttccctttcccttttccctgttttgtgtaaatattaattcctgcaggctcagggttctttaatctgtttctctataagaacactcattttcacgctttctgtctgctttcttccagggctctccccttgccctaggctctggccgttgcgcccggcggggtcaactccatgattagcatggagctgtaggagtctaaattggggacgcagatgtttgggacgtcaccttgcagtgttaacttggctctcatgaagctctttgatcttccacaagaggtaggctacgggtgaaacctcttaagctaatacttctatgaagagatgctttggatagggtaacagcggcggatattggtgagttgttaagacaaaaacctttcaacgccggaggactggctctcatccagtggatgcattgagtggattgtttgtcagggctgtctctaggcttaatctcagacctctctgcgcttagggcaaacattacttggccttaaatgggattctgtgagaggggatccctccattgactgctggacttttctttggggccttaggtagtgtttgcctctgaggtactcaggggcatttaggtttttcctcactctcaaataatt

SEQ ID NO: 104 - DNA, 707 bp, Human parechovirus 3
  strain BJ-C3174, complete genome.1
tttgaaaggggtctcctagagagcttggccgtcgggccttataccccgacttgctgagtctctctaggagagtccctttcccagccttgaggcggctggacaataaaagcctcaactgtaacaaacacctaagattattatattaaccccatgcctggtctccactggttgaaggcaacttgcaataaaatgagtggaaattagacgcttaaagtgtgttgtacatattcttttctaacctgtgttctacacagggtggcagatggcgtgccataactctaatagtgagataccacgcttgtggaccttatgctcacacagccatcctctagtaagtttgtaagacgtctgatgacgtgtgggaacttgttggaaataacagtttgctgcaaggcatcccactgccagcgggttcacatctggtaacagatgcctctggggccaaaagccaaggtttaatagaccctttgggattggttcaaacctgaactgttatggaagacatttagtacctgctgatttggtagtaatgcaaatactagttgtaaggcccacgaaggatgcccagaaggtacccgtaggtaacaagtgacactatggatctgatctggggccggctacctctatctaggtgagttggttaaaaaacgtctagtgggccaaacccaggggggatccctggtttctttttaatttgagtagtcact

SEQ ID NO: 105 - DNA, 708 bp, Human parechovirus 1
  complete genome.1
tttgaaaggggtctcctagagagcttggccgtcgggccttataccccgacttgctgagtttctctaggagagcccttttcccagccctgaggcggctggtcaataaaagcctcaaacgtaactaacacctaagaagatcatgtaaaccctatgcctggtctccactattcgaaggcaacttgcaataagaagagtgggatcaagacgcttaaagcatagagacagttttcttttctaacccacatttgtgtggggtggcagatggcgtgccataactctaatagtgagataccacgcttgtggaccttatgctcacacagccatcctctagtaagtttgtgagacgtctggtgacgtgtgggaacttattggaaacaacattttgctgcaaagcatcctactgccagcggaaaaacacctggtaacaggtgcctctggggccaaaagccaaggtttaacagaccctttaggattggttctaaacctgagatgttgtggaagatatttagtacctgctgatctggtagttatgcaaacactagttgtaaggcccatgaaggatgcccagaaggtacccgtaggtaacaagtgacactatggatctgatttggggccagatacctctatcttggtgatctggttaaaaaacatctaatgggccaaacccgggggggatccccggtttcctcttattctatcaatgccact

SEQ ID NO: 106 - DNA, 708 bp, Human parechovirus 4
  isolate K251176-02, complete genome.1
tttgaaaggggtctcctagagagcttggccgtcgggccttataccccgacttgctgagcttctctaggagagtccctttcccagccctgaggcggctggttaataatagcctcaagcgtaactaatatctaagaagattgtgcaaaccctatgcctggtctccactattcgaaggcaacttgcaataagaagagtggaatcaagacgcttaaagcatagagacagtattcttttctaacccacattactgtggggtggcagatggcgtgccataattctaatagtgagataccacgcttgtggaccttatgctcacacagccatcctctagtaagtttgtgagacgtctggtgacgtgtgggaacttattggaaacaacattttgctgcaaagcatcctactgccagcggaacaacacctggtaacaggtgcctctggggccaaaagccaaggtttaatagaccctttaggattggttctaaacctgagatgttgtggaaaatatttagtacctgctgacctggtagtaatacaaacactagttgtaaggcccacgaaggatgcccagaaggtacccgtaggtaacaagtgacactatggatctgatctggggccaaccacctctatcttggtgggttggttaaaaaacgtctagtgggccaaacccaggggggatccctggtttccttttattttatcatatttaat

SEQ ID NO: 107 - DNA, 708 bp, Human parechovirus 4
  complete genome, genomic RNA, strain T75-4077.1
tttgaaaggggtctcctagagagcttggccgtcgggccttataccccgacttgccgagtttctctaagagagtccctttcccagccttgaggcggctggtcaataaatgccttaaatgtaactaacacctaagattgctttaacaaccctatgcctggtctccactagttgaaggcatctagcaataaaatgagtggaatcaagacgcttaaagcatagtgccagcatgcatttctaacctgcagtttttgcagggtggcagatggcgtgccataattctattagtgagatactacgcttgtagatcttatgctcacacagccatcctctagtaagtttgtaagatgtctgatgacgtgtgggaacttattggaaataacaccttgctgtaaagcatcttattgccagcggaacaacacctggtaacaggtgcctctggggccaaaagccaaggtttaacagaccctttaagattggttcaaacctgaggtgttatggaaaatattcagtacctgctgatttggtagtaatgcaaacactagttgtaaggcccacgaaggatgcccagaaggtacccgtaggtaacaagtgacactatggatctgatctggggccaactacctctatcttggtgagttggttaaaaaacgtctagtgggccacacccaggggggatccctggttttcttttattacacaattgtcatt

SEQ ID NO: 108 - DNA, 709 bp, Human parechovirus 1
  isolate BNI-788St, complete genome.1
tttgaaaggggtctcctagagagcttggccgtcgggccttataccccgacttgctgagctcctctaggagagtccctttcccagccttgaggcggctggtcaataaaagcctcaattgtaacaaacatctaagattattatattaaccccatgcctggtctccgttagttgaaggcaacttgcaataaaatgagcggaaacaagacgcttaaagcatggtgtaaattaacttttctaacccacatcttgtgtggggtggcagatggcgtgccataactctattagtgagataccacgcttgtggaccttatgctcacacagccatcctctagtaagtttgtgagacgtctggtgacgtgtgggaacttattggaaacaacattttgctgtaaagcatcctattgccagcggaacaacacctggtaacaggtgcctctggggccaaaagccaaggtttaacaaaccctttaggattggttctaaacctgagatgttgtggaagatacttagtacctaccgatccggtagtagtgcaaacactagttgtaaggcccacgaaggatgcccagaaggtacccgtaggtaacaagcgacactatggatctgatctggggccaggtacctctatcttggtgatctggttaaaaaacgtctagtgggccaaatccgggggggatccccggtttccttttattttatcaatgccact

SEQ ID NO: 109 - DNA, 709 bp, Human parechovirus 1
  strain BJ-37359, complete genome.1
tttgaaaggggtctcctagagagcttggccgtcgggccttataccccgacttgctgagtctctctaggagagtccctttcccagccttgaggcggctggacaataaaagcctcaactgtaacaaacacctaagattattatattaaccccatgcctggtctccactggttgaaggcaacttgcaataaaatgagtggaaataagacgcttgaagcatggtgcaaatctacttttctaacccacactttgtgtggggtggcagatggcgtgccataattctattagtgagataccacgcttgtggaccttatgctcacacagccatcctctagtaagtttgtgaggcgtctggtgacgtgtgggaacttattggaagcaacattttgctgtaaagcatcctatcgccagcggaacaacgcctggtaacaggtgcctctggggccaaaagccaaggtttaacagaccctttaggattggtttaaaacctgaaatgttgtggaaaatacttagtacctaccgacctggtagtaatgcaaacactagttgtaaggcccacgaaggatgcccagaaggtacccgtaggtaacaagtgacactatggatctgatctggggccaggtacttctatcctagtgacctggttaaaaaacgtctagtgggccaaacccgggggggatccccggtttccttttattttactaatgctatt

SEQ ID NO: 110 - DNA, 709 bp, Human parechovirus 4
  genomic RNA, complete genome, strain:1
tttgaaaggggctctcctagagagcttggccgtcgggccttacaccccgacttgctgagcttctctaggagagcccctttcccagccttgaggcggctggtcaataaaagcctcacatataaataacatctaagaatagcttcataaccctacacctggtccccactagtcgaagacaacttgtaataagatgagtggaacaaggacgcttaaagtgtagtgaaaatattcctttctaacccatgcacctcatggggtggcagatggcgtgccataactctaatagtgagataccatgcttgtggaccttatgctcacacagccatcctctagtaagtttgtgagatgtccgatgacgtgtgggaacttattggaaacaacaatttgccgtaaggcatcctaatgccagcggattcacacctggtaacaggtgcccctggggccaaaagccaaggtttaacagacccgttaggattggtttaaacctgaattgttgtgaaagatactcagtacctgctgatttggtagtaatacaaacactagttgtaaggcccacgaaggatgcccagaaggtacccgtaggtaacaagtgacactatggatctgatctggggccaactacctctatcttggtgagttggttaaaaaacgtctagtgggccaaacccgagggggatcctcggtttctatttattttatatttgctaac

SEQ ID NO: 111 - DNA, 709 bp, Human parechovirus 6
  genomic RNA, complete genome,strain:1
tttgaaaggggtctcctagaaagcttggccgtcgggccttataccccgacttgccgagtttctctaggagagtccctttcccagccctgaggcggctggtcaataaaagcctcaaacgtaactaacatctaagattgatttaataacaccatgcctgatccccaccagtcgaagacaactagtaataagacgggtggaataaggatgcttaaagcatggcgtaaatattcttttctaacccatgatttcatggggtggcagatggcgtgccataactctattagtgagataccacgcttgtggaacttatgctcacacagccatcctctagtaagtttgtgagatgtctaatgacgtgtgggaacttattggaagcaacaatttgccgtacggcatcctactgccagcggattcacacctggtaacaggtgcccctggggccaaaagccaaggtttaacagaccctttaggattggttaaaacctgaattgttgtggaagatactcagtacctgctgatttggtagtaatgcaaacactagttgtaaggcccacgaaggatgcccagaaggtacccgtaggtaacaagtgacactatggatctgatctggggccaactacttctatcatggtgagttggttaaaaaacgtctagtgggccagacccaggggggatccctggtttccttttttatttcactacagccaat

SEQ ID NO: 112 - DNA, 709 bp, Unknown
  Description of Unknown: polyprotein [echovirus 22 EV22, Harris, Genomic RNA Complete, 73391 sequence
tttgaaaggggtctcctagagagcttgcctagggccttataacccgacttgctgagcttctataggaaaaaaccctttcccagccttggggtggctggtcaataaaaacccccatagtaaccaacacctaagacaatttgatcaaccctatgcctggtccccactattcgaaggcaacttgcaataagaagagtggaacaaggatgcttaaagcatagtgtaaatgatcttttctaacctgtattatgtacagggtggcagatggcgtgccataaatctattagtgggataccacgcttgtggaccttatgcccacacagccatcctctagtaagtttgtaaaatgtctggtgagatgtgggaacttattggaaacaacaatttgcttaatagcatcctagtgccagcggaacaacatctggtaacagatgcctctggggccaaaagccaaggtttgacagacccattaggattggtttcaaaacctgaattgttgtggaagatattcagtacctatcaatctggtagtggtgcaaacactagttgtaaggcccacgaaggatgcccagaaggtacccgcaggtaacaagagacactgtggatctgatctggggccaactacctctatcaggtgagttagttaaaaaacgtctagtgggccaaacccaggggggatccctggtttccttttattgttaatattgacatt

SEQ ID NO: 113 - DNA, 712 bp, Human parechovirus 1
  strain USA/TN/2016-23032, complete genome.1
cacatgagttatctgatgtcctctagcccatgttggtgtccactcatgtgtttccaatctaaccagtctaggagagtccctttcccagccttgaggcggctggtcaataaaaacctcaattgtaacaaacatctaagattattacattaaccccatgcctggtctccactagttgaaggcaacttgcaataaaatgagtgggaacaagacgcttaaagcatggtgtgaattaattttctaacccacatcgagtgtggggtggcagatggcgtgccataactctactagtgagataccatgcttatggaccttatgctcacacagccatcctctagtaagtttgtgaggcgtctggtgacgtgtgggaacttattggaaacaacaccttgctgtaaagcatcctattgccagcggaacaacacctggtaacaggtgcctctggggccaaaagccaaggtttaacagaccctttaggattggttttgaacctgagatgttgcggaagatatttagtacctgccgatctggtagtaatgcaaacactagttgtaaggcccacgaaggatgcccagaaggtacccataggtaacaagtgacactatggatctgatctggggccaggtacctctatcttggtgacctggttaaaaaacgtctagtgggccaaacccgggggggatccccggtttccttttactttattaatgccact

SEQ ID NO: 114 - DNA, 713 bp, Rosavirus C
  strain NCGX12IN polyprotein gene, complete cds.1
ggaccggcgctcacccgtttcgacgagtgaccgcctaggattctctctgcccttgctttggacgcccgccacggcgttaaactggcacttcccctcacccctaccctgtaactaagtttgcacctcgcccagacaggctgctaagacgcttgttgctacagtatgtctggatccgcgagttctccttaagaaatcttttccacctccgccggtgcctatgccggtcgagacgggttaggaccccgttggctcaggccagagacaatcggtagtagtctttctactctcgcccatgccggttgtcacaccctcactagtcttaccaaggttgtaaattgtctgtgaaagctttacatgaactctgctgtgttgtagcgatggatgtgttgtgagcggatttccccacgtggtaacacgtgcctctcagaccaaaagtcacggtgttaacagcacccgcacatctggctgccttcccccgcagcccacagctttgtgattgtttagttagtaacggaacatttggcaatcctgaactaaggttagtgcaacggctaaggatgccctgaaggtacccgcaggtaacgttaagacactgtggatctgatcaggggccctcggtgcgcgtgctttacacgcgtagccagggttaaaaaacgtctatgccgtttcccccccgggagggggggttccttacccccatcacaattggcatt

SEQ ID NO: 115 - DNA, 717 bp, Penguin megrivirus
  isolate KGI-Bel-P5/2015, complete genome.1
gtttgggggggcgttcccccaggggctcctttccggtgtgaggcttggcaacctcatatcgttactctgccgaccagtctgggtcgtgtggccacacaatgggattcgttctgttgtgtagagtcacatggcattactgggctgatcggtggggatccgttgccacccctaaacccttacatttactggactgcttttcttggccccggaatgattcgctcacccgcgatgaggactgttgttcttattatggcaggattacgcgtctggtccgcgtaaggactaattcctatgtttatacgttactaccttgttctgaacggtgggcgccaccccgcctagtaggatcctggcttatcgtgtagacctctagggaccacattagctagagtgtaggctgctatggatggagtagtgacccctttttgggtatcactctctaagactccggaatgtgtcatagtacgctggaaatccttacttgtttttccatgagggggaggtggtgctgaaatattgcaagccacccctcggttaaaacagtttggtgccgcttatgccatattaccgccccttgtagttgggctgtttttgcagctccgggttagtagagtaccatagtggacgcggtgttgggaatcaccgccttggctgcacactgcttgatagagctgcggctggtcaagctaattgtggtataaccagttgatttggcat

SEQ ID NO: 116 - DNA, 736 bp, Hepatitis A virus
  polyprotein gene, complete cds.1
ttcaagaggggtctccggggatttccggagtccctcttggaagtccatggtgaggggacttgatacctcaccgccgtttgcctaggctataggctaaattttccctttccccttccccttccttgttttgattgtaaatatcaattcctgcaggttcagggttcttaaattggcattaaatttgtttctctataagaacactcaattttcacgctttctgtcttctttcttccagggctctccccttgccctaggctctggccgttgcgcccggcggggtcaactccatgattagcatggagctgtaggagtctaaattggggacacagatgtttggaacgtcaccttgcagtgttaacttggctttcatgaatctctttgatcttccacaagaggtaggctacgggtgaaacctcttaggctaatacttctatgaagagatgctttggatagggtaacagcggcggatattggtgagttgttaagacaaaaaccattcaacgccggaggactgactctcatccagtggatgcattgagtggattgactgtcagggctgtctctaggcttaattccagacctctctgtgcttggggcaaacatcatttggccttaaaaggggttctgtgagaggggatccctccattaacagctggactgttctttggggccttatgtggtgtttgccgctgaggtactcaggggcatttaggtttttcctcattctcaaataata

SEQ ID NO: 117 - DNA, 737 bp, Hepatitis A virus
  strain HAS-15, complete genome.1
cttcaagaggggtctccggaggtttccggagcccctcttggaagtccatggtgaggggacttgatacctcaccgccgtttgcctaggctataggctaaatttccctttccctgtccttcccttatttccctttgttttgcttgtaaatattgattcctgcaggttcagggttctttaatcatgtttccctataagaacactcaattttcacgctttctgtcttctttcttccagggctctccccttgccctaggctctggccgttgcgcccggcggggtcaactccatgattagcatggagctgtaggagtctaaattggggacgcagatgtttgggacgtcaccttgcagtgttaacttggctctcatgaacctctttgatcttccacaaggggtaggctacgggtgaaacctcttaggctaatacttctatgaagagatgctttggatagggtaacagcggcggatattggtgagttgttaagacaaaaaccattcaacgccggaggactggctctcatccagtggatgcattgagtggattgattgtcagggctgtctctaggtttaatctcaagacctctctgtgcttagggcaaacaccatttggccttaaatgggatcctgtgagagggggtcccctccattgacagctggactgttctttggggccttatgtggtgtttgcctctgaggtactcaggggcatttaggtttttcctcattcttaaacaata

SEQ ID NO: 118 - DNA, 742 bp, Enterovirus C
  strain WIV14, complete genome.1
ttaaaacagctctggggttgcacccaccccagaggcccacgtggcggctagtactccggtaccacggtacccttgtacgcctgttttatactcccttcctccgcaatttagaagctcatgatcaagttcaataggagggggtacaaaccagtaccaccacgaacaagcacttctgtttccccggtgatgttgtatagactgctcgcgcggttaaaagcgacggatccgttatccgctcatgtacttcgagaagcctagtattacctcgggatcttcgacgcgttgcgctcagcactcaaccccagagtgtagcttaggtcgatgagtctggacattcctcaccggcgacggtggtccaggctgcgttggcggcctatctatggctaacgccataggacgctagttgtgaacaaggtgtgaagagcctattgagctacatgagagtcctccggcccctgaatgcggctaatcccaacctcggagcaggcgatcacaagccagtgattggcctgtcgtaatgcgtaagtccgagacggaaccgactactttgggtgtccgtgtttccttttatttttatcatggctgcttatggtgacaatcagtgattgttgtcatagagcgaattggattggccatccggtgaaaacaaagtcaattactttctcacttgttggacctacacccgatacgctttacccccaagctaattaaaattattagaagttaggactacggtgtcaca

SEQ ID NO: 119 - DNA, 743 bp, Enterovirus C96
  isolate 184C5/SD/CHN/2009, complete genome.1
ttaaaacagcctgtgggttgttcccaccccagaggcccacgtggcggctagtacaccggtatcacggtacccttgtacgcctgttttatactccctaccccgtaacttagaagcaataatccaagttcaatagtaggggtacaaaccagtaccaccacgaacaagcacttctgtttccccggtgatatcgtatagactgtacccacggtcgaaaatggtggatccgttatccgcttttgtacttcgagaagcccagtaccatcttggaatcttcgatgcgttgcgctcagcactcgaacccggagtgtagcttaggccgatgagtctggacaatccccaccggcgacggtggtccaggctgcgttggcggcctacctgtggcccaaagccacaggacgctagttgtgaacaaggtgcgaagagcctattgagctacaaaagagtcctccggcccctgaatgcggctaatcccaaccatggagcaggtgatcacaaaccagtggtaagcctgtcgtaacgcgcaagtccgtggcggaaccgactactttgggtgtccgtgtttccttttatttttgtatggctgcttatggtgacaatcaaagattgttatcataaagcgaattggattggccatccagtgagagtaaagcacattatttacttgcttgttgggtttgcccctttgatttgtaacactctttatctaccttatattgtacttttggttagacaacagtatcacg

SEQ ID NO: 120 - DNA, 743 bp, Human poliovirus 1
  isolate HAI00003, complete genome.1
ttaaaacagctctggggttgcacccaccccagaggcccacgtggcggctagtactccggtattgcggtacccttgtacgcctgttttatactcccttcccgtaacttagacgcacgacaccaagttcaatagaagggggtgcaaaccagtaccaccacgaacaagcacttctgtttccccggtgatgttgtatagactgcttgcgtggtcgaaagcgacggatccgttacccgcttatgtacttcgagaagcccagtaccacctcggaatcttcgacgcgttgcgctcagcactcaaccccagagtgtagcttaggctgatgagtctggacgtcccccaccggtgacggtggtccaggctgcgttggcggcctacctatggcttacgccatgggacgctagttgtgaacaaggtgtgaagagcctattgagctacataagaatcctccggcccctgaatgcggctaatcccaacctcggagcaggtggtcacaaaccagtgattggcctgtcgtaacgcgcaagtccgtggcggaaccgactactttgggtgtccgtgtttccttttattttattatggctgcttatggtgacaatcacagattgttatcataaagcgaattggattagccatccggtgaaagtgagactcattatctacctgttcgctggattcgctccattgagtgtgtttactctaagtacaatttcaacagttatttttaatcagacaattgtaccata

SEQ ID NO: 121 - DNA, 744 bp, Human enterovirus C96
  isolate AFP809/GD/CHN/2011, complete genome.1
ttaaaacaagtctggggttgttcccaccccagaggcccacgtggcggccagtacaccggtatcacggtacccttgtacgcctgttttatactccctaccccgtaacttagaagcaacaatccaagttcaatagtaggggtacaaaccagtaccaccacgaacaagcacttctgtttccccggtgataccatatagactgtacccacggtcaaaaatggtggatccgttacccgcttttgtacttcgagaagcccagtatcatcttggaatcttcgatgcgttgcgttcagcactcgaacccggagtgtagcttaggtcgatgagtctggacaatcctcaccggcgacggtggtccaggctgcgttggcggcctacctgtggcccaaagccacaggacgctagttgtgaacaaggtgtgaagagcctattgagctacaaaagagtcctccggcccctgaatgcggctaatcccaaccatggagcaggtggtcacaaaccagtgactagcctgtcgtaacgcgcaagtccgtggcggaaccgactactttgggtgtccgtgtttccttttattttatgtatggctgcttatggtgacaatcaaagattgttatcataaagcaaattggattggccatccagtgagagtaaaacacattatctacttatttgttggatttgtccctttaattcatcacactcttcatctaatttacattgtggttctaattagacagcagtatcaca

SEQ ID NO: 122 - DNA, 744 bp, Unknown
  Description of Unknown: Human coxsackievirus A20strain IH35, complete genome.1
ttaaaacagctctggggttgtacccaccccagaggcccacgtggcggctagtactccggtattacggtacccttgtacgcctgttttatactccctccctcgtaacttagaagcacaaaaccaagttcaatagaagggggtgcaaaccagtaccaccacgaacaagcatttctgtttccccggtgatgttgtatagactgcccgcgcggttgaaagcaacggatccgttacccgctcaagtacttcgagaagcctagtattaccttggaatcttcgatgcgttgcgttcagcactcgaccctggagtgtagcttaggctgatgagtctggacgtccctcaccggtgacggtggtccaggctgcgttggcggcctacctatggctaacgccataggacgctagttgtgaacaaggtgtgaagagcctattgagctacttgagagtcctccggcccctgaatgcggctaatcctaaccatggagcaggcggtcacagaccagtgactagcttgtcgtaatgcgcaagtctatggcggaaccgactactttgggtgtccgtgtttccttttatttttattatggctgcttatggtgacaatcattgattgttatcataaagcgaattggattggccatccggtgaaagcgagacttactatttacttacttgttggacttaccacacttaatacatttattctaggtgtcacttgtatagcaattagaatcaaacagttgcatcata

SEQ ID NO: 123 - DNA, 744 bp, Poliovirus type 3
  mRNA (vaccine strain Sabin 3 (Leon 12a1b)).1
ttaaaacagctctggggttgttcccaccccagaggcccacgtggcggctagtacactggtatcacggtacctttgtacgcctgttttatactccctcccccgcaacttagaagcatacaattcaagttcaataggagggggtgcaagccagcgcctccgtgggcaagcactactgtttccccggtgaggccgcatagactgttcccacggttgaaagtgtccgatccgttatccgaccatgtacttcgagaagcctagtaccgctctggaatcttcgacgcgttgcgctcagcactcaaccccggagtgtagcttgggccgatgagtctggacagtccccactggcgacagtggctccagctgcgctggcggccgcgacctgtggcccaaagccacgggacgctagttgtgaacagggtgtgaagagcctattgagctacatgaagagcctccggcccctgaatgcggctaattctaaccatggagcaggcagctgcaacccagcagccagcctgtcgtaacgcgcaagtccgtggcggaaccgactactttgggtgtccgtgtttccttttattcttgaatggctgcttatggtgacaatcatagattgttatcataaagcgagttggattggccatccagtgtgaatcagattaattactcccttgtttgttggatccactcccgaaacgttttactccttaacttattgaaattgtttgaagacaggatttcagtgtcaca

SEQ ID NO: 124 - DNA, 746 bp, Human enterovirus 96
  isolate FIN05-2, complete genome.1
ttaaaacagcctgtgggttgtacccaccccagaggcccacgtggcggccagtacaccggtattacggtacccttgtacgcctgttttatactccctaccccgtaacttagaagcaataacttaagttcaatagtagggggtacaaaccagtaccaccacgaacaagcacttctgtttccccggtgacattgtatagactgtgcccacggttgaaaacgatggatccgttatccgctcttgtacttcgagaagcctagtaatactttggaatcttcgatgcgttgcgctcagcactcatccccagagtgtagcttaggccgatgagtctggacattcctcaccggcgacggtggtccaggctgcgttggcggcctacctgtggcccaaagccacaggacgctagttgtgaacaaggtgtgaagagcctattgagctacaagagagtcctccggcccctgaatgcggctaatcccaaccatggagcaggtgatcgcaaaccagcggttagcctgtcgtaacgcgcaagtctgtggcggaaccgactactttgggagtccgtgtttctctttatttttacttatggctgcttatggtgacaatcatagattgttatcataacgcgaattggattggccatccggtgatatacaaacacattgtttacctatttattgggtttacacctttaagttctttcactctacaccttactcgtgttgtgttattaaccagacagtggtgccaac

SEQ ID NO: 125 - DNA, 748 bp, Rabovirus A
  strain Wencheng-Rt38-1 polyprotein gene, complete cds.1
ggagttttagtggtgttccaacactatgcgccatgatgtgttctacggaacatgttatgacgtatctttcatctaccccaacccttgtgtcaaccgatacgcctacacaggtgggtaaagcaccggcccactgaatggaacaaaatgctaggtgcaaagtcaggcccataggccatcggtcgaagcccgcttgggaataagactgatggattaccctattctggcgcctgaccacttgtttcttttctgaatcacacacctgtgtgaacggtggacctgcaccgtaactcttctagcctactaccacacttgtggaactataggggcacaggaacttcaaccaagtgctgttggaatggagaaaataatccaatcctgaaacgtcatggatccacactctgtgtggggctactagcctgcggaacaacacatggtaacatgtgccccaggggccgaaagccacggtgataagatcaccctagtagtttgagattgtatcaatgttcatgtcttagtaaggggaggtgaaatctatctgtgacaccggattactggttgtcgtatagcggctgaaggatgtcctgctggtacctttagggaaccttaagagactattgatcgaagcaggagcctggttggtctctcccactccaggttaaaaaacgtctaggccgtggaaccgggcgggaggcccggttttcctcccaaaattataatattgtgtatggtgacaactgaaggcttaaca

SEQ ID NO: 126 - DNA, 751 bp, Rabbit kobuvirus
  isolate Berlin/Jan2011/0572, complete genome.1
ttgaaagaaactccgggtattaaccatacccggagttttggcagggtgttccaacctgtcctggccatgcatttatctacggatatttgcatgacccgctttctatcgccccaacaatcccctttgtaaccacaagctttactcaggctagcagcccgactagctgtttggaagaaaaggctagggcacacaccaacaacaccgaccccactggtcgaaggccgcttggcaataagactggtggaacagggtcgcctgtagttgtttggaacattctttctaatgactttgtcagcggtgctactcacaccgtaactcttctaccctatccccacgcttgtggaactaggaggggatgagtgattcaagtaagtactgtcagaatggtgaaaatgatctgattctgaaacgctatggatccatcgaaagatggggctacacgcctgcggaacaacacatggtaacatgtgccccaggggccgaaagccacggtgataggatcacccgtgtagtttgagatcatatcaatgttcatagtctagtaagatgatttgaaatctaactgagctgatggctaactgcttgtcttattgcggcctaaggatgtcctgcaggtacctttagataaccttaagagactattgatctgagcaggagccaaagtggtctttcccagctttggttaaaaaacgtctaagccgcggcagggggcgggaggccccctttcctcccaaaacttaatattgattgt

SEQ ID NO: 127 - DNA, 751 bp, Coxsackievirus
  A24 genomic RNA, complete genome, strain:1
gaaattaaaacagctctggggttgttcccaccccagaggcccacgtggcggctagtacactggtattacggtacccttgtacgcctgttttacacccctttcccccgtaacttagaagcttttaaattcaagttcaacagtgagtggtacaacccagtactactatgaacaagcacttctgttaccccggtgagattgcataagctgtccccacggctaaaagcgattgatccgttatccgctcttgtacttcgagaagcccagtaaaaccttgggatcctcgatgcgttgcgctcaacactcaaccccagagtgtagcttgggctgatgagtctgggcattcctcaccggcgacggtggtccaggctgcgttggcggcctacctgtggcccaaagccacaggacgctagttgtgaacaaggtgtgaagagcctattgagctacaagagagtcctccggcccctgaatgcggctaatcccaaccacggagcaggtgattgcaacccagcaactagcctgtcgtaacgcgcaagtctgtggcggaaccgactactttgggtgtccgtgtttccttttattacataatggctgcttatggtgacaatcatagattgttgtcataaagcgagttggattggccatccggtgagaattaaaacaattatttacttgtttgttggatttgttcctatacacacccatacaccttgcttgattgaagtaattctgttgataagacaacactattacg

SEQ ID NO: 128 - DNA, 752 bp, Salivirus A
  isolate BN-5, complete genome.1
tttcctcctttcgaccgccttacggcaggcgggtccgcggacggcttcggcctacccgcgacaagaatgccgtcatctgtccttatcacccatattctttcccttcccccgcaaccatcacgcttactcgcgcacgtgttgagtggcacgtgcgttgtccaaacagttacactcacacccttggggcgggtttgtcccgccctcgggttcctcgcggaaccctccctcttctctctccctttctatccgccttcactttccataactacagtgctttggtaggtaagcatcctgaccccccgcggaagctgccaacgtggcaactgtggggatccaggcaggttatcaaaggcacccggtctttccgccttcaggagtatccctgccggtgaattccgacagggctctgcttggtgccaacctcccccaaatgcgcgctgcgggagtgctcttccccaactcatcttagtaacctctcatgtgtgtgcttggtcagcatatctgaggcgacgttccgctgtcccagaccagtccagcaatggacgggccagtgtgcgtagtcgctttccggtttcccggcgcatgtttggcgaaacgctgaggtaaggttggtgtgcccaatgcccgtaatttggtgacacctcaagaccacccaggaatgccagggaggtaccccacttcggtgggatctgaccctgggctaattgtctacggtggttcttcttgcttccacttctcttttttctggcatg

SEQ ID NO: 129 - DNA, 754 bp, Sebokele virus 1
  ORF1 gene for polyprotein, genomic RNA, strain 1.1
gaaagggggccaccctgcccatagggcagggtccttcttggctgggtggctcgtatccactccatgggttgtgcctatccggtcatccccctttccccacagccggtgtgggttctaatcggctcctactaaacacctaagcatcactgcgcctctatctctcctatccacaggtctaagacgcttggaataagacatgtgggtgcaataggaagattagctagtccaatctctccttccagctacgcttctcccttcgatgagcgtagggggggcccccacctccctcatctctggatagggctcttgctacggggctttcccgtctggaccagcaggcccactggtgcgcttccattcaagtttagtgtgcattactgtctgaaatattgctttgctaggatctagtgtagcgacctgcatattgccagcggacttccccacatggtaacatgtgcctctgggcccaaaaggcatgtctttgaccgtatgcagtacaaccccagtataggtcctttctatggcagtatggatctcagtgatgagtctatacagaatatggaagtggttcggatatgtcagcccgaaggatgcccagaaggtacccgcagataaccttaagagactgtggatctgatctggggcccaccaccttcgggtgggtagaagctaaccatgccttgggttaaaaaacgtctaagggctgaccagacccgggggatccgggttttccctatcttgacctactctaatc

SEQ ID NO: 130 - DNA, 762 bp, Hepatovirus A
  isolate 18f.1, complete genome.1
tttccctttcccttttttcaagaagggtctccgggaatttccggagtccctcttggaagtccatggtgaggggacttgatacctcaccgccgtttgcctaggctataggctaaattttccctttcccttttccctttcctattccctttgttttgcttgtaaatattgatttgtaaatattgattcctgcaggttcagggttcttaaatctgtttctctataagaacactcatttcacgctttctgtcttctttcttccagggctctccccttgccctaggctctggccgttgcgcccggcggggtcaactccatgattagcatggagctgtaggagtctaaattggggacacagatgtttggaacgtcaccttgcagtgttaacttggctttcatgaatctctttgatcttccacaaggggtaggctacgggtgaaacctcttaggctaatacttctatgaagagatgccttggatagggtaacagcggcggatattggtgagttgttaagacaaaaaccattcaacgccggaggactgactctcatccagtggatgcattgagtggattgactgtcggggctgtctttaggcttaattccagacctctctgtgcttggggcaaacatcatttggccttaaatgggattctgtgagaggggatccctccattgccagctggactgttctttggggccttatgtggtgtttgccgctgaggtactcaggggcatttaggtttttcctcattcttaaataata

SEQ ID NO: 131 - DNA, 788 bp, Poecivirus BCCH-449
  polyprotein gene, complete cds.1
aggtcggtgctgtgacttttgtagttggattggatcctcactttgggtgaggttccactccaagtttgagtgttttgtgtgtgtgtgggcataattaattgtttattatgggaactacacaatcgcaacacgcgcaagtttgtagtttgattggcgtgcaaatgtcaaatcaagcatataacacaatttggtggctgttggtgtttgttataggaattttggttgtgttgaaattgtggatgtgtaggaaatatgcacaattacgtcagcgtcaggagttttataacctggcgcaacaccaaaatggtcttcgcgctttaacatcaccagcgaggtgtaaacaaattgaagttgaattagatcgtgtataggccagggaaccatccctcccaacgccacatcttgtggggaagttgggataatggtgggtctatatgaattggtctgtagacccacagtgaagagtgaatagtatgcttgcggttccatttgttaatggtctagcatgggtgggggcggcaaccccgtgaggggttccccactggccaaaagcccaggggttagtcatttcaaccaaggaagctggtaacctggtgacctgaacttgagtggtgagacccccttgctagagtgtgtaaaccgattgtaagcattttgtttgcttagtatctgtggtataagcagtcaattttgtataggctcaaggctgtggtagttagtagatgcccggaaggttattactgatccggggaccgtgactatacattaggtaaaccggtttaaaaacc

SEQ ID NO: 132 - DNA, 816 bp, Picornaviridae sp.
  isolate dwb062pic1nc genomic sequence.1
gttcagttgccatccccgttcgggtggtttctcacggctaggcggaagtccagcccattcaacgtgagtccgggagttgggatatccaaaaaggagtcccgttttacttacacaccctcatgtctagccacagagggactgtgcggtagccactccgcacaaacggaaaagaggccagaggggatactcccccctggaccccttttccgtttgtgcggagtggcgaccgcacaggcgttaggctgctaagtagtctgcaagtagcttgcccactctctggggacaaagttctctggattggggtaagtgaagtgcgtgggctaacttggtggctgtagcccggatctggccggcctatgaaaccacggatccgcttcttttccctataccttttcccgagtgtttgtctgcaacttgttaagtgatttcttggtttgtttgacacaatcgctttggattttgttcttattttggtattttgaccactctagtatttgtgttctacctgaaattcccttgcaaggggtgtagtagggtgttgctcgtactagttgtggactccctctgtggctagacatgagggtgtgtaagtaaaacgggactcctttttggatatcccaactcccggactcacgttgaatgggctggacttccgcctagccgtgagaaaccacccgaacggggatggcaactgaacctagtagggctcgtaggaggcttgcacatacaccagattgggaattctggtcttgctcatgactgggtgatagccttgcggcggatcaagtcacagttgtaatccgttgatttgcaccc

SEQ ID NO: 133 - DNA, 833 bp, Harrier picornavirus 1
  strain harrier/MR-01/HUN/2014, complete1
tttgacaacctggcaaccctatctctaggtaggatgctgtctttggcccccgcctcccccatcctcccgaccatatctctattgggatgtgttcgggtcgtcacggatccgacattcctaccggggtccttctggctacggctggtctgactttggtggatgtgtgacggtgtaattactttccggatcccactttcctattataactctttcatcccaaggttagggaaagaacctggctcggtaccaccagaccctccgccacgctagtggactctccggagataacggtaccccctttgtagtcacctgtgctggtgaagaaccacctagtattgcttgggtgcgtgccgcctagcttccatttcttctggagcactgtgcaatgaggtttccccacttggtaacaagtgcctcaggtcccgcaaggatactgtggggtggtgtgaccgcagggagctgtctccacggctcctctaatgttacgccgctatccacaggccagtgcgtgtcatcgatcccggatgacagagctagtattgcgaacccccaagtaagaaaagtggctagtaacctgatagctggtgaagagggtgggtcagttgagtagatgccctagaggtacccgaaaggatctgactagggacccgtgactatacattaggtaaaccgggtataaaaaccatgaaaaactgaccacttttcttttaacctcttctttctttttatgtgtgttaagtgttttgagtttggactgtaccttgcccgcctttcttggattttctctatcgctcttcttacacctactgttatcaaggcactctttagagata

SEQ ID NO: 134 - DNA, 894 bp, Equine Rhinovirus type 2
  genomic sequence.1
ttttgtaactgaggttttgacatctcattgtttttgagccccaacgtcttggtggatgctcaaagaagattactcttgatgcttggctctcagaaagaatggcacctcaatgttttgagacccgattcttttgagtcgagaccatttccccttccctgaagattgcttttcttccaactaaacccctattgatgtgttggtcgtttgccaatcggagggcgacaggcacaggtcgctccgagttctagtagtgtgggaacttgttactactgatgaaacgaggtagtgacactcagtacctgcgaacgaggtcggggccctcccttcttccttcacccaactttcacttttcgttccactttagcaggggtcttctttctatccccctggcggcattggaactagccgtcgcgtcttaacgcgcagccctgaaggccccacaccttgtggatcttgccgtgggtatgtttctggcatgtgtttctcaagcctgcaaccgaagccgaacagccacatgaacagtttgagcgtggtagcgctgtgtgagttggcggtggatccccctcgtggtaacacgagcccccgtggccaaaagcccagtgtttacagcacctctcacatccaggacgaccccatcctggcgctcactcttagtagtatggcttagtacgcattaggtggtaagccgagctctccctcggccttgttctgaatgcacacatgtctaggggctaaggatgtcctacaggtacccgcacgtaaccttcagagagtgcggatctgagtaggagaccgtggtgcactgctttacagatgcagcccggtttaaaaagcgtctatgcccctacagggtagcggtgggccgcgccctttccttttaaaactacttgttct

SEQ ID NO: 135 - DNA, 897 bp, Equine rhinitis B virus
  strain 303, complete genome.1
ttttgtaactgaggttttaacatctcattgtttttgagccccaacgtcttggtggatgctcaaagaagattactcttgatgcttggctctcagaaagaatggtacctcaacgtgttgagacccgattcttttgagtcgagaccactcccccttccccttgaaagattgcttttcttccaactaaacccctatcgatgtgttggtcgtttgccaatcggagggcgataggcacaggtcgccctacggtctagtagtgtgggaacttgccgctactgatgaaacgaggtagtgacacttagtacctgcgaacaaccctagggcaactcccttcttccttcacctacttttcctttccgttctgctttagcaggggtcttctttctatccccctggcggcattggaactagccgttgcgccttagcgcacagccctgaaggccccacaccttgtggatcttgccgtgggcatgtttctggcgtgtgtttctcaagcctgcaaccaaatgccgaacgggcacgtgaacagtttgagcgtggtagcgctgtgtgagttggcggtggatccccctcgtggcaacacgagcccccgcggccaaaagcccagtgttagcagcacctctcacatccagggaaaccccaccctggcgctcactcttagtaatgtgtcttagtacgcactaggtggtaagccgagctctccctcggtcttgtactgaatgcacacacgtctaggggctaaggatgccctacaggtacccgtacgtaaccttcagagagtatggatctgagcaggagaccgtggtgcgctgctttacagtcgtagcccggtttaaaaaacgtctatgcccctacagggtagcggtgggccgcgccctttcccttttaaaacttggtttc

SEQ ID NO: 136 - DNA, 1000 bp, Sicinivirus sp.
  strain RS/BR/2015/5R polyprotein gene, complete1
gggtgggatggatcccgttgcgtgcctgcagccgctcggtgtccatccttcctgttacccaccatgtctggtggtaccccccggtcccttccctatccccccatacagccgggacggaccacttacctccgggtctgtggcccaaccccgactcggggttgtggcggtggtcacagctccggctgtgacctcctaaccactcccttcacctactcccttatatagaaacttaagtttgactccccctatcccaaggtcttggctcatgccctttaaggctatctagcacaaacactctttgtttggcgtctggagacccactgagctaccactcatccgcgctcaatgtaacccccattagtattcgtgcaattttaatagtagttctgctccggcagcatctaagtgcccagggagcccaactggtgacagttgccctggggcccgaaaggctaggtggcaggggcccggtcaagcaaggggttcccaccctgagctgatcccgcggtcccgaagccaccctttggatggaggttccacacccgactgctatttcttttgcccggtgaacctggctggaaacatttagtttatggatttgttggtctgtggtgattagtagaccccctggaggtacccgtttggatctgaccagggacccgtgactatgccgttccggtaatccgggtttaaaaccatgaacgtcaccactcgctttcttttccttgttcttatttcttttatattgcaaactattagtgagaattcgtgttccctgacctctgcgtttggtctgcattctcagttattcagtttggctggtctggattgtttgtttagatgctcctagagcttctgctggttgttgtcacacttgttatagtcgttgcttctcccggcgagttttaccagttgcttgctatctgcacctacaacttcctgttgatctttctctggctagttggcttgattgaactttccaactatcctaccattcaac

SEQ ID NO: 137 - DNA, 1000 bp, Sicinivirus A
  isolate UT-G-Khajehnasiri, complete genome.1
atacctttaccttcccccactcactgatcggtgccaaccccaactccccagtgtcagatgcttttacaaactttatgctatggcgcgctggagtggcagtccacatttccacgtcggccagccccgctatggcaggagcgctactcgtggtggcatcacccgagggctttgaggacgtgcaacagcgcccatggaatgcgcaagttagcgggctaactacaatcccatatgtacttcttaacctgtgccaatccaattcagccactgtaatcctccctccttgtacagtcactccgtttgatgatgcccgctcccatacatcttggtctgtgcgcgtgtatgtcttcacacagctaaatgtccctaccggcgttgcaaatcaaatcacaattcaattgatgtttgctccccttgcttcccggtttttgtttgcatgtgttcccataaagcaccacctgcgcacccgcatactacccggttccggggatggctattcatttaacatcccccagaaccagggcgtccctatggctcaatatcttcctgaacatgagtccgcagactacatccctgggcattttgataattttgcacggtttgctaacgcccccgggctcttgcgcactgtgcgttggctctctgagtatactcccaacacacctcttcttcggcttaatttgaattctattagtctcggtcccgatacccacacccccttatcctatgtacttagtgcttttgctcaacaacgtgggtctctctcttttgatttggtgtttgttggggcccaggtccaatctgggcgcctgctcatatctataacccccccctcgcaggcccctcctgccagtgtcgaggaagccctccgtggccattccctgacctgggacgtgactgtgtcttgctgcagctcatttcacgcccccttcttctctgcgactgcctggcgatctctagctattgatggatccgctacaaaaactctctacaattcgtgggg

SEQ ID NO: 138 - DNA, 1000 bp, Cardiovirus B
  strain rat08/rCaB/HUN, complete genome.1
ccccacggtaaccccctttggacgcgggacctgcgatagtgccaaccccagcctttcctacacccgactcccgaccctaacccagggtcctcggaagaggatcatacatctcatcccctgaatgctgactaatcagaggaaagttagcattttccggcccaggctaagagaagtagataagttagattcaaattgatacaacatccccttgacgaattcgcaacgaaaagtcgtccctcacttgccgcttgatcacacccacgaactcacaattcggcccctcgtgacaagccccttgttgaaacgacctctttcaatgcgacgtggttggagatttgtcatcttacgactccgacgtaactaccgtcatgcctccccgattatgtgatgctatccgccctgctgggtggagcattctcgggttgagtaacctacatcctttactccttggactccggtcccccggtctaagccgcttggaatatgacagggttattttccaaacatcttctttctactcttaagtgttctatacttaagaagggtatgtgttgccccttccttcttggagaacgtgcgcggcggtctttccgtctctcgaaaagcgtgcgtgcaacatgcagagacctgtgaagaaagcagtctttgaactagccttagtgcagacaagaaactggctgtagcgacctcacactagcagcggacacccctcctggtaacaggagcccctgcggccaaaagccacgtggataggatccactggtgtgagcggtgcatccccagcaccctggtttcttggttgtactctggtgaacccagagatggcaatcttaagcaactctgtagagaagccaagaatgtccggaaggtaccccgcttcggtgggatctgatccggagactcgtccacagtgctctacactgtggctcgggtttaaaaactgtcacagcttctccaaaccaagtggtcttggttttccctttttactcattgtgtcacg

SEQ ID NO: 139 - DNA, 1000 bp, African bat icavirus A
  isolate PREDICT-06105, complete genome.1
aagcttgcttcaccagaattgctaggggcgaaccgacaacaccttgttgagtttccgtcccgagacaattcatacaagttccaagactcatgaagcaattggtgcgtactgacgattggtttggctcgagcacgtgttccgtccttgggataatacacaacgctaagtatccaagaaaggccttgtgtagtccctcacgattatgtcatgtctcgatgtcactccacgtggagtacaaacctctttccatctgtctaagcttttatggagtctcccacgattatgtgctctcaatcgtggttgtcgcgcggtctagttctcagcgcgaagtttaagctaagcaccctcgggcgttcccggattatgtgatcacatcaatttgatggctggtcaccacgcaacgcctggagagatactcttacttttctcttaagatccccggtcatttgacgcttgtaggatgatagggttattttccactataaatactttcatactcttggatgttctatatccaagacgggaggacctaccccgtaccccttagaggtgagatgccaagaacaggccctttctgttctctcgacaatggcatcataggcaacaagcatcacaccaagattgctaagttttgttaagagttcttcaagctatagggtggctgtagcgaccttctgatgcctgcggatttccccacggagcgatccgtgccacaggggccaaaagccacggctaacgcccatcaggagcggcacttaccccgtgccccacccttgaaacttgaatgttcacactggcttctctcggctttctgaactgtctgcttgttggggccccgaaggatgccctggaggtaccccattttatgggatctgaccaggggacacctcagctctctaagttgctggtgtttaaaaaacgtctaagggcccccaccccttaggtggagggatccacctttcctttattttttaaaactcttttatggtcacaattgttt

SEQ ID NO: 140 - DNA, 1000 bp, Aimelvirus 3
  strain gpai003, complete genome.1
actaacaggtgaaccctgtgagtttccggcccaggatttaggatgacatgttccaagtcagatgccaacgacttggtaaggacgaatttgcccgcattatgctacagttcccgcccgggacaactgacaccccattaagctacaacatggctgaaaagggtgttgggtccccccggattgtgtctgttcatagtgtgtgtaacgtggtttaccatctccactaacattggactaagcatttcatctttcctccccgattgtgtactcacttggctaacgctgggtggtcgcggttgggtccttgatttactttttctcgtctaagcattccaactgtcctccccgattatgtgctcattcagttaactgctgggtggtcatgactaacatcgaggaatcttctgtctacgcttactttgagctccggtcgcttgacgcttgtagggcgatagggttatcttcctgacaacatctttattctacctccataggctctatctatggagacggagtgtggcacccgtcccttctttgggagcttcggtagtgacgccctttgtcactctcgccagccgaggcatgcctggtgccaggtagcaaagaaagtatatgcttaaggacttgactgatttagcgcaagagtttgtagtgatgtccatagtgtctgcggatcccccacacggcgacgtgtgccgcggaggccaaaagccacggtgttcacagcacccctatggatgcccacagaccccagtgggcactcttgttgccggactttcaggaaattaggtataggctcttctcaaactcctggcattggactaggtaagaatgccccggaggtaccccagtactccttcgggagtctgggatctgaccgggggccccacaaacatgctttacgtgtttcgtgcggtcaaaaattgtctaactagtcccaaccttgaacaagggattgttctttccttttattactgagactggcctatggtgacaacagaga

SEQ ID NO: 141 - DNA, 1000 bp, Picornaviridae sp.
  rodent/CK/PicoV/Tibet2014 polyprotein gene,1
aatagagttttgccattctctaacttgtcaagatgggcacaatgatgctttgtttaacaaggctgatttttccttttgtaatatgagtggaattgtgttccactctattcttcttttatatacatcttatgtatgagactgactgcgtgtataagagaggtaagcaactaagacttgtaaccctcggagtgggttggaatgctgagctctacgcatgtggcgtagagacgatctcgggaatctgtctaaaagttgacataccgacctgtcgagactaataactcgattccattttaaatttccttcgtgttttagtcactttgtacacctaaaggggagtggcagtgggtctggatcctcattgttctgcaatgggttgtatcgctggtttaccacgtaagtccgcaaaaataggatcccatgttagagtgggaggaaggagcagtattagggctcctggccaaccctaaacaaagtgaatacattgtaaggtatgagtcatattactcaaccctttaaaggtgtaagtgttgatcttgtttcctggtaggctacgggtgaaaccaggagcgtagggagaccgtgaataatggtctttctgcaggggagacggaaatggtgtgaggtattccagtcatcgtttagatgccgtgtctaaatcactgtgccccatctgtaatcccaacatgcgacacccaaacttttaattgaatgggtagtttgatgagtgccccaaggtgtataggtcttgtgattgataaaaatgctatgcaggtaccaaatgctttcgcatgcgatctgagcataggtgggtgatcctgacccgtaattgttccctgtcaatcacgattcctctttctagtctaagctaggtttatggcacaatgtctaactatatgagattataagatattaacttacagaaatttagcagtcttattgtattttgttgctaacatactttcatttactgtctataattaatttagttctctttaaa

SEQ ID NO: 142 - DNA, 1000 bp, Picornaviridae sp.
  rodent/Rn/PicoV/SX2015_1 polyprotein gene,1
cacatcttatgatgataggtctgcacctctcataagtaagtgtgtgtgtgtataatacagggtaagcaactgagacttgtaatcctgtaggagtgagttggagtgctgggcctgttccatgtgggttcaggacgatctcgggaatctgcataacagttcgcataccgacctgccgagactaataactcggttccaattgtttgttatttttatcctttgggttttagtcgctttgtactcctagaggggagtggccgcgggtctgctccgcctttcgcctgagtgacaggcactggcgttggatgctggtttaccgcgtaagtccgcaaaaataggatcccatgttagagtgggaagaagaggaagtcttaggtcctctgcccaaccctaaacaaagcgaactacacgtaaggacagcggtagcgtggtaaccctatacacacgtaacgtttgatcttgccaaccagtaggctacgggtgaaactggttgcgactggccactgctaacgtggtgtctgggcaagggggaacggtaacgaagcaagatattccagaaccttagggtccgagtctaaattgctgtgccacggctgtaaccccggcatgcgaacgccaagtgtgtgtttgaatatcacgttatttaaatccccaagtgtagtagggattgattggtgataaaaatgctgcgaaggtaccaaggcaactaaaatggtaacccgggaggaatcttaggacgaattggctgagtcctaagtggaccgggttccaatttaggggcacctcagggtgcctgctgcgatctgatcgcaggtgagtgaacccgactcgtaattgttccctatcaccatcatctctctttctagtctaagtaggtttatggcacaataaaagctacatgaaagagatttaattgttgttgttgagttgttattactttcaaaataaccaattggcttttatttgttttctctgctgtttaatttgctgcaattagtttaca

SEQ ID NO: 143 - DNA, 1000 bp, Picornaviridae sp.
  rodent/Ds/PicoV/IM2014 polyprotein gene,1
ggccatggtaggtctgcacctcatggttcacaaaagtatggacatacaaatttagtataacaaaattgtgtgtgtgtataattgtaggtaagcaactaagacttgtaccttcaaggagtgagttggaatgctggcaccctgtcatgtgggcaggggtcgatctcgggaatctgcataagtgtttgcataccgacctgccagatttagtagtctggttcccaccggtttgttattttcttccttcgtgttttagtcgctttgtacacctaaaggggagtggcagcgggtctgctccgcttcggcgttggatgctggtttaccgcgtaagtccgcagaaataggatcccatgctagagtgggaggaaggagaagttttaggtctcctggccaaccctaaacaaagcgaacattgtgtaagtatgtaggctgcatgctaaccctttgtatgtgtaagtagtgatcttgtcaaccagtaggctacgggtgaaactggttgcgtttggcagctgtatccacggcatgccgagcaagggaaatggtaacggtgtgaggtattccatgacttcggtccgtgtctaaatcacagtgccccggctgtattcccgacatgcgctacccaagcatgcaattgaatagtatgtagttgaaatacccaaacaacgtagagtctagtgttgaataaaaatgctgcgaaggtaccaaagcggctcccaaaaattgaagccgggaggaagctagtggcaaatctggccccacgctgctagtggatcggcttctgggagtgtgaggggaaaccctcacggctgcgatctgatcgcaggtgaacaaacccagttcgtaattattccctgttcaacctaactctctttcttgtctaggctaggtctggcacaatgaaatgctatatgaaaagagttttataagagattttgtgttttgtgcgctttgtctgattctttcaggtttttactattaaagctagttataaagtaaatttgaa

SEQ ID NO: 144 - DNA, 1000 bp, Picornaviridae sp.
  isolate ybw202pic01nc genomic sequence.1
taacatttccaagtcagaccgtgaaatccatctcagtgggatgttttaggtctatcccaaagaccaaatgcagtttaacgacttgcaggtcggaaagagggatgcacgtacagggaacatagccctgaaaacgtgcaccccgctttccgacctgcaagtcgttaaactgcatttggtctttgggatagacctaaaacatcccactgagatggatttcacggtctgacttggaaatgttaacctggacttgagtttggattgtgattccccgggaatgtggagtacccggttaggcaggacttatttttactgcctctccaccttagtttatcacctccttatgaaggatccattagtactattatgatgaaaatggatgaatgggctagcgccagttagattgcctagagactacctccctggtaacagggactctagggcccaaaaggctaggtggtcggattagcaaccaagaaagggtttatgattaacccaatctgaacttgcgtcctaagccacccgtctaacccctgaccccgaggcattcatccactagtagttgtaatgtggaaagtgttggtcttttgtaaggatagtttaagctaagaaatcttggacccgtgggagtagatgccctggaggttattactgaccaggggaccgtgactatagcgttccgctaaaccggtttaaaaaccatgaaactatgggtccaagtgcttttcttaatcttattttactttaatggattgcattgacgaagttgattgtgcacagtgtgatcaaccatcgattaccttgagagtggtattgaaagtgattcaattttttgagtgtgcttttgaatgggtgcatcacctaccaaagactccagagatagtggaagaagtcaaagaagccaattgccatcagctagagaattcagaggattgagttgggaagaaaaaccttgcacacagttgacaaccaattgttgtaagggaggtcaattgattggaaa

SEQ ID NO: 145 - DNA, 1000 bp, Picornaviridae sp.
  isolate bs219upi03 genomic sequence.1
agaccgttgttcactctaaaccttctaaagccacaatgcggttggacaaacatggcaatctcggtcttccgggaaaacctaaactatctggcatacaacagatcgctgtaccgccatctcgcccgaaagctggttcaattcttgatgaacttttctctaaaggtcatccaggaattgtcaccaaaccacgtcctaccgggccaaatgctgttactgcggggtcatataaccctgcgcctgcacctgagtcctatgaagacttggctgctcgggctgctcgatatgccgctagtcgtatcggatcctgggcatctactcaatcccaggtacctaccagctgggacgaagatttggctaccgacgtcaccgacccctgcacatctgggcccggtgacctatctgtcaaatcagaacaagcaaatgatggtgatacagggtcgcacgtatctgtcggatcgaaaggatcagctgatgatctgccagaggatcaagtcatcctggtatcagacccacaaaccacgtgtctggaccaggttgactcctgctaatttgtcccgcccacccttctcctaccagggagtctacggtgccttcctcgccgtggatgacaccatatgggcagggccccaaatggtgccggtaccacacaagcttgtgatgtacctccttggaatgagtcaatctccccccaaccacctgaggcttgcacaaaccatcttagcctcagttcctttaacggaacgagctggtctcacccccgaaagcttgctggaatttgcagtggcctacctaaagcacctcaaggctgttccagtaaatctacgacacgaggatgatacaattgcacgccctgataactggctagctcctgacgtcccagtacccatggcagaaggggtgggtctctgggaagggcccgactttgccaatcggcccttttcgtcatagggggacggttctctgtcccccgctcataactggcttcactcccggtttattc

SEQ ID NO: 146 - DNA, 1000 bp, Enterovirus E3
  strain Papa, complete genome.1
ggtctggggcaaacattatcggtactgacaactctgttgtgctgtcgcggaaatatacatctttcccatggctgctaggttgtgctgccaactggatcctgcgcgggacgtcctttgtttacgtcccgtcggcgctgaatcccgcggacgacccttcccggggtcgattggggctctaccgcccccttctctgtctgccgttccggccgaccacggggcgcacctctctttacgcggtctccccgtctgtgccttctcatctgccggtccgtgtgcacttcgcttcacctctgcacgttgcatggagaccaccgtgaacgccccccggaacttgccaaaggtcttgcataagaggactcttggactgtcaacaatgtcaacgaccaggattgagacatacttcaaagactgtgtgttcaaagactgggaggagctaggggaggagattaggttaaaggtctttgtattaggaggctgtaggcataaattggtctgttcaccagcaccatgcaactttttcacctctgcctaatcatctcatgttcatgtcctactgttcaagcctccaagctgtgccttgggtggcttttgggcatggacattgacccttataaagaatttggagctactgtggagttactctcttttttgccttcggacttctttccgtctgtcagagatctacttgacaccgcatcagccctgtatcgggaagccctagaatcgccagaacattgttcacctaaccacacagcactcaggcaagctgttctgtgctggggtgagttaatgactctggcttcctgggtgggtaataatttggaggacccagcatctagggagttagtagttaactatgtcaataacaatatgggtctaaaaattagacaactgctgtggtttcacatttcctgtcttacttttggaagagaaacagttttagaatatttggtgtctttcggagtgtggattcgcactcctccagcttacagaccaccaa

SEQ ID NO: 147 - DNA, 301 bp, Daeseongdong virus 1
  isolate FTA2-2, complete genome.1
gtcatctataaggatgtcggtggtaaccccacaacggatgaccactgcaatcagtggcacgtgtaaagtcgagataaaataaacaaataagtgaaactctgctggatcctcacccgatccactaccgtaccactttcccaaatcttcagacgaaagaaatttttgtctgttcgctctgctcatcctaatccggtgagaataaacctgctcctcctaactcggggagtactaaactcgtcataatccgacgagaactgtcacttttaaccaaagtggtcaactgaattttcgcaaattcaaa

SEQ ID NO: 148 - DNA, 308 bp, Solemoviridae sp.
  isolate bsk136shi11 genomic sequence.1
gtaaatggttcaatgaatcatttaattctgcgcttttagatttagaccttgcttctgtacccggcgtaactaccttaagtcggtatggtaccacattaggagagatcttaggttttgacggtcaaacgttggatcctgagagagtggccatactgcgtcactatgtggtggacaggattcaggatcttttgcatgggaaacatgtagctgatcctattaaactgttcataaagcaggaacctcataaactgtcaaaaattgaagagggccgtttgcggttaatcagtgcagtatcagtagtcgatact

SEQ ID NO: 149 - DNA, 321 bp, Wenzhou tombus-like virus 17
  strain WZFSL82820 hypothetical protein1
aacaacaacaacaacaacaaccgcaacaagaaaccgcgtgcccctaggcgtggtaaccgcaacttggttgctgatcaggctatcaaggatgtccaacgtctccagggtgagttggacgcattaagggacgaaaaatcccaaaaagagcgagctcgagaacagaaggaacaggaacatgaagagctccgcgatgaaattaaagcgcgcttatctggcggctttaatattaaatgggatccacaagttcatcgtgtggaccgtagtcgtgtgtggcgagcgttagcttactgcatttgggtgcttgcaatcaccagtattgca

SEQ ID NO: 150 - DNA, 326 bp, Xingshan cricket virus
  strain XSXS-2 polyprotein gene, complete1
ctcaggtttagtgcttgcctccgctgcttttagcttgcttgtaggctgtttctttggacctgagtagcttatttgctaggcgatagttcgtgcttacttcttcggaagttactcttatttgatttctttcttcgcgacgagaggacggagccttgtctttcccttggaaagtttgcgtgtggtaacgcccacctgtaatcaaggacgctgctcccggctagggatccccgaccgtttaaaggttctacacattgctccgggtgtagaggtaggaagaaataaattttttcaaattaattcttgtttaagacttgaaaccggtaaaa

SEQ ID NO: 151 - DNA, 333 bp, Persimmon latent virus
  genomic RNA, complete genome, clone:1
gatttaaaccctggttttcttcatctttttgaaggagattttttagggttttaaatccctttctcagttgggtgttcgcactcgattgtttgagaccttcgggcggcctacgtcactacccattcgggtaggtacaggtttctgatctcttgaacttttgagtgcgttccatcaacccgagaaactggggacttgacccggatcctgatgcgtggcggtaaagaccgaagcaggattcggaccccaaggccctgagggagtggtagggaagaggtccggtgctctaaataaaaccctacgctcaacacccctcagggtgacgagcactgagcc

SEQ ID NO: 152 - DNA, 341 bp, Hubei sobemo-like virus 3
  strain WHBL72900 hypothetical protein 1,1
gagatgtttgcgtgggccgttgcgctgcgggcggcccacctccctacggggaccgtgagacaccgctggggaaggcccccacccccggccaaggggatcctgccgagaggcaggagaaagaggcccagccctctggggcgcctttaggggcgcctgggagggaagtacccgagccgggcggccggtcgggtgcggctgtgcagttcgaggctaaccgtaaggaaggcctgagctgcctcggcttgtcggaaaggaagacgaaggcacttatcaaggctttcaggaagcaggagcgcaattacagcgcgcgccgtgcggcctggattaaccgcatttggccg

SEQ ID NO: 153 - DNA, 346 bp, Arenavirus sp.
  isolate RtRe-AreV/Cs2008, partial genome.1R
tgttacagaactgtgtcccaaaatagataaccactatgcctaggatccccggtgcgcagccaaacacccttatttgtggattaaggtcaatgcttaacaaagtcaagtcaatgaaggtcctaaatactagaaggaagatgctcctactatttgatacatttatcctgatggctcatgtaagattcttcaaagaagagtcattgtatgcagaaacagagtggttaggttcatccttttgcagcgtcaatgataggctggtctccttagatgaaacggtgcagtctttgactaagtgggttagggccagacagagaaattactctaagaaagtgcctgagtgtgtgac

SEQ ID NO: 154 - DNA, 348 bp, Beet necrotic yellow vein virus
  isolate F72 RNA 4 segment, partial1
agttgattgtctgtaaaacaattccagttgtttgtctgtaaaacaaacatatatgcttgatcagctttgtagatccttgactatcaattttatttctatcattgaattcgaattgtttctgttgagattctctttacgatttgtgtcgtcatttcgtatattggaagacgggcctgattccagtattaattggtcagtttgtaggtgcagaacgcttttaagtgagacctaagactgcgtcggaaccttagattcacgagccgcgtgattaattgggtttgtcactgggatccagtctatcagtaaggggtaggttttttgttgagacttatctgattagtaacattt

SEQ ID NO: 155 - DNA, 362 bp, Wenling picorna-like virus 5
  strain WLJQ102796 hypothetical protein1
actgtgtagttgatttctagcacagcggtattaaaatttatcattgaatatatcataactatatttcggttttcactgagtataggatcctttactaggactcggggtgtcattgacgctttcgtaggtggatcacttgatagacgtcaatataaagttatcaatacagagaatcatttatgcgctgatttgtaatcggttcatatagcaatttatttatgcatagatctgtgatcagtgtatatagcacaatagggataatttgtgtacttttctgtgattagtacgcatagcaaaatttatagtattttgtgggattttctgtgattataccacatagcaaaatagttaagtatttgaac

SEQ ID NO: 156 - DNA, 367 bp, Yongsan picorna-like virus 3
  strain YPLV3/16-0052/ROK/20162
aacatgacccgatcgcacagttgaaacaatacaatgatgtcgtccagcgcccaaacggggggagagtaaaccggatgaaaacgaatgataccctatttgaagagctttggatcctgaagaacagcatggataagggagcacgatgaggaataagatccagtgcttcatccaataacaatgtcgggaacaggggagaagtttaaactctttggtagggtagatatgtctaattggaaggtgagtctccctagactagttgattgcggagacaatctaggataacggcaacggtagaataataaatgtagcgtgtccttaaggagcgcttgtatcgtccccaaatcagaaacataaacataaaacaaac

SEQ ID NO: 157 - DNA, 370 bp, Charcot virus
  isolate Antarctic66 maturation protein and1
gcctgaagaaaacgtcgggaaccccgacatccgtcaactatgcggatccttctaacctaaatactacggttaaggtccgtgcccgtatacagcccgttaacaaacgggatgggaagtacaatcatgttcgccaagaaattcgcgtcggtttcgaaacgaaacctcctcgcgcttgcgaacagagttgtgccacctctccagttgtgctcacccttgtttggagcgcgccggaaggtgtccaggccgatgtccctaaagcagtgttggacaaagtcctcgagcatatcgctcttggtactgctttcttggctggacctgatacacttgacgttgatacaacgctaactactaactaaatggagtaatactc

SEQ ID NO: 158 - DNA, 373 bp, Sanxia picorna-like virus 11
  strain SXXX37695 hypothetical protein2
aagcattgacacatatgtcattgccccggttatatgcttaagtgagtctactactcagactttaagagagaggagggcgatgcggtgtgcttgtttgagcgacagcacacatgaaatttagcttacaagtgatataacaattaaagagcaagagtgctcatcgtttgaaggtttagcgttaaaaccggatccagaagtgattggagtttcatcttttagtaatgaggcaggacaatgtgttgaagttaaggcttcggatagcttttattctgttaatcaggttgctgatttgcagtctgttaaggagtatttagctagacctaggctttttgacacttttgtgtttggtactagtcctggtgtggttacgacg

SEQ ID NO: 159 - DNA, 379 bp, Hubei sobemo-like virus 12
  strain spider127544 hypothetical protein1
ggcggtgtttgattacatcgtagcctcggcggagtttgtgagacagaagttgcagttgtcaccttatacttggtttcaactcatcctctgtttcttagtgctcctcccggcagttgccttttaccttagggtattttggtggctgttgagaacctcttggagattctcttgcggattgggacgttggttttgttacgttggatcatgcttgaaatggaatgttaagaaggtttttagggttttccggaaaactcccttacagtatgaaccggaggcctatgtcgctggatccgaatatgagcaagtgaaagaactgccagcttgtcagtttttgatcttaggaaatttggaatgcggtgacgttttgactccggttggt

SEQ ID NO: 160 - DNA, 384 bp, Picornavirales sp.
  isolate H1_Rhizo_26_FD_scaffold_168 hypothetical1R
tcatgaacccacagctcccgtattacggagctatataagtagttttactatgcgttagaaaacgacttaatgtattagttacaggattggtaactcgaagactatgagagtttaccgattatcggatacattattaaaagttctgcttaggtgcaaactaatcagatggaactataaaacgtcagattgatagtctatatccctaatctttaacgcgagcatgggatgaatataagcgttgctgaatcaaataatttaaaaataaatcagtcggaaaccactagcgagactattggaatcgtagactttaaacaggatggagaaattcatgaagcagaaatcaagaatgagattatgttggatcctactttaggacagactatt

SEQ ID NO: 161 - DNA, 386 bp, Beihai narna-like virus 19
  strain BHNXC41285 RNA-dependent RNA1
gtttgggctcagttttccctatttagggaagtgtacacggtgaggattcactgcgtagacaggatccactgcggcctggaccaccgtagttcctgtctacgatccttgaatcggatctgatgtgcacgtacgtctcagaggttttgcctaaaacgctctgatgcgcagtctgggttagctgcgcactcgaattatgacctgctaaccaaaaaggaaagcatgatcatgcggacggcgtgagcctgtccattgatcgagggcaactaaactgtttggaggacgttctctattcctatgagaacgtggttccaaacggcaggcgaccacccaatatcgacaagttaaaagaatgtcttgtcgatctccggaccctcagggtcaacggc

SEQ ID NO: 162 - DNA, 389 bp, Andean potato mild mosaic virus
  coat protein gene, complete cds.1
ttcgccaagctcatgatctgcgttgatgatggaagccttgaggacaaaaaactgtcttacttgtctgaattctcagtaggtcatctctccggcgactgcatccaagccatcttacctccatcgctcatcaagtatcagtcagcatgtcatgacttcttctgccacaattgcaccccatcccaaaaaatccttctcagcctggatcccatccctgagaacaagatccttcaactcctcctcaaagttcgttgggcttcacaggccttcttttcttaccttccccaaaaagccagagagttgctaatctctcgctccagccttccttcccttcactctgatcccaaaatctccctactagagtctgaattgcttccctttttcaattaatt

SEQ ID NO: 163 - DNA, 390 bp, Mossman virus
  complete genome.3
gacaaagggggcatgactgaccagtgctagtatacttatcccctgttcacaaatatggagtcagcagaatattcttttaaagaacagatcatgcaaacatcagccatctacttccatgataaatccagataatacagtgtgtatgtgtgtaaaagaccccccaaatcctatctgtacccttcacaagatgaatataatcctttcttcagccatatattctctatgcctaatagttgatctccatgaagtacaagatttagaccgtaatgtaatactgtcctttgtcatttttgttcccacagaatcccagtaagttactctagtgttagtggtgatgactaaagaaaaacgtaggatccaggatcctaaagccaacttttggggttcaaa

SEQ ID NO: 164 - DNA, 393 bp, Scaphoideus titanus reo-like virus 1
  isolate St_USA segment 5,1
tttaattgcaattctagtattgcaattctctagggaaagccaatcttatttttattcattctcaaattattaagatttatgatttaattcagatttaacaatttataaaaccccagtaaccaaattttgaaagcaagatgggctttccctagagaactgtaatacctttcatttgacactaaaatcaatttttttcgacaattgatggctaccagtgatgactcttaagcactcttgactgattcacacttgttagtatggatccaaacttcgtatggatttagtaaattgagcatgtcaagactacttttcacaggatttaacactaaatagacccccccctctcttaaacaggtgcttctccaattggctgggtgggttcatgtacaaaaa

SEQ ID NO: 165 - DNA, 400 bp, Hubei hepe-like virus 1
  strain WHCC116187 replicase and1
tagagggtatttacatcctgcgatcttgaactttacttaacagttatacaagtttggtcgtcggatgtacggttgttgactcgctgagaactctcttttgaaatctatccagacattcttagagatcgatctcgcctctcgacaatcacatactggatcctccggaagagattccgttagaggaactggtccaaccagattttcggatctttgctggtaatcctcttcgtttcgtggagttttatcgcatactaaattttctcagtttttctttattgttattttttattttatatttagattattacgcggtctattataataccttctacttttatcattctccttatttttctcttccttattcaccttatccttatcctgtttctttcgcttgggt

SEQ ID NO: 166 - DNA, 411 bp, Unknown
  Description of Unknown: Diatom colony associated virus-Like RNA Segment 3 genomic RNA,1 sequence
tgataagcatccagctaactatcgtatcgcgttagtgctagtaggttgcttatactcggagtgtgttctccgatccctttttagggaaacccggagtcaatatgacttcaaggtcgattttatcggcctattcagtgtggccgcaggaactctaaccgctacctccgcgaagcgattacgtgggaccgatgaggagcgaggacgagtcagcgttgcactagtacgaccagggagggttccgttgatctgagcttgtgctaatttcaccggatccccctgagcaaaatttcgattctcttcgttcttctgttctccctagtcgttactagtgtaacgctcgcctacggcctcactcactcagttttcatttatcgtctcggtttcccctccccctacccgatccgaccaaag

SEQ ID NO: 167 - DNA, 411 bp, Mossman virus
  complete genome.4
gcagcagtaaattgtttctaatgaactcagtttataatccatgctatataagagtccataggttgaacccctgcagacttacaacacccttttggctctgtcttagagaattatctacaatcagtattgcagtggattccttaatacttgggcattatatttcctccaacacatatcatggtctgtataatgcttatcagattgtaagacacctagggtatgagaactaaaaatggtactcagtaagagaatagattaaaactactagatattaagcctcatcagtatagacttaatagtgttttaacaattatgttaatttgatatttcggtcagtagtattaactaacctcatttgttagaatattacaaaaaacttaggatccaagaggagctccgtaagctccaata

SEQ ID NO: 168 - DNA, 412 bp, Unknown
  Description of Unknown: Uncultured virusisolate acc_7.3 hypothetical protein gene sequence
ggccaattgcctacttctatacattttatgtgtccccgtttcaattgaaaaattgaattgaactcaggaagactagggaccgtgcctgagttggatcctagatccatgtgcgtgaagcatacatagtaaatgtaagaaatataattaatattcttcttttttaaagattaaaaggtattttatattgtccgagcatttacgacctagtttttactaggaacgcccctttgacaacttggggcaaacccgcggcggtctgctattgcgacacgtcgaaatggtcactgttagaattgtataggtggcctgttaaccatatatggggtaactgtaaaaatagttatggccaaaatcgtcttaatagcctacagggaggcaacagggcgtgctaagtggtaatttatttacctaa

SEQ ID NO: 169 - DNA, 413 bp, Lonestar tick chuvirus 1
  isolate RTS21, complete genome.2
atttaaggggatccctggaaaacatatgtattattgaatgcggcccatatagcccttattgccgcaaactttccaggtagttatataacccattttactatgagcccagtaggaatataacctctcactgtgggcatattgtatgtttgtttgagctgtattaaaaaccatcttgggccatagagccattttgctagacagctgatccggagagaccagattccgttcatacagtgcgattgtgagttttcaccattgcgtttcttgctttgcttgtggagtttaatcaagtgtttcgtgaaatacttgacttctccaccgaagtagagacctcccgtgacatcctagtcgctatcgacctgctcgagagagcacacgaacttagtgaagacatacttgatctttacacaaca

SEQ ID NO: 170 - DNA, 414 bp, Thrips tabaci associated dimarhabdovirus 1
  isolate Tamono1 RNA1R
aggaagaagaattctcagtagtttgattgttttttagacctgcttggcataacgggacaagaaattgtgatgactccctatacatatcgctttgccaaattaatcttaagtcccggtacagagctggtctctgaatcggatcctatatatccttatatataaaggcctaatactgctaagtactgacatttactagtttgtaagaatcaacccagggggaaatgttggacggatacagattaagtgcaaggttcttgtacttaaggatgggaatctcagggttttgcattagaatcgtctccaataagggatggattacatcagggggttggagtgttttatcaattacttaaatttaagccggatgttaattaagatgtataaattgttctgaaaaaaactaacagacgtaat

SEQ ID NO: 171 - DNA, 429 bp, Ying Kou virus
  strain YK1714, complete genome.1
gaaaataaaaccaatacaatccacttttctcagttattccctgacccggaataaccccgaaaaacaaaaattccctggtaccctaacccggtatcacgaaatcgcttaccctgacccggtaagtccaaatccgctggctaacccccagttaactggtacgcgagtaattcccgtactttgctcccttcgcttaccacgaaggtaactgcccaactaacccttgggataaattctggttgacttaccctcaacttttctcgcacggctcacccccgtgttatctgttctcgctaaccccgagaaacttctcagaaccctcacccggttccaactgatccgctaaacccggaatcaattctcaggatcctaacccgatcctcttcttctacaggaccctcacccggccctctaatccacatcggattaaca

SEQ ID NO: 172 - DNA, 440 bp, Lunk virus NKS-1
  RNA, segment L, complete sequence.1R
cgcaccgaggatcctaggctattttgatgcgcatttttggtatctggaatggaagacattattggagagataaggcatctgtgtttaagttacatgagtcaagatgagcgtctgtccaggcaaaattaaacttcttaagtcagtcagagccgaagctgactttgatagaagggttgaagttgttatcaaggtgcatagagatagacagtgctgacaagaatggctgtgttcacaatcatgaagacaaatcagtggagaccatcttgattgaggctggtgtcatctgccccgggttacccctgattattccagatggttataaactgattgacaacaccttaatcttgttagaatgctttgtgaggagttccccggctgggtttgaggcaaaattcatagaggacactaataagctttcaagcatcaaagacgatttggca

SEQ ID NO: 173 - DNA, 464 bp, Beihai hermit crab virus 3
  strain BHJJX21702 putative glycoprotein,2
aatccttctccaacaatctccctccctctcctcaagagtatcctattattagggatcctcattcctcttgcatgctgtaaatagttctcagtatagtagtggacccatatattcttgccatagtattttccatgcttttcatacaatattagtatagcccaatgctcttgtccatgtctgcctgtatatttgcttatgtcgtgtgctgctttaaaaaacaatcaacaacctcgagtagacccttaaaaaaagtgtcctaaacaatttagttaaaaattagaattgatcctttaattcttgctagtcttcattacccagtgaattttcgattactcagtttttgttttttgtggatcggaagattaattctctaatttgatcggaacacagagtctatcaacctgtctccctgggaaaagacagccctggttgttggtggtttgggtcttgtggcgtgttggagg

SEQ ID NO: 174 - DNA, 468 bp, Elephantopus scaber closterovirus
  strain pt171-clo-1, complete2
acacgaagtgaccgttcggatttaattgctgcgatgagtattcgacgcgtgtggttaaaggttatagctgtaattacagtgttgtggtacggtaaggaaccttccattagtgaaggttacaatgctcttatgaacgatgactttaagtttatcgatacacacttctcaaacgtttcttatgctaagaaatgttatgatttggctaatttcgatttggactttctgcgcatcgttattattcctttgagtggtggtacggtaaacgaatcgcgtgccgatcgcactaacgtttcagagattgtcgaatcgcacatgagcgaccgagacagaatgaatatcttgttgcgtaataagcggatccagattccttcgctcttaccttgcgataactagagtctactcagtagtgcgtctactagtataacgtattaaacactttagtaaagagttttgtttaagttaaacaat

SEQ ID NO: 175 - DNA, 471 bp, Lake Sinai virus
  isolate LSV3/PNG_Ac-b putative capsid protein1
ccgttgcgcaccctctctaagattcacgtgtgttgcgccgatggatcccccaataacctcattgttgctaaggcccttagtgttctgaatctcaatccctccacacccattatcacagccttttgtcgacatatacttaatgtcgttcgttccaggttgctgaatccgcgaaatcgtaacagacttgctgctgccgttaagcgtgtcgcaccttggatggtttacatgccttttcgttacacgccttattatgctgagccatgtcctgccactcgcgccgcgtttgctgtgcgcacaggcatttcccctgccttgcagatcgagtacgagaagtacttgctttctctaacgtttgtaccatctaggtatgtcctgcttaagcgcgatgttgagctcgatggcctcagtactgtcctacttggcgacttccggtctgtcctttacgcgtagaatcaagaaatttactacgcc

SEQ ID NO: 176 - DNA, 473 bp, Fusariviridae sp.
  isolate H3_Rhizo_Litter_15_scaffold_562
tgggctctggggctggcaacatttctgcatctgcaaatcaagatcgtgcagatttggtcacaaaatgcacaaatttgatttctgccagtcttgaagctgcatcctctggtgacccttcattgttgaatgggatggaggaattagcctattttaacggcgcaactggtattgtgttgaaaatgtctaatttcctttttaaacttgtgtcagacccagttggtgaggtgtctgaaatgttcaatccaaacaatagggatccaactggtacactacgggacgtagcaaacgtgttttctatccttacaagcctggcttcaatcagtaatgattaagcattggcaaaaatcttatgatcctgaagagtctgttttacagcgaaaccgtcaaggtaggtcaacatgagtaccaaaaattcaaaagcccctagtgtggcatcgaatgagtcagctggtcaatcgttagttcgagagatc

SEQ ID NO: 177 - DNA, 475 bp, Fusarium langsethiae hypovirus 1
  isolate FlHV1/AH32, complete1
gggggtgtgaaaacctacacctattcacaatgttttcattatgaatcgtaggttcgcttcgttgcacagggttaaaatcccgcgctattttgtccgttacagacgcatagcagtgcaagcatacttagtcttaggagtatgcatcctggaagtttgaccggccctcatgggttagtcttttaaaatctcgggagagatctttgtggatcctagcgagcatcaatcgtggtaagacaattttaaaattggtgcgtgttaagacacacttgttagaaatttcattcagaaaccgttggcagttagcgaataactgtgatttgactgaaccccattatcagaacggcaagaaagatgaatctgtggagtagtgccctagaagattcaatcctctttctcgttaatggcttgtcacccaggccctggccgctaaaccagtttatatttcatcctagtttcttttaggattattagctca

SEQ ID NO: 178 - DNA, 483 bp, Wenzhou yanvirus-like virus 2
  strain beimix74779 RNA-dependent RNA1
ctggtgtaaactactttgctccccgggtagcttacggtcgagtcgaacggcattgaaaatgccttacgactcgatcagatgacggggagcgccccccccaggtgtttggtcgcacctggggggaatgacggtaattcacagaatagcgccgagctggaactggtgaattggtggacgtggatctaggtcttttgggttgacttaggtgtgagtgtaaagtgggtgaaaccgcagcccgaataagctcgcacgacggatccatgtatcaatactattactcgaacgcccaaaacacaggccgtgtaataggaacctgcgaaagcagtgcaattgggagaagcccaccgttgcatcaccaatcacctccaggcagttctgtggagggcccgatatgtcgacctcactcggcacgcgcgctcagcgtcaggcacgccacggtgcctgacgtttacacacacaacacacacacagcactttccttat

SEQ ID NO: 179 - DNA, 500 bp, Picornavirales sp.
  isolate H2_Rhizo_32_scaffold_97 hypothetical2
acgtacgcactctattaactaaaaggtatgcccgaagttcctaaatattcgggggtttactctttccacaaaaagagattaacatggttgacttgctccataatgcaagcgcttgagaacaagctatagttctgatggtaataccccttgaggaatccatatttctaggatccgttcaagtccgaagaattgcgcctcattgaattgagcataatatcgcgcgtgtcgtaggtgggccaccacgcgtatgatttaagtccactgctgattcaggtaatgaattaaaacttgggaatgaaacccaaacaaaaacagaaatcgactctggtttagtaacttttgaaatcaaggaagaagagataatttcggttagtcccgaaattgtaccaagcttcccggttcaaaatccttaccagaatcaaacagcctctcagatattatctaggtggcgagcaataggttcccaatcactgggtttaacgactcagtttgggacaaaa

SEQ ID NO: 180 - DNA, 504 bp, Diatom colony associated dsRNA virus 7
  genomic RNA, complete1
tgaatatgagcgagagcaccccataggtacccttctcatacaccaggtagtcctgggggtgacacttcgcctagctatgcaagagctttgaaagtgttcacctgagcacgcggcctcgtcagacaaggttagcgccgaaccccactagctaagttgatgctcaatcgtagtgtgtgtgttttctagcattcacgccgaaggttactgagctctgtaagattcacgtctgcggagtagtgattcaccgttaagtcgggatagcttcctgtttggaaacactcaggatcagggctaagaccccgtagaacagtagccgagtagtacaaactcaaagttagtcttgtcgagtctttcgcgcagtacaatcagggtaagaagccattggtaattgatggtggatcctatgaagttgtagctagctgagattctcatatatcttagttctagtaacaaaatcataggcgtgctgcacgaagcagaaggttttaagtgatattatcgctg

SEQ ID NO: 181 - DNA, 508 bp, Wenzhou picorna-like virus 51
  strain WZSBei69571 hypothetical2
tccatttggagcgtgggtgcgctccttaaatatacgcccttttaagtggctggcaccacagacggatcctctggattgtctaaacgccctttttcattcgcgatccgcttagttttcctgttcttagttttgcgtgaatggaatcgtattaggaaatgttgtgctagtgcgagatattcggtctgatctcgtaccttattttagacctgcaagtttatcagaaacacaaactactgctgatgttcagattcagcaaacttttgcctttgacgatagtgaaaagcaatttatacaaactgtccgggagggggaggatccttcccatgattgggggtcatattcggatgttgatttagctaattggcttcagcgtcccatattggccaccacaaagatttggaacgtaggtgagggttttcctgaaatttatttcaacccttggtctgcttttttggacagccctagtgtagctcagaaattgtcaaatttttatctccttagatgcaag

SEQ ID NO: 182 - DNA, 515 bp, Rhizoctonia solani mitovirus 25
  putative RNA-dependent RNA1
ctcctttacagagcatacctggctgaatcgtagtcacgacccaacctatggccttatatggctgtactcgggttcccgaaacgcgaagtaacgttcggtgtttgcaatagttctactattaataatactgaatgcgggtggagtctcaagtgagttagactaacggggtaaggtacctttacaggtaagaatccttattcctaggtctttctcatcctgagaatgtccacatatgcgtaagcataagagaattactctctggctgcagcccggggcctcattgaggatccggaaactgaagtttaaaccgctttactttgtacaacaacctattgcctcttatggtgatactaggatcagatataactagacggggttaccccctagcgacttgagtgtcgtcgtgtagtgagatgataaaacaaacagtgtttggttaccacttaaaactcgtgacctcatcgaaatctccctagtccctcccataggaaccgacaggcggatatttacctaaa

SEQ ID NO: 183 - DNA, 523 bp, Caledonia beadlet anemone dicistro-like virus 2
  isolate I38,1
cgatctatatttttcatacacaatttggcccacagttaagatggactctgtaacagacaaaatatcgaccgatttgcagcaatcaaatgaagcatatttcgacagaaaacatgaaccatgcggacgatatattcttaatagttatatcttacttgaacctttgagtacgttgattatggaacacacatggaactgattaggtcgatacgattttaacacaaactttttgcaagtataaagcaatgactagttttcaaaaagaaaaccggtatttacaccgtaagtaaaaaataattttttccagccttcctgaatatagtaaggaaaggtattggcgaaatggaaaattttattttatttaaacatagtttgttgaaaactattcaaaatttcattatgcgatttttaattgagacgtcttattaatagactaggtactaattaatctaacgcatagttttacaaggcagcaacaccgcatcaatggatcctaaccatagatgaaaagaagaaaaaacaaatc

SEQ ID NO: 184 - DNA, 528 bp, Wenzhou picorna-like virus 6
  strain WZSBei69574 hypothetical2
gtaaatcaaggcgtcgtgtatgcctattgtaaaagcacaccccgttttgccgatggggttccagagtaaagttgaacaggcatgtgtgtatatggttacatatggtgaaaatgttttatatattttgtattttcgttagaatgctttgcacataaataatatcctacagaaagggtacccgtatttacgggatgtgggattggatcccatatcaagatatgtacttctgcaggtttaatcgggcctgtagtcgcaaacaaatagattggtaattgtataaaagaattgtgttttgataataactgtaataaattagtttgtatatttggtaagagttcagcaattgttaacgctgaacctagtgctcacatttcatgtgggcgagaagaagacgctggccatcccggggccagcgcagtgcaactacgatccatagatgagatcgaggaagcacttggaattgtggagagcgatgctgacagcatatgcaccatattcgagcctcattccgggacaacggatgacaac

SEQ ID NO: 185 - DNA, 530 bp, Marmot picobirnavirus
  clone c293452_g2_i1_libraryA_2678 segment I1
tagatttacaaataaaatataggaggaagtgctatgaataacatgcattttaaagtagtttcagcgctactgaagttggcgcgacgtgttaagtacgttgtgtcgttattgctgacagccatctctgctgtaaaagagaaaattaattcatcaaaggaggttaatgatgatgaaaacaagtaacaataacaattcccagcggtcgggccgcactgcagtcaaatgtgatgtaagttttgaagagcttatagctgatttggatccaagtgacatccaatcccttgtgtctcagcctaagtgtcgcattctgtctcacgatcaactttcatcatatttgggtactttatgttctaatcattcaatggttgaaaatctcaaaattaagcaccaggaattttcttcaagaggatatcatggagtagtaactacagtcagttattacaagagatttaaatacagatatgtgtatgagcgcatatatacaattgaatatgttagtatttctgaaatggttatgggggtagaaaata

SEQ ID NO: 186 - DNA, 535 bp, Wenzhou picorna-like virus 51
  strain WZSBei69571 hypothetical1
tttatgcccccccttctttcgagaattcataccgtgtagatcgctaactaattttgtaagcaactaactttaggtcaatgactgtgcgacctattgtaagtatatctactgccaacttccatgagatggtttgttgtggtatgccgagctgatattacgttgtcagcttggatttagcggaaacgttacaccccttcctcctgcaacatggcgtcttgttgctttagtgtagtgtccgcgtcttagtattatgaatgacgcccttatatatattatatgttcgtaagactgaaattgtactcccgaagctatcacggagacgcatctatcacagtcggatttagatagatgtaggcaatagccccatgcaccacgggttgctatatacccctaaggcgtctaattcgtttaggcgtctcattgaacctggttaagaatctttaggtgcaacgggtgcgaaggcacccaatctgcccgtgtggatcccgtcctaacacgacgtttaggtcccgaaacggattctttgtccgtaagc

SEQ ID NO: 187 - DNA, 560 bp, Linepithema humile picorna-like virus 1
  putative RdRp and putative1
ggtaggattatagatggacggaacatcttaaaaattctgttatgtcctgattatgacagcactaagtgacaataaactaatcacccaaatttaaaactttgatttgatattcaagttgacgattataggcattcttaaaggaattgatttcgatttataaatggaaatatgttaatacatcaatataggactaagcgattgaaatgaatcaggaatttatttatggcgacagatcttaattacttgaatgacatatcctgtctcttatcatgtgttctcctatggatcccggtggagaacaagcacgacatgatttatattattgtatttcggtatgcacatagcaagtagtgcgtagccttcagtgatcagttagaaatttggtatatggtgactaattgtcaagtatattaaataacgttgttctgatcaatactgattgagcgtaaccttgttctattagcgctaggagtacaattttatagaagcttgcttcagagaagtcccggaagttatttatttaattaaatatttcatataggctaattctaacgatattg

SEQ ID NO: 188 - DNA, 562 bp, Yado-kari virus 4
  genes for RNA-dependent RNA polymerase,1
cgttaataaattcaaggatttattagctattttatttgatagttttgcttctgttcagaagtgtgccctgcatgcaatacatgcaaataggttaggcagtagaaatacagatcgccggggaccagcattcattctttacgaatcactgggttacagctactttgactagatcatatactgtatttatcattcgcgttggttggacctgtaatagcagggttccggtcttggaaatcaaaacgagggcactcgccaagatgcgttacgtcgtaacaacctgaaaaagtgggcttgacaacctggcctatcatacactggcaagtgatatgagaggtgatcaaatataccgagtagcatgaatatcgctacacgtagtcacaatttaaaaaaaaagcattctgacactgggaaagactagaaacaatcgtgggatccaacgatggtaaaatgacgcttgggaatcaacgtgcccaataccgaatcgatcacagttagtcaccaaagaaggtgcaattaaaagaacacatagttagtatcctgaacacgactcgtacaataactc

SEQ ID NO: 189 - DNA, 569 bp, Wendell virus
  isolate Antarctic4 polyprotein gene, complete cds.1
ggtggggatgcgcgcatcatacgtgatgtgtgcatccacccccccttttctcccctccccctccaactaccctttccccctcgttcggatgggttcttggttaacgtgaagtttggacgacgatacggcccttacacctcacgggctattggcacgctcgtgttgtattgcaagttgctcctaagtatgtacactggaaacgcacttggcacgtgcgcggaatgtcgtaccaatgttaggatctaagcagcgaaccttcgtagctagacatactactgcgtaggatgatgatgaccagttttctgtatctgattcaaggcactccacaagatcattgtacgccggatacggttctgacactgcgccctaacctggtgctgaaatattgcaagggcactggggcgttgttgttggttcccgccgctggtgatcgagtgggccccacatttgtgagtgcagttgttctgccgggtaaatgtgcacctacgtggatccgcagttgggaatctgcggttttaagtatgactgggtgatagccttgcggctggccaagttacgattgtagccag

SEQ ID NO: 190 - DNA, 572 bp, Spissistilus festinus virus 1
  complete genome.1
gtcacacacccacccgtgtgtgttcggcttgcggggaaacttactgcttgcaggaacgaaaaacaagagcagcacaaccgaacacacacgagtgtcccgtagggaccgagtcgggtgtgttgatgcaaagaagagagaagccgacagctctctactaggctgggggatagctctagcgggatgtatccgctttgggattttctgcccagtgcccaaaatcagggccgccaattcgacttaaaagggattggatggcgcctgtgccaagggtgctaccaagcacctggagtgccgatcgactacaacgggtcataggcatggccagctcaggctgggcccagcctgctagtaggggggatagtcacctgggggatccagggtatcgccaagtcaggtatccactgttctttgcttttgccaggtgctcagccgtttaactgagcaaattgctaggtcccagccgtatctggatttattatcttcgctgttgtttgacagtgctataaccctgctactctccttactctaccctctccttttgattcccattctggattcgactggagatagac

SEQ ID NO: 191 - DNA, 572 bp, Shahe tombus-like virus 1
  strain SHWC0209c12685 hypothetical1
attcaatggtatcggcggcattggcacagatggtttcgtctgtgctcgacgaggggcccaggatcctcctattcctggtggtgtgggttgttgtgcgtagggtgtggcgctggtttcggccgggccccactgctggcgcgcaactggtggccgagctggatgctggcccagactgggacaccgtgggtcacaccacgcgttaccagcgggagctggcgtatcggttcaaggcggagtttggcgagttgcgctataacaaggctaaccgcattgtcgcatcggcctgggtcctcaagaccatggccgctgatgacgtgcggtacgtggaccgtgttatgctcgagccattggcagtgcagttatgcctgctgcccacacgggctgcagtcctcgccgcggcgtttgcaaagacccatgaggtcaatgcgcgccgcgacgaggctgagctcgttaaatagggatgccctgctgaggtgcctggagtaaccacgtctgtcgaccgtcgtggtgaagcatgcttgcgtgtccgggcaagtgtcggcaagggtataaggtccggtgttgaccgtaca

SEQ ID NO: 192 - DNA, 580 bp, Partitiviridae sp.
  isolate H4_Rhizo_Litter_19_scaffold_21291
cgccacgtcgctcgtggattgctcgacagtggctggctcagtacgatgagtctcggcctcggatggtggcgcagcaaccttttctagggcgtgctctgcgcgccgcagcgattaagtcggcgcgttctgtggctacagtgcgtactggtgtctctactggtaaggatactttggtgacgacccttcgagccctgcattttggggtcgttaaagccgtcgagcgcgtcgactctgttccaggagcacagcttcgcaatccatcacctttcacccgaacgcgtaaattgcctctcccacagaccaaggtatgtactttcttgggaacatggccgtttaaagttggaagtcaaccagctatcgtgcgacgtacgacaaagtccctctttaagtggtggtctagtccggccggtgcaccgtaccgtgcgacatgtccggatccacgtaactattttcttgtcaacgggtcttggctgcgaatatgcatgtacttcgcgcgtttgcgacaccttctgatgcgaccgttactcgtgcggagctattacggtgtctctctttcgtacacacattgaacatccctttt

SEQ ID NO: 193 - DNA, 583 bp, Korle-bu Aedes virus
  16GH61 genes for hypothetical protein 1,1
gaaggttaaaggagacaagttatacgcgaatggagttcgaaagaacgccaccgtggatccccctccgtatgcaggcaaatcacttcaggcggctgcacttaagggccaggtagtgaccaacagtcggcccccattctgcgctacagaaaccatactggtcaagcgccccatttctaccagtaccaagagcaaagtgtgttctgaatctgccgatgagattaaatgcgatgccacgttgtactattatctcatcgacaagtttgcttacatgccacgcgacaaccgcatcatggggttgatgcataatgccctaacccgttacctaactgattatgactgttctaattattcgattggacagatttatcggttaaagattgacgctgttagggcagcattgtttccgcccagagaggagcaggaaacacgggtgttgttgcgtgattacgatcctaaggttttggagaagcacgcccagtggactggagagggcattttaggacgtaattcttggtggcaatcttccgaaaggaggatgcctaaggttaagaagtaggggtcgctagtttcaccctctatttgc

SEQ ID NO: 194 - DNA, 595 bp, Unknown
  Description of Unknown: Picornavirales N_OV_001 putative structural protein1 sequence
gtaacacgtcgaacctgttatggcttatcgtatgccctgctatggcgaaaatgctactatgcgatgggagactcctatgtctcaaactaggaaatccaatttcttttggattgccatttgtttgttcatttggccgctctagctccgagtgcgttgcacttgtaacttcgtgcgtaacgaagatagttgcttatttcgagaagcaacacttccgcctatatggctgaacctggattggatccctgttctggaaaaggaaagatcccctcccctctggttacccaagacactataccacgtagtgtcctatggcttaggggttgatgtgtgtccctcatggggatacccctttttaggggagacagcactgtcagtgggaccctgctttcaatcaaaaaagtgtagattgttagctgatacgtcacttactgaaaatacgaataataaaactaactcgtctgattcacatcaggcgttcgacaatgaccaatcggtaacctctactagcaacgttgtttctgctgatcataccactgacgtggtggtggttagtggacatggccacgctgatggaggtacaaccgatgattcctta

SEQ ID NO: 195 - DNA, 600 bp, Hubei myriapoda virus 2
  strain WGML147749 hypothetical protein 1,1
tggcgtttttggcagctatgctcggtggtgaagttttgaatatggggggtagtttaattggcgcaaaagtaaattatgattataattctatgttattaaatcaacaattggcaaatgctgaaaagtttcagcaatttaatgcaaatttaatgcaacagcaaggtttaccgtatttggctaacggtggccaaggatataatcctcaaatttctaatatgtacaatgccggaacgtctaatggatttaataatattataccattaatggctggagcgtctgccggaattttcggtggacgtggttcaaactttttcggatcccaaactagaagttcctccacacaaactggacagtcgacctccaattccttttcacagacaggacagtttacttccaattcttttgcgcaaacttatgcatcagcttatgaacagccttatacaggggcagatacggacttttacatctctccgccacccctaactggtactgctgtaaatactatggcagatgcagcaactgatgcgggtgccatgatggctgcgtagtcctgatttcatcttactacgtgataggataggcgctttgtatactgtaaag

SEQ ID NO: 196 - DNA, 600 bp, Hubei tombus-like virus 9
  strain WHBL63242 hypothetical protein 11
ggaccatccaggcaggtgtaggctagtaccctcacctgacctgtcgcgatgtttggctttgtgaggcttgtgggaggatcccttggcccatgcattgctgctgtcatcgtgaaaaatgttgtatgctcgcacctggcgtggaggaaacggcatttgacggatgctaaggaggatttgaaggtcctcaactcccatgccttattacaagtcccctttccttcaagcttcgagcccacgtctgtgacgagcagaggtgaggttggagtcaagaggagtcctattcaagctgttcgcagcaagaaccataaaactttcattgctcaatgggcaagagcggctaaggctcggttctcgtttgcacgacagtgtgagcggagccctgtaaatgtcgcggcccttcatcggtggtttgcatcggagtttaagaaaattggcatgaacttgctccaggtttcgtacgtgatcgatgaggttgttgaacttagtttggaaccaacgtatgagcgtatggtgtccgaaactaagaagcaattccgtcatcgggcacgtatggaatactacaacgagaaaaaatgccttgaaaagatccactaggaacgc

SEQ ID NO: 197 - DNA, 608 bp, Santeuil nodavirus
  RNA 1, complete genome.1
tattatcatactgacaatggtaatatgcgagagcgatagcaagcactagaaacgagttacgcaaccacagacagcaagcccggaaggcgcgcagagactgaacacctctgtgtggctgaaggctccccactaaccctggagagaagtggcagaaccacagcctagtactagccgcaaggcttaagaaactaggtgtagctgagtcctttcccttaaacaaggattggaccacttgtaggatccgtgtattcaaacgatctggcagcactatggctcggacaggtacaaccaataaacacaagcgttttgagaaaccggcgtgattgtaccgcagttttaaaggagcttcaaaccctcccagccgaaagatcaaacgaagtcgtagttgaactaacgtagtaggggagcggcgtttgaggatgttcacgggtcagtaacgtgaatagcttcattcgtgacgtgctcaaaccaccgtataggttcgccttagtcattagcagggatggctaggttcagctgcgcatgcacaaaccacaacaataaactaaactttattcgcgtatttgtgcattcccgttgcccacccacactcctaacaaatttcaagt

SEQ ID NO: 198 - DNA, 619 bp, Osta virus
  isolate OTU55 hypothetical protein gene, complete cds;1
caacaaccgacgctccccacgtccgggtcgagcgtcggttgcagggttttaaaccagttctagccggtaacggctagaatgtgattcatcacacttggggagacccgagtgtgttgttctcgtcatttctcaattggctctcggacatcaatgcaccgagttacccaactaacataaaacacgagagttgagataatgaagaactaaacaaaaagcacttcgaacactttaatacaaacctagggatatgacaatctttgcttgaggcttggttataccagccggacaacaaatgttggagtctcactacgcctacctgattatggtcggtggccaaaacgttagccctatgttgagagggtgcgggcgtgctaagtttcccgagaagggatcccaaatgccgaacgactggaacggccgcaatgtagtggggggacagtctattccgcgcaccccaagttagcgcggagtgctcaaattcagctccagggacagctcaacagacaaccagttagtatcgaaagtcgaccacagacgaaatcttattactaggtgttatacatccggatatacaaacagtctttttcaagactagggatttcagtgcataggacttgta

SEQ ID NO: 199 - DNA, 628 bp, Wenzhou picorna-like virus 3
  strain WZSBei69560 hypothetical1
cgtgtagcacgattattagttggatgcttatatggtatatgttgcgcaaacgctcatatgccatgtaggcactgattataagagtctacccagttttaactaaactctgcttctagttcctttagaagccacctaccgcgaggtagtttgtataatagtgtgtatatgtaagacctatttaataaaaattattcatatcttataaagaaaaaacttaggtctgtgatttgtataatatagtccatcagaaggatccctgaattactactagtcatgtagtaaggttgaaaatggaaatcctgcttgttgaatgcttagggtgcgattcactcactgtgtgttgtgatagtacttggataagtatttagtgacgcttgaatggtcactattgtcgcattcggaattgtgtgcgactgattcaagaggatatggtggaaaaagatcactggcgtaaggcaatccagtgaacactccaaagggaggagttagttcaagtttctccgtgtcaggctcaggaaagccgggtgtggacatccacctactgaaccggttttgtctatttccaataaaatagtcactcccaattcgcgcgttcctaacccgtccccgcaaaattaaagaattaatc

SEQ ID NO: 200 - DNA, 630 bp, Myrmica scabrinodis virus 2
  complete genome.1
gggaatccctatgcgcaattatttgcaactccgacgtggctgagtataaacgatcccgtatgtcctgaacatgacagcttagtcaataaaccgttcaccccaaactcatcaaatttacagtatttagatgtaactaaaatctttcactggattaacccaattaagaaagatgattagtataagttagttttaattattagtggaaatctatttcttttcccgtgtataagagagacctatttgcacgttaaatatttaaatggaatacatgatggtgtcatgttaaaaacactcttactactggcgtaagtattctcgcttttagtatcgtattaaagaaataccgtataaaagattgtgtatcgcgattgcgaaagctaagacaatgggtgtaacccaggtcgataaccattagcacgcggcatttgcagcaagcaaagcacttcccttttatattgcctcatactcgcgaggttcgactatgagtgtatggagcatgaaattgaattatctttcatgttctgtaaccttcgcttgggaaggacggatcctttctatttttattaatgacaactaaatcttttgttcagttgttatcaaagctatcaaagtttaaacaaataaattaaa

SEQ ID NO: 201 - DNA, 647 bp, Bat Paramyxovirus
  Eid_hel/GH-M74a/GHA/2009, complete genome.5
ttgtatgtaatcagttaaaggaatctattatttctcttctccattatctgattatatcctaagaaaaacttaggaattcagggtactgcccttaatgacttgcactaatatcaaaatttcaatatacgacgaatgtgattggcttgtattatcatcataactacctccagccgtatcactgacaaaagatttataagcactggatcacggagtcagagttcaaagcttactaacgtcaacctcattatatctagttggtgttacagggttacttcgagtcatatatgtaattgcacctgataatacctctctcatctagtacattacctcaacagtatgatctcggggatccaactacacctcgacaactcataacaatcaactaaatctgcctcacaattgaccattgccattctctcagtcataaaaaggatcatcccaactgattgattatttctttaaaccctaaacgtaaattattcaatcatgtaaaataaacataatactttcagatctacagtgatagagttcttaaatttattccaatataatcctattaattagcattgagagatctcccatgacatcacttttccagtcagttaaatctcagaaatccactaactgagctaccgtcgaagtcaagc

SEQ ID NO: 202 - DNA, 655 bp, Riboviria sp.
  isolate rfb198shi4 genomic sequence.2
gaggtgttattcaaggcgaatacaacaaaagcatcaacaactccaccaatgaatccaatcaaaagatcgctaagatgaacaatgacacctggacccttacaacagacaaaaacatccagggccagaaagacatccaaaagcatacagaggaccaattcacaaacaatggccttccatcttacatggcatatcaaaacaatgggggaaacgacaaattaccacatcagcaataccatctggggggaaacaactattatcaatctggaaactatggctcttcacagccatccatttcaaataattaccagcaatttaatcacgtgggagtcccttcaaaatttgaaaacaaaactgggaaacaaaaatttgttccgggtggaacactacaaccgaaagaacctactgccgttccgaatactatggtaaaaacaccattccctacttcaactggtactcaaaccagccgttcaggactcggatcccgtgttccttcaacttccaattttcaattttccaatatggacccaaaattttcttcaatgcttaataatcaggtttcaaaaagcaataaggccttcataccttccgataaagcaaaatttaaggatacctggactcagacaaaacaatcaagtactgccacttccatgatccc

SEQ ID NO: 203 - DNA, 660 bp, Changjiang tombus-like virus 21
  strain CJLX8746 hypothetical1
cctaaaggtaaacaaaaaccaacggcttgtcccgtaaggacgcaggaaactgcgagacaagaaaagaaaccacgagtgattaacacttgtaaacttaaggatgttcctttgtcggaactccaaattttcataaggaattatgaaaatgctaaggcgactgggattgagcctgatttaaaattcctttcaagacagaaagaaattttgacaaaacacaatcccaacagaaaagtgaagacattaggacccgacaagaatattgccaagttgttagctgataagagaactagatcagctgccttggattatgtagcgcaaacatcttcacttgacaccgatctttatggatcctatttagaagatgaggaatttccaacttatttggataactgtaaagatcgccagtatagacttaagaccgagccatgtcgatcgtcttatattgagaacttcaatgaaccttccacattggtaccacccaaagatttggttaatgaagttttcgaacagcctaaaataaaagattacactttaatagaagtggcttcatttaagtacgtccgagagaacgtcctaacagaagtatgttttaataacactattgagatcagaaatagtgttgaagattctaggttagatgttttgactaatactgatttg

SEQ ID NO: 204 - DNA, 667 bp, Unknown
  Description of Unknown: Armigeres iflavirus gene for polyprotein, complete cds, strain:1 sequence
ataacttttaaaattgcacgtaatgtgcactgcaattttaaaagttatttttctagtaacagtacaatgcacaatctaggcaattcatgtctcttatggcatgctttgtttggatgagttagtcctctgttgtactgggaaagctttagcatcccaaggaaatttagcgaaaccccaaacctgtctcctcgacacaaaattggaaaacaaacattatcgaaagataataaggtgattccgtattaatccaagagtagactccatcacaactcttgtaaataaaattgtgaattttatctatatttgtacccgcaatagcgctgacgcctataaattgaatttataagtatgcatttgaatttctatttcctattccatacgttttggataggacacacccctctaacaccacctcagacgtggcgcattgagtgtgtaacgaatagaaactattttgcatcttgtttaggaaatttgtagaaacgaaccgcgacagtatagtaaccttactgtataaagacaaggtttatcaagtatttcacacttgagatgtctgatgtaaattccagactatgtactatagtgatctaaattgatgttttacaaggtatgtttcttccgcttcaaaggatcctaaccttagaagaaatcgaaacaaaatgaaaat

SEQ ID NO: 205 - DNA, 667 bp, Bremia lactucae
  associated ssRNA 2, isolate DML-A_DN40638 coat1
gcgtccggttatttcacccacctcttatatctggccgaccaggatatctgaggtagcaatataatggccagaaggttgtgaaagcttatttctaacggcgcaatcgggaaagttaattcttagcccgtaagcctaggatatcaacctggacagaacgagccatagcataggcatggtgagcgagattccacagcaacatttagagaatgagagacaaaaaccccataaaaataaatataactctcttatctaggtgaccgtaaatgtattgcactttttgtttaaatcgcgggaattgcggcatatgccgtcgctcttgacagcgtcctccggagattgttcttactccgagtgcgttaatgtgtagtctcacttcggtgccactactgggcccacagacgagaagagatcactcttggtgcaaattggaagtgcgtacaactgtacgaacggtggccgaaacctagtgccacagcatcgagagtaaagatttcttgtggatccacgttgtcaatagagttgcgtaggtagtctgtgtgtgagcgcgactggttatgatcgaaagctatccattagcttccgaaactgttagttcaggattaggctgagtagcatcttgaaagaggtgtgcggggactcgggcagtggactttcataatcactactt

SEQ ID NO: 206 - DNA, 667 bp, Beihai weivirus-like virus 7
  strain BHZY60887 RNA-dependent RNA1
ttcacaccctgcattaatttgtgaacactttaaagggggggtcaggaggaaatgcctgactcgagatggcgtgtgggtcatgcaaacacccgttcccaggccgggccgggacccacgcaggtgagatgggacacctgtttgaatcgacgcgcataagttgttgtcgatcgggcgccagccttgttcttcttcactctgattccggagcttcagagtggcgagcctgtgcgatacgtaccggcgtatctgaggtgaggctgacaggggatccagaaagtagcgtcctggatggtttggccacctataaactccctgcccccgagtccaccgtccctgggcacggttaaaccgtgtcaacactggtcactgcgcggcgacgcgttgttggttggttagtggatctgagggaatggttgcggtccgctaccgggggcgttatcccgggcccctattttagggaaggactggtgcaccattttggaaagccagtcgacgctagtctccgtgagttgttcagtttttcgttgcttaaagtgacctaattaaggtgttcacagaccgttacttcagcttgactttgccgccaaacgtgcggccacatacatcccaatagggaacttttgtctgcacgagactgagcccagctcaacttgtccgttaaaccgag

SEQ ID NO: 207 - DNA, 674 bp, Neofusicoccum parvum ourmia-like virus 1
  isolate CREA-VE-26SY1,1
gcggtttttggccgccctcccggaatttgtggctttcctaaccgtgtgaaggtcatgtggtgttcgcgtgagtgtgtctagcggccctctaagggagcggtgggggttaaagcccgaccactagctgcacgtgtaaccatatgacatgtaacatccagccaccttccggcggtgaactggcgcgtctgagaacgctccggattctccggcccccagagggtccatcgtaaacggtgcggtaactcaaagtacgaaattgaggggtctcagccccataaaacaaaggaaatgagttataaagagggtagcgtgcggcaatcgcgcgtccataccgctaaaccggatgggttctcggcagggagtgtgtgcgacagtaacgagtagtgtcgactgcgcgggatttggccgctgtgaaatgcggtctgtaaaaagggatgttggggccttaccggtgattgagcttagtaactcttcccagtaccaggactccgtgactgtgcctcgcgcgcgacggagcttacgcaagtgtgtcttcggatcctgggaccggttcggttgacatggtggttcccattccctatcctattctcgctggcgaaacaccgcgtctccggagacgctgatgtgtataaaggcgaattgaaatttggaccaaaacaaaagaaaacgatcga

SEQ ID NO: 208 - DNA, 679 bp, Changjiang tombus-like virus 2
  strain CJLX30692 hypothetical1
gcgccaactgttcgtcgtattatccaacgtcatggattccacaagctccgcagttcaagcagcttttgtggcctgcaccatcgggaaaatcggtttaactctgtataaaaaatggatggcaccccggtgggctgctgaccgctatctggctaaagctgatgctacaacccgtgtgatcatggaagaggttgagaatggacatgactttgaagtccatcaactcacagtcgacatatcctctcagaccatggacactccggaaaatagcaccaccaaacgtcgggttcggtctaaagccccctttcgtgcttaccttgtgaggtctggcaaggctaaatttggtctcatgaagcgaacacccgccaacgtcatgtgcgttcgcaaatacttgtacgacctatgtgttgtgcatggggtgatagcacgacatatttgtgagaacgtagacattgcttcagagcttgtcttcattcccaccgctcatgagttagaaacacttgctatgcagtctagccgatatggaaaacgtcagcatacagttaagaacatcctctctgaggatgcctctgactgttgatggggccctgctaagttggagggggtagacactgatccaagcgactaccccggactcactccaacctacgctgggatcccaaaacgacgaaagtgtttgtat

SEQ ID NO: 209 - DNA, 681 bp, Hubei tombus-like virus 36
  strain WGML125257 hypothetical protein 11
cagttctcaacacagaacaacgggtcatttgtcgaatgatgggatgcgacagttcccattttcccttgacactggaaatattatttcgttagataattactcatgtgtcagttgccttgccggagatccgcttagcaacactttacatcttcccctgtgccattttctggatggcctgcaaagccttacggggccgagctcgagtttcgtttatgcgttacgacaagtttacgattcaggttggaataccgccgtgatttcacgtatgccaagtgcgggtgtgcgtgccctctaagttagaggggttaagcagggatagggatgtttagtgtgtgttttgggatgtgaaggaagaaacagctgatatgtggggagctaaggagcgttttagttttattccagcgggtggatgagaagttgggagagaaatcgaccgcactggggcctgaacttgccctataccaacctcaccaaacccccctggggaaatgtccacggtgccaccttacggtggttccactcttttcatcgtgagtgcaacgacggtacttccatttaatattgccgagcggatccatgaaaccgctgagcgattgcgagtgacaaattgcgactgtgcctaacggcattggcgcgacggttaaaattgcacaacaataaagtaatccaggcctgaggcca

SEQ ID NO: 210 - DNA, 687 bp, Lasius niger virus 1
  isolate Cambridge-Lni, complete genome.2
aaagttgtggtcttttgctccacatcacgtctaagcgtgagcaatcaacgtgattaaataaatgaatgcatagcgttttgtgtatacgtttacggactgtaaccctgaatacacaccttaataaaggcgaaaccctaatcgtctctattattgtagtcctccttgtcacgggacaaatgcagggcgttcacgcatcaaacctacgagcgttcaagagccttactccaatattgtttgaggttaaggcagccaccccatagaggcttaattcggcatttagagtccaaggttggagcacatgaatcaagtaatgtgtaattcgaagatggcgattaagtttaatcattctgaagtcctagcaagatggaagaaagatgtggatccgtgtggccgttagctttgatgtaatgtgaattgctgtccacccgtgtgggtcggctggacagaaaggggtacgacttggtccgcgcactctacggagggcataccctgtacccattctggcgatggatacaccgtctcaaacttttaaatacaacttatgtgctattatttttgctgctttatacgctgccctcaacctgctattttatatgctacaatattgatactgctatatttgctaacaattatattgctatatttcttataagttgaaaagtaagagacgctatatcctgagataaa

SEQ ID NO: 211 - DNA, 724 bp, Rhizoctonia solani mitovirus 31
  putative RNA-dependent RNA1
gggacctgatggtcctcgacggcggagaagagctttcgccctctcgccttcaacggttagttccgtgtaactcaacattacagttgaggtgcattgcgctgccttagaggggagacccccaaagccttaagtggtggataagtgttggacattatttgtttaacggctgtccgccgtaggttattaactctgtgtttaaaccttcgaagtatggaggatctgaagaacggtaatttattactgtaactttgggttagtacatacgaggaggtacatatgatttatgtccctacaatactaacgtatagcttactaaagctggctgcggcccaactgctgtaatggcggttggaaaccgaaggttagtgttcttaaattactttacaaacctatatatggacagtataccaggcactgattagttcataatcaggaaggagtaccggaaccctgtgcgaagaaaacctcgaaagaggcatgttttcacctgaaatcctcatagcagtaccttagacagtactcactagatggataggcagtcactggaaaccatgcatggtgctaacgggaaatgaccaaaaagtctagttatccgagagctacatatatagtaacccgagctgagtaacactcagaaggagggtagtgaaccatattggattggtccgtaacgttagaagtgatactaacaggatccctttgtggagctccagatattaatact

SEQ ID NO: 212 - DNA, 741 bp, Hubei picorna-like virus 6
  strain WHBL73048 hypothetical protein 11
atgcactagtgcataactaagtgaagtttcagtgagcttttgtggattacccgctattagctcatatagctattagactgtgattttcgaaagcgaacgaaatggatctaagttttgtgttattgtgttgcgagtttttgcccctcctcgggttaccaggaaaacaagaaaaagctacgaaggccggctaagtgccttcaatttcgttttcgttttagggcgttgtctgaagtaggttcccaatctatttcagcctagtttatggtgcaaaagttattgctgagtgattaggataaatgagcctaaacgttatccgccttgacaaccgtttggtttatgcggaaatcatggatccccgtgggtgaagtgatattccggtaattgttaacggctcaagccagggtgcggtatgcgagtcagatccgaaatccataaatattcttccggtccaatattccgatacataatgtagagcaagaggccaaaggttaattatgaatgaatgatcgtgattcataatgtccccccttttcgttcccgtaattatgtattagctactggcccatcacaggatgatgggacactagtgaaagcgtgctcttctgggaggttgagcggcgctaggcgggcgacctgaacgcatatatggcaagtttgttctaatcacaaagataacaataagcgtgctgcataattaagctagttttgggagtcagcgggctactgaagtccgcacaccca

SEQ ID NO: 213 - DNA, 743 bp, Plasmopara viticola lesion associated mitovirus 32
  isolate1
gggcgcgagcccacagtttcactaaataaccttgtgaaatggttatctttgtgacctgccttaattggcggcgcgcactggtaatttccctataggaaaattcctttaacgtggatttagtttcgtagttgttggtcataaggccgcctttcgcgagggcagcagttgacttgggtttgcaccccatttcactgtggtataaagccaacagttactttctatataaagcgttattgaagggtagttatcctgcctttctttttagtcggaaacagcgaaagatcaccgatctcgggtttgaaatagaacaccgatcacggaattgagctgcccggtagtaatactggggggtccgaggaaaagagggtaaggctaatttagccctatctgtacgatcagaaccttgaataaggcggctgcagcccgtagtgatacggaaactgaagtctttactcgatacacaataaagaactaaagcaacacaaacatataatttaaataaaatattgttcgcgactgccactaggtctttaaagtcactgtcaaagtgaagtgccgggatccaagtaaaattgggtcgcccgttgctgggtctcttattgagattcattcccgcaacgggtattaagatcgacagaggtcgggttaaggtaacgttatccttcctagcgacgtgtcataatcttttcaagtcaaatggtttaccttttttggttaaatcattgaaagcttgatctgttatt

SEQ ID NO: 214 - DNA, 748 bp, Fer-de-lance virus
  complete genome.1
gcaggttggcgagatatccatggcagtttcggatctaggtgtcattgttagaaaagtcataatgggcaattccgagagggacgaaaacttaacagcactaatgatgaagatgcaaaaacagcttgcaatccaggagggaaagctggaaactctgcaatccactgttgggaaaatctatgctaaagttgacctgatcaaggatcatgtctcgaagtacatgatattaacaagagaaggaggtaaagacagtcaagaacatgaacctaggagattgatacagtcttacacaggcccagggaaacccgaagccgtgatcaatgagcatggccaaatcaggctcaaaggaacgaccaggagtggcaccagttggaacacgaccccacatgatttggtggatcccacaagactgacgatgtccagagatgaatcaaatgctacaaggtttatacccaagcttgatgatgcttctagggcaactctcctcagcctcctaaccatgtccggcctggacaatgacactcaaagcacacttgaaggaataattatgagtgccacaagagtagatcagctaattgaggttcatgagatactcttggaaccataacaaccccatatatgatagacccagtatatctgtgcaatgtcgactctccaacctgacatctgagccacaccgccatagaacaaattccatccagtcatcaccttattaagaaaaacctaggaacaaagttccactggttccaga

SEQ ID NO: 215 - DNA, 752 bp, Picornavirales sp.
  isolate war204pic2 genomic sequence.1
attggatatcctgacggatccagtccaaattttctttaatagaataacaaccatgagaatgcatgggcgcatactgttggatatatctagtttcgtaagatatatggtatttacagttttaacctaattgacgccatttttagataaatggtaactagtttcaaaaccctcgagattcgaaagaactcacccttccgtttgcgaaggcaaagaagttccgaaaatcccgtaacccccccaagatcggggatgaagggagaaggaaatctaatccttgtaattattattattttaagcgtctttctatatgtagttgtagagagagagtagagtagagagagagagaagaagagtaccaacagagaagtactattaacgaaagactcttaatttaatataatgaaaaggtcattacgatgaattccccagaagtgaatctaacatcaaaagttcatttcgaaggttttgaaactagttaccatttatctaaaaatggcgtcaattaggttaaaactgtaaataccatatatcttacgaaactagatatatccaacagtatgcgcccatgcattctcatggttgttattctattaaagaaaatttggactggatccgtcaggatatccaatactatttattagttaacatgttagtgacaggccttgtagccctaactatcgcatctgagtaaacagattagacaaatccaacgaatttattaggctttatcgccaatcttctacgtgtaacca

SEQ ID NO: 216 - DNA, 760 bp, Crab spider picornavirus
  strain J1 polyprotein gene, partial cds.1
ggctcgtgaggctggttactagctgagacgctagcaagcacacggcacagaagggatccctcgtcgtcacaatatcaacttgaatttctgtttggttgataaacccattccattggtcagttaaaatcgttggtcataactctcgcggtcaagatctctgggatagaaaatccatcatttataaccgccctcacttgtcggatatgtctcattcttttgattgaatcctcttccttgtaaactgacctagtcctttacattgcggaccgattcctcaaatttatgactcagatgtgaaacccccttttctcaaaaaccccacttttctttgacttggcatgaatttggattattctgactatcgattttaggtttaaggcaattttggtaaatgagtgttgtggcttgtaaaccgcagctcatatgtttgacagaaagatcttgagaaacatgatactatttagtaggacctccgaacaatagtccctcatgactactcttgagatgaagttgtttattatatcttgttatattgatttagttcggtatactgagagcattcatctaacccacatcagtcccctaagttttcggacgacaaggctgattggagtatttgtctaaggtaataaatgatggattttctatcccagagatcttgaccgcgagagttatgaccaacgattttaactgaccaatggaatgggtttatcaaccaaacagaaattcaagttgatattgtgacgacgagggatccctt

SEQ ID NO: 217 - DNA, 762 bp, Soybean dwarf virus
  isolate IA-2016, complete genome.1
tagacgtaggcaagtttaatcttgcaccaatatagaagtagttagcgctttccattgttacttataggagccaaatttggtgagtcccgatcgatggatcctgggaaacaggttcggtgaacaaaaagccggtaatctcggggagatgtcagctcccgtcgtatcactttcggttgcatatccaaagaataaccctatatttgacaactaaaaaatagatagtttccgcctctcttgtaaaccacatacaagatgcgagcttgtggagagtaccttcccttgaataaggagggttgaaagtttctggttcccaaaccattgatcaaaattggctctgcttctggtgattacactgccgctgaatcaacagcgtaaacaaattcctattggccgctccgtgaaaagagagtggctaatacgcccctttgatggcgttaaatgaaagcgtaggtcgtacgacaccccctgtcaaggacagccaaccttgcgaagtcgggagaatacccgatagactgtggtctagtattaaaatgactcgagggctcttcctcgttaaaaagggggcgacggcaggcaactgctgtcattaggcgaaagcctctttgttgttaaggtggccatcgggtccacctgccccgtaaagttgacacctttacagaagtgttcttgctagtaagagttatttccttgtgaagtaatacaagaacctcctcccggcatcttcgtatcgtgtttgaggaatctctagtgttattgttagtt

SEQ ID NO: 218 - DNA, 773 bp, Mumps virus
  complete genome.1
acgggaatggagcctcagctgggtccaaggagaggtccgggtctttgagtggtgcaaccctatatgctcacctatcactgccgcagcaagattccactcctgcaaatgtgggaattgccccgcaaagtgcgatcagtgcgaacgagattatggacctccttagggggatggatgctcgcctgcaacatcttgaacaaaaggtggacaaggtgcttgcacagggcagcatggtgacccaaataaagaatgaattatcaacagtaaagacaacattagcaacaattgaagggatgatggcaacagtaaagatcatggatcctggaaatccgacaggggtcccagttgatgagcttagaagaagttttagtgatcacgtgacaattgttagtggaccaggagatgtgtcgttcagctccagtgaaaaacccacactgtatttggatgagctggcgaggcccgtctccaagcctcgtcctgcaaagcagacaaaatcccaaccagtaaaggatttagcaggacagaaagtgatgattaccaaaatgatcactgattgtgtggctaatcctcaaatgaagcaggcgttcgagcaacgattggcaaaggccagcaccgaggatgctctgaacgatatcaagagagacatcatacgaagcgccatatgaattcaccaggagcaccagactcaaggaaaaatctatgaactgagagccacaatgattccctattaaataaaaaataagcacgaacacaagtcaaatccaaccatagcagaa

SEQ ID NO: 219 - DNA, 774 bp, Wenzhou weivirus-like virus 1
  strain beimix75799 RNA-dependent RNA1
agaacccctcgcgggtcttgcatgcaattaacgactcctctaattagaaggggtgtcacggggaagacaacgccccgtggcgagaaacgcacgactacatttctttgaccggtttacctgccgccgcccggtagtcgcacctgtagaaggacccaggtgttagcagagtgcgccgaagcgtgcacaatgctggtgcgtgccttattcttttgccgagtccgcccacggatcggtggaagcctggtggaggggacgggaccctcctgaggtgaaggcctgtggaaggggggggataggcacccctaaggattggcctcctgtacttccatgctacgagtcggcccggtccggggcttcattgtcaaccgtggcccacacgctggtaacggcggtgggttgctagccgaccttgcaaatggctacgaacccgaggtgtggcggatccacatcggcctattgctatttcgtgcgaattactgcccctgaggggaggtgacaaggctagagccagccgttggtagcttgccctctcaggcccagtaaggaatgcccgttgggacgcacgtaacagtagggtcgcctttgtacatagtgggacatgcatgccacctgatcaacgctggaagtacttccggtcccagtagttgtttcttgtccgggttacctacggtgcaaatcgtggatgccccgtatgagaaatgaccattgggaccgaaagcgcgaaaccaacgttagcaggccaaagggaatccccttgagcgaaattagcttgca

SEQ ID NO: 220 - DNA, 779 bp, Rhizophagus diaphanum mitovirus 2
  RNA-dependent RNA polymerase1
ggggggggtcccccgcgcaagcggtgtgggctcttcattgagcggtagctaccaactactctccacatgatggaaggaccttggttattccagatttactctggaccctggcttggttaagactgcaaacgccactaggcagttctataaaacggacatcagtgccccctatgctgttacttggtaaggaagaagaacccttcttcatcccgtcagcatctccatggctggagtataacaaaacgggtgagtgcacgacctgggtaaggacccagtgaggctccgaaagtaaggcttcgttgattgtagcgtaggtaacggtctatcactagacaagtgccccttaactctggaatctcgctaatcagagatcaacgaaataaccaaagataatcaggaacaccggacttatacctctgtatgtcgggggggagagactccccacctagtacttggacgacttcctcggaaggagtctaaggaacggtcaagggaatctcctacggtagagctggccaagtcagtttaagattatagtgatatagtcttcagagcaagtagatccttcccttcagaaaggaaggactctcctgatgatcctcgtgagaggagtcacctcacttcagacctcgtacgtgtggtacggaaggatccccagacggggagaaatctgtatctgtcggcgacaactcccaccatgccctcttgggggggattgaaaacccttttaacccttgagagtaaggaagcccttctctgaaaccccacttaacttcgtc

SEQ ID NO: 221 - DNA, 781 bp, Rhizophagus diaphanum mitovirus 4
  RNA-dependent RNA polymerase1
cttcgccaacaattacggtggcttccgatgatctgcgccagtaaggtagacgtaccccagaggatccttttaaaggcagtcatcttctccttgcacttgcagtgctggccacattgtaatggaacgtaaggaataccttaatatactactggccatagttatattccatcctgagggtaacctcttgtatatccagggtgccgccttttactaaaatatatacttcaaaactgttacctgtccgctaaaacctattggtaatctcaactacacataaagcaaggtttacgccgtctagttctattgtaccactgagaggctatctgtaacgggccccctgccgccagaggtagtacgatatgggttaaaggacccaatgttccccatcaagatataccatcgtcactggtagttcatcacactagctcacctagctctcccgaagattggtcgcttctgggtcttggggtgcctgagataggtacaggcataaatacaccacttacccgtgcagggtaccataccaaaactccccttaaatagcttccacatggttactgtccctaaactctctgagaaggaagtcgttaccagagggcatacgtgctcagtaataacaatggcgaccgaggagggtggtttactaactatagtacgtatttggagatactacgtgtgcgagatctccggccgacctaccccatggtagattgtgcccccctgctctgcagacgaaacacatgggacactgtataggaaacaaaacatatgcgaaattgtt

SEQ ID NO: 222 - DNA, 807 bp, Cryphonectria nitschkei chrysovirus 1
  RepAsoc gene for replicase1
tgataaaaaacaaaaaaccgctttttgccattatcactcaatcaactactagatatgaataaattagacgattttagcgatgaaggcggtgcccccgcgctaccggggggatggcgcagaacggaggtaggcaagactataactggctacctacgtgataacaatttaggcccatggaataagttaactcacggacaaactaaccaggtcagacggatgttctcagcccttactgttagcagtttagaaagcgtgtcatcgcctggcccaccaaggaggcggttaggatacattgtactgccgcctggtcacggtaaaagctatatactgaagataccaccgcgacctgtccaattggttgaagctgatcaggtgatggattaccacctggatcccaccctggcacggttgcgtaagaacgcaaaagctagtgggtattggcaagaatacgatactaactatgctcagaggttggattcacgattgccgttcggcgattgggtaatcatgctacctagcgatgagttgggagtaacgatggggtggagtagacttgggacttatatattggctctggacgcgtgggcaaataatctcaagggacgtaaaggctcgatatctgagtatagtactgtatatagtagggctcagctgattgaaggtgttaaatgtttcggtacaaacgcagaactacaggcagctgtattaagggatgttaacaagttcctgaccgcctgaagtacctgatgagtctcccccaggggaacgaaacgctgtcgcgtcgtaccaggggcaacgcaacgaaca

SEQ ID NO: 223 - DNA, 808 bp, Human rubulavirus 2
  complete genome.1
gctcttaaagggacttgatcttcgccttcagactgtagaagggaaagtagataaaattcttgcaacttctgcaactataatcaatcttaaaaatgaaatgactagtctcaaggcgagtgttgcaactatggaaggtatgataacaacaattaaaatcatggatcccagtacaccaactaatgtccctgtagaggagatcagaaagagtttacacaatgttccagtagtaattgccggtccaactagtggaggcttcacagccgaacaggtgatattgatttcaatggatgaactagctagacctacactctcatcaacaaaaaggatcacacgaaagcctgaatccaagaaagatttaacaggcataaaactaactttgatgcagcttgcaaatgactgcatctcgcgtccagataccaagactgagttcgtgactaagattcaggcagcaaccacagaatcacagcttaacgaaattaaacggtcaataatacgctctgcaatataaaatgaggtgcagtcacacaagagacactcaacatgcatccaatcaagatccagactccatccatccaaaaacacgcccacaattgtcaacaccaagaaacaaccacagccgaaccatgctcaaccaaaagacccaaacaacacctcacatcaatagaaggctggacatgataaatttaataaaaaaagaaaagaagttaagtaaaatttaaaggacacaatagagaaaatctaggtccgaaagcttgcctctcagacagatcccaaaatcatagtccaaaccccaaacacagcagcagac

SEQ ID NO: 224 - DNA, 812 bp, Dicistroviridae sp.
  isolate rbu035shi1 genomic sequence.1
actggcctcccttattattaggagacttcaaaatgcgtacggggttaaacccgtacgcaattttgaagtctcctaataataagggaggccagtccgtctaggtagactcgtcatatatacatttattgttacggcaattaatttatatatttgaagaggcctattccggctgcccatagtgttattgtatccctctgatagattcaccgtttctaacactccaaaccaatgcaaaactgactttgtcgacattgatcgttaagagagaaacaaagatgttcaaggtactagctatggcgtcttaggagggcgtaaaactcccgcagtgacaggcgtatctgtctaccccttgactgtaatataagttgtatgaatgagtgcgtgctcccgcaagtaataatagtgagcaaaattaattttaagttagttttaagtctttcatatatatttatttcattggcatgtcacaaatcgtgcagtttattagtacctatacgaatcactgacttatgaaaatattatttcgatatctctaagatatagttttgcccagtgggagtctatatgatttcctgcgtgcttcggctgaggcaaaatttaagatttaatatgagtagtggaatatgtgaggatcatgtgggaaaatttaccggtgctggatctttcatttttattataggtccttccgcacggacaggttaaccgaatttggcacttcggatccctggataataattgccccctttccacctcagcaaagtttttgggttaataaagcttggatttgaggatcaaaatatttttctctcatc

SEQ ID NO: 225 - DNA, 814 bp, Picornavirales sp.
  isolate H4_Rhizo_43_scaffold_235 hypothetical1R
cattgctacagcccttagagaatttactttacatggtaaaaacacgtataaatactggtattctgaattaatcaaactaaaagaagattattacgaaggatatgaatttgaatgtcttgttcaccgtgattaccacatggctctcaccgaaactcttggtggagatcatgtttggtacatgtaaagtccaaaactaaaactgtaaatatgtaaatacttttaaaatacgcccgtaatggcgttaaactattttggaaacattatatttaatggatccatgccccaaaggcaaatttgatgtgtgatcttgctcccttataggctcatcattataatctagtagtgctgcatcaaataatctcaggactttttagtcactacgcccaaactgagagttggcaatcccaatgaacaaaagttagatgaaccctgatttagtgttaattgaaactaaattgggttaaataaaccaattgctaacactaactcaaatcaaactaccactagtgttactagtggaatcctcaatattggagattcaacccccactcccgtccaaggtacacccgaggacgctcacactgaagctgctgttaatcaagtttttcagcatgctactaccaaattcatcgatgataatgataccgttaacagagatgaatccaccgtcgaacatatcaactctagttggttatcactcaacgacacacaatccactgagcaaactattattgattttctttcgaaacctatcattcttaattcaggtactttttccatttctgatacttattcttttcttaactactatact

SEQ ID NO: 226 - DNA, 827 bp, Unknown
  Description of Unknown: Fesavirus 1 polyprotein gene, complete cds.1R sequence
gttttcatcaaagttgaagctcctgaaattgacagaagtgatagaagatttcaggagcttcaactttgatgaaaacattaatacgccttttgagtgcttcaggatccgtcatacgagactggagctccgcttgttgagcatcgatgtcgaaatttgaagttagaacgacgaatggggaagagaaatacacattgcctttgcctgaacactcagcaatattgagtggatagggagactcgtctgtcatttggataagattgaatatttcattatttcgatactctggatctttcatttgaaaaacgtcgttacacactgcgaatctctgataggcgtactggtcatggtatggggtgtttgacatgactgcgtatatatcccgggatttgtcaaagtcaggctctccaaggacagcacacaagtcatgtgccaattgtggaaccatgactgtcttcccaatacctgggacgccataaatatagattgtgtaaggtttcattttaccctcacagccgacgaatgatgctaagtttccagatatgattttttcgagcttacgaacccgatcctggattggtttaacttggtcagttggaatttcgtgcttctcggactttcgcacaaactgtcttccctgagacagcagggacaaaacctggagacgagaaactcgtgatttagttagttcagccaatacattccaggatcagcaggctcaggctgttgattggtggggtttggtgcgccttctccgccttgatatcattcaaacattctcgctatctgatgctatatcgaaaattggagttaaccagcaggaggaggaa

SEQ ID NO: 227 - DNA, 834 bp, Marnaviridae sp.
  isolate brb141urn1 genomic sequence.1
tcaagcacgtaaacgtgacataggaaaatctgtttttgagcagaatttttcctatatcacgtttacgtgcttgacaatgtcaagtgtaatccgattgaggtgcaaggcctcatctgccgcgttagcggcgcgctaggaccgaaaaagcaaaccctatgtattctgctatttcgattcgtatacattgggcgttgtgatcgacccaaagcgcgctgcttacgcggcatagggcggtgtcgcaagacaccgcccgttgggggtgtaatccccccctttggagggttgaaccctccaccttagtcccagtaggttcccactgagcaaacccagcaatggatcccgtggaccattcggccagaccaacactctccggagttagtaattcatccgtttggacacgctacacatcgtcgactgctaatcacttcgtgcgtgctattgtgggccgtccgcgtccactctaagactttgtgctatatatttcaggggggggcccctgcctcccccactgcatatacattgacggaacccaccgtcgttaaacaagtggagaaaaacagcgagaactgaaactcgcagaaaccattgtgtcgctaaggctgccagaataggcttgcctggtgcagaaaggaacccataacctccgacctctccgttccgataaaggacgacgtcgaaggcgaaactgtaagttgatacttttgtgtatttgccaaacgagctcgtcgtaagaccctacgctcgtgtaacatttgcacaattgagatactgattggaccctctatgccctgatagctagatcgatacatttactcatcacagtaaaaggctgag

SEQ ID NO: 228 - DNA, 855 bp, Perth bee virus 4
  isolate WA2-63 nonstructural polyprotein gene,1
ggtgcaagccctccctcccacttggtggttggaggtgcacgttcaattccaaggcgtcctgcgcagtcgtcatgctgtgcggtgtacgtggtaccggctagtagatccgagagtgtacctggtgcgcagcccgttcctgatactcactagtggcaacccctgtatgaatgagccgtcttcagggttagttagtggcttaccgaatctatttctacctttcaacgcaccgacttaggtgtatacaatcaggacgttagtggtccttctgtaagtagtggcacaacttcttttgtggcagaccccgtggctgccatccagccggtcggccggtccgaccaggttgaagagttgtttgccccgaattccgttagttctattagtgactatttagctaagccgtatcaagtatttcaaggccctttcactgttgtggatccaattggtgccattttgtattccgccgacacttttacttattacactaacttgttaaaaataaacaagcttagaggtttctatggtctgcgggcaacgctgtgcgttcgccttgatctcaatggcactccttatcacgctggtcgtttgaggttgtgttattatccttgttattctgagaatccaaggaaggggtctgcccatgttcaaaatgttatttctatttctcagttgcctggtgttgacatcgaggcaaacgagacttctgttttacttcgcatcccttatgttgctactactcacttcattgaacttactgctggccctgttgattggggtcgtgtttacgtttctgttatttctcctttgcgtacggggcctgacaaccaacagcagatcaattatagggtctggacttgg

SEQ ID NO: 229 - DNA, 859 bp, Lothians earthworm bunya/orthobunya-like virus 1
  isolate L381R
gtttgaaataagctgtatgtgtgattgagatattgctattccgtcacatagaatttctgtgaatccactcttatctgatgtgaatgatgattcaaccactaatccactttcacatttgaaacaaccgtggcatgctgttagtttgaaatttgttattgctgccttttcaattagtgtttcaggttttttacctttgatagtgaaaatgaagtttagatcattcattacttctccaactttgtaaattttgtcagcaacatgtctgagattgtgctcagaatgcaaatttctaatcaatttgaagttatttttgcagcaagatttgaaagtgaaaaatcgatttcttgaaaagaaacaattatgtttgtaatcagcatcatcagaatcacaatcaaaatatggagtcattccgtcaacatgttgcagtgtgccaaatctatttgaaaattcagacctatcattaattgggccagaatacaaatggcctttgtaagatgcaaatatcttaccaacatcatctttggaatctccatcgaatgtgaatccatatttcttctgtgcaattagttctgttgaagatatatttctgcagaaggcttttgattgaaataatacacataattcaattgatttcttctctcctgttatcttgtagacatcagcacaatcacctaattttggttccatccagcaggttccacatgtgcaaccggtacctattgagaaacatccggatccgtcacaagaccaactacttgtatcttctgacgaaattattttgttgttcacagtttttgaaccaagtttgtctttacacttgtcacaattttctgtacaagtatcggtgctttcatatttc

SEQ ID NO: 230 - DNA, 861 bp, Colobopsis shohki virus 1
  Kumejima-Csh RNA, complete genome.2
aagaccaataagagctctatggaatgaacatgtagagcaatgtccaaattgcaaatatgtttattctgttttacgcagaccatatatagttccttcagttccttatttcagcactccaaaattccaaacttcagaaacctcatttccttttcctgaattcactaaacccataagaaaagaagaaaaatcgtcttctggtgaagatactgttgatgattaagtattctttatgagttgcagtctcttactctgcactgtgtctaggtggaaactatcagcacagtaaataagtgaatgtaacaagtttggtggatacttgtcggactgacgttataattcaccctgtatgtttggcgaaaaccctatcgtcttcatatggaagttctccttgtcacagaacaaatatgggttgcccccagcattaaccactaagcgtttaagagctcatgtctctctttagagatttgatgtatgagcaactctcccggggaggagaatttaggctgactcctaccaaggttggatcttgtgatacgtagcaagtataggatgatggctaattcttttattaaattcagaaggactagcaatctggatgaatttaccggatccgtagagtcatgtgtttaatgtaatgggggttactgtatactcgtgtgggtcgactatgcagaaagggggatctcgccatagagatgtcctgtacccattcttgcggtggacacatcgtacttaaattttaaatgtatttaatgctattattttgctgctttttgctagttatttgcttattttattgctattaataaccattttgctgactaagttgctttcgttaagttatattgctattcaactacg

SEQ ID NO: 231 - DNA, 863 bp, Culex mononega like virus 2
  isolate OTU6 RNA-dependent RNA1
ggatcgatgaaggagatcctgggaattagtcttagaaaaacccgacagttactagtcaagcaatcatgaactatataacgccgacgattttggttgccgtcattgtgatcgcccatacagtggccattcggtcactgtcttacgacatgacggacagggtacctgtgatcgccctcatcaatgaccacgcttcgtggtttatgaaattgaccgtcagcccggtgactatcaatttttacgcgacgctgacctccttcttcgccaccttagccctgatgggtgtggtggtcaaaaattggcgggcgtatgtccgggacatacaacgaggggtggtgagggcggaagtgttgatgaggtcagcgtgactgcgctggtctgcttctagtttctccctgagagagttaatctgtggaacccgggatctcctgaggcggacacacgacagcattgtgcagcttacatcttgcataagatgctgtcgtgcttattttgagcgaattaaactcctcaattctgccgaagcagggggatcctagatttcaactagttattctctcagaggaatagtttggtttattttgttagtttcattgtttttttatgcatagttctatgtgtgtttgtttgttacacatattttgttttatatatatacacatgtatttttgatgttggtcatgtttgtctagcaattcggagccctatacactcatcttccctgattctaaattctctgtagaaattcacatatatgtgtatatgtatatatattttgatactgacctgctctacaaggagcttataacaaattgagaagtggcatatcttcttagaaaaacccgctagttactattcaaatcaaa

SEQ ID NO: 232 - DNA, 867 bp, Dicistroviridae sp.
  isolate wwb174dic01 genomic sequence.1
ttaaatagaatccagatcaattcgaagctttttaagtagccgatgtgtagaattttagtattgtccattttatagggtacagatcaattcgaaactataattgtaggtggccgtcacaagagcaaacaaaggtagatttattagagtccagatcaattcgaagctaataagtcaaaattataacaagttgaataactttaaaatattcaaaatcaaatttatttaaagaatagtactctctttttcgatagaatgttttaggaaaagagctcaatattactttattgttttcaaattattatgttttaacacaaaatatatttttgatagtagtgacagtctatttctctgtctaatgtcgatttcccgttatatgtggatcctagtgtgaattactagtaaaattttattccgtgtgcattcgtataatgtacttattgtttcaggcgatttagtaatgctgtttcaataatattaagaactaagattatttctatattctaatcaaagataaaatatagactcttgttatgaggaaagttttcccctctttcaagttttaataacgaaacaaatatagcaggttatttgttgaacgatcggtagttactccgatgattcgattacttccccttgacccaactttggttgaacttttagttcaggtatatgttgcattttccacgtgtgagaagcgtgttcttaagtgaaaggtaagttaggaaagaatttagtgttgcaaataatatagtgttatgtttcctcaaaccaggtgtgttcccctcgtttgttgtatttttagggcatccgtaattaaaggattttaattaattaaataagtacaccattaatgtaaatttttgttgt

SEQ ID NO: 233 - DNA, 892 bp, Achimota virus 1
  complete genome.1
caggagttcagcaacaagttcagaactcaagagacgccatcggagagagtttgatcttagatggactggaagaagaccccatgtcagtgaatggtgcaaccccatatgtgccccaatcactccaatcccacggagatttacatgccgctgtggagactgccctgatgtctgccccatgtgtgagggagattttaaggtacttaaaattgctggagaaccgttttaatcaaatggattggaagttggacaagctgattggacaacagagtacaataacccaaattaggaatgaacagatgggactaaaagctaatatggctatgatagaggggttgattacctctatcaaaatcatggatcctggggttggtactggagcaaacgccgcacaggccaaaaaattgttcaaagaagtgccggttgttattagtggtcctgttgtgggagagaacccattggtgacagctactgagcttgagatccaagatcttggcaaaccagcaataccatctaaagggagttcgaaaaaggctggactgactgaagcagatttggctgggtacaagatgaccctgatgacattgatcaaggattgcattcccaatgcttcgatgcaacaagagtttgagaggagagtaaatcaaatcaagaatgaagttgatttcaaggcgctcaagagagagatattaagagctgctgtctaagaagaatccaaattatgcttagtacccatactgcaaggctttcaaggaatcatgctgcttaaatagtgcacataatcaatacattccatgcaaacaaatgacatcctgattagtagatatagttaatttgcaatttaagaaaaaaccaaaagtgggcccggacccatcaagcccaggagccctcaacc

SEQ ID NO: 234 - DNA, 898 bp, Norway nairovirus 1
  isolate NOR/A2/Bronnoya/2014 nucleocapsid1
ctcgaagatatctaacccccgagaattacaaaccattcaaccaagagaacgggaagtggcatctgcctcggggacacttccttgtgaagtttagattcagagattcaaccttagtcatctcaagggattcacctctttctcaaaccctcttacagagaagttggctcactgtagaccaagtggagagtgaccaaccgtggatcccaacttaattgctctagtcatttaccttttgagcttgatctccattacagtttatcacctgtcaggtcccaactggccaagaataactgagaaagaagaggggccaagagacatacccaggcttctacaggagaatccctgccaactagtctctttccagaagctagtcactccaggaagaagtgtctgtgtaacctcacagaaaacaaagccaggaaacaggagtccagcagaaactctgggtgaggtccaggctgatgaagctgacgaactgatctgtgtagttgaacaacaactgcaagacttgggtgccaatgctgtcgctttggtagatcagaaagcaaaaggactccaggaaagactagtaagcacgtggaactacagcgaagataacctctcaacatcgccagtgttctggctggttatacttgtgttggctggttttctggtgctccgcagttctaatccaaggtacatccctagctgtccgagctgctgtaacaagtcagcaggtgaaagaaaagtagtgtacctagagtctgtacacactcagacgggaagaccaagaaggaaaagctcgagtactcaaaccgaagcagtccctgagaggataagccggtcatctcaaacagaaggaccactgacaaatccagtgcgagaaagtctacagctgctggaaatctgaccaatcaca

SEQ ID NO: 235 - DNA, 908 bp, Shahe picorna-like virus 3
  strain SHWC13623 hypothetical protein 11
cgcggcaacgcgtacgtagagtctgtctcgatttggggtttaaccacccctggttcttctgatcaatatatatatgtagcaatggttttccttgtgttattttacgaatgatcacaagatttaaaacccctacatgtatgcatatcgagcagacaggttttttgagcgctagcagtcgatctactgccaccaacggattttaccaattcaatcctaacagcaattggaccgcgccccccttcgggggggcgcattcaggcactttgtgccgccgctttatgcggtttaagatgcatttgcatctggaatatcccgggattccactagaacaccgatttaacggtaccggggaccccccgcttatgcggggggtctcggcccatctgggccaaagatcttacgtcgatctcaacagcacgtaaacacgctctcccatcaacgggattgagcacttcttatacctttgaagtaaatttgggaacctttctacttccagtgatagtgaatcacaggacaatctgttcacggaacagggtacttacggatccaccgtaagcgtgaaattagtttggggagcgaaataccccatttgaccgtagttacgcactcgcgaagatgcacttacgtgcgtcttgcgaggaaaaaaatatctcgtgtggttacgcggtttgatgtaaaccacctgttgagagtctcatgatactcgtccggtacgccgggtagacaggacaggtccctgcaagccataaccttaaactggtaggttgcctcacatggtttttgaaatacatgctgtggaggctttccctattggataataaagcacgtgaccgacaattgataccaccttcgcggtggtatcaatcgtcggaaaatttcctccaagaagttttccggtgattgatatc

SEQ ID NO: 236 - DNA, 909 bp, Hubei picorna-like virus 2
  strain WHBL73152 hypothetical protein 11
tgcaggtttccttttataggagacctgcacgtgtttttgtcgagatgaagagtagctgctcttctcagtattattgtatgatattttcattcatattctgcgttattttggataactaagaattggtgtaatttcacagtagtactgtgatttgcacttttttcttaccaatctgcgtatgaatccctgtttgggtttacatacacattttatttgaattcgacaatgaagtttagcaacttctttctgaaaactagctagagttcgacgatctctctggctaatgacaaataaccaatcaaaaagtcaaatgttcatgtatatatatatttagtagtgacctttatttagaaaaactttagatgatttatcgtcaagttgccctttgtgaagcgatcagctttttatatcgtttcatttttgtatacgtcttaattgacgttgtaagtacgttttgcatacctcacattgaggatagtatcgtttcctgactaagaagttaaactagtctaccaatagcaaccatataggatatagctttgtttttaacaaggtttaatctgatcttatgctcttgcttacggtgttttatgtatagaaaaatttttataaaaactacataattgtcaaaagaaaaagcgttacgtactgacgcatttatgttcacagtgtgacacaaaccttctatattttgattgtaaaataggctttgcctgaccatttatcaaatacaaactgtttcaaacgcctctccgagccatattggccgacgcgaatcgacataacagggtgagtttacagctgcagttgcagccgaggatccacttatttgagagagaattactcttaacgaaattttgaagtcacttctacacagttaagtctgagtaggcgttatccaaacgtaaa

SEQ ID NO: 237 - DNA, 911 bp, Changjiang polero-like virus 1
  strain CJLX30310 hypothetical2
aggaagctccacacaccctagccagtaacagttgttgcaatagctggaagggtaaagccaacgaaagcacaaactggacacacatttcttaatcggggttctgtccgggataatcgtaaccacccccgtcatcgcgtttgtgctatatagatttgtctaccttcctatccaggccaatatcagaggtcttgtcaacgaatatggccgtggctaggactaataggagaagacgtatgcggcgacttcgtcgcccccaaagagcgcgaccacccgttgtggtcgtagcggcgccacctggccgccggcgccggcaggcaccggctcagcgcccaggtgctagtagtatgtcccaagaaacctttgtgttttccaaggacagcctggctgggaacgcttcaggcgttctcacctttggaccgagcctcactgattgtgcagccttttcctcgggaatcctaaaggcttaccatgagtatcgtattaccatggtgcttctggagtacatcacagaagcctctagcaccgcttatgggtccatagcatacgagctggatccacattgtaagattaccagcctctcatccaccgtcaacaaattcggagtcacgaagaacggtcggaggagcttctcccggcgccaaattaatggcaccgagtggcacgatgcaacggaggaccaattccggatcctttataagggtaatggcgattcgaagatcgccgggtcttttcgtgtcacgattcgggttgagactcaaaacccgaaataggtagacgagagctcgcctcccactcccacaccagagccgactccggctccacctcaaccagaacccaccccctgcccccctgctaaacaagacagattttggggttatgagggtgtaccacaatcgaaaatttcctcgggc

SEQ ID NO: 238 - DNA, 930 bp, Solanum nodiflorum mottle virus
  culture-collection ATCC:PV-491,1
ctgcttgggatccgaccgatctcctaatgctaaaaccctccgctatggtccgtatgggcctggtagacccggccagagtgttcgtgaaacaagaaccccacaccaacaagaagctgagtgaaggtcgctataggctgatctcctcggtttccatcgtggaccagatcatcgaaagattgttatttggtccacagaaccagcttgagatagctacttggtcgaccataccgtctaaacccggtatgggcctaagtttgcggtcacaagctgagttgttgtggaatgatttgaagcataagcaccgactgagtcccgcgtctgaggcagacatttctggatttgattggtcggttcaagagtgggagctttggtctgatttaagcatgagggtaaatttgtgtgatgatatgcatgagggccttaagagattaatgatcaacaggtttaggtgctttatgttttcagttttccagttatccaacggagagctactagagcagacctcacctggaattatgaaatcaggttcttattgcacgtcctcgactaactccagaatcagatgcctcatgggcgtcctcattggctctccttggattgtagctatgggtgatgattctgtggaaggttgggtgaccggagctaaagagaagtacctcgagttaggtcatgtatgtaaggagtatagaccttgtgagaccaccagagatggtgagctatccaaggttaatttctgttcgcatgaactctctgagggaagattctggctcactagttgggccaagactctctataagttcctggactcacctaatgaatctcatgttgagttggagagagagctgagttctgggcccatgtggccccgcgtaaaacgttacttgtgtcaggtaggactgatccctgacaaaacattagaggaaaggaaag

SEQ ID NO: 239 - DNA, 936 bp, Red clover carlavirus A
  isolate B46, complete genome.2
gtttacaggcttgaaattgatatagtaagatacaggacaaatggccgatcaagatcaacgcaaacgcgagcaggaaatgaaagagagggcggcggaggagcaagctcgtcggaaggctcaagaaagcaagttgaaatcaccagaagcaaccggtagtggattgggtcattccatgatccaaacgcaacaacgattaactactctggaaggtctactgagggaggataggtctggcttgcaaatcacaaatgctagctttgaaaccgggagaccaccgttgcaaccaactgaagacatgagaggtgatccacaaaatatctacaacaggccatcaacagactttctgtgggaactgaaaccaaaacctgtttcaaacaatatggcaaattccgaagaaatgtcaaagatcaaagttaggctggaaggactgggtgtacccacagagtatgtatattcagtcattcttcaactggtgttcaagtgtgcaagtactagtagttcctcctatcaggatcctcaagggaccttcgaattcccaggtggtgctatcatggctgatgatgtggtgggaacagtgcaggagattgctggactccgtcgagtctgccgactctatgcgcccgtgacatggaattacatgcacctgcataataaaccaccttctgactgggcggctctgggttttcaatccagcactagatatgctgcatttgactgctttgactatgttgaaaatgaagcagctatcaaaccaagtggtggaatttcccctagacctagcagagctgaatatgtggcatacaacacgtataagcgacttgcgttggatcaagcgaataacaatgatacatatgcaaataatgattcggcaattactggtggtagaatgggtcctgaaattactaggaatttcaataatgcgaataataagaaact

SEQ ID NO: 240 - DNA, 942 bp, Dicistroviridae sp.
  isolate rfb199dic1 genomic sequence.1
ttataattatatcgtattaaaggattttcattagttgtcatggttaaatcataaatacttggctaaaatggtttcttcgacaagtatcgtgtaaagttcttaaaactaataatcgtccagatcaacggtcagtgtacaggcgtgacatcctaatctcggccttacattctccactccatacgggggaatgacgcccctctcctaagagtgccgagagcgccacatgtatgtcttaagtttcttaaactctcttcaattgtacgtagggtatgtccctacgtacaattgaagagagtttaagaaacttaagacatacatgtggcgctctcggcactcttaggagaggggcgtcattcccccgtatggagtggagaatgtaaggccgagattaggatgtcacgcctgtacactgaccgttgatctggacgattattagttttaagaactttacacgatacttgtcgaagaaaccattttagccaagtatttatgatttaaccatgacaactaatgaaaatcctttaatacgatataattataacctgacctttacttagtgatttcacaaacggatcccgggtgatttcacgcacgactaagttttataatttgataaagattatgcgagtaataggctcttttgtagcttttagtgcatgtttagaaatttatttgttagcgaccattgaaaagcgaccctcgatgattacgatcacagaggttagcctgtcaagacatttaaataacgaaccagcatgctatactaattgagcaataccctagtttatcagcgattgatatcaaaatataagattcctcggaatcaaggtagtcccggtaaattatatttgtagcgaagacccccggaactgtaagcgatacacgaatgaagacgacgattcaagacggaatcagaatgcctcgtgggcgtaaacacaaacc

SEQ ID NO: 241 - DNA, 943 bp, Changping Tick Virus 3
  strain CP1-3, complete genome.1
cgctgatagactcttagttttcgaccacatgcgcgcaacggaggttggtcgtgttctgttttaaaaacaaatcatgccggaaggcacagttttcagagatctcgttgttcgtttgcgctctattagtctccgctttgctagcctgaggcgttccgagccactgtgtacttccggtaccatcagtcaatcttgacgggcattcccctgagagattgaccagccagggggtaaccccggcagcgcgaggcgtcagccttcggcccgccgtcgcgctccaacgagatctccacgttcaccaggtcatccccatcgaccttccccccactctgacagctccccggaaagaggtgatctttccgtagaagatcggttgagcttgtcgacgacccaacgacgtcccagacctgtgttaggtgcagctggagtgtcttttgcaaaggccttgctctcaccgccccctggtcgccacgagccttgcccgccacccgctcgtcgtgtctcctcccctgagccacagccaggtccttccggctatctgagacacagcccgcgagaggttgccactccaggatccccacctgagtcaccctatctgaccccccgatcctctcctgaaccagacccggctggtctcttagccgaggaaggtcagggtgatcaggatcctgtggaagatcctgcgcttgtacagcacctcgccaggcttctcgagctaagcctagacctggagggagggatagaaggcggtgtgcaagctctgtttgcacaacaggaaggtgatcaagccgcaggaccagcccagccaccagcacccgaggccccccaagcggttgcagccccaccacctccgccgcggcccgatcgacgacagccagcggttcccgtcgcagttgcagcacctgctccaccagcccccgcagcagaaccggtcatccggccagcg

SEQ ID NO: 242 - DNA, 945 bp, Entoleuca hypovirus 1
  isolate 97-14, complete genome.1
tccgaattcccgggatccgcctttgagatcttcctaggaaggccacctaaggaacttgccatagcccgtgtgagtgcttttatgcattctcatcacagttttctctcttggagaactatggttaagtttaggatttcattggtgaggccagtgggtctcggtcaaggcacagtgagggcctgtgcgtggttgtctccctcctctcccgcaggggaagtaaaacatacttgcaccgggacgcgatgacgtccgttatgtggataaaccatctctttaattaaaactcatcaaccgggggttgcacccgattgcaagtcaccactagaaatgacgacgaaagtagaagggtggcagagaagatgaaaaggtcggcggctaagatggtgtcttcttagtttgctttaagcgcggcaattcaacattgtcccgtcagattggccgcaatgcctcaaccttcaatcgcttcgggtactgagctcgcggtaaaccattgtaaacggtaacgcgtaggagtatagcactcttgcgtagtccctagtcattaaggaattactgtctctttacactacaccaagtggtcgggtccgtagggcctgatctttagcctctccggctatcgctgcgtatactgcagtctgttagtaggagtcatttcgaaatggtgatcccattcatacgaccgtgacgaactgaagtcactgatgtctctaaaagctaactaaaatttagtctgcggggtcgcagtacggctccctcatcgatctttttctggatgtaaaactccgcgtctcatcgctcaagagtataaaaggaaattgaatggtgacagctggaaagacagcaccccaattcttcaagtggtcacaaacatcgagctttagtttgcaaccaccaccgtttcaagaatatcgccgtttcgcaataccgtaaattgccattttcaac

SEQ ID NO: 243 - DNA, 946 bp, Kummerowia striata marnavirus
  strain pt119-mar-10, complete genome.1
gctaactgtttgccctatatagacaagtgtttagccctttaccgagaactggactgcacggagaggtagtcctagctcgttacgttggtcttccttggtataggtcatcaatggttatttgatgagagctttgatgtaattggatagagacgttttactcagataggtgatttctgtccgacacgcatgtcggtaaatatcaccaactttcgggataaccggatcctttgttatttgggattgttatattcttttgctccggagcatttgatattttataacaatttgcaggtggcgctgcatttacccgtagccatataaatagttgtaattatattgtatatatatacaactggtcgtcacttaatttgatctgtagataattttgatacacaattttgtttacaggtctttactgatcagtctctctgcctaaagaggcagaactaaccgtaattaacggacgacccctatgagtggaggatccacttggcgcgacattagttcatggtcatggcgcattatatgacccccgaagggtggctcccgaaacagccttttttgatggtcggaaatgtacatgaatttatttatgtgctgagtacggacatcgcaccctccaggagtattggattattcgagctacctgacttagtatggtcacctctttctcaatagaaattgcatacaagagggtaagggttcatgacctacattatgttttgcataatgataccgttccgataccaaggcattatttggtggcaacatcattagtgctaatgattacctgtgccacaccgtcgaacgtgtgaaattatcaggaggaatctggggggacctgctgtgacaagatagttggggcgactttcccccgactcttcttgttactgcaggtgcttcaattcgttgaagcatttgcggtaacaaccatctctattatttc

SEQ ID NO: 244 - DNA, 956 bp, Garlic yellow virus
  isolate G83, complete genome.1
gtttacagtgtggtatattgataacaatgggaaacgagaatgaacaagacacagatccaaaacttgcagggcgaaaaggcactagaactgatgtaaacagccttgtccacacagaggagcaactcagggatccaaactacggccgtagacaagtgaatgacgttaatgtctctgaacacgattcttactctgaacttatgaagaagtacgaagatagattcaacaaactcaaagaaagctgcttcagggatctttcaagcgtgtcgatttcaaacagtggttgggaaactgggaggcccaaggctgtcattgctgacaatctaaaaggcgatgctgctaatatcttcacaaggccttcgatcgatgcattgctcgttcgtaatacagtacccgagtcaaataacatggccacagctgaagaattggccagaatatcagctaaggttcaagcactgggagctcctgaagaacatttggcagaggtcttttgggacgtggctaagtattgcgcaacagctggcagctcgccagctgtcaatccccagggtactattcagcttggtgggaggacaattacaagagacatggtgttcgctgttattaaagagtattcaacactccgtagagtttgcaggagttatgcacctattacttggaacaacatgcttttaaacaaccaacctccagcgaactgggatgctaaaggtttcactgaagacaccaagtttgcagcatttgacgtttttgatgccgttactaataaagctgctattcagcctctggaaggtctaattaggcacccgactcaggctgagcggattgcatatgccacccataagaagttggctctggaaaagagcgcacaaaatagcaggtatgccaacacttcggctgaagttactgggggcttgttcggctgttcccctcgcaacaatttccgtgagagtcgatgttaa

SEQ ID NO: 245 - DNA, 959 bp, Trichoderma harzianum hypovirus 1
  isolate THHV1.T-70, complete1
ttccaaaggatccactttgggaccccgcgttaaggtactatgattttgtacttacgtctcttggacgaccttaacatggtttatactctgtcgagttgctggtttcagtaattcagccacacattgtggttggccagcaggcggagtgtgatccagcttgggtgcaaccttcgttagctaatcgcagtagctaacctggggtgccctaaggccggaggaactcgttggttaagaataacccatttatcggtttcacaagctatgtagcctagatgatgttctcatcctacgtaaaactatgaaacgcgcagcttctcccacccctttagagagaggggaattggttgggtgcctagatcccaggagcactgagtagtgcactgtagctgatgttagacgttggtgtgaccatctgacattgtctctagccatgtccatcgaggttggcaacctaatgaggcctgggatgccttgtttcgcttctgacttcgcgatcagatcgttgactgagaacagtcgattaaacagcatgcattcttttgggtagatgtatgaaggtaaaagccgtaaagcgaccctcctcgactgatgcctttgtgccagcttgagagaactgaggacctggcgaagccagtgggtcaccttcaataggttcatggtgtgtgagttcatctcaccacaaacgttttccctctgtttagagattctggaatcgctagccgagaacggctgcccttgtattgctttggttctggtttatacgcttgagatcgtggaagttctcaaatccgaaatcaacgtgtgtagcacgaagacgtggtgtgcttgcacaagtcttcattctcaaggatagctgggttctttactagggcaaccccctagagccagccggttcggcacaagaacggtggaagatgtgggatgaaaactcctagcatcagaagtgcacttccatagat

SEQ ID NO: 246 - DNA, 993 bp, Beihai picorna-like virus 48
  strain BHZC37443 hypothetical protein1
atgcagtgtgttttacacactgcatgttatgttttggagagaaagtatttacgatatacttggatcctccgcttgattgcgtcggatcctttcatggtacattcactgcgagacataatgtaccataggaaggaattcgcaacatgacgaaggaagagtcaatttcgtggaatgccaattgatattacaattattttcatacgtctgtaacacgatacgtacaacccctaacttaatcgtaggttaccaacgcctacttcactgaatttatccacaataattcagtatttgtttagagtacctcaacactctatgtgtcgaagttgagacaggtttttaagtttgctctctgtatggttatttccgacagatgagcttacaatgcgttatgaagatgctatttttcctggagtcaatagtcgatgtcatttagacgtcgtgagatttataataaaaatgttagtcgtagctgctatgtgaaggcgtacgaccgaatgtttgaacgagattatcaggtttacttgatttatctacacttttgggcaactttgttgccatagcctcattttgattgtcgaattttgagtttgatctaaagattagacattgggactgattagtaaagaaaagacaagagttgatgggaattaactcgggacacgtcatacggtggacgtgaacgagttgcagggttctcatgatgtagagatacgtcataaaagggtgtggcacctcaaccacacttcgaaagctatcccctaagtgcatgggatgatatatttaagctgtttatgtttgcgccattgccatcgcttttgagccattggtggtaattcgcacattcctctatacagtggagattatttgaacttgtacattgagaagcgttacatactgtttgttggtcacggcagatgtatactcaaactttgattgaacattggaagaattgtcgaaatttcggtgataactcatgatttttggtgcttggaa

SEQ ID NO: 247 - DNA, 1000 bp, Papaya mottle associated virus
  isolate KE-Mer-04, complete genome.1
tttgacaaaaaaacctcaaaaagtgcagctactattgaaaatcataatatacgctcttgcagggattggcttctggatatgactcaagtgttttcaaagagccaattatgcactaaatttgacaaccgatttaggtcggcaaaggcagcgcaaacaattgtttgctttcagcacgcagtgctgtgtagatttgcgccttatatgaggtacatcgagatgaagttgaaggaatccttgccgaaaaagtattatatacattcaggcaagggcctagatgagctgaacgattgggtcatcaagaacaagtttgacggcacttgcaccgaatcagattatgaggcctttgatgcttcacaagatcagtacattgtcgccttcgaattagagctaatgaggtacctcggtttacccaacgatttgatcgctgactatgaattcatcaagctgcacttgggatccaaacttggatcattcgcaattatgagattcacaggggaagcaagcactttcctattcaacactatggcaaacatgctctttacttttttgaggtatgacattaagggcaacgagagcatatgttttgctggtgatgatatgtgttcatcaaagcggctaacagtcaaaagagaattcgaaagcttcctatctatgatcaaactgaaggctaaagtgcaacatactaaaaatcccactttttgtggttggcacttgtgtccagaagggatttacaaaaaaccgcaattggtcttcgaaaggatgtgcatagctagggaaaccaacaatttacacaattgcattgacaattatgctattgaggtttcctacgcttatcggaagggtgaactgattacagcaagaatggatgaggaggagctgggggcatattatggctgtgttcgaactataatcaaacacaagcacctcttaaaatcagatgtcaagaagttattcgaaggtgcaacgatgtgatcttaggttgtagatatttaaattgaat

SEQ ID NO: 248 - DNA, 1000 bp, Sclerotium rolfsii mycovirus dsRNA 1
  strain BLH-1-16 hypothetical1
ttttcgtttgaggtacgaaagacgatgcgagccgaaagcgtcacttagaaccttgtccgttagattgattttgataacccagaaaaaacgtgccacgggtaacaacacgctaaacaactggaatctgctttacagtcaaagcagcaaagaccagcgacctaacacctttaagaaagaccgacttgtgctggggaaccgcctactcagcttttcaccggaacccgaagccttagcgattttacgaatcgaacgcgctactgaacgatagtgctcttttccaactgcgtatgagcataatgacgcatgccccaaagcgtcaatctcgtatcgaaacaaatgactcgagacgggttatcaccaaagtgacactaccacttttgccttagatgtcccaacagagaaagatagcgtgtaaggggcggctaccaccacaggatatagcagccgcaggtgttcgtcgccgggagacgcgccttgctgaggaccgaacgacgaaataaagtaggacctgactcgtctcgcaatgactgttttcagatgccgtggacttttgacgagtctcgcgcgtatggtccgaacgcggggatcgaaaggagccacacgtatcttgcattggtcttacgcatacacgtaatactaccatctattggtcttacgcatggagatcacacgtaacaccgcatgttgccgaggcgtaactctcggtgcaaggcgtgggtgagtggccggccgaagcctcatcagtctcgctgcgctaaggcaaacgacggactggtgtgagaaagggaggagagagggatcctgagtaacgacagactacggtaggaaggaatgtaagggtggggcttaggaacgaatcgaaagcccgcggtgtggaaacttggaggaaagaataggacttaggacgaatcgaaagcccagggtgtggagttactcactacctccccgctactacaccgccaaggatgttggatcgttcctgcctcaggcaaggatcggt

SEQ ID NO: 249 - DNA, 1000 bp, Rosellinia necatrix fusagravirus 1
  genes for hypothetical protein,1
aagaaaatgaagactgtggtcattttcttccaccaacctcactctccctacggggagtgttcaggctggtgttcaaaatcacagtacacacatgcttgaagtgtgacaagggcgggctccggtccgcggctaaactttggccgtactctgtattacagtttgcctaagtatgctgatagctcaaatcgggaagtggtttggtggaccagagcccgttattcacacaccacacgatccaggacggctctggctaaggcgatccaggatgcgtataaacccactgccaattagctgaaccgccgactaggggatccgcgacatcgtctgggcctgtagcgtaccgtcatcactcttttaaggtacgcgcctgtgtctgggccgtcaactgcggggctggagcttagcgtctagctgcggcgttagtctgttttactgtttacgttgtaggcagtactaagacacacctcctaattttacacttttccaacctactcagcttgccgctttggttgggaagttcttaaaatgagctcctattttatagagctcaagtaacttttgtgcttataatccatcaatgtctcaggctgacaataaacgcggctccggtacatcggcggcgtgtgctcccggaatcataattagccgcaaatccttcctgtttggtcattgtgaccatccattggggtaactctcttttgaggggtgtggtcaaggcgaactcggatagctgaagactgctaacgtagtgcacatcaccgacttgaagatgtgttcgaacgtgccagggcacagcagcttaggctggcttccttggtggacagactgacacccattggggacctcttcctcacggtaagcgctcacgctcaacttccttcgacctgctatgcattcacatttatgtgaaataagtctccgctaactgaacgaaaccgagatagacgaaacttatttggtaagtccgcagcaaacagtcgcacgggttttaggcccgtgg

SEQ ID NO: 250 - DNA, 1000 bp, Fusarium virguliforme dsRNA mycovirus 2
  putative structural/gag1
ggccaaccattgatatcttctttaactcccttggctgggttacagctgggatatctaagtgctacccaccatacaagcatgccctcactgcgggagcagtgcttcagctagttggccgcctaactggagtagttacaggccctttaaggagtcgggtcaccccttatagtatacagacccgtgccaggtttaacgagcctggctactactagttgtgtgcatggacctccgcaatcaatgcattctatttcctgcggctctaatcggtgtgactaaccgttggagtataaaagtcgggtcacatagtactacatctggccgcggcgcggtatcttgccccacacttattatttaccgccgtgcttcggaattacagatcggagaggcttctgcgctcttctgtgcccctcaggagtgagatctaactatgtctcatgtgtagttaactactccgcgtactctcattttccacctctgcaagaaaactaccagcggagggagcagtgaataaattgagctgcacgtctcgaggaaagccgggacgttaaactaggcccgcgcatcgaaggcgctcaacatgaggctagcttcggcaaaggcttaaccgttgcaatcaccccgtcgcggcctgggccccgggtcgcgattcgccagctgctggttcatcatgcagttaggggccccatggaatagtctatgcgttagcatgcggagcacttagtcccggtacagttgacagtaagtcaaagggattgctcttagcatgtggctggaacgggttttatgtccgtgcgaggagtgggaggatccccacccgagtgtaacgactgcgaagtcttaactagcgtgtaggaacagtctctctcgaagtgatgactcgaggggtaggccaccgttccaatcttcagtggtgtccttgcttataggcgtcactttaatcccaaaaatttctaagcagagagtagtgttagtagcattattctcgaaaccaaatttaaaa

SEQ ID NO: 251 - DNA, 1000 bp, Rosellinia necatrix fusagravirus 3
  genes for putative structural1
gcggtttaaggagaagtgccagactctggacgtttcctcacacgcacgacaggctcggctgttgtgcgtgcttatcaaaccgagactctggtgcaagagggcttcttgtagcaccagcgaacgctagtggtggtgaagccagttcttatttgaatggttggctgacgagatgagaccggcgtacttgaagcttggacctctggtaagaggtgataaataactactcgcagatccctggcgtcagttcagtgggcaggaaggctggaaggccttgtggggtttatcgtcacgcagagcggtttggctcgctgtggccccacactacgcactctaaggtctcaataccgcgtggcgtaggccagcttttatagcgatttatctcctgaatactccgagcttcgagtttcggaggttggagtaaatttagcgttacctccgcgggcggcacgcggtttagcaaatatgcctaaaactggacctcgcattcaatcaggtgcttgcgagtcgcctaacacgtgggttgaaccttcgggatcccctttaccgccgcgaggtggagtgtaaccctgcgccatagtgactcagagacagaccctgccccttcaccctcaaaagtgataccgcgggattctggtgagtggaacgggaggtggaatccgcaaggcccaccacgcttgtccgtgcaagggaacacgcttgcaacttggagtgccaccgcgtaggcggcagacaggaatttattctctgtcgttcggcgatatcctaatacagttgtaatgcagtttccgagtgtaacgactgcgaactccttattctgagtaactgaacagtctctgacccaggcctcaagtgggcatacagtggggagggtgctatcatggctttcctttgcggatcgtcgatttcttcggttatttattagccgtcgtacaactcagaatcgtcctctttagagacggggtagcaacctagatagctatatattttctaactcacaaaa

SEQ ID NO: 252 - DNA, 1000 bp, Sclerotinia sclerotiorum dsRNA mycovirus-L
  RdRp gene for RNA1
acgcttatgctggcatgtccctagtgccggtagatttctcaccagttagcatggcagattacaaacccgctagcaacctcactttcccatccctcactcgtccgagcgcagtggatacaagcgacgtcgctaggaacccgcgagtagctagctctaaacgagctcctcgcgctgcagcttctgatattttaaacaggtttaaagagtttaacgcaccaccaccacccgaacccgcgcccgcacagtatgataatgacgcgccggctgcccagctgagctacgaggctaaataccccgttgaacaggcccaggttccaggtgatttcaaatattaccaacctgtggtggcagaagaccgagtacatgtggaacctgctgcagcgcctgatgcttacgatcgcttatctaagcaacaactgaaattagcgatcgaaaacaacatgcaactcttggctaagattcaaaactcacctattctaggtgagttagatttagatgctgaacgtaaacgccaggatgagttccgtcagcttgaagccacgcgtaatgcgcgaattcaacgcaggtctagctacgtaccttttggtcctgctcgtccacgcccggtgctcagccctcgctctacgccgaacaaacctcctgtcgtgcatggcaaactctctgaaaacgaagttaaccatgcacctgtagaggttaacgatgctgctgctgaacaggttcagcgtgaagttcgatctctaggtcgaccgataccaccgcctactaccgcggatccttttgccactctcgctagtgataagcgccgcccaggcacttattatcagaagaatgaggctactctcaatttcgatgacttggtaaaggagcagctcccagcaactaactttggacatactggcgcggacgttaacgtgcaggatgggatggcaactgactcactagcgaaaaactagtgtggaacgttgcttattaccgctctgcgcgtaacgttctcgccagt

SEQ ID NO: 253 - DNA, 1000 bp, Sclerotinia sclerotiorum hypovirus 6
  strain BLH-1-1 polyprotein1
ggcgacctccttccggcacgtcgtagacggcgaccggattaatcaatacagctagtacttctcagcacgctatagcgcagagaacaccaggggacgtcagggagaacgaagcacgtcgcgacctcgcgaggtttctacctccaaggggggctgcaggctaaggccgtatgaacgttgtactcccgcattttggatagatactgatcacgtgcgtccagcgaatcacgagatccctcgtccctgtagacgttaaatggcagcgcaggcggcgacaccgccctttcggttcttactaatcaccgcatccataaaagcggagataggcatgggtgtccaattaatcagtatgagatgggcagtgccgatcgctagcggcccacgggtctgacgatagcgttccgaaaggaaaagggctgatatcagatatcagatatataggccggcccacgtccgtagttccggctgtgtgcaaaccggtggcctagcttgggacttcgatcaccccaatgacgccatgaaaacgattcatccaattcttgctgtgttaacggtttatcttgggcgatagagccaactagctaagatcgtggtgaaatggttcgccttcgtggatcctcccgacactgtggtttcgacaccacaggtgctttcgaacttgaacttttatgcaattaccggcgcgggagcgccacattttggagtcgagactaagattacatcagttctatatgacgtagccacagagagcttgcgcctctcgcgttggacagcttatgccagtgactaacgatatcagatgaagctctgcgggatcttcggtgaaccaacttctttacctgtacgaaataaagggatctgtacctcgtcttgcgtgtctgaacgggaccgaaaatcgacttctaatgtagcagtttgcgtatggaagggatggcttgatagtgcggtttggaggtggtagcgtaggttgaaagagttctagggaacaaaacctccatacaat

SEQ ID NO: 254 - DNA, 1000 bp, Nodaviridae sp.
  isolate dwb062nod1 genomic sequence.1
taagttgggcgctggaatagcgaaatccattaaagaaacttatggtgctcctaaatgtagagcgccggttggttacgcagcagtgcaatctactgaagacggccgtatattgcacttggttaccaaagctgtgagtagtgttccagctattaaacagaggaatgcatatactaagttcacggctgccctcttgcatgcttgtgaattatctatttctaaggaaataggtgtgccgaacggaataggttgtggcttagacaaattagatgcgaatatagttcggaatatactcgctgaagttggtcacatgaggggtaaggtctttgtaatttacaataatgcttaagtcagctattgatgtagcatttaaagctgtccgtgcttcagctaaaagtgcgttgacggcttggagagtgacgcctaatccaacgatggttgttgctaaaacaaaggtcggatccttggtccaaaccgttgccttagaactaagacaaagagcaatcaggcgcgaacatctaaacttatggaagcatcgcccagttcagccggttggttatataactgccatggtgcccaggcccaccctgcttaatagatttgttgaacatgtcttaagtaagttaatgtctgctataagggttattaaaacctatacatttaggttggtagcattaacagggacgggactttactggctcttttcaaccctcattcaggggccagcagttgtagttggtggcacctgtagtagaatatggcaagcaattgtcaggttctattataggcttaaagcccgatttaaaaggagtaagattaaaggaaccaatcggttcagaaaattagcgtcgaaggctgattataggataagagcagcatatatactctatcgagttaccaaacatagagttgctgatgcagttcaattctactccaagaaactggcgcgtatggcttgggacaagcaagcatacttttggtggacagctctgggagcagaaac

SEQ ID NO: 255 - DNA, 1000 bp, Heracleum latent virus
  RNA binding protein gene.1
gtcctgagattcttcttgtggcctgaggagttaatacaagagtacaaaacactgaaactcatgatgggttgctccatgggagatctggcaataatgcgattctctggggagttcgggacattcttcttcaacactatctgcaacatggccttcacctgcctgacatacaacatcaggagggagacccccatttgttatgcaggggatgatatgtatgcgcctggagcacttgtggttagaaaggattatgagaaggtgctgggtgaactacagttgaaggccaaagtgaatgtcagttgttcaccacttttttgcggatggcggatgagtccctacggcattgtgaaggatccgaatctcttgttggatagatggaagatagccaagttctccggaaacctcgagaactgttttgtgaattacgcggtcgaggccatctatggatacaggttaggcgagatcctctatgacatcaatatcgatatcgatgcgcagcaagaattggtgagagagattgtgctggttaaacacaagctgccagcggccatagctaagtatttctctagcgacgtcaatgaagcgcattccgacggagaggaggtagatctacatctgagccctgaaggtgaactacttgattacactgatgccagagggagaggtggcactttttctaagtgggtcaaaggaaaagggaagatcaggtgaggaaaaaataaattaaaaccgaataaaaatagaggtgtgtagaaggttacttagctacggggtaactgctgacctctttaagttaggtgtgaataaaaacctaataatatagaaaccatcttacgtgtttgtgacttgttactgtctgattacggattgaatagagagagcgtagtgaggttactctcagaagtggacgcgaaggaagcggggaaaccggctctgagtttcaagagcctgatttgcaatctttgccgtggggtatcgccttccaacctgagtttacgaacga

SEQ ID NO: 256 - DNA, 1000 bp, Pepper vein yellows virus
  genomic RNA, complete genome.1
ctagtagatcaattggtagcccgggttctgttccaaaaccagaacaagcgagaaatcgctctttggagggcaaatccctcaaaacccggttttggcttatctacggatgagcaagtgctggagtttgtacaggctctggccgcacaagtggaagtctcaccagaagaaatgattacctcgtgggagaagtaccttgtgccaactgattgctccggctttgactggagcgttgcggaatggatgctacatgacgatatggtcgtccgcaataaactcacactggacttaaatcctacaacggagaagttacgatctgcgtggctaaaatgcatctgcaatagtgtcctgtgtttgagcgatggcactctcctcgcccaaagggtccccggcgttcagaagtctggtagctacaacacaagtagttcaaattcaaggatccgagttatggccgcctaccactgtggggctgactgggccatggcgatgggagatgatgcccttgaatcagtcaacaccaacctagaggtgtataaaagtctaggtttcaaagtcgaggtttcaggacaactggaattctgctctcacatttttagagcgcctgacctcgcccttcccgtgaatgagcgcaaaatgctgtataagctcatcttcggatacaatccgggaagtgggaatctggaagtagtcgcgaactacattgccgcctgcgtatcagttctgaatgaactgcggcatgacccagatttagttgctctccttcactcgtggctagtctctccagtgctgccacaaaataattgaagagagagccgataactagccaagcatacatcagttgcaagcgttggaaagttttagtctgattaccaacagcctgacataatagattataaatttttagcaggatttgcgtttggattcttatccgcaatcccaatttctgtagcaggcatatacctagtctaccttaagatctcagcccacgttcgcgcaatcgtta

SEQ ID NO: 257 - DNA, 1000 bp, Avian avulavirus 20
  isolate AAvV-20/great black headed1
ccccagattatgttggcagcacaggcaaccaaagtgcagtgaatgtccatctggatcattctggattcctgggcacagaagagaatatgcattttccacaaataatggcctcacatacctctccagctggtgtaacccagtctgttctccagtcagaacaaatccaagagtcgagcaatgcagatgcggctattgtccatcagtctgcatcctatgcagagacgattcttcatagtgattccatggtgctgggtcggcttgcgaaaattgatgaaaaattatcagagattatgaagataataggaattataccatctatcaagaatgatattaatcagctcaaagctacaactgcccttcttagcaaccaacttgcagctattcaaatattggacccagggaatgctcagtgcaaatcactgaatgagatgcgagctgcatcaaggagtgctactgttgttgtatcaggcccaggagaactatctccacagttagtgagtgataaacttatatgtaaaaatgagctgggccaaccaattcccagagaggaatatagagccagtcaaccgaccaaatcatcgcccaatatggttacagatgctgagctagagagtttacaagcactcattgagacactggtagaacctgggaaaaagagggatagactagtctcacagctcaccaaagttaagactaaagatgattggaatagacttaaacgcgcaatctacaattcataactgtgaattcacgcctgcaactggaacattataaatgcctgacttaacacattaatccctataatcaccttacgctttaagttagctagataggatccttttcttgataccatttttctctctattactctctgaccttaccaaattataaatgtctctgagttacacgcctaatctcctgtacaattaataaaaaagaataacttgggggcgaccctatccacaccggcccagagaccccacagactcccaaactcacc

SEQ ID NO: 258 - DNA, 1000 bp, Mossman virus
  complete genome.1
ataatggataagctcaagatcctagatgagatcaagcatgatgtagagagcatcaggaagacagttatgaagcatagtctgtctctcgcaactctggaagggcagttgagctcggtaatgattgcagtcccttcaactgggtcccaaccacatcaagtagaggtgaatcaggaccttaggcccctgcttgggcgagacaagggaagagggatccctgaagttggaaaaatgaaagtccaaacagtttcgtttgatgagcccaatcaatcaaggagtagtcgtgctcaactgccgaagattagagttgagcttgataagaagatactccctcctccaattgactcaagcaaaactaatgcaacaggatacaaacctgctcctactctaatctcaaaggaagtgatcatagcactgattgattctcggattaaggacaaggatatgaacactagaatgaggaggctacttaatacagccaagacacagagagaactagtggagatacataaggcaatcatcagtgctttaaagaatcaaggcagctaagcaacagtcagtttccattgggtatcaggtaaatttgatacgacattgcttgatacaaaactaaaaagtcaaatttagaatattcatcttagactacattagccctataaagtcagtagctcccttaatagattattggatacactccttagggtgatatcagttcaagataagcttcaaactaactcaggggtttatagaaaaatcggctggtattgacttgaatatttaaagatttctcaacatgttttcggtaataaagtatagtcaaccagcaccacaagtatcgtacttttagaggggatgatctttacacttatcaaagaccagaatactaatattaatctagtattgcttagctaaattagaccttaagatacatgcaacttactggccgctaatagcatattacaaaaaacttaggacgcaggtccatccctttactccagcaacc

SEQ ID NO: 259 - DNA, 1000 bp, Rinderpest virus
  (strain Kabete O), complete genome.1
tggtgccgccgatcccctctcaggagaggccaactgcatcagagaaacccattaaaaagggcacagacgtgaaatcgacctcatctggaacgatggccgagtcttcatcgacaggtggtgcaacccgacctgctctaaagtcacagtggggaccgtcagggccaaatgcatctgcggagaatgccctcgcgtctgcgagcaatgtatcaccgactcagggatcgaaaacagaatctggtaccacaacctcgcggatatcccagagtaacattgagcctgaggatgattacgatgatgagctgttctcggatatccaagacatcaaaacagctctagctaaattgcatgatgaccagcaaattataattaccaggttagagtcactgctttcgctcaagggagagattgattcgatcaagaagcaaatcagtaagcagaacattagcatctctaccatagaaggccatctctccagcgtcatgatcgcaatcccgggatttggcaaggatcccaacgatcccactgccgatgtcgacatcaaccctgatctgagacccataattggtcgggactccgggagagcccttgctgaagtactcaaaaagccggcctcagaaaggcaatccaaggacactggcaaattagggatcgagtccaaaggcctgttgaagaaagagttccaactgaaaccaatagaaaagaaatctagttcggctatcagattcgtcccggacggcagtgttgcatctcgcagtgtgatccgttcaatcatcaagtcaagtcatctcggggaggatcgcaaggattacctgatgagtctcttgaatgacattcagggctccaaggatcttgctcagttccatcagatgctggtcaaaattctaaagaactagactcggcacaacatagctgatctcctcgcttcccctcagcttagctacagcttgcatgctcattataaaaaacttaggagcaaagcataacgcctcgcactcccaac

SEQ ID NO: 260 - DNA, 1000 bp, Measles morbillivirus
  IC323-EGFP viral cRNA, complete genome.1
atgttcctccgcccccgaaccccagtagggccagcacttccgagacacccattaaaaagggcacagacgcgagattggcctcatttggaacggagatcgcgtctttattgacaggtggtgcaacccaatgtgctcgaaagtcaccctcggaaccatcagggccaggtgcacctgcggggaatgtccccgagtgtgtgagcaatgccgcactgatacaggagtggacacccgaatctggtaccacaatctccccgagatcccagaataatgaagaagggggagactattatgatgatgagctgttctccgatgtccaagacatcaaaacagccttggccaaaatacacgaggataatcagaagataatctccaagctagaatcattgctgttattgaagggagaagttgagtcaattaagaagcagatcaacaggcaaaatatcagcatatccaccctggaaggacacctctcaagcatcatgattgccattcctggacttgggaaggatcccaacgaccccactgcagatgtcgaactcaatcccgacctgaaacccatcataggcagagattcaggccgagcactggccgaagttctcaagaagcccgttgccagccgacaactccagggaatgactaatggacggaccagttccagaggacagctgctgaaggaatttcaactaaagccgatcgggaaaaaggtgagctcagccgtcgggtttgttcctgacaccggccctgcatcacgcagtgtaatccgctccattataaaatccagccggctagaggaggatcggaagcgttacctgatgactctccttgatgatatcaaaggagccaacgatcttgccaagttccaccagatgctgatgaagataataatgaagtagctacagctcaacttacctgccaaccccatgccagtcgacctaattagtacaacctaaatccattataaaaaacttaggagcaaagtgattgcctcctaagttccaca

SEQ ID NO: 261 - DNA, 1000 bp, Carpet python nidovirus 1
  strain F17-605-7, complete genome.1
tattgaaaaactctctctttttcaaccaacttaaccagttgtttgaccgcctgcacagtgggcacttgagtatatttttcatatccccaaacagtttagatccgtccaattattaaacaaacaaaacaattgaaatattttatttttattggcagagtagttaactgcttgtttgtcaattgtgtaccagcacaccaaccccttgccaacctccactcagagcccaggatatccccgaaaggggcttcctgctggtgtgagctcttggccccacccctctcaagactcgtaaaacagtctctacccagatattctgcgaaagtagaaatcactcaatctttctcccatagctacaccgagaacaggataaccccgaaaggggcatcctgcgggtagctctctgagcgtgccagtagatatcttcaccgactctgctgggcgtatcggaaccagtccgtcccaaagtccgcaaccatccaagtagctcgaacgagcgaaaggatagggagtacctccttagtaggcctcagccgaaaagggtgggaaacagcggcgaggcccttgtggcctgaccgcagaaacgacctggtagtcgcttctcaacaacagacccgactggatgtgaaaacgtccgatgtggtcagcttgtaactagctatatacttggatatccctcacaaggggactccaggggggaggaactgacccctcccctaggtatatagtaagcaaaaccaggggcgatctgcgaagacacccttcaccacacagccggagaacgctgagtgaagccaagaatcctgtccagcgtaagcacacagggacacattcttgaagaatacctcataactagcttaaggcggttatttggatccgaaagctgaccaccgtcactttcgtggaattctatctgacaccaacacagtcggaaggaattattacatttcaacccccaaaagggaaggtgcaagaacacagcacgaacaaaaattaactaact

SEQ ID NO: 262 - DNA, 1000 bp, Renmark bee virus 4
  isolate SA-10 polyprotein gene, complete cds.1
aaatccagcatcccccctgtggccccgcgcaggaaaggggataaagcgttagaaagtccgctttgttgacacacgtggataggttgagtggagagatatagccacttgatcgaatgtgttgaaagacacgctatgtatcactgacccccctaaggaatccagccgagaaactggatatcagtacgctcttttcaaaaaagagcaagaaagagagaagaagcacagacaatttgttaatagcagacccgctaaggttttcacaaaaacaaatttgaagtccgctaactctaaatcagccccggttaccaaagatccagctgttaccgttttgaataagaaaaagaaacacaagtttgatgataaagttgtcaaaactgtggatccttttgatatacaggatgaatcagaggttcccgtgattaatcctaatgagaattatgaagaattaggtcttgaaattcccagtcgccaagaggtcgttcccgaagaggtcatagctcaagaagcatttgaaaccctagatcaaggatcttgggatattgtacaagagtataccaaaactcaagaagatcttgatgatgagaaagtttttcttgaaagtttagccacagttcctcttacacctgttgaagaagataagaattatgaacctgaaccttttgaatatcaccctaactggagtgatcagtctcctgaagaggcgccaaagaaaccaaagttttcttttgagcctgagaccgtttcagattctgaagtcaaagaagagcttttaactgttaagaaaaagtctaatcctggactcgtagcttatagaaagaaagttgaagctcagcgcaaacaggttagagatgatcgccgtgaagagagagctcgtgccactgaatcagatattcgcaaaagtcgtgataacaagtacttaggagatcgcgagaatgctgaattcaatttccgtaacctgaagacaaagaagatacggtctaggacaaagaacacgactctt

SEQ ID NO: 263 - DNA, 1000 bp, Picornavirales sp.
  isolate H4_Bulk_46_scaffold_10 hypothetical2R
tttccagagatttgatgccctttggtctaatttgagtattgatttgtacctgcattcgcagggtgggtttatcccatgcaccccgggttcattgagttgatttatcctcattgttcccacccgtttttgttgacccgtctgattttgattagttagcattgccacccttgccagaggttttctggtatttctgcactattgtatcattcatgctagtttgatagtagtgccccctgattgaggaatgatcttattcctaccttcaggttcacaccgcctagtaataggcctattgactcactgtaaaaggaaatgtcgtacataccttgtgatattactgattaagaagctgcgttttggacacgcgagaaagtccagaattagtttttgaccattgttttgtatggggaaatgaccccctaggatccgccataataaagtgacgattattttaaaggagttgtttgaagcctcagtttaactgatagctgataatgacaccatcctgtataacttaaagaatatatagcgccccgtgaaactactcgaatggtgaatcgagaacgtaccgggggttagtattaacgccttattccttgagatgtgtcaggtagtgtttccgtctgccgcccgctataggaacgcgaggttaatcccttgcatacattgccccactactcaactcatagagtaagaaaaagacgtgagtccgtgtttttactatgtctatctaggttattcggtacttgatacgaggcaagagaggcacaggccccgagtatcaagtataaagctaaagtcctgttataccataatggatgcggcagacggctcagctgttgaccaagtagggttaccaattgagattactgaaattaacatatttgtagaagaattacattattcagtaccgtccccttcacaggagttccgatctttgtatcggcctgtgttggaagaagtgagatttgtgtctcgcttacacgtggaaagagacagc

SEQ ID NO: 264 - DNA, 1000 bp, Picornavirales sp.
  isolate RtRn-PicoV/YN2014 polyprotein gene,1
tggtaagatcagtggaaagcacaacaccgcttcccccgattatgtgacatctggcaagtgggcggatgggagcccctcagaatccctgtctctcttgacaggttgatttttaaatttcccatgccggacgaaggcgcttgcaataagtcaggcttattttcaggattctctttcttctcattcacgcgcgtcctatgcgtagtgagcggtttcgtgaggacccgttctcaggtgaccaccagacgcttgtttggaactatggcaccacctcaggtgtagactagtgaagacagtgtatctctacaggaaacctttggaggaaaagatttgtagtgcacctcttggaatagactgtgaaaacggttgagaccaagagctctgctatgtaaagaggctgtggagcaacgtgtggtaacacacgccacagtggccaaaagccaagtgggcagaaactctcttctaatatgctgtacccacggcagaagattggagagcaacgagttcaccctttacctccgcttcggcggctgcaatcctagtaacccaattgtggaatgtaccgacgaactgcctcaagctgtctgcattggtttgtgtaggaatgctatgcaggtaccctggttacaggatctgagcataggctaattgtctaagcaaacccaaaccaatttccccttttcttttccattggtgacgaactgcggatgtcgatatggcttcccaggcaattcacggtgttttcaacctcccaatggatcccctagaaggttttcagatgattagagtcttttattcccaaaataatttaaattttgatgagtattgcgcatctgttgtgcgcacttatccagctgttttgcaagaattggctccttttgttagagaaccggatcgtttcgtactcttttgtgctctttggtggcaagccaatcacgatgagggttatgagactgatccagaacccgaaccagaacaacagagttcggatgaagaagaacca

SEQ ID NO: 265 - DNA, 1000 bp, Picoa juniperi mycovirus 2
  isolate ANK_VIR-90 hypothetical protein1
tcgcgttacagccttccagctccgccgaataacactcattataagattcctcccccggcttatcctagttctggggttgtcctattccttttgtttttccttatcactgccatcccagtggtactttacttgtgatacatcattatgtctatcctgtaggagaatttccgaaatcattcacaattggagaaactgcatatacactttttcatccatcgttgaagattacgatgtttcatcctcgtcggtttttctaagtaggagatactctcaattagatcatcatccactggtaagaatgcatatacactttcttgccttctgttggagatgaagggtttatcatcctcatgaaagtgacttttagagatgttcactggtatttgtattccgtggaagacactgattgtctttcctttctctggacaacccctagcactacttttaccggtgcggaggagttagaggttaattcgaggcgtttattattgtccgcaatgacgttaaactattaatgattcttatattaacgatttataatacttaatactgtaatacatttaacactacaaccgataactatcggtgatgggaattagagtcaacttcgatcttgaattgaagctctgttatctattccaatgccgctactctcccggcacgtaggagaaacacgggcgcatggctgcggctcggatcactattcactttggattttgatttaatacatgatttgctgttcccctgggtagttcccagtagcggagttggcaatgataacagccttagatggagcagggatgtagggaatatgttcgggtgaacctcaaaaggggaatctcatttaactaggttaaaatgacgtgtgggataacaacgtgcccactaaccattatagttatctaaataaccactatcccgtgcaattagcgcatgccctaaacgacgttttccatccgtgtatagagtggatcccttggattgagatctcaacaatctc

SEQ ID NO: 266 - DNA, 1000 bp, Shahe heteroptera virus 1
  strain SHWC13624 hypothetical protein1
agttccggagaaggagcactgtcggaacattatataataccacgcttcacgtggtcttgtataccggcattgtgaataccgtaaacctcttcaaggtacctcagtgtttgaattatttagctgaggataaattttcttaaatgagttgtcactgtacataatactcttcaagtagtacatacctcacgtaatttagaaaaggtgtttgaattctttaaccttttcaccttgaatttggcttaatcaatcatgtggatcttatgagcacggatcctgatgctgaaaagtgagcctagacgtggaggaacctgcaaggcgggtgttctttaaggctgtcgtaccctagctgagacagggggggtcccaatactgtcgaagccagacttttagaacatgtgccgctatcgaagggtagcacgcgggcgcgccctcctagagcgaagttcagccagtaagtatcgattgattaatcgacggtggacatgagcacccatcagtcaataaacaccccgttgggagagagaaacgaacgaggaatggcacacctcacaataaaaagccgttgtattctctttccggcctgggagtctcaaaccttcgaaccaattggttccgctacatatattggggacaattatgtggtgctacatccctcggacctaaggtagatcgtgtttatctacttgatagaacctcctgcacctcagagtgcggtccgtagtagaggcaagagaatagtatagcggtcagaaacaaactggattcttcaaaggtacgatttctcagactgagcagactgggtaaacctgctcctaaaaagcataaggggaaacccactgcaggcgtgaggcatttttcaaatgcctttttcgctaaatgggccatcgacccaactaagtccctcctagaggagctcctcggaacgcccgtaactgaggaggaattccggactttcgagcggggtttgtggaggcggccagtgattgtgccggcgcggtgt

SEQ ID NO: 267 - DNA, 1000 bp, Beihai picorna-like virus 53
  strain BHNXC41443 hypothetical protein1
cgggatcccgatcccggtgtagttttattctgttatgtggcgaacgataacggatgtataaactttgactcgatatcaaaatagactagatgcctatactcgataattgtcctaacggacattgtttcacccagaagtggtgttatgcagtgtcctattaggacctgcatagagatagtatgttgtaagctccaacctctttgtcttaacgcatattgtttatgaagttcatgctaaaactcaatacgcaaaagatgccttcctttgttgggctgtaaatacgatgaaggaccattcctctttaaaaagtcaaaacgacggtatattctgtacgtttgaataacccgtgtctcacggaaatgtgaggaatgttttctggtgtgacatttaaaaagcacaccagtgcaagatgttaatgatatattgagtggtgtatcatatacttgtatagcttaaagccttcacacgatggagtagaattcgtacgtgtgtcgtataattccagtacattccatattgagcgctccgctcttatggaagtgattagattaggagaactctctacgtggtacggtgcagtactttaaagcacttaatacacggagaactgtatgttcgtgtacgatcttactataggatagtaattgtctcgaaacaaacgacatttttgttgaagattagtatgtgcagattgctttagaatggcgctgccgattggaaaagaaatctgaattgaaacttttgtatgataatgccaaattaacttttggatggctctgcaactggaaaagatgtttagacgacaacttcggttagataatgtctaattacgatctgagaacactattattttggatgcattgtgttgcgcgtttctctgagcgctaccaaagtagtaattgaaacctccttttggagggtagtagagcacggatgtcgcaatgaataacaaaccaaaactttttggtttgagttcattgcgtcaagttctgttattaac

SEQ ID NO: 268 - DNA, 1000 bp, Beihai hermit crab virus 1
  strain BHJJX25619 hypothetical protein 11
aaagggcaacaacaatgtttatgcttatcacaaaagcaattaaggaacgtgtgttatagttcccactttatgtgacctaatgacggtgagcttccgtaagcaagtccgtacatactgaagaatactttgaaagaatctgcaacatggttctctctcgatagtatatatcaggtgacaaacacacactcaacccgattatttcgcgagttctcgataagagaccgcaccaggtcgagctggaggggtgtaccaatccccgcctaacgttgaacttataacgtctgttagtattgttgtaacaaaacaatcctagatgattttggatcctcaatgtatagattgatcacaagagtagtatggtattgattgaaattgaggctatatttaattcgaagattgtagagttcaatatgaaagcattccaagcaggggaccctgtgttagtacgttagaaattggaatcccccgttcagaggtttctgacaaataggatggttgacacatatgtgaatgttattcagttagagtagatttaattttggtacgtgagcagccaactcatgtacaaactgggtcagttaattggaaaacgcaaggagagttttcactgcaatgcagtctagctttagcaggaccaaaattaagttgtagaagactgaatatttacataggaggacgtacactgatggatttaactcgacctctgtgtcgagacggtgaggattaggaaagttccctactacttctcctaggacgccggtgcgactgtgtacgagtcgtacggaaagtgtgatctttagagagcacgaagtttaagtggggcctgacatggtaaagagtctgaaacagttcactgtaaaggtgaaccttggcaagctcgtgatcgatacgagattataaagcaagttcgatgtttccagatttcccttccccgcgccccaccccagaacactcacactttagtcttgtaaattttgaacaagactaaagattattgaaa

SEQ ID NO: 269 - DNA, 1000 bp, Beihai sipunculid worm virus 2
  strain BHNXC41483 hypothetical1
tttgttaccaaaatatttattcgtgtgttttatttgagcgattcgttagagtggctttcctagaacgccaccctatccggattcgtaaaacctcctagcaggtttcctcgaaccctgttagttatttgtttttacattgcatttattctcgttgatagagaactatcactttgctcgctccacagcgatacgtggatccccgcgcattacgcgcaagggaactttcacttgagtacggaaactttgtattcagatctattagattaattatgctacctatagcttgactataggtgttaaagtcccttcaagaaaactttagcagacgtgtgagactagaggacttcggtctagcgtctattagattctgtcatgaattggaaaagaactacttcttgtttttgattcccgaccccggttgtgttaagtaagatatcatctagcacccatgagtggttaaccccacatagatacagatattaaaattagccggcgaaagccttgagggtttgcacccctctctaagcctccatcaccgcttcatcgcggcgggggttactttttatttgcttctgaaagtctaacttttatttacgctctacttgaagagaaactagcgttcaaggcggtcgtcacccagactgtgactagcattgagagtgcgaatactctctcgtttattacttaccttgcttttgctttgcttattggctacattgttggcctatgggcttggcacgagagcattgtcccttcccaatctggtaaggctgagcgtaaagctcagtgggataaaaaacaaaagaacaagcgtaaggccgctgagaagcgtgccaaagcgcaacaagccaaagagaaacgtgaacttgagtctaagaagaaagtgactttcgagtcatctggacccaagtacgaatctcagtcaggcttttggtttggtgattccaaatggactaagtaccattggaccaaatttttcctgattggcacctacacgttc

SEQ ID NO: 270 - DNA, 1000 bp, Beihai picorna-like virus 42
  strain SCJXSX39263 hypothetical1
ctttataatatgtttttcgtgtatacgtcgtttagatgtgcgtcggcagcgattgtcccgtcgcatttataacatgacggtgtagatttactgcaatatttctacatgcggtgtgcaggaccctggagtagtgtatgttctcctttagacctgtgactacgtgagcgtgctaggttctcccttggaattacggttgcgtggttccttgggcgtgcttagccttgtccattggaggctgtacatatcctgttgagttgtggctctcattcaaaagccccggtgttgtgtgttgtttgctcacccggaagccttttgcagaaggcacgtcttcccacagacttgtaaatagtgggcggtgcttcctgtcgtaaccaggatccccctttccttgccttgagggtatcaaggcgaattgtgttgagatccccggatgggtctcctcactcttatgctaccatccaatcccttactgccgcgaggattatgtgcggtagactgggtcctactcctcgggtggggtagttcccttttatattaccacccaaacagttattttgatcttaactccttatttatatatccatttatgatttttatcaattgtgttaatggtttgccgcaattgagttttttgtattctagtggagttttgtgataaatggctgccatcgacggacgtcgatttgaacattaatgatatagtagtgaaaaatagaagtacattgatgttcttgtgtcggacagcaatatttgaccagtatgaaaaatattgtaaataacctttctttctgattggttctgtccggctgcgatacggtgagaaaacctgttccacagcgttgacatcgtctggtgttaagtttttgccatttgactgatagccatctcaattgagatgttgccctactaaactcttttggtcttaatacctggtgtcactgtgagttctgcgagtcaattctcacttacatccccggcccaaccctcctttccatcaaaa

SEQ ID NO: 271 - DNA, 1000 bp, Penicillium cairnsense negative-stranded RNA virus 1
  isolate1R
cgctcctcacctaccgctttcttgagagtttgttgagccttgttagccgcttcaagctcaggtcgtagttccgggaactcactcagaatccatttgttcttgatcaccgcctctttaattatgcgaagcgctcccatcccgaagtcggcgagaaggaggaacatattcatgaaagataaggcggatcccatccacggccgaccgatcatctgcaccactttgcttgtcatctgagaccggacaggctgatacgataaaaaagacgcgtagaccttcttcaagactgagtcagcaaggaatacagagtcggatacaaaaatctttggttcaccaatcactgaggcaagtgctgcaccttgacgtcgttcattgaacgcagaacgattcttgtcggtaactggtttattaccggctaggtaaagaagaccaaagtaggctccaagctcatcaacatccgtatccagaagagtaagaagctcctctgcagtgacgtcctctgcatcttcgaagttcgttttgagaacagattgttcttctgcctgactcagatcatctctaccaagacctgttatgtcgataggagtagcgcttgatccagtgaagttgaccctagcgttcagtaagattgctgtggcagatgcaagcgctctaatgatgaccgctttatctttactcttcaaaatttgaagcgcaaggaaggcaagagtctcatgacctcctccgtagaccacgttgatagtcacatcaattttcggcagatccggaatttcatatctaacgcgctgatcattcagttcgacagatgagtcgtcccacatactcaattgacccggagtgggtgggatgactttaggcaagtttccagtgttagcggaagacatagttgttcttaggattgaagtagatgaataagattatcgtttctcctagtttctttaaatgtacagaacgacctattctacaggatctgtaggtcctccgtgataagcatactaccaag

SEQ ID NO: 272 - DNA, 1000 bp, Changjiang astro-like virus
  strain CJLX30757 putative protease,1
acctgaatgtgccaaagaaatggtctgggcttaaatccattaaaccacatggatccccaaccactatcaagaaggggtatttgtggctggtgcgtgacgaccagccaaccctggttgcagtgaagttggggtggatgccaggcataattgcacatgatggatccactatccctggggatagtggcgcaccaatcactgatgagcatggcaacattttagccatacacaatgggtatttgcgtgacagtcaggttaatgccgcgttggcgcccccacaagtagttgttggtgggggtgttcaggacgaactggtcaatcttcgtgctacgaaccgtagaaatgaggagaagatgactgagatgttcgagcaaatgcggcagcttaagttgttgtgcgaaaagcatggtatcatgggtgaggttgaacaggaagcgcgtggtgcgagaaagcgaatggtcaatcatcagcggaagccattgcgcatatggagtgaccaagaatatgagaaattattggatgatggattcacacgagacgaacttaaggcgatagccacaaagcgccgtaaggaatatgattactatgaggatgttgagcctgagggttatgccaaagttcaggttaattcacgcgatgataaagttgacaacatgaaatccagttgtgtcagtgagacaacgactgaaaagcatgatcagaaacttgctaaagcgattacgaagtttgagcaagctgttgatggactcaagactgatgtgatagacgagacctaccctgacaaacaagttgaggtcgcgattgatctacacacggggcttgaccacaaacatgttagcgtgactaagacattgggcgatgcaggcaaacaggatttacgggaagccctggctaccattcagaactttatggttcagtggtcagctggggccaaccagcctcgagaggagatcgaactggaaacacggagagtaaaagagcactgccccctatatcaaatggg

SEQ ID NO: 273 - DNA, 1000 bp, Rhizoctonia solani ambivirus 1
  strain AG2-2 LP, complete genome.1R
cggcaggggatgtgagggacagacagtttcgtcaacttcgtgactactctatctcgtccggtcactgggtagtccacatgagatttgaaagaatctaagtgtacgcctttgatccactctctgccattcaaggtgaattgctccgcgtttccctctggagagcccttgcgctgatgacccaatctacggtgcctgcgttcccattatagcttatttgatatgtcgaccacaacgatcccccaatccgagattgatgcggctcttgtcgtactcgccgagtccccctctgagcgccaggaagtagcacccgaaatcgccgaacttgggcttaacgcgatccgtactgcaacaagcgatattgcctggaatggtgctccgctctggatccaacccaattacgccttgtatcgcgatcacatcgcacaattcatctatggagggaagaataaggttcctatcgtgttagcgggttcaacattctgtgatgttgcctatactggggagaaattgcccattcctcttccgattctcgtcattggctgggggaagacgcgcgttgccgaagaagttgcagaacagttcaggaattctggctttaaagattcgatgatccgctccgtcccggtccttgttaaggcgaatccaaccatcgaggacgctcgtcaggctattaatgccaaagcttcccttacctccccctgctctgccgagcatatgaacgtcttcgccttccgccagctaaacacgatcctaaacttggcctcttgtttcttgaagatccaccaatatcccgctttccttgacgaagatgccgtgtccgacttttgcatggctgattggcaacaggttgatcccgatgctgacaaacacaccactcatatggacgttgatgatgagaatgttcgagataagaagacttcaggctggaaggtacctagagattagtacaatggagtttccgaaccgtgctgacctttttgtaattcgctagggattgaag

SEQ ID NO: 274 - DNA, 1000 bp, Beihai weivirus-like virus 5
  strain BHZY60693 RNA-dependent RNA1
ttgcaagcatgcaattcgctctcctcttaattagaaggggtgctccggggaagacaacgccccggggtgagaaactcgtgtcccataattcaatccggtctgcctgccgccgcccgtgggacgtacctgtagaaggacccaggtattggacagtttgcagcgtggtttttactgagtggcgacgtcgaaaaatgaaaactaaaaatgctccctgcggtgtgtcgtcacctcggatggggcctgtcgtcacttgggggtcgcgcatcacttataagtgcgtggctttgttcgtttgctgcagtccggcgagtgccttattcttttgcctgtccggcctgtgacaggtggaagcctggtgtgcggggacgggacccgcctgaggtgaaggccggtgtggggggggagataggcaccctaagctcgccaagctgaaccccacacactacgagtcggcccggtccggggctgccccatctgcataggggttagtcaacagtggtcacgcgctggtaacggcgtgtggttgcaagccgaccttgtgaatggttgcggagccgagtcgcagcggtactgcgatgacagtcgtctgtggtgtggtgctctcgtgctgcccgtggaggaggtgaagaggtttgagccagccgcaagtagcttgccctcttaccggtggtgcggaaatttcccccttggggccgcccccgcggatgctgtcgcctttgtacataacaggtagcatgcgtatcccatacattacgtgtacgttaatatacccaccccgctggccggattcgtgcgagctgttggccgtagtgcccttgggccgtgcctggcttgtcgtcgcggattccgccagccacggggggctttacgtcgtctctgctaggagaggcggcgtctaaagggatccccttgagtcgaattcgtcagcttacctagccgtggcgtcgccaccgctagcgtgtgtttgcgcacggttcaccgtgcgtgtggtgttcgggtg

SEQ ID NO: 275 - DNA, 1000 bp, Dryglaski virus
  isolate Antarctic82 RNA-dependent RNA polymerase1
ttgccgatgttcaagcgtgggaacgctgggctaatgacccgactatcgatgccgcgcaaaaatggcgtgagcatcagccgtggtcgcggaagtcaggatcgcacacgtgcggtggatccaacgaggtttggtttgcaaccgaccatcgagacagagtcatgactttccttcgttatgattatactgtcacttccagcgcgacagtttggattaaagaacccagacctacgctttcgcgtagtatggggcttgacctccaaggtgtcatcccagccgcttgggatttgactgcgttttcctgggcggccgattggtttgggaattgctctcaagttatcaaggctgcaaattgccttttacttgggcccgagccaatgggtggatgggttacgactgtagttcgtggtaaagttaccgtgaagaaaagtccacacccacaagataaacagacagaagtccgtcaccatgagacctttaatgttaagtggaagaagcgtaggcccctagctttttgggaccgcttcccctcgttagagtataggcctaatctcgacccgtggagggtcgttgacatggcttctcttggtataatattctctaaagggcacaaagtgccaggagttatcaaacatggataagagtgcttacaagctctataccattggtcgggacgaggtagtttatgccacgcctgaccacacagtgtcaaattcagacactctcactatgcgacgtacgtcttccaaaaaacgtacagtcaagggaggtaatgttgaacttacgccacagcgcgtaaattacaactttaccaagactattgacgggaacttgatcacgctgtccgtcacaagtacaattgtacctgggactgatacagctcaggcgaagaccttctttagtgacgcgcttaccgcgttcgcagaggaatttgccggatctgcaatctccggtgacatcactcggactccctttaactaactttttataaggaacaattttt

SEQ ID NO: 276 - DNA, 1000 bp, Chronic bee paralysis virus
  isolate 3657 segment RNA1, partial1
tcatccgacatactccgggacgccaagaaccctgagccgccattctcatcctgcggcggtcgtggcgaggtctgtccctcccgtcatgatttccccggagccttgctctgtcactccgattactacctctacgacgagctctcttatgtcattcgtgggcacacttttatcatcaatcactcgtttcttgaagagaataagcacttccacaatgaagcgttcatcacgaagaaaggcgacggagtaatcatgtccacccctgacggcactgaatatcagcacccatacaacatctggaaagccgaaggttgtatcataggatccggtggtgctgccgtctatgcccgagtctatcgtgggccctcaatggatgtttactacgcctatcccgcttctggcacttatcatagtgatgatccacaccgcttaaaacgctcagaccaattcgagaatctccgccttagtagtggcaacattgccagactctctttcaaatccgtcaagattcaaaccacctccggtgacaccatcctcgattgccctcgcgatccctttgaaagagcagttgccaaatgcggtagcggtgtccgtgatctgaagttcttacccacgctatcttcatatatcatatccaaattaaccatgcacgatttagagattaataacgcacaagacatcttagaattagcaaacatcatgtgtgagcgcttcgcttttgacttctactcccactcccatcttgagtatgatcccaccaacataaacatcttcactaggtgtcgtcgtcatgctatgctgctggcccgcgctattcgccacaccctagcacgcaatataacatgttcgattattaatcgtcccatcttacggcaatttacaccttgggcatttaaaagcatcaccatgcctgcttacatcaagcaccgacgtgcacgtcacatcgacttaagacttgcgtctgacaggcctaagccctttcgtgacgggcgcccgatacttg

SEQ ID NO: 277 - DNA, 1000 bp, Carrot red leaf luteovirus associated RNA
  clone sigma RNA-dependent1
gggcacataccgttatgagaaaacggggggcagatgttccggcgatagtgacacatcgttaggcaacgtgagcatcatgctggcgattacgagggtggtttgtgagaggctaaaaggcatacacgtcgagatagcaaacgacggagacgatcaggtactgatggttgaggaaaaccacctcaacagcctggtcgaggagctcagccccacattcatgcggtttggtttccgcgtgaaagtagaggacccggtttgggaattcgagagaatagatttttgccaaaccagaccgatcttcctgtcacccaacgcgccaattatgtgccggtacccaatgcaatctatgtctaaagatgtagcgtcgttcctcaatatagaaagatctgagggatggaaatacatgctgcgagcgataggagcttgcgggtcttctagtttctcacaagtaccagtacttgggaagttctacagagcgttaagttccacatcaaacaagtcagaacacacatggtggaaacgcactggggtagatcttggattcaaacaactcacgaccaacgtgggcccggtccaatatgacgaaataacggcacgaagctccttctataaggctttcggcatactacctgacacccaaatggccctagagagggcaatagacgaatggtacataagccccacaccaccaattgagcacgtccataagttctcgagtgagtacccagtggttgaaggttgggcctaattgtagggtagcaataggtatagctagcctgcccccccccgcttgctgggccggtgggggcagcaccgcagacaacgtggttgagtttgggaacatagatccgaacaccacgtcacgggtaggccacacccgcggagtcaggctgattgccataattggcaggtggggccacgccgtttggccaaaccacccgggtcaccggtagggagaggtctctagggatccgagtgctgccctgttgtaggggcacgctca

SEQ ID NO: 278 - DNA, 1000 bp, Carrot red leaf luteovirus associated RNA
  clone a25 putative RNA1
tacacattgaagtagccaatgatggagatgaccaggtgttgatggtcgagacaaaccaactcgacaacctggtcaaggagcttagtcccacattcgcgcgatttggttttcgcgtgaaagtagaggatcctgtctgggaattcgagagaatagatttttgccaaaccagaccgatcttcctatcaccaggtgagcccataatgtgccgatacccaatgcagtctatgtccaaagacgttgcgtccttcctcaatatagaaagatcagagggatggaaatacatgctcagagctataggagcatgtgggtcttctagtttctctcaagttccagtgcttggtgagttttatagtgcgctcagctccacatcaaacaaagatgaaaccaaatggtggaggcgcacgggagttgatttggggtttaaacagcttaccaacaatgtaggcacgatcccttacgacgaggtcacggcacgaagctccttctataaggccttcggaatcctcccagacacccaagcagcactcgaaagcaaaatacgcaactggaatatgagctccgtaccacacatcgagcaagtccacaaattctcgagtgagtttcccgtggttgacggatgggcctaacttagggaatacagttaggttaagttagtcggcccctcctcttgctggctgggtgagagggggggccagcgcagactggttggataggtttgggaacatagatccgaactccaatcaacgggtaggtcgcacccgcgtagtcgagaatgattaccataattggtaggtgaggtcacgccgtatggccaagtcacccgagctttcggtagggggtctagttgttgagtgccattatgacataaccaactagacaccccacatttggagaagcggcttgcccacgctccaacattccatggatagattgaacgacgaaatgtcattgtcttgccgtcagaggcgttcccctctccaaggctagcccgacgtgcgcc

SEQ ID NO: 279 - DNA, 300 bp, Bovine viral diarrhea virus 1
  clone SWU-Z6, complete genome.1
gcgaaggccgaaaagaggctagccatgcccttagtaggactagcataaagaggggggtagcaacagtggtgagttcgttggatggcttaagccctagtacagggtagtcgtcagtggttcgacgccttggcataaaggtctcgagatgccacgtggacgagggcacgcccaaagcacatcttaacctgagcgggggtcgctcaggcgaaaacagtttgatcaactgctacgaatacagcataataggttaggccagaggcccactgttctgctactaaaaatctctgctgtacatggcac

SEQ ID NO: 280 - DNA, 301 bp, Sicinivirus sp.
  strain RS/BR/2015/2S-1 polyprotein gene, partial1
tgtggtgattagtagaccccctggaggtacccgttttggatctgaccagggacccgtgactataccgttccggtaattcgggtttaaaacaatgaacgtcaccacacactttctttttccctttattttatttgtttgttcagtatgttttatgagttgctcattattgctgcccttgtcgtgattcttgtttcaccgcatgatacccagtgtcttattgtcgtctgtttggtcaattttcttgtatactttctttggacaattccagggttagaccttccattatacccagcaatacaac

SEQ ID NO: 281 - DNA, 303 bp, Feline picornavirus
  strain 661F, complete genome.1
tggccaccggggaaaaacggctactgtgcaccacctctgcaccccacgccgaccacgcctaaccatggcgttagtaggagtggaggaccactgcagagggtcctggtgtgcgacagtcagtggtagagtagacagtcctgactgggcaatgggaccgcgttgcgtatccctaggtggcattgagatttctctgccacccaccagcatggattcctgtggggggggccccatgggctaggtctatactgcctgatagggtcgcggctggtcgactgctgactgtataaccagttgtaacttact

SEQ ID NO: 282 - DNA, 304 bp, Swine vesicular disease virus
  isolate ITL/16/2006, partial genome.1
tagttggtagtcctccggcccctgaatgcggctaatcccaactgtggagcagatacccacgcaccagtgggcagtctgtcgtaatgggcaactctacagcggaaccgactactttgggtgtccgtgtttcttttatttattcctacgctggctacttatggtgacaattgagagactgtagttatattgccatcagattggtcatccggtggagaataaaacagttgctcacctgtttgtcagtcctgcaccgtcgtgccatagagtcttaactgcccctcaacatcgtcgtaaacacgctgga

SEQ ID NO: 283 - DNA, 305 bp, Bat picornavirus 1
  strain LMH22A, complete genome.1
gtggctggccaccacggaataacggcaattgtttgtatgtgggaggtcaagcctgcctagccgataacctttgaccgggtgtgtaggatagaacaggaacccactacaggcgacaggttatggtagagtggatacctagccaggggcaatgggactgcgttgcatatccctaatgagccatcgagatttctctggccattacccggtgatggttgtgtggggggggccccacacactagatccatactgcctgatagggtcgcggctggccgaccataacctgtatagtcagttgactttgaatc

SEQ ID NO: 284 - DNA, 306 bp, Coxsackievirus B5
  isolate 028/Pakistan/91, partial genome.1
taactggtagtcctccggcccctgaatgcggctaatcctaactgcggagcagatacccacatgccagtgggcagtctgtcgtaacgggcaactctgcagcggaaccgactactttgggtgtccgtgtttccttttattcttatactggctgcttatggtgacagttgaaagattgttaccatatagctattggattggccatccggtgacgaacagagcaattatttacctatttgttggttttgtaccattaaatcacaaagttttaaaaacattgaaccttgttttagcatttaatacagcaaa

SEQ ID NO: 285 - DNA, 306 bp, Swine vesicular disease virus
  isolate TAW/119/97, partial genome.1
tagtcggtagtcctccggcccctgaatgcggctaatcctaactgtggagcagatacccacgcaccagtgggcagtctgtcgtaatgggcaactccgcagcggaaccgactactttgggtgtccgtgtttcatttgttcctacactgactatttatggtgacaattgagagactgtaactatactactatcagattgaccacctggtataaaataaaacagttgttcacctgtttatcagcctcgcaccgttgtactgtaaagcctcagacaccccccaacactatcataacacgtagatcattaaa

SEQ ID NO: 286 - DNA, 306 bp, Unknown
  Description of Unknown: Human coxsackievirus B4isolate CB4_Cph1 polyprotein gene, complete1 sequence
tagttggtgatcctccggcccctgaatgcggctaatcctaactgcggagcacatgctcacaaaccagtgggtggtgtgtcgtaacgggcaactctgcagcggaaccgactactttgggtgtccgtgtttctttttattcctatactggctgcttatggtgacaattgagagattgttgccatatagctattggattggccatccggtgtcgaacagagcgatcatttatctgtttgttgggtttgtacccttaaatcttagagttttcaaaactctcaacctcgtactacaactaaactcagcaaa

SEQ ID NO: 287 - DNA, 306 bp, Unknown
  Description of Unknown: Human coxsackievirus B4, isolate CB4_Cph2 polyprotein gene, complete1 sequence
tggttggtagtcctccggcccctgaatgcggctaatcctaactgcggagcacatgcccacaaaccagtgggtggtgtgtcgtaacgggcaactctgcagcggaaccgactactttgggtgtccgtgtttctctttatccctatactggctgcttatggtgacaattgagagattgttgccatatagctattggattggccatccggtgtcaaatagagcgattatctacctatttgttggatttatacctttgaattttgaagtatttaagaccctcaaccttatattacaactcaattcggtaaa

SEQ ID NO: 288 - DNA, 306 bp, Unknown
  Description of Unknown: Human coxsackievirus B4isolate CB4_Cph10 polyprotein gene,1 sequence
tagttagtagtcctccggcccctgaatgcggctaatcctaactgcggagcacatgcccacaaaccagtgggtggtgtgtcgtaacgggtaactctgcagcggaaccgactactttgggtgtccgtgtttctctttattccaatactggctgcatatggtgacaattgagagattgttgccatatagctattggattggccatccggtgtcgaacagagcgatcatctacctatttgttggatttgtgcctttgaattttgaagtattcaagactctcaaccttgtactacaactcaattcggcaaa

SEQ ID NO: 289 - DNA, 307 bp, Swine vesicular disease virus
  isolate HKN/4/89, partial genome.1
taattggtagtcctccggcccctgaatgcggctaatcctaactgcggagcagatacccacgcaccagtgggcagtctgtcgtaatgggcaactctgcagcggaaccgactactttgggtgtccgtgtttccttccgttcttatattggctgcttatggtgacaattggaagattgttaccatatcgctattggattggccatccggtgacgattagaacacttgtatacctatttgttagctttgcaccgctgaactacagagccttaagcaccctttgatcacattacaacacccaacacgtcaaa

SEQ ID NO: 290 - DNA, 307 bp, Swine vesicular disease virus
  isolate HKN-8-73 polyprotein gene,1
taattggtagtcctccggcccctgaatgcggctaatcctaactgcggagcagatacccacgcaccagtgggcagtctgtcgtaatgggcaactctgcagcggaaccgactactttgggtgtccgtgtttccttttattcttatactggctgcttatggtgacaattgagagattgttaccatattgctattggattgtccacccggtgacaaatagaacagttgcttacctgattattagtttcgcaccactgaactacaaaaccttaaacaccctttaatttcatcacaacgcacaatacgttaaa

SEQ ID NO: 291 - DNA, 307 bp, Swine vesicular disease virus
  isolate HKN/7/81, partial genome.1
tagttggtagtcctccggcccctgaatgcggctaatcctaactgcggagcagatacccacgcaccagtgggcagtctgtcgtaatgggcaactctgcagcggaaccgactactttgggtgtccgtgtttccttttactctcatactggctacttatggttacaattgagagattgtgaccatattgctattggattggccatccagcgacgaatagaatagttgcttacctgtttgttaacctcgtatcactgaactacaaagccttgaataccctttaacttcatcataacgctcagtacgctaaa

SEQ ID NO: 292 - DNA, 307 bp, Swine vesicular disease virus
  isolate FRA/1/73, partial genome.1
tagttggtagtcctccggcccctgaatgcggctaatcctaactgcggagcagatacccacgcaccagtgggcagtctgtcgtaacgggcaactctgcagcggaaccgactactttgggtgtccgtgtttccttttattcttatactggctgcttatggtgacaattgaaagattgttaccatattgctattggtttggccacccggtgacgaatagaacagttgtttacctaattgttagtttcgtaccactgaactacaaagccttaaacaccctttaatttcatcataacactcaacacgttgaa

SEQ ID NO: 293 - DNA, 308 bp, Swine vesicular disease virus
  isolate HKN/19/70, partial genome.1
taattggtagtcctccggcccctgaatgcggctaatcctaactgcggagcagatacccacgcaccagtgggcagtctgtcgtaatgggcaactctgcagtggaaccgactactttgggtgtccgtgtttccttttgttcttatactggctgcttatggtgacaattgagagattgttaccatattgctattggattggccatccggtgacgaatagaacaattgtttaactatttgttggttttgtaccgctgaaccacaaagccttaaacaccctttaatttcatcataacgctcaatacgttagaa

SEQ ID NO: 294 - DNA, 308 bp, Swine vesicular disease virus
  isolate ITL/5/77, partial genome.1
tagttggtagtcctccggcccctgaatgcggctaatcctaactgcggagcagatacccacgcaccagtgggcagtctgtcgtaatgggcaactctgcagcggaaccgactactttgggtgtccgtgtttccttttgttcttatactagccacttatggtgacaattgagagattgtaaccatattgctattggattggccacccggcgacgaatagaacagttacttacctgtttgctatcctcgtatcgccgaactacaaatccttaaacaccctttaatttcgtcacaacgctcaatacgttaaaa

SEQ ID NO: 295 - DNA, 308 bp, Swine vesicular disease virus
  isolate HKN/3/91, partial genome.1
tagttggtagtcctccggcccctgaatgcggctaatcctaactgtggagcagatacccacgcaccagtgggcagtctgtcgtaatgggcaactccgcagcggaaccgactactttgggtgtccgtgtttcttttttgttcctacactggctacttatggtgacaattgagagactgtaaccatattgctaacggattggccacctggtatagaatagaacaattgcttacctgtctggcagtctcacaccgttgtaccataaagcctctgacacccctcaacaccgtcataacacttaacacgttgaa

SEQ ID NO: 296 - DNA, 308 bp, Human rhinovirus B
  strain HRV-B06_p1159_sR2067_2009 polyprotein1
gctgtgaccataagacaataatgagtaaaaagagaaacacggacacccaaagtagtcggtcccgtcccggaattgctcattacgaccttaatatcactggtttgtaatacaaggctccagggttaaggttagccgcattcaggggccggaggaatcacaaccaagcacatgcgagtcttcacaccatgtctataaaagggcgtaatgagcaattccgggacgggaccgactactttgggtgtccgtgtttctctttttactcattattgtcttatggtcacagcatatttgttaaatatactgtgatc

SEQ ID NO: 297 - DNA, 310 bp, Bovine viral diarrhea virus 2
  strain AU501 structural polyprotein1
gcagccccggacatctaagggcatggctagccatgcccttagtaggactagcaaaaggaggggactagcagtagcagtgagttcattggatggccgaatccctgagtacagggaagtcgtcaatggttcgacactccattaaccgaggagtctcgagatgccatgtggacgagggcatgcccacggcacttcttaacctatgcgggggttgcatgggtgaaagcaccattcgtggtgttatggacacagcctgatagggtgtagcagagacctgctattctgctagtaaaaactctgctgtacatggcac

SEQ ID NO: 298 - DNA, 310 bp, Human rhinovirus B
  strain HRV-B06_p1220_sR1439_2009 polyprotein1
atgctgtgaccataagacaataataagtaaaataagaaacacggacacccaaagtagtcggtcccgtcccggaattgctcattacgcccttttatagacatggtgtgaagactcgcatgtgcttggttgtgattcctccggcccctgaatgcggctaaccttaaccctggagccttgtattacaaaccagtaatattaaggtcgtaatgagcaattccgggacgggaccgactactttgggtgtccgtgtttcttattttacttattattgtcttatggtcacagcatatttgttaaatatactgtgatc

SEQ ID NO: 299 - DNA, 315 bp, Fur seal picorna-like virus
  isolate KGI-Bel-22, complete genome.1
ttctgcttgctctacgtgcggcgcacgttaaaacgtcccggtggtgtctgtgagcatcatcgttactcttaggagaaacaattatcacaacatgttagtgcggcgcacttcaaacgtcccggggacattcgtgaatgtcatcgtaactccatggagaaatcaaaatcacgatagaagtactgattacggcagcctacaaaggcttgaagtttaccatgtacctgacgcttgcttctatttggacttacaactcttcagttgtgcggcaaccaccgcagaaaaacttagacagggtcctaccatgatgttggtagg

SEQ ID NO: 300 - DNA, 315 bp, Human cosavirus E/D
  strain NG385 polyprotein gene, complete cds.1
ctacaagctttgtgtaaacaaacttttgtttggcttttctcaagcttctctcacatcaggccccaaagatgtcctgaaggtaccccgtgtatctgaggatgagcaccatcgactacccggacctgcaaaattttgcaaacgcatgtggtatcccagccccctcctctcggggagggggctttgctcactcagcacaggatctgatcaggagatccacctccggtgctttacaccggggcgtggatttaaaaattgcccaaggcctggcgcacaacctaggggactaggttttccttatattttaaagctgtcaat

SEQ ID NO: 301 - DNA, 316 bp, Feline picornavirus
  strain 127F, complete genome.1
gatgtcggatgacggctggccaccggggaaaaacggcaaatgtgcaccacctctgcaacccacgccgaccacgtttaaccatggcgttagtaggagtggaccactgcagtgggctctggtgtgcgacagtcagtggtagagtagacagtcctgactgggcaatgggaccgcgttgcgtatccctaggtggcatcgagattcctctgctacccaccagcgtggactcctatggggggggccccataggctaggtctatactgcctgatagggtcgcggctggtcgaccactgactgtataaccagttgtaactcact

SEQ ID NO: 302 - DNA, 317 bp, Antarctic picorna-like virus 2
  nonstructural protein and structural2
atcctcggctccgtcccggaaagacttaaaacttgtccctctgagcgcactagcgtgctcactaaaccaaagacagtattctgccatggataccataccggacacacactctttattgtcccaaaaggcttggcattgtaggcttgaaggctatttagccttggattcaccatccaagagaaccccacgtgcgtagcttgagtcagctagcacatagtggtccccgacttacttcaaaacttacaacaatcagctctgctcctaacgatcataaggagtatagcgtgaaatttcatgatcaaacccctgactgggtt

SEQ ID NO: 303 - DNA, 318 bp, Bovine viral diarrhea virus 1
  genome assembly, complete genome:1
ggaacaaatcctcctcagcgaaggccgaagagaggctaaccatgcccttagtaggactagcatatagaggggggtagcaacagtggtgagttcgttggatggctgaagccctgagtacagggtagtcgtcagtggttcgacgctccagaatgcgagcctcgagatgccacgtggacgagggcatgcccacagcacatcttaacctaggcaggggtcgcctaggtgaaagcgggtggaccaaccgttacggacacagcctgatagggtgctgcagaggcccactggactgctactaaaaatctctgctgtacatggcac

SEQ ID NO: 304 - DNA, 319 bp, Parechovirus-like virus PLV-CHN
  complete genome.1
acatggggtatgttgtctgtcctgttttgttgaaacaatatataagatcctttccgccgatatagacctcgacagtctagtgtaggaggattggtgatagtaacttgccccagaagagtgaccgtgacacatagaaaccatgagtacatgtgtatccgtggaggatcgcccgggactggattccatatcccattgccatcccaacaaacggagggtatacccactatgtgcgcgtttgcagtgggagcctgcaaatttagtcatactgcctgatagggtgtgggcctgcactctggggtactcaggctgtttatataat

SEQ ID NO: 305 - DNA, 319 bp, Enterovirus sp.
  isolate PoEV_VIRES_YN01_C1 polyprotein gene,1
gaatgcggctaatcctaaccacggagcacccaccagtaaaccagctgggagggtgtcgtaacgggtaactctgtggcggaaccgactactttgggtgtccgtgtttccttttgatcctattttggctgcttatggtgacaacgataagttgttatcataaagcttttgggttggccacctggaaaaagttatcagtgtttgatattgctcggctttcacgcctaccaataaaacaagctttatattacttaatttccttttacccaaaggaagaaatctctgaatttcatcttcaactgctcttaacattatcagcaag

SEQ ID NO: 306 - DNA, 321 bp, Echovirus E6
  isolate ETH_P17/E6_2016 polyprotein gene, partial cds.1
agagtctattgagctaattggtagtcctccggcccctgaatgcggctaatcctaactgcggagcagatacccacacaccagtgggcagtctgtcgtaacgggcaactctgcagcggaaccgactactttgggtgtccgtgtttccttttattttttacactggctgcttatggtgacaattgagaaattgttaccatatagctattggattggccatctggtgacaaacagagcgattatttacctatttgttggttttgtaccattgaattttaaagtattaaaaacccttaacctcattctaacatttaacacagtaac

SEQ ID NO: 307 - DNA, 322 bp, Human rhinovirus A
  strain HRV-A34_p1058_sR263_2008 polyprotein1
agagagttatgtatggacatgtccagtcaggtctaggggtcctgctggcgacagtgttctagcctgcgtggctgcctgcgtgtcctcacgggcacgaagccatttacttgacaaggtgtgaagagtcccgtgtgctcgtcttgagtcctccggcccctgaatgtggctaaccttaaccctgcagccagtacacacaaaccagtgtgtagctggtcgtaatgagcaattgcgggatgggaccaactactttgggtgtccgtgtttcactttttaccttttattatgcttatggtgacaatatatagacatatatattgacacc

SEQ ID NO: 308 - DNA, 323 bp, Bat pegivirus
  isolate PDB-99 polyprotein gene, complete cds.1
ggtgcgcgtgaaaccttctcgtcacagaagattagcgcgctaggtacgccaaaggcgtaggcccccggcggtttgcaccgacgtgggacaatgcgctggaggattttacagccgacagagctgcaaaacctgtagtaaggccggagtaccggcctcccagcccgcgtcagcctaaacctggctgtcatacgcggtgtatggaggacatgtccaactatgggtgccttggggtggttccccttggcgtggtgtgacgaccatagcagtactgcctgatagggtcccggcggatgggtcggctgtgtacatccgttgtccccccc

SEQ ID NO: 309 - DNA, 323 bp, Feline picornavirus
  strain 356F, complete genome.1
ggaatgtggatgacggatgacggttggccaccggggaaaaacggcaattgtgcacctcctctacaacctacgccgaccatgcctaaccatggcatcagtaggagtgggcccctgtagtgggtcaaggtgtgcgacagtcagtggtagagtagacaatcctgaccgggcaataggactgcattgcatatccttaggcggcattgagaagcctctgccacccaccggcatggatttctatggggggggccccatagactaggtctatactgcctgatagggtcgcggctggtcgaccactgactgtataaccagttgtgtataac

SEQ ID NO: 310 - DNA, 324 bp, Enterovirus C
  strain 04-4517, complete genome.1
agcctactgagctacttgagagtcctccggcccctgaatgcggctaatcccaaccacggagcaggtgaccataaaccaatggttggcctgtcgtaatgcgcaagtctgtggcggaaccgactactttgggtgtccgtgtttccttttacctttttcattggctgcttatggtgacaatcatagattgttatcataaagcgaattggattggccatccggtgaaaatcagagcgattgtatacttgtttattggattcactccattaacaccaaactccctaacactcatcaaactagttttgttgataagacactactatcata

SEQ ID NO: 311 - DNA, 327 bp, Enterovirus B73
  isolate TO-127, complete genome.1
ggtgtgaagagtatattgagctagctggtagtcctccggcccctgaatgcggctaatcctaactgcggggcaagcacccacaatccagtgggcagcttgtcgtaacgggtaaccctgcagcggaaccgactactttgggtgtccgtgtttcctttatttttaaaactggctgcttatggtgacaattgagagattgttaccatatagctattggattggccatccagtcaccaacagagcaattgtgtacctctttgtagggttcataccacttaattttactagctacaacacactgtgtttcattatcgatttaaacacagcaag

SEQ ID NO: 312 - DNA, 328 bp, Enterovirus G
  EV-G/Wild boar/JPN/Ishi-16/2019 gene for polyprotein,1
ccggcccctgaatgtggctaatcccaaccacggagcgctcgccaacaaaccagttggtagggcgtcgtaacgggtaactctgtggcggaaccgactactttgggtgtccgtgtttccttttgatcctatattggctgcttatggtgacaacgataagttgttatcataaagcttttgggttggccacctggaaaaagttatcagtgtttgatattgttcggctctcgcgcctaccagtaaaacaagcattatactatttaatttccttttatccaaaggaagagatttctgagtttcatttacagttgctcttagtgttgtcaacaag

SEQ ID NO: 313 - DNA, 329 bp, Human hepegivirus
  isolate AK-790 polyprotein gene, complete cds.1
tgaactgttgttgtagcaatgcgcatattgctacttcggtacgcctaattggtaggcgcccggccgaccggccccgcaagggcctagtaggacgtgtgacaatgccatgagggatcatgacactggggtgagcggaggcagcaccgaagtcgggtgaactcgactcccagtgcgaccacctggcttggtcgttcatggagggcatgcccacgggaacgctgatcgtgcaaagggatgggtccctgcactggtgccatgcgcggcaccactccgtacagcctgatagggtggcggcgggcccccccagtgtgacgtccgtggagcgcaac

SEQ ID NO: 314 - DNA, 329 bp, Porcine teschovirus
  isolate SH1, complete genome.1
ttcccaccctcaccctctggatttgtaactgataagtgatgatccttggaagctaggtactcgttacgctggttttggattgtcttgtgcccaacactagttttcggactcttgttgtgtttaaacacagaaatctgattatttggttgtagatttactggacccaccctttgaaagacctgctctggcgcgagctaaagcgcaattgtcaccgggtattgcaccaatggtggcgacagggtacagaagagcaagtactcctgactgggtaatgggactgcgttgcatatccctaggcacctattgagatttctctggggcccaccagc

SEQ ID NO: 315 - DNA, 331 bp, Porcine teschovirus 2
  strain T80 polyprotein gene, complete cds.1
actagtccttggacttttgttgtgtttaaacacagaaatttaattacctggccatgaattcattggattaacccttctgaaagacttgctctggcgcgagctaaagcgcaattgtcaccaggtattgcaccagtggtggcgacagggtacagaagagcaagtactcctgaccgggcaatgggactgcattgcatatccctaggcacctattgagatttctctggggcccaccggcgtggagttcctgtatgggaatgcaggactggacttgtgctgcctgacagggtcgcggctggccgtctgtactttgtatagtcagttgaaactcacc

SEQ ID NO: 316 - DNA, 331 bp, Teschovirus A
  isolate R6 polyprotein gene, complete cds.1
actagacctcggtcttctgttgtgtttaaacacagaaatcttgctatctgactatgaattcataggactaacccctctgaaagacttgctctggcgcgagcaaaagcgcaattgtcaccaggtattgcaccaatggtggcgacagggtacagaagagcaagtactcctgactgggcaatgggactgcgttgcatatccctaggcacctattgagatttctctggggcccaccagcgtggagttcctgtatgggaatgcaggactggacttgtgctgcctgacagggtcgcggctggccgtctgtactttgtatagtcagttgaaactcatc

SEQ ID NO: 317 - DNA, 332 bp, Porcine teschovirus 2
  strain Vir 480/87 polyprotein gene, complete1
actagaccttggtctcttgttgtgtttaaacacagaaatttttcctatttggttatgaattcattggatcaatccctctgagagacctgctctggcgcgagcaaaagcgcaattgtcaccaagtactgcactaatggtggcgacagggtacagaagagcaagtactcctgactgggcaatgggactgcgttgcatatccctaggtacctattgagatttctctggggcccaccagcgtggagttcctgtatgggaatgcaggactggacttgtgctgcctgacagggtcgcggctggccgtctgtactttgtatagtcagttgaaactcact

SEQ ID NO: 318 - DNA, 333 bp, Bovine viral diarrhea virus 1
  isolate CA2006, complete genome.1
caatgattaggcctagggaatgaatcccccttagcgaaggccgaaaagaggctagccatgcccttagtaggactagcataatgaggggggtagcaacagtggtgagtttgctggatggcttaagccctgagtacagggtagtcgtcagtggttcgacgcctcagtgaggaggtctcgatatgccacgtggacgagggcatgcccaaagcgcatcttaacctgggcgggggtcgctcaggcgaaagcggtttattaactgctgcaaatacagcctgatagggtgctgcagaggcccactgtattgctactaaaaatctctgctgtacatggcac

SEQ ID NO: 319 - DNA, 333 bp, Atypical porcine pestivirus
  isolate KU16-5 polyprotein gene,1
tgctgtgagccccgtggtgagtgggggaaaggggttaaccaggcctctagtaccacaggcaccattggacagggcaactcgaacctgagagagaggtaccgaacccttaagccccgagtacggggtagacgtcaccgagtagtacacccaaagaccaccacattcaggtgtagggtctactgaagctcgggtggacgtgggcgtgcccaaagggaaatcggtggtggacctgggggttgggcccgccatgccccttcatggggtagacctcactgcttgatagagtgccggcggatgcctcaggtaagagtataaaatccgttgttcattaac

SEQ ID NO: 320 - DNA, 335 bp, Porcine teschovirus 1
  strain Teschen-Konratice polyprotein gene,1
caacactagacctcggtctactgttgtgtttaaacacagaaatctcgctacttggttatgaattcattggatcaatccctttgaaagacctgctctggcgcgagcaaaagcgcaattgtcaccaggtattgcaccaatggtggcgacagggtacagaagagcaagtactcctgactgggcaatgggactgcattgcatatccctaggcacctattgagatttctctggggcccaccagcgtggagttcctgtatgggaatacaggactggacttgtgctgcctgacagggtcgcggctggccgtctgtactttgtatagtcagttgaagcacact

SEQ ID NO: 321 - DNA, 337 bp, Bat picornavirus
  isolate BtNv-PicoV/SC2013 polyprotein gene,1
accttttccccctctaaggcaatgcactttggtttattctcatggatcatgattttagaggctggccacctaggttaaacggcaattattagtgataggggtcaaacactcatcgtgaaaccgtccagtagcgaggagtagttccctatctactagtgactagtgtgagcagagtaggaggtatacaaggaagtgggacgctatttgctatccccgtattgagagttctctacaccttgtgtatacagtggattgggaagtccactctggtcctatactgcctgatagggttgttaactgtcagctcacacttagtataacagtttgtcaaacactt

SEQ ID NO: 322 - DNA, 337 bp, Enterovirus C
  isolate mew716_CV-A polyprotein gene, complete cds.1
tacccatggctaacgccatgggacgctagttgtgaacaaggtgtgaagagcctattgagctacttaagagtcctccggcccctgaatgcggctaatcctaaccacggagcaagtgcccacaaaccagtgggtagcttgtcgtaacgcgtaagtctgtggcggaaccgactactttgggtgtccgtgtttccttttatttttatcatggctgcttatggtgacaatctaagattgttatcatatagctgttggattggccatccggtgatttacagagacttgagaactaacccgcctttctacaacactcatttacttattaatctcacaatacaaa

SEQ ID NO: 323 - DNA, 338 bp, Phacovirus sp.
  strain RS/BR/2015/1R-1 polyprotein gene, partial1
ctcgtgagtagtacttggccctgcccattacttgaggaccgactcttcttgactacaatgtgtttaaagtaacctggaccacattgtgtatccagacaactccattaggtaatgtacgctggagacgttttcagtgcatagggttctaaagtggtgctgaaatattgcaagctcaatggaatactgaacgctgaaaaccgccgctattatcttttgggccccttgtgggcaaacgttggctttaagcatatactgcttgggaatgcagtactggttgtagacagggtgatagcctaccggctggcgtagttgagttggtatagccagttgattgccat

SEQ ID NO: 324 - DNA, 341 bp, Hepatitis C virus
  replicon I389/NS2-3'UTR.1
gccagcccccgattgggggcgacactccaccatagatcactcccctgtgaggaactactgtcttcacgcagaaagcgtctagccatggcgttagtatgagtgtcgtgcagcctccaggaccccccctcccgggagagccatagtggtctgcggaaccggtgagtacaccggaattgccaggacgaccgggtcctttcttggatcaacccgctcaatgcctggagatttgggcgtgcccccgcgagactgctagccgagtagtgttgggtcgcgaaaggccttgtggtactgcctgatagggtgcttgcgagtgccccgggaggtctcgtagaccgtgcacc

SEQ ID NO: 325 - DNA, 343 bp, Culex theileri flavivirus
  complete genome.1
atataaatcccagtttggttaaacctatttcaaggcttaagttgtttattattttatcgccgctcgtgactataaagttgcctagcggagagagataaagaagaaggagttcaaggctcagggcagggcgcaagttccctggtccctaggccgctcgcaggaaggaggagtgaagaagaagaaagagaaggagaggaccaccgccgaaagaaggcaggtgcctcacaagagggccaaccagcgtgttggaccagtggccaacgccggacggcgtggtggcctgctgggacgcctggggattggatggagtgccttcctacaggaagacatcgttcaagccatc

SEQ ID NO: 326 - DNA, 343 bp, Parechovirus sp.
  QAPp32 polyprotein gene, complete cds.1
acatggggcaggtgtgctgtgccaagagcaacactacggtggccgagccgatggttcgtcaccacgtagtaggactccgtagtgcttggttacggcggacgtaagtcagttgagtgatgtctaagtggcaaaccatgagtacatggtaaccttgtgtggactcgcgggacggaatttcctatcccattgactccttgtagcaaggtgggtatacccaaccacaatggcagcaccctgggtgggaacccaggggcctggattagtatccagtcacacagcctgatagggtggcggctcagccactgaccagcgtctctaaataattgtgagctgttcatgcacc

SEQ ID NO: 327 - DNA, 343 bp, Porcine teschovirus 2
  isolate Stendal 2532 polyprotein gene,1
cttgtgcccaacaaaaggctttggtctcttgttgtgtttaaacacagaaattttgttactcggttatgaattcactggattaacccctttgaaagacctgctctggcgcgagctaaagcgcaattgtcaccgggtattgcaccaatggtggcgacagggtacagaagagcaagtactcctgactgggcaatgggactgcattgcatatccctaggcacctattgagatttctctggggcccaccagcgtggagttcctgtatgggaatgcaggactggacttgtgctgcctgacagggtcgcggctggccgtctgtgctttgtatagtcagttgaaattcact

SEQ ID NO: 328 - DNA, 343 bp, Porcine teschovirus 2
  isolate DS 183/93 polyprotein gene, partial1
cttgtgcccaacattggtcctcggacttctgttgtgtttaaacacagaaattcaactattcggttatgaattcattggatcaaccctcttgaaagacctgctctggcgcgagctaaagcgcaattgtcaccaggtattgcaccatcggtggcgacagggtacagaagagcaagtactcctgactgggcaatgggactgcattgcatatccctaggtacctattgagatttctctggggcccaccagcatggagttcctgtatgggaatgcaggactggacttgtgctgcctgacagggtcgcggctggccgtctgtactttgtatagtcagttgaaatgcact

SEQ ID NO: 329 - DNA, 347 bp, Bovine viral diarrhea virus 1
  viral cRNA for polyprotein, strain1
aattccaaaacagaaatcaggcctagggaacaaaatcctcctcagcgaaggccgaaaagaggctaaccatgcccttagtaggactagcaaattggggggggtagcaacagtggtgagttcattggatggccgaagccctgagtacggggtagtcgtcagtggttcgacgccttaaggaaactaggtctcgagatgccacgtggacgagggcatgcccacggcatatcttaacctgcgcgggggtcgctcaggtgaaagcggcataaatgaccgttatggacacagcctgatagggtgctgcagaggcccactgtattgctactgaaaatctctgctgtacatggcac

SEQ ID NO: 330 - DNA, 347 bp, Picornaviridae sp.
  isolate ybb150shi01 genomic sequence.2
atgtttgtttcatcatatcactatttttgtatcctatcttgattaatcgcttagattggcttggggaagccgatgcgaatttccgccacctcacccccctcaattgtccaaatcagggactgggaaggttttaactaagggcataatttgtcagtggatggtctaggtacagagaatggcgcggtcacttcttctcagtgaacaccgtttgtcctaccctcttaggcccgccatctgctgaatttctgttgcagctggtagtcgcttttgtaattaatcactatagaaatacaatccactttcgtcttctttttgtatccccttctctatagattcgtgtgttttac

SEQ ID NO: 331 - DNA, 348 bp, Bovine viral diarrhea virus 1
  genome assembly, complete genome:1
cgaaccactgacgactaccctgtactcagggcttcagccatccaacgaactcaccactgttgctaccccccccgggatgcccttagtaggactagcataccggggggggtagcaacagtggtgagttcgttggatggctgaagccctgagtacagggtagtcgtcagtggttcgacaccttagaatttaggtctcgagatgccacgtggacgagggcacgcccacagcacatcctaacctggacaggggtcgtccaggtgaaagcgggcaaccgttacggacacaacctgatagggtgctgcagaggcccactgtattgctactaaaaatctctgctgtacatggcac

SEQ ID NO: 332 - DNA, 349 bp, Pegivirus J
  isolate CC61, complete genome.1
ggacttcggtccccctgttactctgcgagccaccgcagagccagggttggtacgcccgaggtgttagaccccggccgaaagctcctaaccatggggttagtaggacgtggtaaatgccactgaggggttggagagctggtagagcgagtaagtcggcgtaaggcccgagtacgggcctcccagcccgggtcagcctaaacctggctgtgatacccggtgcatggagggcgtgtcccaacgctcgatcgctgtagggtgggtccctgcagttgggtgtggctaccctgctcgtactgcttgatagagtcccggcggacggaccagctctcgtcagtccgtggagttgcac

SEQ ID NO: 333 - DNA, 353 bp, Echovirus E9
  isolate NSW-V32-2008-ECHO9, complete genome.1
cccgtaggacgctctaatactgacatggtgcgaagagtcgattgagctagttagtaatcctccggcccctgaatgcggctaatcctaaccgcggaacacatgctcacataccagtgaggagtgtgtcgtaatgggcaactctgcggcggaaccgactactttgggtgaccgtgtttctttttattctcatactggctgcttatggtgacaattgaaagattgttaccatatagctattggattggccatccggtgacgaatagagcaattatatacttattcgttggatacatcccactcaactttaaagaactaagaactcttaattatatattgcaattaaatttcgcaaa

SEQ ID NO: 334 - DNA, 354 bp, Human enterovirus
  isolate EV/Human/CMRHP5B/CMR/2014 polyprotein1
acccataggacgctctaatgtggacatggtgcgaagagtctattgagctagttagtagtcctccggcccctgaatgcggctaatcctaactgcggagcgcatgcccccaaaccagggggaggtgcgtcgtaacgggcaactctgcagcggaaccgactactttgggtgtccgtgtttccttttatctttgcaatggctgcttatggtgacaattgagagattgttaccatatagctattggattggccatccggtgagcaatagagcgatcatctattcctttattggatttgtaccattggactatactgcctttgtcacattgaaatacattctattgttgaacactataaa

SEQ ID NO: 335 - DNA, 355 bp, Atypical porcine pestivirus 1
  isolate APPV-China/SWU-KZ/20181
gcattatgtatgggacatcctaaattggagtgagccccgtggtgagtgggggaaaggggttaaccaggcctctagtaccacaggcaccaatgaacagggcaactcgaacccgagagagaggtaccgaactcttaagccccgagtacggggcagacgtcaccgagtagtacacccaaagaccaccactaggtgtagggtctactgaggctcgggtggacgtgggcgtgcccaaagagaaatcggtggtggacctgggggtcggggccaccatacccctaaacagggtagaccttactgcttgatagagtgccggcggatgcctcgggcaagagtataaaatccgttgtctatcaac

SEQ ID NO: 336 - DNA, 356 bp, Border disease virus
  strain BD31 polyprotein gene, complete cds.1
gaactacatcatactcgtgtacaaaattggacattccaaaactcgattgggttagggagccctcctagcgacggccgaaccgtgttagccatacacgtagtaggactagcagacgggaggactagccatcgtggtgagatccctgagcagtctaagtcctgagtacaggacagtcgtcagtagttcaacgcaaacatgctctgcctgaaatgctacgtggacgaggcatgcccaagactgcttaatctcggcggggtcgccgaggtgaaacacctaccggtgttgggttacagcctgatagggcgctgcagggcccacgtataggctagtataaaaatctctgctgtacatggcac

SEQ ID NO: 337 - DNA, 358 bp, Pestivirus sp.
  isolate ovine/It/338710-2/2017 polyprotein gene,1
gttcattctcgtgtacaaaattgggcatataaatttctgattcgattagggaatccctctagcgacggccgaactgggctagccatgcccatagtaggactagcaaacggagggactagccgtagcggtgagctccctgggaagtctaagccctgagtacagggtagtcgtcagtagttcgacgtggacgagagtccatctcgagatgctacgtggacgagggcatgcccaagacataccttaacccaggcgggggtcgtctgggtgaaatcacttagcgtgatgggggtacaacctgatagggtgctgcagaggcccgctattaggctagtataaaaatctctgctgtacatggcac

SEQ ID NO: 338 - DNA, 359 bp, Human pegivirus
  gene for polyprotein, isolate 89860282.1
gtgatgccagggttggtaggtcgtaaatcccggtcatcttggtagccactataggtgggttttaagggagggttaaggtccctctggcgcttgtggcgagaaagcgcacggtccacaggtgttggccctaccggtgtgaataagggcccgacgtcaggctcgtcgttaaccaataggcaatgccggcgagttgacaaagaccagtgggggccgggcggcgggggaaggacccccgtcgccgcccttcccgggaggggtgggaaatgcatggggccacccagctccgcggcggcctgcagccggggtagcccaagagccttcgggtgagggcgggtggcatttcctttcttgtaccgatc

SEQ ID NO: 339 - DNA, 360 bp, Bovine viral diarrhea virus 2
  strain SD1301, complete genome.1
atacagattggatgttggcaaaaagtgaatcgataaatagggaaccttcccctcagcgaaggccgaaaggaggctagccatgtccttagtaggactagcaaagagaggggactagcggtagcagtgagttcattggatggccgaatccctgagtacagggaagtcgtcaatggttcgacgctctggcaacaaagagcctcgagatgccatgtggacgagggcatgcccacggcacatcttaacctatgcgggggttgcgtaggtgaaagcatcatcttgagatgttatggacacagcctgatagggtgtagcagagacctgctattccgctagtataaaaaactctgctgtacatggcac

SEQ ID NO: 340 - DNA, 363 bp, Human rhinovirus C
  strain HRV-C17_p1192_sR2967_2009 polyprotein1
cagggtcgcctttgtgtttgatgggttagtcgctcagtcagttaccccctgatagacctggcagatgaggttggaaacaccccactggtaacagtgttccagcctgcgtggctgcctgcccctctttttgaggggaagcccatatgtagacaaggtgagaagagccgcgtttgctaatcatgagtcctccggcccctgaatgcggctaatccaaccccacagctactgcgcagaaaccactgcgtgggtagtcgtaatgagcaattgtgggacggaaccgactactttgggtgtccgtgtttcctgttttaccttacattgcttatggtcacaacatatatgaaatcgtatatgttgttcacc

SEQ ID NO: 341 - DNA, 365 bp, Bovine viral diarrhea virus 1
  isolate SLO/2416/2002, complete1
gctcttgtatacaaattggacatccacaaattaaaaatccggcctagggaaaaatccctctcagcgaaggccgaaaagaggctaaccatgcccttagtaggactagcaaaaggagaggggtagcaacagtggtgagttcgttggatggctgaagccctgagtacagggtagtcgtcagtggttcaacacctcggaaagaaggtcttgagatgccacgtggacgagggcatgcccacagcacatcttaacctggacgggggtcgcccaggtgaaagcagttttaaccaactgttatgaacacagcctgatagggtgctgcagaggcccactgcattgctactaaaaatctctgctgtacatggcac

SEQ ID NO: 342 - DNA, 366 bp, Classical swine fever virus
  isolate IND/AS/GHY/G4, complete genome.1
aggttagttcgttctcgtatgtaatatcggacaaactaaaattctgatttggtttagggcacccctccagcgacggccgaactgggctagccatgcctatagtaggactagcaaacggagggactagccgtagtggcgagctccctgggtggtctaagtcctgagtacaggacagtcgtcagtagttcgacgtgagcaggggctcacctcgagatgctatgtggacgagggcatgcccaggacacaccttaaccctagcgggggtcgctagggcgaaatcacgctatgtgatgggggtacgacctgatagggcgctgcagaggcccactaacaggctagtataaaaatctctgctgtacatggcac

SEQ ID NO: 343 - DNA, 367 bp, Rodent pestivirus
  isolate RtNe-PestV/SC2014 polyprotein gene,1
tataagctgggggtgggagcccagcttgtactaaagtttacagcacgtgtgtgaagtttacttagtcctgtagaggtgacggggataacctatgccagtgggtgtgtaccagtaaccattgaactacagggactgcaacctgggagagcacctagagcccctaaggcatgagcacatgccattcgtcaagtggtcagctggaaaggatcacccacctggaaaccactgtggacgagggtattcacccaagggtaactctattaattggggggggccccaattatcaacacaattgtgttgggtgtgctgcctgacagggtcccggctgatggcccaggaagcagtataatatcagttgttttggcac

SEQ ID NO: 344 - DNA, 369 bp, Border disease virus
  isolate R4785/06, complete genome.1
gtatacgagagtagctcatgctcgtatacaaaattggacattctaaaagattaattggactaggattccctcccagcgacggccgaaccgggttagccatacctgcagtaggactagcagacgggaggactagctatcgtggtgaggtccctgagtggtctaagtcctgagtacaggacagtcgtcagtagttcgacacaaacttttgtctcgaggtgctacgtggacgagggcgtgcccaagacacactttaaccctggcgggggtcgctagggtgaaagcgcctaacggcgttggaactacagcctgatagggtgctgcagaggcccacgtaccagctagtataaaaatctctgctgtacatggcac

SEQ ID NO: 345 - DNA, 369 bp, Pronghorn antelope pestivirus
  complete genome.1
gtatacgcagttagttcatcctgtgtatacagattggagactctaaaaacaacgattcggaataggggcccgcggcgaagaccgaagacaggctaaccatgccgttagtagggctagcaccaaaacgcgggaactagacacttaggagagtggtctggctactctaagaggtgagtacaccttaaccgtcaagggttctactcctcagttgaggactagagatgccctgtggacgggggcatgcccaagagttagcttagccggggcgggggttgttccggtgaaagtagcaatattgaccacactgcctgatagggcggagcaggccccctaggtagtctagtataaaatgtctgctgtacatggcac

SEQ ID NO: 346 - DNA, 369 bp, Porcine pestivirus 1
  isolate ISDVDL2014016573 polyprotein gene,1
ggccaattaaagcattatgcgtgggacatcctaaatatttatgagccctgcggtgagtgggggaaagaggttaaccaggcctctagtaccacaggcaccaatggacagggcaactcaaacctgagagagaggtaccgaactcttaagccccgagtacggggcagacgtcaccgagtagtacacccaaagaccaccacttctaggtgtagggtctactgaggctcgggtggacgtgggcgcgcccaaagagaaatcggtggtggacctgggggtcggggccaccatgcccctttacggggtagaccttactgcttgatagagtgccggcggatgcctcaggtaagagtataaaatccgttgttcattaac

SEQ ID NO: 347 - DNA, 370 bp, Pestivirus reindeer-1
  V60-Krefeld complete genome.1
gtatacgaaagtagctcacgttcgtatacaaaattgactgtaccaaatccccaattcggttagggcccctcccagcgacggccgaaccgggttagccatacccgtagtaggactagcaaacgggaggactagcttacgtggtgagatccctgagtggtctaagtcccgagtacggggcagtcgtcagtagttcaacgcaatgtggagttgccttgagatgctacgtggacgagggcatgcccaagacacactttaaccctggcgggggtcgccaggtgaactcacctaatggtgttgggattacagcctgatagggtgctgcagaggcccacgcataagctagtataaaaatctctgctgtacatggcac

SEQ ID NO: 348 - DNA, 370 bp, Border disease virus
  strain Aveyron, complete genome.1
gtatacgagagtagctcaagtctcgtatgcagattggatacacaaaattgttgaattggtgtagggcccccagcgacggccgaactaggctaaccatgcccacagtaggactagcatacggggggactagctttcgtggtgagatccctgagcggtctaagccctgagtacagggtagtcgtcagtagttcgacacaaacgtggttttgtctcgagatgctacgtggacgagggcatgcccatgacacgctttaggcccggcaggggtcgccgggtcgaaaacacctcactgtgttggggttacagcctgatagggtgctgcagaggcccacgcataagctagtataaaaatctctgctgtacatggcac

SEQ ID NO: 349 - DNA, 370 bp, Bovine viral diarrhea virus 1
  strain USMARC-55477 polyprotein gene,1
gtaaaatactcgtatacatattggaaaagaaaaaaataataattaggcctagggaacaaatcctcctctgcgaaggccgaaaagaggctagccatgcccttagtaggactagcacaatgaggggggtagcaacagtggtgagttcgttggatggcttaagccctgagtacagggtagtcgtcagtggttcgacaccttggcataaaggtctcgagatgccacgtggacgagggcatgcccaaagcacatcttaaccagggcgggggtcgctctggtaaaagcagttagatcaactgttatgaatacagcctgatagggtgctgcagaggcccactgtattgctactaaaaatctctgctgtacatggcac

SEQ ID NO: 350 - DNA, 370 bp, Sicinivirus A4
  strain RS/BR/2015/1 polyprotein gene, complete cds.1
cccgattgctgtcctgcttgtctggtgaactcggctggaagcattcagtttctggatttgctggtttgtggtgattagtagaccccctggaggtacccgtctggatctgaccagggacccgtgactataccgttccggtaattcgggtttaaaactatgaacgtcaccacccattttgttttgtttggttgggctggattgtttgtttagatgctcctagaatccctgttggtgattgtagcacttgttgtagtggtcgtctctcctagtgaattaccccagctgtttgctatttgcatctacaactttgtcttgatttttctctggttatttggtaccttagagctccccaattatcccaccattcatc

SEQ ID NO: 351 - DNA, 370 bp, Pasivirus A3
  complete genome.1
tacctaaaggttcggacacaactccgcgcttcagcctccttaccaaaacaggtgggcagccctgtcttatacttagtggaaacgggaaccaaacgaagtgctttcggttccgttgcaaaaagcatttccgcaggcattacgagcacgtcacgaccacctggtggactgtgggcgagcgtggatctgagagacagggggatgcctgcattttagtaactttcaaaaactcctgtcaaagacaggacttcctcaaaactgtgcctttgccgccaggaatgcaagcgcaaggaattaccatgcatttagactattaacagacaatcttgcattgcacctgcagtgaaggacatctttgtgcagaaaaactgtg

SEQ ID NO: 352 - DNA, 371 bp, Bovine viral diarrhea virus 1
  isolate SLO/3301/2014, complete1
agttctcgtatacacattggacactctaaaaatatattgtaattaggtctaggggactaaatcctccttagcgaaggccgaaaagaggctagccatgcccttagtaggactagcacaataaggggggtagcaacagtggtgagttcgttggatggctgaagccctgagtacagggtagtcgtcagtggttcgacgcctcggaggacaggcctcgagatgccacgtggacgagggcacgcccacagcacatcttaacctgaacgggggtcgtttaggtgaaagcggtttaaccaaccgctacgaatacagcctgatagggtgctgcagaggcccactgtattgctactgaaaatctctgctgtacatggcac

SEQ ID NO: 353 - DNA, 372 bp, Border disease virus
  isolate Coos Bay 5 c, complete genome.1
gtatacgggagtagctcatacccgtatgcaaaattggacgtctcaaaattcgattgggtgagggagccctcctagcgacggccgaaccgtgttaaccatacacgtagtaggactagcaaacgggaggactagccatcgtggtgagatccctgagcagtctaagtcctgagtacaggatagtcgtcagtagttcaacgcaggcgtggttctgccttgagatgctacgtggacgagggcatgcccaagacatgctttaatcccgacgggggtcgccgggatgaaaacacctactggtgttgggattacagcctgatagggtgttgcagagacccacgtataggctagtataaaaatctctgctgtacatggcat

SEQ ID NO: 354 - DNA, 372 bp, Border disease virus
  strain X818, complete genome.1
gtatacgggagtagctcatgcccgtatacaaaattggatattccaaaactcgattgggttagggagccctcctagcgacggccgaaccgtgttaaccatacacgtagtaggactagcagacgggaggactagccatcgtggtgagatccctgagcagtctaaatcctgagtacaggatagtcgtcagtagttcaacgcaggcacggttctgccttgagatgctacgtggacgagggcatgcccaagacttgctttaatctcggcgggggtcgccgaggtgaaaacacctaacggtgttggggttacagcctgatagggtgctgcagaggcccacgaataggctagtataaaaatctctgctgtacatggcac

SEQ ID NO: 355 - DNA, 372 bp, Classical swine fever virus
  strain 94.4/IL/94/TWN, complete genome.1
gtatacggtgttagctcatcaccgtatgcaagattggacaaaccaaatctcaatctggctcagggcatccctccagcgacggccgaactgggctagccatgctcatagtaggactagcaaacggagggactagccgtagtggcgagctccctgggtggtctaagtcctgagtacaggacagtcgtcagtagttcgacgtaagcggaagctcacctcgagatgctacgtggacgagggcatgcccaagacacaccttaaccctggcaggggtcgccagggtgaaatcacactatgtgaggggggtacgacctgatagggtgctgcaggggcccactattaggctagtataaaaaactctgctgtacatggcac

SEQ ID NO: 356 - DNA, 372 bp, Wood duck megrivirus
  isolate WDMeV/6497nt/WD08.18-AU-20181
tgggctcttttccgtacggtggcgtgacgaaccaccgtgcgtgaccctgctaagtcgtctgtgcctctcgggcatgtcgtggctccggctccgatatgcttgggacaacggatgggcggcttggtggggctagtcaccccgtttttggacttcctggttttgactccctctttgtctttcgggcttggtccaccgacggactaattggtatctgcaaggcctatagcctcgttctgaaatgccctagccaaagggacgtagtaggatcttggtgtttcccttgcagctctaccgaccgtattagctagagctaggactgtgcaggatgtttcagacctctttttgagcaatctgggacaagaccccggtctg

SEQ ID NO: 357 - DNA, 373 bp, Bovine viral diarrhea virus 1
  isolate VE_138cp_05 genome assembly,1
actagataaaatactcgtatacgtattgggcatttaaaaatataattaggcctagggaataaatccccctctgcgaaggccgaaaagaggctagccatgcccttagtaggactagcataatgaggggggtagcaacagtggtgagttcgttggatggcttaagccctgagtacagggtagtcgtcagtggttcgacgccttgtcgcaaaggtctcgagatgccacgtggacgagggcacgcccaaagcacatcttaacctgagcgggggtcgctcaggcgaaagcagtttaaccaactgttacgaatacagcctgatagggtgctgcagaggcccactgtattgctactaaaaatctctgctgtacatggcac

SEQ ID NO: 358 - DNA, 373 bp, Classical swine fever virus
  isolate CSFV-UP-GZ-NVD-11, complete1
gtatacgaggttagttcattctcgtatgcattattggacaaatcaaaatttcaatttggttcagggcctccctccagcgacggccgaactgggctagccatgcccatagtaggactagcaaacggagggactagccatagtggcgagctccctgggtggtctaagtcctgagtacaggacagtcgtcagtagttcgacgtgggcagaggcccatctcgagatgctatgtggacgagggcatgcccaagacacaccttaaccctggtgggggtcgctagggtgaaatcacacaacgtgatgggggtacgacctgatagggtgctgcagaggcccactaacaggctagtataaaaatctctgctgtacatggcac

SEQ ID NO: 359 - DNA, 373 bp, Classical swine fever virus
  strain JJ17LOM-JSJ12, complete genome.1
gtatacgaggttagttcattctcgtatgcatgattggacaaattaaaatttcaatttggatcaggtcctccctccagcgacggccgaagtgggctagccttgcccgcagttggactagcaaacggagggactagccgtattggcgagctccctgggtggtctaagtcctgagtacaggacagtcgtcagtagttcgacgtgagcagaagcccacctcgatatgctatgtggacgagggcatgcccaagacacatcttaaccctagcgggggtcgctagggtgaaatcacaccacgtgatgggagtacgacctgatagggtgctgcagaggcccactattaggctagtataaaaatctctgctgtacatggcac

SEQ ID NO: 360 - DNA, 373 bp, Sicinivirus 1
  strain UCC001, complete genome.1
gtgtcattaaggtgtgtttggaagttcgaattagctggtttgtggtgattagtagaccccctggaggtacccaattcggatctgaccagggacccgtgactataccgctccggtaattcgggtttaaaacaatgaacgtcaccacacaattacttttctcattttattttcatcattgtcttcctatttaccgattacactcgatttccttggatgttcctggagatttccctggttacctggaccctcattattgttgttgtttcacccagcgagctgtcccaattgcttattatttgcgcttacaacttcgtcctaatatttttctggttgatcgggttgattgagctcccgggctatcctgccattcaac

SEQ ID NO: 361 - DNA, 374 bp, Classical swine fever virus
  strain CSFV/1.4/dp/CSF1058/2010/Pinar1
gtatacgaggttagctcattctcgtatacatgatcggacaaatcaaaatctcaatttggttcagggcctccctccagcgacggccgaactgggctagccatgcccacagtaggactagcaaacggagggactagccatagtggcgagctccctgggtggtctaagccctgagtacagggcagtcgtcagtagttcgacgtgagcagaagcccacctcgagatgctatgtggacgagggcatgcccaagacacaccttaactctagcgggggttgctagggtgaaatcacaccatgtgatgggagtacgacctgatagggcgctgcagaggcccactattaggctagtataaaaaatctctgctgtacatggcac

SEQ ID NO: 362 - DNA, 374 bp, Border disease virus
  gene for polyprotein, complete cds, strain:1
gtatacggggtagctcatgcccgtgtacaaaattggactttccaaaaaactcaattggattagggagccctcctagcgacggccgaaccgtgttagccatacacgtagtaggactagcagacgggaggactagccatcgtggtgagatccctgagcggtctaagtcctgagtacaggatagtcgtcagtagttcaacgcagacatggttctgccttgagatgctacgtggacgagggcatgcccaagacgcgctttaatcctggcgggggtcgccagggtgaaaacacataccagtgttggggttacagcctgatagggtgctgcagaggcccacgtataggctagtataaaaaatctctgctgtacatggcac

SEQ ID NO: 363 - DNA, 374 bp, Classical swine fever virus
  strain JJ9811, complete genome.1
gtatacgaagttagctcaccctcgtatacataattgggcaggtcaaaattccaatttggttcagggcccccctccagcgacggccgaactgggctagccatgcccacagtaggactagcagacggagggactagccgtagtggcgagctccctgggtggtctaagtcctgagtacaggacagtcgtcagtagttcgacgtgagcagcagctcatctcgagatgctatgtggacgagggcatgcccaagacacaccttaatcctggcgggggtcgccagggtgaaatcacactgcgtgatgggggtacgacctgatagggtgctgcagaggcccactattaggctagtataaaaaatctctgctgtacatggcac

SEQ ID NO: 364 - DNA, 374 bp, Classical swine fever virus
  strain CSFV/2.3/dp/CSF857/2006/Borken,1
gtatacgaggttagctcgttctcgtatacgatattggatacactaaatttcgatttggtctagggcacccctccagcgacggccgaaatgggctagccatgcccatagtaggactagcaaacggagggactagccgtagtggcgagccccctgggtggtctaagtcctgagtacaggacagtcgtcagtagttcgacgtgagcaccagcccacctcgagatgctacgtggacgagggcatgcccaagacacaccttaaccctggcgggggtcgctagggtgaaatcacattatgtgatgggggtacgacctgatagggtgctgcagaggcccactattaggctagtataaaaaaatctctgctgtacatggcac

SEQ ID NO: 365 - DNA, 374 bp, Bovine viral diarrhea virus 1
  isolate GXNN1, complete genome.1
ggaaaaaacactcgtatacatattgggcgattctaaaacgataattaggcctagggaatgaatccccttcagcgaaggccgaaaagaggctagccatgcccttagtaggactagcataatggagggggtagcaacagtggtgagttcgttggatggcttaagccctgagtacagggcagtcgtcagtggttcgacaccttggaagaacaaggcctcgagatgccacgtggacgagggcatgcccaaagcacatcttaacccgggcgggggtcgctcaggtgaaagcagtttaaccaactgttacgaatacagcctgatagggtgctgcagaggcccactgtattgctactaaaaatctctgctgtacatggcac

SEQ ID NO: 366 - DNA, 374 bp, Human enterovirus
  isolate EV/Human/CMRHP55/CMR/2014 polyprotein1
ggtacctgtggctaaaagccacaggacgctagttgtgaacaaggtgtgaagagtctattgagctacaagagagtcctccggcccctgaatgcggctaatcccaaccatggagcaagtgctcacgcaccagtgagtagcttgtcgtaacgggtaactctgtggcggaaccgactactttgggtgtccgtgtttccttttatttttataatggctgcttatggtgacaatctcagattgttatcataaagcgaattggattggccatccggtgaaagtgagatatattatatacctttttgttggatttactccaatcaattccttcacttatcagctcatcactataactctgttgattagaagcatataccaca

SEQ ID NO: 367 - DNA, 375 bp, Classical swine fever virus
  strain GD19/2011, complete genome.1
gtatacgaggttagttcgttctcgtgtacaatattggacaagaccaaaattccgatttggcctagggcacccctccagcgacggccgaactgggctagccatgcccacagtaggactagcaaacggagggactagccgtagtggcgagctccctgggtggtctaagtcctgagtacaggacagtcgtcagtagttcgacgtgagcaggagcccacctcgagatgctatgtggacgagggcatgcccaagacacaccttaaccctggcgggggtcgccagggtgaaatcacaccatgtgatgggggtacgacctgatagggtgctgcagaggcccactaacaggctagtataaaaaatctctgctgtacatggcac

SEQ ID NO: 368 - DNA, 375 bp, Pestivirus Burdur/05-TR
  complete genome.1
gtatacgagattagctcacactcgtatacaaattggatatgacaaattcaaattggactagggactccctctagcgacggccgaacggggttaaccatacctctagtaggactagcaaacggagggactagctatagtggtgagctccctgggaggtctaagttccgagtacggaatagtcgtcagtggttcaacgccggtaaaccccggccttgagatgccacgtggacgagggcatgcccaagacacaccttaacctgggcgggggtcgtccaggtgaaaacacccctttttgggtgctgggggtacagcctgatagggtgctgcagaggcccactaataggctagtataaaaatctctgctgtacatgagac

SEQ ID NO: 369 - DNA, 375 bp, Bovine viral diarrhea virus 1
  isolate MA_101_05 genome assembly,1
atttagaaaaggttctcgtatacgtattgggcaatcaaaaataatgattaggcctagggaacaaaccctctcagcgaaggccgaaaggaggctagccatgcccttagtaggactagcaaaatgaggggggtagcaacagtggtgagttcgttggatggctgaagccctgagtacagggcagtcgtcagtggttcgacacctaggatggtaggtctcgagatgccacgtggacgagggcatgcccacagcacatcttagcctgagcgggggtcgcccaggtgaaagcggtacagacagaccgctacgaatacagcctgatagggtgctgcagaggcccactgcaatgctactaaaaatctctgctgtacatggcac

SEQ ID NO: 370 - DNA, 376 bp, Border disease virus
  strain Gifhorn clone pBeloGif3, complete1
gtatacgagagtagttcaggctcgtatgcaaaattgggtgtttcaaattttaaaattcgactagggccaccccccagcgacggccgaaacgggttagccatacccttagtaggactagcggacggggggactagccatcgtggtgagatccctgagcggtctaagtcctgagtacaggacagtcgtcagtggttcgacgcggtcatcgcatcgtctcgagatgccacgtggacgagggcatgcccaagacacgctttaatcctggcgggggtcgccagggtgaaaacgtcctagtggcgttggggttacagcctgatagggtgctgcagaggcccacgcataggctagtataaaaaaactctgctgtacatggcac

SEQ ID NO: 371 - DNA, 376 bp, Border disease virus
  strain H2121 (Chamois-1), complete genome.1
gtatacgagagtagctcatgctcgtatacagattggacacgctaaattttttaattagggttagggtgttccccccagcgacggccgaactgggttagccatacccatagtaggactagcagacgggaggactagccatcatggtgaggtacctgagcggtctaagccctgagtacagggcagtcgtcagtagttcgacactaacttggcttagtctcgagatgctacgtggacgagggcatgcccatgacacgctttagccccagcgggggtcgttggggtgaaaacacattacggtgctggtatcacagcctgatagggtgctgcagaggcccatgaataggctagtataaaaaatctctgctgtacatggcac

SEQ ID NO: 372 - DNA, 376 bp, Bovine viral diarrhea virus 1
  isolate SLO/2407/2006, complete1
agatttaggaaagctctcgtatgcatattgggcaatctaaaataataattagacctagggaacaatccctctcagcgaaggccgaaaggaggctagccatgcccttagtaggactagcaaaatgaggggggtagcatcagtggtgagttcgttggatggctgaagccctgagtacagggcagtcgtcagtggttcgacgcctaggatgataggtctcgagatgccacgtggacgagggcatgcccacagcacatcttagcccgagcgggggtcgcccgggtgaaaacggtaaatacagaccgctacgaatacagcctgatagggtgctgcagaggcccactgtaatgctactaaaaaactctgctgtacatggcac

SEQ ID NO: 373 - DNA, 377 bp, Border disease virus
  isolate R9336/11, complete genome.1
gtatacgagagtagttcatgctcgtatacagaattggatattctaaaatttgttaattggactagggtctcctcctggcgacggccgaaccgggttagccatacccgtagtaggactagcatatgggaggactagctttcgtggtgaggttcctgagtggtctaagtcctgagtacaggatagtcgtcagtagttcgacacaaacggagttttagtctcgagatgctacgtggacgagggcatgcccaagactcactttaatcctggcgggggtcgccagggtgaaaacgcccaatggcgttggaactacagcctgatagggtgctgcagaggcccacgcaacagctagtataaaaaatctctgctgtacatggcac

SEQ ID NO: 374 - DNA, 377 bp, Pestivirus
  strain Aydin/04-TR, complete genome.1
gtatacgagattagctcatactcgtgtacaaattggacgtagcaaatttaaaaattcggatagggtccccatccagcgacggccgaacggggttaaccatacctctagtaggactagcagacggatggactagccacagtggtgagctccctgggaggtctaagttctgagtacagaacagtcgtcagtagttcaacgctggtaaaccccagccttgagatgctacgtggacgagggcatgcccaagacacaccttaacctggacgggggtcgtccaggtgaaagtacccatctttgggtgctgggagtacagcctgatagggcgctgcagaggcccactgacaggctagtataaaaatctctgctgtacatggaac

SEQ ID NO: 375 - DNA, 377 bp, Bovine viral diarrhea virus 1
  isolate SLO/1361/2014, complete1
agatttagctcaatctctcgtatgcacattgggcaagcaaaataacaattaggcctagggaaaaaataatcctcctcagcgaaggccgaaaagaggctagccatgcccttagtaggactagcatattggggagggtagcaacagtggtgagttagttggatggctgaagccctgagtacagggtagtcgtcagtggttcgacgccttagaatacaggcctcgagatgccacgtggacgagggcatgcccacagcacatcttaacctgagcgggggtcgcccaggtaaaagcggatgaaaaccgttactaacacagcctgatagggtgctgcagaggcccactgcactgctactaaaaatctctgctgtacatggcac

SEQ ID NO: 376 - DNA, 377 bp, Atypical porcine pestivirus
  isolate 5620 polyprotein gene, complete1
gcataatgcttagattggctgcattatgtttgggacatcctaaatttttatgagccctgtggtgagtgggggaaaggggttaaccaggcctctagtaccacaggcaccaatggacagggcaactcgaacctgagagagaggtaccgaactcttaagtcccgagtacggggcagacgtcaccgagtagtacacccaaagaccaccacttttaggtgtagggtctactgaggctcgggtggacgtgggcgtgcccaaagagaaatcggtggtggacccgggggtcgggaccaccatgcccttcacggggcagaccttactgcttgatagagtgccggcggatgcctcgggtgagagtataaaatccgttgtttattaac

SEQ ID NO: 377 - DNA, 378 bp, Bovine viral diarrhea virus 2
  isolate McCart_c, complete genome.1
ttgcatggtacgggctgagctacggattggatgttgacaaattttgaattggcaaagtaggtaactttcccctcagcgaaggccgaaaagaggctagccatgcccttagtaggactagcaaaaggaggggactagcggtagcagtgagttcattggatggccgaacccctgagtacaggggagtcgtcaatggttcgacactccatcattcatggagtctcgagatgccatgtggacgagggcatgcccacggcacatcttaacctatgcgggggttgcatgggtgaaagcgccattcgtggcgttatggacacagcctgatagggtgtagcagagacctgctattccgctagtaaaaaactctgctgtacatggcac

SEQ ID NO: 378 - DNA, 378 bp, Atypical porcine pestivirus
  isolate GX02-2019 polyprotein gene,1
gcataatgctttgattggctgcattatgtgttggacacctcaaattaccacgcgccctgcggtgagtgggggaaaggggttaaccaggcctctagtaccacagacaccaattggcagggcaactcaaacctgagagagaggtaccgaactcttaagccccgagtacggggcagacgtcaccgagtagtacacccaaagaccaccatgtttaggtgtagggtctactgaggcttgggtggacgtgggcgtgcccaaagagaaatcggtggtggacctgggggtcgggcccaccacacccctttatggggtggaccttactgcttgatagagtgccggcggatgcctcaggtaagagtataaaatccgttgtttattaac

SEQ ID NO: 379 - DNA, 378 bp, Porcine pestivirus 1
  complete genome.1
gcataatgctttgattggctgcattatgtgtgggacatcctaaattgtcataagccctgcggtgagtgggggaaaggggttaaccaggcctctagtaccacaggcacctatggacagggcaactcaaacctgagagagaggtaccgaactcttaagtcccgagtacggggcagacgtcaccgagtagtacacccaaagaccaccatttctaggtgtagggtctactgaggctcgggtggacgtgggcgtgcccaaagagaaatcggtggtggacctgggggtcggggccaccataccccgttatggggtagaccttactgcttgatagagtgccggcggatgcctcgggtaagagtataaaatccgttgtctattaac

SEQ ID NO: 380 - DNA, 378 bp, Atypical porcine pestivirus
  isolate NL11 Farm10 polyprotein gene,1
gcataatgctttgattggctgcattatgtatggaacatcctaaattgttgtgagccccgtggtgagtgggggaaaggggtttaccaggcctctagtaccacaggcaccgatagacggggcaactcgaacctgagagagaggtaccgaactcttaagtcccgagtacggggcagacgtcaccgagtagtacacccaacgaccaccactcctaggtgtagggtctactgaggctcgggtggacgtgggcgcgcccaaagagaaatcggtggtggacctgggggccggggccaccatgctcctttacggggtagaccttactgcttgatagagtgccggcggatgcctcgggtaagagtataaaatccgttgtctattatt

SEQ ID NO: 381 - DNA, 378 bp, Swine pasivirus 1
  complete genome.1
gcttttgaccagtggctctgggttacttagccaagtccctttctcttattttcactagtttatgttgtgtgttgtctgttttgttttgtttaaattgtatacaagatccttcccgccgacacagacctcgacagtctggtgtaggagggttggtgatattaatttgccccaaaagagtgaccgtgatacgtggaaaccatgagtacatgtgtatccgtggaggatcgcccgggactggattccatatcccattgccatcccaacaaacggagggtatacccaccacgtgcgcgtttgcagtgggaatctgcaaatttagtcatactgcctgatagggtgtgggcctgcactttggggtactcaggctgttcatataat

SEQ ID NO: 382 - DNA, 379 bp, Bovine viral diarrhea virus 2
  isolate 1786c polyprotein gene,1
tcctcgttgaaattctcgtatacagattgggtgttggcaaacagttaattagtgaagtagggaaccttcccccctctgcgaaggccgaaaagaggctaaccatgcccttagtaggactagcaaaaagagggggctagcggtagcagtgagtttattggatggccgaatccctgagtacagggaagtcgtcaatggttcgacactctggtaatataagagtctcgagatgccatgtggacgagggcatgcccacggcacatcttaacctatgcgggggttgcatgggtgaaagcaccatttacggtgttataaacacagcctgatagggtgtagcagagacctgctatcccgctagtaaaaactctgctgtacatggcac

SEQ ID NO: 383 - DNA, 379 bp, Classical swine fever virus
  isolate LK-VNIVViM, complete genome.1
gcatactcaggacttagaccaccctcgcatctgcatgatatcggacaaatcaaatttcaatttggttcagggcctccctccagcgacggccgaactgggctagccatgcccacagtaggactagcaaacggagggactagccgtagtggtgagctccctgggtggtctaagtcctgagtacaggacagtcgtcagtagttcgacgtgagcagaagcccacctcgagatgctacgtggacgagggcatgcccaagacacaccttaaccctagcgggggtcgctagggtgaaatcacaccacgtgatgggagtacgacctgatagggtgctgcagaggcccactattaggctagtataaaaatctctgctgtacatggcac

SEQ ID NO: 384 - DNA, 379 bp, Atypical porcine pestivirus
  isolate GX01-2019 polyprotein gene,1
gcataatgctttgattggctgcattatgtatgggacatcctaaattgctacgagccctgcggtgagtgggggaaaggggttaaccaggcctctagtaccacaggcaccaataaacagggcaactcgaacctgagagagaggtaccgaactcttaagtcccgagtacggggcagacgtcactgagtagtacacccaaagaccaccacatctaggtgtagggtctactgaggctcaggtggacgtgggcgtgcccaaagagaaatcggtggtggacctgggggtcgggtccaccatgccccctttagggggtagaccttactgcttgatagagtgccggcggatgcctcgggtaagagtataaaatccgttgttcattaac

SEQ ID NO: 385 - DNA, 380 bp, Atypical porcine pestivirus
  isolate APPV-China/HeNLY/2017, complete1
tgcataatgcttcgattggctgcattatgtgtgggacatcctaaattgttaagcgccctgcggtgagtgggggaaaggggttaaccaggcctctagtaccacaggcaccattggacagggcaactcgaacctgagagagaggtaccgaactcttaagctccgagtacggggcagacgtcaccgagtagtacacccaacgaccaccatgtttaggtgtagggtctactgaagctcgggtggacgtgggcgtgcccaaagagaaatcggtggtggacctgggggtcgggcccaccatgccccccttacggggtagacctcactgcttgatagagtgccggcggatgcctcaggtgagagtataaaatccgttgttcgttaac

SEQ ID NO: 386 - DNA, 380 bp, Sicinivirus sp.
  strain RS/BR/2015/3R polyprotein gene, complete1
ttttgtcccgattgttgcaacattggcttggggaaccgaactcggttgcatttaagttgtgaacttgttggtctgtgatgattagtagaccccctggaggtacccgtctggatctgaccagggacccgtgactataccgttccggtaattcgggtttaaaacaatgaacgtcatcactcaacattctttcccattttattttgtatcttactgtcttagtatgctcattgagatttcgctggtagttgttgctttggttgtagtggttgtttcgcacagtgagtctcatcagcttctcacagtttgtatctacaattttgctttgaccttcctttggctgttcggatttcttgaacttcctaactatcctgctgttcaac

SEQ ID NO: 387 - DNA, 380 bp, Porcine teschovirus 2
  isolate JF613 polyprotein gene, complete cds.1
ttggaagctaggtacttgttacgctagttttggattgtcttgtgcccaacattagtctttggacttctgttgtgtttaaacacagaaatttgaacatttggctatagattcacaggataaaccctttgaaagacctgctctggcgcgagctaaagcgcaattgtcaccgggtattgcaccaatggtggcgacagggtacagaagagcaagtactcttgactgggtaatgggactgcgttgcatatccctaggcacctattgagatttctctggggcccaccagcgtggagttcctgtatgggaatgcaggactggacttgtgctgcctgacagggtcgcggctggccgtctgtactttgtatagtcagttgaaactcact

SEQ ID NO: 388 - DNA, 381 bp, Linda virus
  strain Austria1, complete genome.1
gtatagcagcagtagctcaaggctgctatacgattggacataccaaattccaattggtgttagggaccacctaggtgaaggccgacgacaggtagccattcctgttagtaggacgaaccgttatggtggactggttgctcaggtgagcaggctgcaatgcgtaagtggtgagtacaccacagccgtcaaaggtgccactggtaaggatcacccactggcgatgccttgtggacgggggcgtgcccaacgcaatgttagcggtggcgggggctgccatcgtgaaagctaggtcttgatggaccttgttgcctgtacagtctgataggatgccggcggatgccctgtgacagccagtataaagaatatccgttgtgattgcac

SEQ ID NO: 389 - DNA, 381 bp, Pestivirus PG-2
  complete genome.1
gtatacgagattagctcatcactcgtatacataatcggatataaccaaaacaatgatttggcataggaaataccccgatgcgaaggccgaaacaggctaaccatgcctttagtaggactagcacaaaatcggggactagccaaggtggcgagcttcctggatgaccgaagtcctgagtacaggacagtcgtcaacagttcaacgcgcaggacaggtctgcgtcttgatatgctgtgtggacgagggcatgcccacggtacatcttaacccagccgggggtcggttgggtgaaagtccaataggactggaagtacggcctgatagggtgtagcagagacccacctgttaggctagtataaaatactctgctgtacatggcac

SEQ ID NO: 390 - DNA, 382 bp, Pestivirus giraffe-1 H138
  complete genome.1
gtatacgagtttagctcaatcctcgtatacaatattgggcgtcaccaaatatagatttggcataggcaacaccccgatgcgaaggccgaaaagggctaaccatgcccttagtaggactagcaaaaaatcggggactagcccaggtggtgagcttcctggatgaccgaagccctgagtacagggcagtcgtcaacagttcaacacgcagaataggtttgcgtcttgatatgctgtgtggacgagggcatgcccacggtacatcttaacctatccgggggtcggataggcgaaagtccagtattggactgggagtacagcctgatagggtgttgcagagacccatctgataggctagtataaaaaactctgctgtacatggcac

SEQ ID NO: 391 - DNA, 382 bp, Bovine viral diarrhea virus 1m
  isolate LN-1, complete genome.1
gtatacgagaattagatcaatctctcgtatacacattgggcatcccaaacagcaattaggcatagggaaaatcctcctcagcgaaggccgaatagaggctagccatgcccttagtaggactagcaaattgaggggggtagcagcagtggcgagttcgttggatggctgaagccctgagtacagggtagtcgtcagtggttcgacgccttaggatctaaggcctcgagatgccacgtggacgagggcatgcccacagcacatcttaatccgagcgggggtcgctcgggtgaaagctgttgtgctaacagttatgaacacggcctgatagggtgctgcagaggcccactgtgttgctactaaaaatctctgctgtacatggcac

SEQ ID NO: 392 - DNA, 382 bp, Phocoena pestivirus
  isolate NS170386, complete genome.1
gtatacacaaggttagctcaatccattgtgtgtacgattggatgttgcaaatttataatttgagatatagggacccattcatcacagcgaaggccgaacaagggtagccaatcccttcattaggactagcacaagtgatggactggagacgtggatgagtgagctgtagagaggaagtggtgagtacaccacagtcgtcaagagtactaccggtaaggatcacccgctagttatgctctgtggacgagggcatgcccaccttttctactagataccccgggggttggggtgtcgaaagtcgaaatatcgattgctcacacagtctgataggatgccggcggatgctccacgtataccagtataaaaatccgttgaatagcac

SEQ ID NO: 393 - DNA, 383 bp, Unknown
  Description of Unknown: cDNA to genomic RNA of bovine viral diarrhea virus.1
atgtatacgagaatttgcctaacctcgtatacatattgggcattctaaaaataaattaggcctaagggacaaatcctccttagcgaaggccgaaaagaggctagccatgcccttagtaggactagcaaaacaaggagggtagcaacagtggtgagttcgttggatggctgaagccctgagtacagggtagtcgtcagtggttcgacgcttcgtgtgacaagcctcgaggtgccacgtggacgagggcatgcccacagcacatcttaacctgagcgggggtcgttcaggtgaaagcggtttaaccaaccgctacgaatacagcctgatagggtgctgcagaggcccactgtattgctactaaaaatctctgctgtacatggcac

SEQ ID NO: 394 - DNA, 383 bp, Bovine viral diarrhea virus 3
  Th/04_KhonKaen, complete genome.1
gtatacgcccagttagttcaggtggacgtgtacgattgggtatcccaaattaataatttggtttagggactaaatcccctggcgaaggccgaaacaggttaaccatacctttagtaggacgagcataatgggggactagtggtggcagtgagctccctggatcaccgaagccccgagtacggggtagtcgtcaatggttcgacgcatcaaggaatgcctcgagatgccatgtggacgagggcgtgcccacggtgtatcttaacccaggcgggggccgcttgggtgaaatagggttgttatacaagcctttgggagtacagcctgatagggtgttgcagagacctgctacaccactagtataaaaactctgctgtacatggcac

SEQ ID NO: 395 - DNA, 383 bp, Bovine viral diarrhea virus 1
  isolate Carlito, complete genome.1
gtatacgagaattagttaaaactatcgtatacacattgagcattccaaaatgataattggacctagggaacaatccctcccagcgaaggccgaaaagaggctagccatgcccttagtaggactagcaaaatggggggggtagcaacagcggtgagttcgttggatggccgaagccccgagtacggggcagtcgtcagtggttcgacgcctggcgcgacaggcctcgagatgccacgtggacgagggcacgcccacggcacatcttagccagagcgggggtcgctcgggtgaaagtggtcaaacagactactacgaatacagcctgatagggtgctgcagaggcccgctgtaatgctactaaaaatctctgctgtacatggcac

SEQ ID NO: 396 - DNA, 384 bp, Pestivirus type 1
  cytopathic genomic RNA, complete genome.1
gtatacgagaatttgcctaggacctcgtttacaatatgggcaatctaaaattataattaggcctaagggacaaatcctcctcagcgaaggccgaaaagaggctagccatgcccttagtaggactagcaaaataaggggggtagcaacagtggtgagttcgttggatggctgaagccctgagtacagggtagtcgtcagtggttcgacgcttcggaggacaagcctcgagataccacgtggacgagggcatgcccacagcacatcttaacctggacgggggtcgttcaggtgaaaacggtttaaccaaccgctacgaatacagcctgatagggtgctgcagaggcccactgtattgctactgaaaatctctgctgtacatggcac

SEQ ID NO: 397 - DNA, 384 bp, Bovine viral diarrhea virus 1
  isolate SuwaCp, complete genome.1
gtatacgagatttagaaaagtctctcgtatacacattggacataacaaaataacaattaggcctagggaacgaatccctctcagcgaaggccgaaaagaggttaaccatacccttagtaggactagcaaacgagaggggtagcaatggtggtgagttcgttggatggctgaagccctgagtacagggtagtcgtcaatggttcgacacctatggaacgtaggtctcgagatgccatgtggacgagggcatgcccacagcacatcttaactttggcaggggtcgccaaagtgaaagtggcctaaccaaccactacgaacacagcctgatagggtgctgcagaggcccaccttcttgctactaaaaatctctgctgtacatggcac

SEQ ID NO: 398 - DNA, 384 bp, Bovine viral diarrhea virus 1
  isolate 10JJ-SKR, complete genome.1
gtatacaggaattaggaaaagctcctgtatacaaattgggcaattaaaaattgaagattaggcctagggaaagatccctctcagcgaaggccgaaaagaggctagccatgcccttagtaggactagcaaaatgagaggggtagcaacagtggtgagttcattggatggctgaagccctgagtacagggtagtcgtcagtggttcgacacctcggaaagaaggtctcgagatgccacgtggacgagggcatgcccacagcacatcttaacctggacgggggtcgcccaggtaaaagcagtttaactaactgttatggacacagcctgatagggtgctgcagaggcccactgcattgctactaaaaatctctgctgtacatggcac

SEQ ID NO: 399 - DNA, 384 bp, Pasivirus A3
  isolate CS15-4016, complete genome.3R
cctacctcaagcagcagtagcagtagaaaagcagagaagcgctctcaaggtctgcaggttggagaatgagcgtaagaggaagaagggttgaagatatagagaggtgatagcaaggaggaggtgctcaggttaggagaccaatggtagcagggggtaagggtactttccctagttgagatagctatatatggctgggggaggtgctgggattgtttaaagattgtctaaatgtggcgcaagttctgttaatattttacctgacctttaccgtaaaaggaacaaggaagcatgtctttgcattacataacgcatgagtggttttaatctgttaccaattaacagagtacggtcagggttcgttgcggcttcctttgatacgtgggc

SEQ ID NO: 400 - DNA, 385 bp, Bovine viral diarrhea virus
  strain Oregon C24V, complete genome.1
gtatacgagagttagataaaaatactcgtatacacattgggcaattaaaagtaataattaggcctagggaacgaatcctcctccgcgaaggccgaaaagaggctagccatgcccttagtaggactagcatagcgaggggggtagcaacagtggtgagttcgttggatggcttaagccctgagtacagggtagtcgtcagtggttcgacgccttaacatgaaggtctcgagatgccacgtggacgagggcacgcccaaagcacatcttagcccgagcgggggtcgctcggacgaaaacagtttgatcaactgctacgaatacagcctgatagggtgctgcagaggcccactgtattgctactaaaaatctctgctgtacatggcac

SEQ ID NO: 401 - DNA, 385 bp, Bovine viral diarrhea virus 1-SD1
  polyprotein gene, complete cds.1
gtatacgagaactagataaaatactcgtatacatattggacaacagaaaataactattaggcctagggaatgaatccctctcagcgaaggccgaaaggaggctagccatgcccttagtaggactagcataatgaggggggtagcaacagtggtgagttcgttggatggcttaagccctgagtacagggtagtcgtcagtggttcgacgcctcggtataaaggtctcgagatgccacgtggacgagggcacgcccaaagcacatcttaacctgagcgggggtcgcccaggcaaaagcagatcgaccaatctgttacgaatacagcctgatagggtgctgcagaggcccactgtattgctactaaaaatctctgctgtacatggcac

SEQ ID NO: 402 - DNA, 385 bp, Bovine viral diarrhea virus 2
  strain HLJ-10, complete genome.1
gtatacgaaattagctaaagtactcgtatacggattggacgttggcaaacattgaattgacaaggtagggaattttcccctcagcgaaggccgaaaagaggctagccatgcccttagtaggactagctaaaagaggggactagcggtagcagtgagttcattggatggccgaatccctgagtacagggaagtcgtcaatggttcgacactccgtcagtcgaggagtctcgagatgccatgtggacgagggcttgcccacggcacatcttaacccatgtgggggttgcatgggtgaaagcaccattctaggtgttatggacacagcctgatagggtgtagcagagacctgctattctgctagtaaaaactctgctgtacatggcac

SEQ ID NO: 403 - DNA, 385 bp, Atypical porcine pestivirus 1
  isolate AH-GL-2017.04, complete1
atatggggcataatgcatagattggctgcattatgtgtataacatcccaaattgccataggctctgtggtgagtgggggaaaggggttaaccaggcctctagtaccacaggcaccatttaacagggcaactcaaacctgagagagaggtaccgaactcttaagcctcgagtacggggcagacgtcaccgagtagtacacccaacgaccaccacatttaggtgtagggtctactgaggctcgggtggacgtgggcatgcccaaagagaaaacggtgggggacctgggggtcgggtccgccatgcccctcaatggggtagaccttactgcttgatagagtgccggcggatgcctcaggtaagagtataaaatccgttgtttattaac

SEQ ID NO: 404 - DNA, 385 bp, Bovine viral diarrhea virus 2
  clone BV 65 polyprotein gene, partial1
gtatacgagattagctaaagtactcgtatacggattggacgtcgacaaactttgaattggcaacacagggaaccttcccctcggcgaaggccgaaaagaggctagccatgcccttagtaggactagacaaaggaggggactagtggtagcagtgagtccattggatggccgaacccctgagtacaggggagtcgtcaatggttcgacactcctttagtcgaggagtctcgagatgctatgtggacgagggcatgcccacggcacatcttaacccacgcgggggttgcgtgggtgaaagcgccattcgtggcgtcatggacacagcctgatagggtgtagcagagacctgctactccgctagtaaaaactctgctgtacatggcac

SEQ ID NO: 405 - DNA, 386 bp, Bovine viral diarrhea virus 2
  genomic RNA, complete genome, strain:1
gtatacgagattagctaaagtactcgtatacagattggatgttgacaaaatattgaattgacaaggtagggaattttcccctcagcgaaggccgaaaagaggctagccatgcccttagtaggactagcaaaaggaggggactagcggtagcagtgagttcattggatggcctaatccctgagtacagggaagtcgtcaatggttcgacactccatcagttgcggagtctcgagatgccatgtggacgagggcatgcccaaggcacatcttaacctatgcgggggttgcataggcgaaagcaccattcgtggtgttatggacacagcctgatagggtgtagcagagacctgctattccgctagtaaaaactctgctgtacatggcac

SEQ ID NO: 406 - DNA, 386 bp, Bovine viral diarrhea virus 1
  gene for polyprotein, complete cds,1
gtgtatacgagatttagaaaaagctcttgtatacatattgggcaatctaaacaacaatcaggcctagggaattaatcctcctcggcgaaggccgaaaagaggctagccatgcccttagtaggactagcataacgaggggggtagcaacagtggtgagttcgttggatggcttaagccctgagtacagggtagtcgtcagtggttcgacgcctcggaaatagaggtctcgatatgccacgtggacgagggcacgcccaaagcacatcttaacctgagcggggggtcgctcaggtgaaagcggttcaaccaaccgttacggatacagcctgatagggcgctgcagaggcccactgttttgctactaaaaatctctgcttacatggcac

SEQ ID NO: 407 - DNA, 386 bp, Bovine viral diarrhea virus 1
  strain Singer Arg, complete genome.1
gtatacgagaattattcgcccttctcgtatacgtattgggcaattaaaataataattaggcctagggaacaaaagtccccctcagcgaaggccgaaaagaggctagccatgcccttagtaggactagcataaagaggggggtagcagcagtggtgagttcgttggatggcttaagccctgagtacagggtagtcgtcagtggttcgacgccttggaataaaggtctcgagatgccacgtggacgagggcatgcccaaagcacatcttaacctgagcgggggtcgcccaggtaaaagcagttctaaccgactgttacgaatacagcctgatagggtgctgcagaggcccactgttctgctactaaaaatctctgctgtacatggcac

SEQ ID NO: 408 - DNA, 386 bp, Bovine viral diarrhea virus 2
  strain CN10.2015.821, complete1
gtatacgagtactttagctaacctcgtatacagattggatgttgacaaacattgaattggcaaagtagggaacctttcccctcagcgaaggccgaaaagaggctagccatgcccttagtaggactagcaaaaggaggggactagcggtagcagtgagttcattggatggccgaatccctgagtacagggaagtcgtcaatggttcaacactccactaatcgaggagtcttgagatgccatgtggacgagggcatgcccacggcacatcttaacctatgcgggggttgcatgggtgaaagcaccatttgtggtgttatggacacagcctgatagggtgtagcagagacctgctattccgctagtaaaaactctgctgtacatggcac

SEQ ID NO: 409 - DNA, 386 bp, Classical swine fever virus
  isolate IVRI-CSF-BS, complete genome.1
tttgcccgattgtgcatacgaggttagttcattctcgtatgcacaatcgggcaaatggaaacttcaatttggttcagggcctctctccagcgacggccgaactgggctagccatgcccatagtaggactagcaaatggagggactagccgtagtggcgagctccctgggtggtctaagtcctgagtacaggacagtcgtcagtagttcgacgtgagcagaagctcacctcgagatgctatgtggacgagggcgtgcccaagacacaccttaactctagcgggggtcgctagggtgaaatcacaccatgtgatgggagtacgacctgatagggtgctgcagaggcccactattaggctagtataaaaatctctgctgtacatggcac

SEQ ID NO: 410 - DNA, 386 bp, Bovine viral diarrhea virus type 1b
  strain HP-KY-RK13, complete1
gtatacgaggttaggcaagttctcgtatacatattggacactctaaaaaaaaataattaggtctaggggacaaaaatcctccttagcgaaggccgaaaagaggctagccatgcccttagtaggactagcaaaataaggggggtagcaacagtggtgagttcgttggatggctgaagccctgagtacagggtagtcgtcagtggttcgacgctttgaagaacaagcctcgagatgccacgtggacgagggcatgcccacagcacatcttaatctggacgggggtcgttcaggtgaaaacggtttaaccaaccgctacgaatacagcctgatagggtgctgcagaggcccactgtattgctactaaaaatctctgctgttcatggcac

SEQ ID NO: 411 - DNA, 386 bp, Bovine viral diarrhea virus 1
  genomic RNA, complete genome, strain:1
gtatacgagaagatttagctaaaaactctcgtatacaaattgggcattccaaacaacaattaggtctagggaagaatcctcctcagcgaaggccgaaaagaggctagccatgcccttagtaggactagcaaattggggagggtagcagcagtggtgagttcgttggatggctgaagccctgagtacagggtagtcgtcagtggttcgacacctcaaggttgaggtctcgagatgccacgtggacgagggcatgcccacagcacatcctagtctgggcaggggtcgctcagatgaaagcggttgagtcaaccgttacggacacagcctgatagggtgctgcagaggcccactgtgttgctactaaaaatctctgctgtacatggcac

SEQ ID NO: 412 - DNA, 386 bp, Porcine enterovirus 8
  isolate Po 5116 polyprotein gene, partial1
ccttccaaatcggatggactactggacttgaaactatggaaagtaaattggtgagattttggatacacttgaacggtagtagcgtggcgagctatggaaaaatcgcaattgtcgatagccatgtcagtgacgcgcttcggcgtgctcctttggtgattcggcgactggttacaggagagtagacagtgagctatgggcaaacccctacagtatttcttagggggaatgtgcaattgagacttgacgagcttctctcagagatgtggcgcatgctcttggcattaccatagtgagcttccaggttgggaaacctggactgggtctatactacctgatagggtcgcggctggccgcctgtaactagtatagtcagttgaaaccccccc

SEQ ID NO: 413 - DNA, 387 bp, GB virus C
  gene for polyprotein, complete cds,isolate: HGV-GA128.1
tagccactataggtgggtcttaaggggaggttatggtccctctcgcgcttatagagagaaagcgcacggtccacaggtgttggccctaccggtgtaataagggcccggcgctaggcacgccgttaaaccgagaccgttacccccctgagcaaacgacgcccacgtacggcctacgtcgcccttcaatgtctctcttgaccaataggcgatgccggcgagttgacaaaggccagtgggggccgggcggcaggggaaggacccctgtcgctgctcttcccgggggggcgggaaatgcatggggccacccagctccgcggcggcctacagccggggtagcccaagagccttcgggtgagggcgggtggcatttttcttccttaactgatc

SEQ ID NO: 414 - DNA, 387 bp, Bovine viral diarrhea virus 1
  gene for polyprotein, complete cds,1
cgtatacgagagttagacaaaatgctcgtatacacattgggcaaactaaataataataattgggcctagggtactaatccccctctgcgaaggccgaagagaggctagccatgcccatagtaggactagcataatgaggggggtagcaacagtggtgagttcgttggatggcttaagccctgagtacagggtagtcgtcagtggttcgacgccttagtataaaggtctcgagatgccacgtggacgagggcacgcccaaagcacatcttaacctgagcgggggtcgctcaggcgaaagcagtttaaccaactgttacgaatacagcctgatagggtgctgcagaggcccactgtactgctactaaaaatctctgctgtacatggcac

SEQ ID NO: 415 - DNA, 387 bp, Bovine viral diarrhea virus 2
  genomic RNA, complete genome, strain:1
gtatacgaggttagttaaagttatcgtatacagattggacgtttacaaaacagtgaattggcaaaatagggaaccttcccctcagcgaaggccgaaaagaggctagccatgcccttagtaggactagcaaaaagaggggactagcggtagcagtgagttcattggatggccgaatccctgagtacagggaagtcgtcaatggttcgacgctctagcaattgcagagcctcgagatgccatgtggacgagggcatgcccacggcacaccttaacctatgcgggggttgcgtaggtgaaagcaccattttgtggtgttatgaacacagcctgatagggcgtagcagagacctgctactccgctagtaaaaactctgctgtacatggcac

SEQ ID NO: 416 - DNA, 387 bp, Bovine viral diarrhea virus 2
  isolate JZ05-1, complete genome.1
gtatacgagattagctaaagtactcgtatacggattggacgttgacaaaatattgaattgaaaatgtagggaatcttcccctcagcgaaggccgaaaagaggctaaccacgcccttagtaggactagcaaaaggaggggactagcggtagcagtgagttcattggatggccgaacccctgagtacaggggagtcgtcaatggttcgacactccttcagttaaggagtctcgagatgccatgtggacgagggcatgcccacggcacatcttaacccatgcgggggctgcatgggtgaaagcgccattcgtggcgttatggacacagcctgatagggtgtagcagagacctgctatcccgctagtaaaaaactctgctgtacatggcgc

SEQ ID NO: 417 - DNA, 387 bp, Bovine viral diarrhea virus 1
  genomic RNA, complete genome, strain:1
cgtatacgaggatttaggaaaaactctcgtatacagattgggcactcaaaaataacaattaggcctagggatcaaatcctcctcagcgaaggccgaaaagaggctagccatgcccttagtaggactagcaaattgaggggggtagcaacagtggtgagttcgttggatggctgaagccctgagtacagggtagtcgtcagtggttcgacacctacggcgtgtaggtctcgagatgccacgtggacgagggcatgcccacagcacatcttagcctgggcgggggtcgctcaggtgaaagcggtttaaccaactgctacgaatacagcctgatagggtgctgcaggggcccactggactgctactaaaaatctctgctgtacatggcac

SEQ ID NO: 418 - DNA, 387 bp, California sea lion sapelovirus 1
  isolate 1162 polyprotein gene,1
ccccaatccactaaccttttccccctcctttaatcggactgatatttgtgttttgacgcttgttttccttttgcggatgtcggttgcgtggctggccaccacgggaaaaatggcaattgtggattgatgggtctacacattctcaccgaacgccttgtgttattaggggagtctaagtgtccatcatgaagcgagtgtactggtaagagaggagacctagctaggggcaatgggacggcgttgcctatccctaattagccatcgagatttctctggcgattacccagtgatggtcgggttgtcggggggcaacctgcttagctccttactgcctgatagggtcgcggctggccgtatcagtacactatagtcagttgatgttcgaat

SEQ ID NO: 419 - DNA, 387 bp, Norway rat rosavirus
  isolate NrRV/NYC-A15 polyprotein gene, partial1
taaggtagcagatgatttagtgaaaagctttggattgtttggagttttgtagcgatgctagtagtgtgtgtggacctccccacgtggtaacacgtgccccacaggccaaaagccaaggtgttgaaagcacccctactagtcccagaccctcccatctgggaactcctctcatgaaaaaccctagtaactaatgatttggcttctcatcaacctctctagtcaaggctgaaggatgcccggaaggtacccgcaggtaacgataagctcactgtggatctgatccggggctctggtgcgaccgactgtccggcgtagcagggttaaaaaacgtctaggcccttctaccccaagggattggggtttccccaatcattttagaagttcact

SEQ ID NO: 420 - DNA, 388 bp, GB virus C
  gene for polyprotein, complete cds, isolate: HGV-BL230.1
tagccactattggtgggtcttaaggggtggtcaaggtccctctggcgcttgtggcgaaaaagcgcacggtccacaggtgttggccctaccggtgggaataagggcccgacatcaggctcgtcgttaaaccgagcccattatccccctgggcaaacgacgcccacgtacggtccacgtcgcccttcaatgtctctcttgaccaataggcgatgccggcgaattgacaaggaccaatgggggccgggcgtcaggaaatggactcctgccgctgcccttcccgggggagtgggaaatgcatggggccacccagctccgcggcggcctgcagccggggtagcccaagagccttcgggtgagggcgggtggcatttttcttcctgtaccgatc

SEQ ID NO: 421 - DNA, 388 bp, Bovine viral diarrhea virus genotype 2
  strain 1373 polyprotein1
gtatacgagattagctaaagtactcgtatatggattggacgtcaacaaatttttaattggcaacgtagggaaccttcccctcagcgaaggccgaaaagaggctagccatgccctttagtaggactagcaaaagtagggggactagcggtagcagtgagttcgttggatggccgaacccctgagtacaggggagtcgtcaatggttcgacactccattagtcgaggagtctcgagatgccatgtggacgagggcatgcccacggcacatcttaacccatgcgggggttgcatgggtgaaagcgctaatcgtggcgttatggacacagcctgatagggtgtagcagagacctgctattccgctagtaaaaaactctgctgtacatggcac

SEQ ID NO: 422 - DNA, 388 bp, Bovine viral diarrhea virus 1
  isolate SD0803, complete genome.1
acatggggtatacgagatttagatcaatctctcgtatacacattgggctatcaaaaaagaaaattaggcctagggaacaatcctcctcagcgaaggccgaaaagaggctagccatgcccttagtaggactagcaaattggggggggtagcaacagtggtgagcttgttggatggctgaagccctgagtacagggtagtcgtcagtggttcgacgccagagatgaggcctcgagatgccacgtggacgagggcatgcccacagcacatcttaatctgggcgggggtcgctcagacgaaagcggttgtaccaaccgttacaagcacagcctgatagggtgctgcagaggcccactgcactgctactaaaaatctctgctgtacatggcac

SEQ ID NO: 423 - DNA, 389 bp, Hepatitis G virus
  gene for polyprotein, complete cds.1
tagccactataggtgggtcttaagggtgggtcaaggcacctcttactcctgcggcgggacagcgcacggtccacaggtgatggccctaccggtgtgaataagggcccgacgtcaggctcgtcgttaaaccgagcccgttacccacctgggcaaacgacgcccacgtacggtccacgtcgccctacaatgtctctcttgaccaataggctatgccggcgagttgacaaggaccagtgggggccgggcgttatggggaaagaccccctgcgctgcccttcccggtggggcgggaaatgcatggggccacccagctccgcgggggcctgcacccggggtagcccaagaaccttccggtgaaggcgggtggcatttttctttcctgactaatc

SEQ ID NO: 424 - DNA, 390 bp, Bovine viral diarrhea virus 1
  isolate SD-15, complete genome.1
acatggggtatacgagatttagctaaaactctcgtatacatattggacattccaaacaataattaggcatagggaaaatcctcctcagcgaaggccgaaaagaggctagccatgcccttagtaggactagcaaattgaggggggtagcagcagtggcgagttcattggatggctgaagccctgagtacagggtagtcgtcagtggttcgacgccttaggatctaaggcctcgagatgccacgtggacgagggcacgcccacagcacatcctaatccgggcgggggtcgctcggatgaaagcggttgtaataaaccgttatggacacggcctgatagggcgctgcaggggcccactgtgttgctactaaaaatctctgctgtacatggcac

SEQ ID NO: 425 - DNA, 391 bp, Bovine viral diarrhea virus 3
  isolate HN1507, complete genome.1
gtatacgcccggttagctcatgtcggcgtatatgattgggtatcccaaattaatgatttggtttagggactaaattcccctagcgaaggccgaaataggttaaccataccttcagtaggacgagcataatgggggactagtggtagcagtgagctccttggattaccgaagccccgggtacagggtcgtcgtcaataaggttcgacgcatcaacgagtggatgcctcgagatgccatgtggacgagggcgtgcccacggtatgtcttaacccaagcgggggccgcttgggtgaaagatggtcgattatgtggccctttgggagtacagcctgatagggtgttgcagagacctgctatatcactagtataaaaactctgctgtacatggcac

SEQ ID NO: 426 - DNA, 391 bp, Bovine viral diarrhea virus 3
  isolate LV168-36/16RN, complete1
gttgggtgtgtttgggccgggtagctcatgtcggcgtatatgattgggtatcccaaattaataatttggtttagggactaactcccctagcgaaggccgaaatgggttaaccataccttcagtaggacgagcgtaatgggggactagtggtagcagtgagctccttggattaccgaagccccgagtacggggtagtcgtcaatggttcgacgcatcaaggaatgcctcgagatgccatgtggacgagggcgtgcccacggtgaatcttaactcaagcgggggccgcttgggtgaaagagggtcattatatggctctttgggagtacagcctgatagggtgttgcagagacctgctacattactagtataaaaactctgctgtacatggcac

SEQ ID NO: 427 - DNA, 391 bp, Bat pestivirus
  BtSk-PestV-1/GX2017 polyprotein gene, complete cds.1
tgcataaccctgattgtaattggctgggttatgcatgtgagaacgcaaaattttttaaattatgttaccggctttgaggttggcggaccagagttaaccaggctctcagtacgacaccctcctaaacaaagtcggaactgctgactaggagactatgcactcagcactaagcccggagtaccgggcattctactacagctctgcactcaacgacggctcttgaggcctagagtccaggatggctgtgtaagtagaggacatgtccaagtgtgaggtgtaatccggtgggggttgccggatttgctactggtagaccagtagtcatagactgcctgatagggtcccggcggacggcctaggcttagcagtataatagtccgttgtattcaac

SEQ ID NO: 428 - DNA, 392 bp, Picornaviridae sp.
  isolate zftegr01hep3nc genomic sequence.1
taactccttggctagcaaggagctgtggccgccaaaagtggtgatacactgactaatactctacttgggtacagtgagttggtccctttggaaagtcacctgatgatctttcaattggggtaggctacgggtgaaaccccttctccctccatttgttatacaaatgtggagtgacaacgctaaggccctggatagaaatgagttctttatggacaagaatttctcaacagggggagcaccggtgtatgtctttgaatgcgtcttgtgactgaaaaaggagcaggcttattgtgttcacatagagttaaggtgtaccctatgagtttagggctactcaggggcatgttaggttttaaaatgctcatttattgttttctatgagttgagagaag

SEQ ID NO: 429 - DNA, 393 bp, Pasivirus A3
  isolate CS15-4016, complete genome.2R
agcgaagcgatcggtgtctcgggcactgtgacgataagcaaactcagcatcagggacgaggctggaggaagaacctacttatctaagcgccccgtctgagcagcagcgtcgaaaatcaacttcgtcttcgtcgtgaactgcgacgactggttgtgcgaacggcaacgatcctagtcgtagtgttggttctcgcccgtcgagacgcgcccccgcggactcggcgcctgctgacgcgtcgtctccgacgcgacctagcagcacccaatcctaagagtgtgcgaagggtcagagctccgcgtcggagcccaactccccgcataccgtgacgggagatacgtcgtggtctcatggcgccccaaccgcggttgtcgctgggtgagatcaaaatggaca

SEQ ID NO: 430 - DNA, 393 bp, Kunsagivirus B
  clone Bat/CAM/KuV-P2/2013 polyprotein gene, complete1
gattttctggttatcccttttggacttggtaggggcccacgtgcccacccacctctgtgtgtgttgatttctaatcgatgcctggcagtggcggccacctctccttactggtaaacctccggtgagtgaagttgtcaagctacaggtaccgtgcaggatgaaatgcgcacatgtgaacaaactaggagtcatacaccgggtcaaactctggaaacggagtccgggactctgaccttggttgggtgagctcgaggcatcacattgatggacgcgattcgctatccttccctagtaggaccttgtggtgtacccctggttgggaatccagggctggtcgggtgcagggtgacagcctgttctccacctcaaccattgtaggagaaatcaacccct

SEQ ID NO: 431 - DNA, 395 bp, Kobuvirus sp.
  strain 16806x8 polyprotein gene, partial cds.1
accacgtctttcctccagatcgacagtcctgctgtgtgaattcccattgcgcacttagtggtgtcactgtgcgctcccaatctcggccgcggagtgctgttccccaagccaaacccctggcccttcactatgtgcctggcaagcatatctgagaaggtgttccgctgtggctgccagcctggtaacaggtgccccagtgtgcgtaaccttcttccgtcttcggacggtagtgattggttaagatttggtgtaaggttcatgtgccaacgccctgtgcgggatgaaacctctactgccctaggaatgccaggcaggtaccccacccccgggtgggatctgagcctgggctaattgtctacgggtagtttcatttccaattcctttatgtcggagtc

SEQ ID NO: 432 - DNA, 396 bp, Border disease virus
  isolate TO_121_04 genome assembly, complete1
ctctgcagatatcaggggtgtatacgaaagtagctcaagttcgtatacaaattgactatgaccaaaatagtattcggcgtagggacaccctccagcgaaggccgaacggggttaaccatacccttagtaggactagcagacggagggactagccatcatggtgagcttcctgaggggtctaagtcctgagtacaggacagtcgtcaatagttcgacacgtgcgagtcgcacgtctcgagatgctatgtggacgagggcatgcccaagacactttctctagcctgggcgggggtcgcccaggtgaaagcacctgataggtgttgggagtacagcctgatagggtgctgcagaggcccatgcataggctagtataaaaatctctgctgtacatggcac

SEQ ID NO: 433 - DNA, 396 bp, Porcine teschovirus 15
  JPN/Ishi-Ka1/2015/G new genomic RNA, nearly1
gataagtgatagtccttggaagctaggtacttgttacgctagttttggattatcttgtgcccaacaattgtctttggacacttgttgtgtttaaacacagaaatctttgattattggttgtgaatttaatggattcttcccttgaaagacttgccttggcgcgggctagagcgcaattgtcaccaggtattgcaccaacggtggcgacagggtacagaagagcaagtactcctgactgggcaatgggactgcattgcatatccctaggcatctattgagatttctctggagcccaccagcatggagttcctgtatgggaatgcaggactggacttgtgctgcctgacagggtcgcggctggccgtctgtactttgtatagtcagttgaaactcatt

SEQ ID NO: 434 - DNA, 399 bp, Porcine pestivirus
  isolate Bungowannah, complete genome.1
tacgcggggtataacgacagtagttcaagtgtcgttatgcatcattggccataacaaattatctaatttggaatagggacctgcgacctgtacgaaggccgagcgtcggtagccattccgactagtaggactagtacaaataggtcaactggttgagcaggtgagtgtgctgcagcggctaagcggtgagtacaccgtattcgtcaacaggtgctactggaaaggatcacccactagcgatgcctgtgtggacgaggacatgtccaagccaatgttatcagtagcgggggtcgttactgagaaagctgcccagaatgggtagttgcacatacagtctgataggatgccggcggatgccctgtattttgaccagtataaatattatccgttgtaaagcat

SEQ ID NO: 435 - DNA, 399 bp, Pasivirus A
  isolate SPaV-A_GER_L00721_2014 genome assembly,1
attttctggccgtgtagctgcttttgaccagtggctctgggttacttagccaaatcccccttccttcacccttttaaatttgatggtctgtgttgtttgttttgtcttgtctaaataatatataagatccttcccgccgatacagacctcgacagtctggtgtaggagggttggtgttattaatttgccccagaagagtgaccgtgacacatagaaaccatgagtacatgtgtatccgtggaggatcgcccgggactggattccatatcccattgccatcccaacaagcggagggtatacccactatgtgcgcgtttgcagtgggaatctgcaaatttagtcatactgcctgatagggtgtgggcctgcactctggggtactcaggctgttcatataat

SEQ ID NO: 436 - DNA, 400 bp, GB virus C
  gene for polyprotein, complete cds, isolate: G13HC.1
ggtcatcttggtagccactataggtgggtcttaagggtgggtcaaggtccctctggcgcttgtggcgagaaagcgcacggtccacaggtgttggccctaccggtgtgaataagggcccgacgtcaggctcgtcgttaaaccgagcccatttcccacctgggcaaacgacgtccacgtacggtccacgtcgcccttcaatgtctctcttgaccaataggctttgccggcgagttgacaaggaccagtgggggccgggcagcaggggaaggacccctgttgtcgcccttcccggtggggatgggaaatgcatggggccacccagctccgcggcggcctgcagccggggtagcccaagaaccttcgggtgagggcgggtggcatttttcttcctataccgatc

SEQ ID NO: 437 - DNA, 401 bp, Human rhinovirus A
  strain HRV-A33_p1152_sR1114_2009 polyprotein1
tttgatcgttatccgcaaaacaactacgcaaagcctagtatcatcttcaaagatatgtggttggtcgctccgctataaacccaatagcagacctggcagatgaggctagaaattccccactggcgacagtgttctagcctgcgtggctgcctgcgtaccctgcatgggtacgaagccatatattggacaaggtgtgaagagccccgtgtgcttgttttgagtcctccggcccctgaatgtggctaaccttaaccctgcagctggtgtgtgcaatccagcacatggccagtcgtaatgagtaattgcgggatgggaccaactactttgggtgtccgtgtttcctgttttacctttatatttgcttatggtgacaatatatatataacatatatattggcatc

SEQ ID NO: 438 - DNA, 402 bp, Human pegivirus
  isolate JD2B8C, complete genome.1
tggtcaccttggtagccactataggtgggtcttaagagaaggttaagattcctcttgtgcctgcggcgagaccgcgcacggtccacaggtgttggccctaccggtgtgaataagggcccgacgtcaggctcgtcgttaaaccgagcccatttcccgcctgggcaaacgacgcccacgtacggtccacgtcgcccttttaatgtctctcttgaccaataggttcatccggcgagttgacaaggaccagtgggggccgggggtcacagggatggaccctgggccctgcccttcccggcggggtggggaaagcatggggccacccagctccgcggcggcctgcagccggggtagcccaagaaccttcgggtgagggcgggtggcatttttcttcctataccgatc

SEQ ID NO: 439 - DNA, 403 bp, Pasivirus A
  isolate SPaV-A_GER_L01061-K07_15-03_2015 genome1
gcggctggatattctggccgtgcaactgcttttgaccagtggctctgggtaacttagccaaagtgtccttctccctttccctattatatgttttatggctttgtctggtcttgtttagtttatatataagatcctttccgccgatatagacctcgacagtctagtgtaggaggattggtgatattaatttgccccagaagagtgaccgtgacacatagaaaccatgagtacatgtgtatccgtggaggatcgcccgggactggattccatatcccattgccatcccaacaagcggagggtatacccactatgtgcacgtctgcagtgggagtctgcagatttagtcatactgcctgatagggtgtgggcctgcactctggggtactcaggctgtttatataat

SEQ ID NO: 440 - DNA, 404 bp, Pasivirus A
  isolate SPaV-A_GER_L00799-K11_14-01_2014 genome1
gctggactttctggctgcgcaactgcttttaaccagtggctctgggttacttagccaaaaccccctttccccgtaccctagtttgtgtgtgtattattattttgttgttgttttgtaaatttttatataagatcctttccgccgatatagacctcgacagtctagtgtaggaggattggtgatattaatatgccccagaagagtgaccgtgacacatagaaaccatgagtacatgtgtatccgtggaggatcgcccgggactggattccatatcccattgccatcccaacaaacggagggtatacccgctatgtgcgcgtctacagtgggaatctgtagatttagtcatactgcctgatagggtgtgggcctgcactctggggtactcaggctgtttatataat

SEQ ID NO: 441 - DNA, 405 bp, Pacific black duck aalivirus
  isolate PBDAaV/4768nt/PBD05.18-AU-20181
gctcttccctccacctcctttcaacgtctggcccacgaaacgggccacttttcaatcttaaataactatcccttttcttgttttgactttccggttaagaataatatggatcacacaattggattttctctaaggataatggataggatactttcgggataccactccctttctgtgctaacacaaattctaattctctacatctcttatatgctcgaagaggtggtgctgaaatattgcaagccattcttgcatgtaggtggtttagactcaagatgaatgttgtgttactcaagacaagtgtagctatcaccatggtattggtagcgtgaatcggattaccggtagtagcgcaatcttccgccatggtgctctagtgactagaggacaacgacatggcattgg

SEQ ID NO: 442 - DNA, 405 bp, Enterovirus sp.
  isolate CU106 polyprotein gene, partial cds.1
caaaaacctcaaagatcgttatccgctcattaactacgcaaagcctagtaacatcttggatgtggtaaagttggtcgctccctgcattcccagcagtagacctggcagatgaggctggatgttccccactggcgacagtgatccagcctgcgtggctgcctgctcacccaaacgggtgagaagccttattactgacatggtgtgaagagccccgtgtgcttaatgtgagtcctccggcccctgaatgtggctaaccttaaccctgtagccgttgctcataatccaatgagtatgcggtcgtaatgcgcaagtacgggatgggaccaactactttgggtgtccgtgtttcttatttttctttatctgcgttatatggtgacaatttatagaatatagattgtcatc

SEQ ID NO: 443 - DNA, 405 bp, Rhinovirus B
  strain 20692_48_HRV-B polyprotein gene, partial cds.1
tgtgcttgtaacgccatgggggaaatcacttgatcgaacgcctagtaccatcatgtctttgactaggcgttcgatcaagtgatttcccccatcactagtttggtcgatgaggctaggaattccccacgggcgaccgtgtcctagcctgcgtggcggccaacccagcagttgctgggacgccttttttagggacatggtgcgaagactcgcatgtgcttggttgtgactcctccggcccctgaatgcggctaaccttaaccctggagccttgtgctacaatccagtagcattaaggtcgtaatgagtaattccgggatgggaccgactactttgggtgtccgtgtttcctgttttttccaaatgttttcttatggtcacagcatatagcatatatatactgtgatc

SEQ ID NO: 444 - DNA, 407 bp, Picornaviridae sp.
  isolate gbt104pic2 genomic sequence.1
ccactgtatatacatttaatcatttccccttctttttggtctctcttgtacataaggataaaacccctctaacaaagcctgttcttcagactattaagtatgacaatatattacattatctaactacacatgaaggccgtcgtgctttctcacgccttcccacctacttccatcttcacagacattgggtagaggcactttatcctgaaggactccagcccacatccactcatttatcttctgagactttccattgtaaatatctttgcggccattttcttcagacgtgtgagtggcatgcaaacgttcaagtccctccttttattttagttcgtaggcaacttatttataatattctttgcaaattgaatcttcttgatagtcttcctttcttcctttcagtggca

SEQ ID NO: 445 - DNA, 407 bp, Hepatovirus sp.
  isolate HepV-bat3206/Hipposideros_armiger/20111
ggataccaatggaacgaccgctgcgcccggcggggttaacttgttgattagcaacaagctgtagtttctaaaagtcctgacaccataggtccacgtcccgacctttggcattttaacttcattttggtgaagtccattgatcttctaggaggagtaggctatgggtgaaactcctcatgctagtacctatattaggagatgcattgtgtaggtgaaggtttccggtagaggtgagttttacgacgcaacctctcaacggatgtgggcccatctcacacactagatgctttggatgaatccaatctgagggtgtcattgttagggatctggatactaggtgccctcccgagaggtcgtaggggtaatcaggggcatataggtttccacacattaaatgttattatgtt

SEQ ID NO: 446 - DNA, 410 bp, Bat picornavirus 1
  strain NC16A, complete genome.1
gaaacccgtatacaccggaccttttctcccctccctctccacttacctttttcccctcttcggcatgaaacaaggattattcaagtggaaacgcgatttaatatgcggctggccaccgcggaataacggcaattgtgtatctgctggaagccaagcctgcctagccgatagcccttgaccgggtgtgtaggatagcccaggaaccagcaatacgcgacaggttatggtagagtagatacctagccaggggcaatgggactgcattgcatatccctaatgaaccattgagatttctctggtcattacccggtgatggttactagaggggggcctctagtactagatctatactgcctgatagggtcgcggctggccgaccatgacctgtatagtcagttgatttgagcaat

SEQ ID NO: 447 - DNA, 410 bp, Enterovirus sp.
  isolate CU42 polyprotein gene, partial cds.1
ttgaagctgtagcgttcgttacccgcacacgtactgcgtgacggctagtagcatcttgcattttcctttaggtgtttcgctcattgtggttaccccaccacatagatcagggcaatggggctacacaatccccactggcgacagtggtgtagcccgcgtggtgccccgcccaggctttgcctgggacgccttaggaaagacagggtgtgaagaccttaatgcgctacgtgtgagtcctccggcccctgaatgcggctaatcctaaccccgtagccatggtgcgcaatccagcgcatgtgtggtcgtaacgagcaattacgggatggaaccgactactttgggtgtccgtgtttcactttttatttgaaattgtctcatggttacagatttgtgtatacagatttgtaatc

SEQ ID NO: 448 - DNA, 411 bp, GB virus C
  genomic RNA, complete genome, strain: F1029.1
ccgacgcctatcttaagtgagacgtaatggccccgcgccgaactggcgaccggccaaaaggtggtggatgggtgatgacagggttggtaggtcgtaaatcccggtcatcctggtagccactataggtgggtcttaaagggaggctacggtccctcttgcgcttatggcgagaaagcgcacggtccacaggtgttggccctaccggtgtgaataagggcccggcgctaggcacgccgttaaaccgagcccgtcatccccctgggcaaacgacgcccatgtacggtccacgtcgcccttcaatgtctctcttgtaccaataggttttgccggcgttgttgacaaggaccagtgggggctgggcggtaggggaaggacccctgccgctgcccttcccggtggggtgggaaatgc

SEQ ID NO: 449 - DNA, 412 bp, Pasivirus A3
  complete genome.2
ttagtcatactcaaggtgtaaatattcatttgatctttgtacagtttttataccatatttacattattataggttactggttgctacatcctggtcatagtcacatcatcatcataggtctaggtcacaattaggtttgtcagatactcaagacgacgtggaatctctcttgtcacctgaatcctatcctttactgtcctatcctatcctatactgcctttgttttgttatccaaagtcagcaagtgccatctttctccaagtgcaatgtcatctgcctgtaatcccaaaagctggtgtcatccttgtcagtagaacagtcaaactaagcctttgaaaagaaagcctcacacggaaaccttgtatgtatacctcgtgaaaaagctttgaactgccacgacattgacgcctgc

SEQ ID NO: 450 - DNA, 413 bp, Sapelovirus A
  strain ISU-SHIC polyprotein mRNA, complete cds.1
gttgtatcccccataccttaccctcccttccacacaggacggacaaatggacttggacttacggcaagaacatatggtatggcttttggatacggatgaatggcagtagcgtggcgagctatggaaaaatcgcaattgtcgatagccatgttagtgacgcgctccggcgtgctcctttggtgattcggcgactggttacaggagagtaggcagtgaactatgggcaaacctctgcagtattactcagggggaatgtgcaattgagacttgacgagcgtctccttggagatgtggcgcatgctcttggcattaccatagtgagcttccaggttgggaaacctggactaggcctatactacctgatagggtcgcggctggccgcctgtaactagtatagtcagttgaaacccccc

SEQ ID NO: 451 - DNA, 414 bp, Avian encephalomyelitis virus
  isolate 204C, complete genome.1
ggagcgcacggtatatatgtgctcccgcatggcaggggcgtgctaccttgccccttgacgcatggtatgcgtcaaactgattttggatttgtcttaaggattagtcgctttgtgccgaaaatctctttgcgtttcacagaaccatcctaaccatggatgtagtatgggaggcgtgtataggggtgagtaggatctctcatagagggataggcatgccattcaaatccggggagtactccggctctgacattgggacatttgatttaaccggacctggttcagtatccgggttgtcctgtattgtcacggtgtatccgtcttggcatgttgaaaaggtatctttgggtaatcccttcctactgcctgatagggtggcgtgcccggccatgagagattaagggtagcattttaacc

SEQ ID NO: 452 - DNA, 415 bp, Teschovirus A
  strain CHN-NP2-2016, complete genome.1
cccctttgaacttgtaactgataagtgatagtccttggaagctaggcacttgctgcgctagttttggattatcttgtgcccaacactagtcttcggactcttgttgtgtttaaacacagaaattttgttatctggttatgaattcattggatcaatccttctgaaagacctgctctggcgcgagcgaaagcgcaattgtcaccaggtattgcaccaatggtggcgacagggtacagaagagcaagtactcctgactgggcaatgggactgcgttgcatatccctaggcacctattgagattcctctggggcccaccagcatggagttcctgtatgggaatgcaggactggacttgtgctgcctgacagggtcgcggctggccgtctgtactttgtatagtcagttgaaactcacc

SEQ ID NO: 453 - DNA, 415 bp, Porcine teschovirus
  strain HuN-1, complete genome.1
ctccctttgaatttgtaactgataagtgatgatccttggaagctaggtacttgttacgctagttttggattgtcttgtgcccaacactagtcttcggactcttgttgtgtttaaacacagaaatctgattgtctggttgtggatttattggattaaccctttgaaagacctgctctggcgcgagctaaagcgcaattgtcaccgggtactgcaccaatggtggcgacagggtacagaagagcaagtactcctgactgggcaatgggactgcgttgcatatccctaggcacctattgagatttctctggggcccaccagcatggagttcctgtatgggaatgcaggactggacttgtgctgcctgacagggtcgcggctggccgtctgtactttgtatagtcagttgaaactcatc

SEQ ID NO: 454 - DNA, 415 bp, Human rhinovirus B97
  strain SCH-105 polyprotein gene, complete cds.1
ggttgtacccacgaccaaaagcctttaaccgttacccgccaatcaactacgtaacggctagtaccatcatgtttttaatctggtgttcgatcaggtggtatcccccactagtctggtcgatgaggctaggaattccccacgggtaaccgtgtcctagcctgcgtggcggccagcccagcttatgctgggacgcctttttaaagacatggtgtgaagacccgcatgtgcttgattgtgagtcctccggcccctgaatgcggctaaccctaaccccggagcccagcaacataatccaatgttgtttgggtcgtaatgagtaattctgggatgggaccgactactttgggtgtccgtgtttccttttattcttatattgtcttatggtcacagcatatatatcatatatactgtgatc

SEQ ID NO: 455 - DNA, 416 bp, Porcine teschovirus 15
  JPN/Ishi-Ta1/2016/G new genomic RNA, nearly1
cttccttttaattcgtaactgataagtgatagtccttggaagctaggtatttgttacgctagttttggattatcttgtgcccaacatttgttttcgaacatatgttgtgtttaaacacagaaatctagtttctttggttatgagtttaatggaatatccttttgaaagacttgccttggcgcgggctagagcgcaattgtcaccaggtattgcaccaatggtggcgacagggtacagaagagcaagtactcctgactgggtaatgggactgcattgcatatccctaggcatctattgagatttctctggagcccaccagcatggagttcctgtatgggaatgcaggactggacttgtgctgcctgacagggtcgcggctggccgtctgtactttgtatagtcagttgaaactcatt

SEQ ID NO: 456 - DNA, 419 bp, Bat picornavirus 2
  strain MH9F, complete genome.1
gggttttacgaaacccgtatacaccagaccttttctcccctccccctccacctaccttttccccctctttggaccgaaacaaggacacgtaagtggaaacgcgattttatatgtggttggccaccacggaataacggcaattgtctacatgtgggaagtgcaacctccctagccgataacccctgaccgggtgtgtaggataggaaaggtgcccactgtgggcgacaggttatggtagagtggatacctagccaggggcaatgggactgctttgcatatccctaatgaagtattgagatttctctgctcattacccggtgatggttgtgtggggggggccccatacactagatccatactgcctgatagggtcgcggctggccgaccataacctgtatagtcagttgaattcagccaag

SEQ ID NO: 457 - DNA, 419 bp, Sapelovirus-like porcine picornavirus Japan
  Pig/Isi-Im1/JPN/20151
tattacggtaccggtatatcttagtccatttcccccttccctctccacttaccttttccccctcttgtgacggatacttttggttttgactgtatgctagaaaaccctctgatatctggatggcctccagggaataaaggcaattgtggatcgctggtattgggctctgtcggggaaagtaggttaaccataccactagtaccagtctgagcaccccagtgtgaagcgacagtacatagtagagttgggagtgaggcttgggaaatgggactgcattgcatatccctagtgacctattgagatttctctgggcaccaccttgctgagcttaccaggggggggcccctggtactggcccattactgcctgatagggtcgcggctggccgactgtgtattgtatagtcagttgaatttaac

SEQ ID NO: 458 - DNA, 419 bp, Porcine enterovirus 8
  isolate 16-S-X polyprotein gene, partial cds.1
cttaaggtggttgtatcccctaccccatcctcccctccaaacaggacggacaatcggacctgacatctggcgagaagaattggaatggtatttggacacacttgaatggcagtagcgtggcgagctatggaaaaatcgcaattgtcgatagccatgttagtgacgcgcttcggcgtgctcctttggtgattcggcgactggttacaggagagtagacagtgagctatgggcaaacccctacagtgttacttagggggaatgtgcaattgagacttgacgagcgtctcgtagagatgtggcgcatgctcttggcattaccatagtgagcttccaggttgggaaacctggactgggtctatactacctgatagggtcgcggctggccgcctgtaactagtatagtcagttgaaaccccccc

SEQ ID NO: 459 - DNA, 420 bp, GB virus C
  isolate KY117, complete genome.1
gttggtaggtcgtaaatcccggtcatcttggtagccactataggtgggtcttaagggtgggtcaaggttcctcttacgcctgtggcgggacagcgcacggtccacaggtgttggccctaccggtgtgaataagggcccgacgtcgggctcgtcgttaaaccgagaccattacccgcctgggcaaacgacgcccacgtacggtccacgtcgcccttcaatgtctctcttgaccaataggctttgccggcgagttgacaaggaccagtgggggccgggtgcagggggaaggaccccctgtactgcccattccggcggggtgggaaatgcatggggccacccagctccgcggcggcctgcagccggggtagcccaagaatccctcgggtgagggcgggtggcatttttctttctgtaccaatc

SEQ ID NO: 460 - DNA, 420 bp, Bovine kobuvirus
  polyprotein gene, complete cds.1
cccggtggtttgatggtagctctcttatggttctgccctggcaaggctatagagtactgtgatccgctgcggacgccatcctggtaacaggacccccagtgtgcgcaacagtatgctcacggttcgccgtgtccaccatgactggaacactgctttcatgaaacagtgtgtgtccaatccctgtgatcagtatcaaccacaccacctaggaatgctaggaaggtaccccaattcgttgggatctgatcctaggctaattgtctacggtggtgctcctttttattttcacttcacttctctggtcacaactgcttgattctgtgtttgctgcttcctccgctctcactgccattctcaagtgttcacactgtccaagttcctttggttgatctcttccacttgccactgtcaactcttgtc

SEQ ID NO: 461 - DNA, 421 bp, Porcine teschovirus
  strain wild boar/WB2C-TV/2011/HUN, complete1
ccccccctcctttgaatttgtaactggtaagtgataatccttggaagctaggtacttgttacgctagttttggattgtcttgtgcccaacattggtcttcggacttctgttgtgtttaaacacagaaattttaacacctgactatgaattcaatggaccaccccttttgaaagacctgctctggcgcgagctaaagcgcaattgtcaccaggtactgcaccaatggtggcgacagggtacagaagagcaagtactcctgactgggcaatgggactgcattgcatatccctaggcacctattgagacttatctggggcccaccagcgtggagttcctgtatgggaatgcaggactggacttgtgctgcctgacagggtcgcggctggccgtctgtactttgtatagtcagttgaaactcacc

SEQ ID NO: 462 - DNA, 421 bp, Human poliovirus 1
  strain NIE1116623, complete genome.1
agtctggacatccctcaccggcgacggtggtccaggctgcgctggcggcctacctgtggtccaaagccacgggacgctacatgtgaacaaggtgtgaagagcctattgagctacaaaagagtcctccggcccctgaatgcggctaatcccaaccacggatcaagggtgcacaaaccagtgtacaccttgtcgtaacgcgcaagtctgtggcggaaccgactactttgggtgtccgtgtttcctttttaattttgatggctgcttatggtgacaatcatagattgttatcataaagctaattggattggccatccggtgagagtgaaatatattgtttacctccctgttgggtttactctaactaacttctccatttataaacttgtcatcacagttttaataattagaagtgcagtttaca

SEQ ID NO: 463 - DNA, 423 bp, GB virus C
  isolate GBV-C_agmMal_seqID_10 putative polyprotein gene,1
catggacgaaagcccgtggatggacggtgacagggttggcaggtcgtaaatcccggccgccctggtagcgggtataagtctgagggaaacccactagaggcttacgtgttcttgtccgagtggacgtgcacggtccacaggagacgcctattccggtgtgaataataggccgactcgagcggagtcgttaaactgaggaccgtctgagagatggtaacttggcctgcgtacgggaacgccgctaaagaatacagtgggttaagtccggcgggttggcaatcccagcagggcgggggggttctactgttgaatcctgccagttcctctcagatggtaggcatggggggacccagctccgcggcgcgctacagccggggtagcccaaaatccttcgggtgagggcgggtcccatgtccctttttg

SEQ ID NO: 464 - DNA, 423 bp, Hepatitis G virus
  polyprotein gene, complete cds.1
gtgcaagccccacaaaccgacgcctatttaaatagacgttaagaaccggcgcctgcccggcgaccggccaaaagttggtggatgggtgatgccagggttggtaggtcgtaaatcccggtcatcttggtaaccactataggtgggtcttaagggttggtcaaggtccctctgaaccctgtggcgagaaagcgcacggtccacaggtgttggccctaccggtgtgaataagggcccgacgtcaggctcgtcgttaaaccgagcccattacccacctgggcaaacaacgcccacgtacggtccacgtcgcccttcaatgtctctcttgaccaataggctttgccggcgagttgacaaggaccagtgggggctgggcgtcgggggaaggacccccggcgctgcccttcccggtggggtgggaaatgc

SEQ ID NO: 465 - DNA, 424 bp, Hepatovirus D2
  isolate FO1AF48Rhilan2010 polyprotein gene, complete1
gtcttcttttatccgggctcacgtgatgccaatggtccgacccatgcgcccgtgggggttaacacatggattagccatgtgctgtaggccctaaaagtcacgttcacgtaaggcttggatgaaactcatgtctgttaactgagggtggtaagttacattgatcttctaaagagggtaggctacgggtgaaaccctctaggttagtactcatattgagagatacctccagtaggtgaaggtttccggatattggtgagtttaacgacaataaccattcaacggatgtgggcccacctcactggttagatgccttgtaatccaacacccaaggggatatgagtgaattcttagtcccaagtgaccctcccgaaaggttgtaggggtactcaggggcatttaggttttccacatttaaagtgaattg

SEQ ID NO: 466 - DNA, 426 bp, Porcine teschovirus
  complete genome.1
ccccccccctccccctttgaacttgtaactggtaagtgatgatccttggaagctaggtacctgttacgctagttttggattatcttgtgcccaacactagtctttggacttctgttgtgtttaaacacagaaatctgattgcttggttatgaattcactggactaacccttttgaaagacctgctctggcgcgagctaaagcgcaattgtcaccgggtattgcaccaatggtggcgacagggtacagaagagcaagtactcctgactgggcaatgggactgcattgcatatccctaggcacctattgagatttctctggggcccaccagcgtggagttcctgtatgggaatgcaggactggacttgcgctgcctgacagggtcgcgggtggccgtctgtactttgtatagtcagttgaaactcacc

SEQ ID NO: 467 - DNA, 426 bp, Porcine teschovirus 8
  isolate Fuyu/2009/2, complete genome.1
ttgaaaccccctccctttgaatttgtaattgataagtgatgatccttggaagctaggtacttgatacgctagttttggattgtcttgtgcccaacattagtctttggacttctgttgtgtttaaacacagaaattttgttatctggctacgaattcattggattaatccctctgaaagacctgctctggcgcgagcgaaagcgcaattgtcaccgggtattgcaccaatggtggcgacagagtacagaagagcaagtactcctgactgggcaatgggactgcattgcatatccctaggtacctattgagatttctctggggcccaccagcgtggagttcctgtatgggaatgcaggactggacttgtgctgcctgacagggtcgcggctggccgtctgtactttgtatagtcagttgaaactcact

SEQ ID NO: 468 - DNA, 426 bp, Porcine teschovirus 1
  JPN/Ishi-Im7/2016/G1 genomic RNA, nearly1
cccccctcctctccttttggactcgtaactgataagtggtagtccttggaagctaggtactcgttacgctagttttggattatcttgtgcccaacattggacctcggtcctgtgttgtgtttaaacacagaaatcttgacacttggttatgaattcattgtatcaacccttttgaaagacctgctctggcgcgagcaaaagcgcaattgtcaccaggtattgcaccaatggtggcgacagggtacagaagagcaagtactcctgactgggtaatgggactgcattgcatatccctaggcacctattgagatttctctggggcccaccagcatggagttcctgtatgggaatgcaggactggacttgtgctgcctgacagggtcgcggctggccgtctgtactttgtatagtcagttgaaaagcacc

SEQ ID NO: 469 - DNA, 427 bp, Simian pegivirus
  isolate myb_M23 polyprotein precursor, gene,1
ctggacgaaagcccgtggacgggcggtgacagggttggcaggtcgtaaatcccggccgccctggtagcgggtataagtctggaggaaacccgtgaaccggcagcgtgaagctctgctagcgaacgtgcacggtccacaggagacgccgattccggtgtgaataatcggccgactcgagcggagtcgttaaactgaggaccatcagggagatggcaacttggcttgcgtacgggaacgccgctaaagtcacagtgggttaagtccggcgggttgacaatcccagcaaggcgagggggtgctattgttgcaccctgccagtccctcccttttggtaggcatggggggacccagctccgcggcgcgctacagccggggtagcccaaaatccttcgggtgagggcgggtcccatgtcccttttattcaggc

SEQ ID NO: 470 - DNA, 427 bp, GB virus C
  isolate VSAC1003, complete genome.1
tggacgaaagcccgtggatggacggtgacagggttggcaggtcgtaaatcccggccgccctggtagcgggtataagtctgagggaaacccactagaggcttacgtgtacttgtccgcgtggacgtgcacggtccacaggagacgcctattccggtgtgaataataggccgactcgagcggagtcgttaaactgaggaccatttgtaagatggcaacctggcctgcgtacgggaacgccgctaaagaatacagtgggttaagtccggcgggttggcaatcccagcagggcggggggactctattgttgagccctgccagttccttacaagtggtaggcatggggggacccagctccgcggcgcgctacagccggggtagtccaaaatccttcgggtgaggacgggtcccatgtccctttttatggctc

SEQ ID NO: 471 - DNA, 427 bp, Theiler's disease-associated virus
  isolate B2 NS3 gene, partial1
cggcgcggtgttttgggttcagggcagtaggggcagccgggccagcagtagctggctcctggtaccaccaccctacccggacgacctccctcgcgaaaggtcgccacggtctgtggctcgacgacgcctacaattcagtccgaggggcgcagccctcgttaaactcagacttgattcctcgcctttgatctggccaggggtttaagtgaacgccgcccttttaatgtttaatagggttctttcccggcgggttgacaaacacttccctgggcttttcttcggcttcggtttcatgttgcttcggcacccatgagcgcacaggggggggaccctgcgacagtccgccaagaggaaaatccttcgggtgacctcgtgcgcaacccaatccctttctcttccacatggcgtgtctgtggtgcatgctgtg

SEQ ID NO: 472 - DNA, 428 bp, Sicinivirus sp.
  strain RS/BR/2015/1R-1 polyprotein gene, complete1
tggctggaagcattcagtttctggatttgttggtttgtggtgattagtagaccccctggaggtacccgttctggatctgaccagggacccgtgactataccgttccggtaattcgggtttaaaactatgaacgtcaccacccattttcttttcctattttattttttcttatattctgatatacgtgtgagtattgatgttccctgatctttgtgtctggtctgcattttcagttattcaatttggttgggctgggctctttatttagatgtttttagaggtctttcttgttattgtagcgctcgttgttgtggtattgtctcctagcgaattatcccagctgttgactatttgcatctacaactttgtcttgatttttctctggttatttggtaccttagagctccccaattatcccaccattcatc

SEQ ID NO: 473 - DNA, 430 bp, Sapelovirus A
  isolate PSV_GER_L00798-K11_14-02_2014 genome1
cccctccacccttaaggtggttgtatcccacataccccaccctcccttccaaagtggacggacaactggattttgactaacggcaagtctgaatggtatgatttggatacgtttaaacggcagtagcgtggcgagctatggaaaaatcgcaattgtcgatagccatgttagtgacgcgcttcggcgtgctcctttggtgattcggcgactggttacaggagagtaggcagtgagctatgggcaaacctctacagtattacttagagggaatgtgcaattgagacttgacgagcgtctctttgagatgtggcgcatgctcttggcattaccatagtgagcttccaggttgggaaacctggactgggcctatactacctgatagggtcgcggctggccgcctgtaactagtatagtcagttgaaaccccccc

SEQ ID NO: 474 - DNA, 430 bp, Sapelovirus A
  isolate PoSapV_VIRES_NM02_C1 polyprotein gene,1
cctccacccttaaggtggttgtatccccataccctaccctcccttccaaagcggatggatatacggacctgaacttttggcgagtacatatggtatgattattggatacaccctgaatggcagtagcgtggcgagctatggaaaaatcgcaattgtcgatagccatgttagtgacgcgcttcggtgtgctcctttggtgattcggcgactggttacaggagagtaggcagtgagctatgggcaaacctctacagtattacttagagggaatgtgcaattgagacttgacgagcgtctcctagagatgtggcgcatgctcttggcattaccatagtgagcttccaggttgggaaacctggactgggcctatactacctgatagggtcgcggctggccgcctgtaactagtatagtcagttgaaaccccccc

SEQ ID NO: 475 - DNA, 430 bp, Human rhinovirus B
  strain HRV-B35_p1135_sR738_2007 polyprotein1
cgcgaggcataggttgtacccacggccaaaaaccttcaaccgttacccgccaatcaactacgtaacagctagtatcatcatgtctttgtctaggcgttcgatcaggtggttttcccctccactagtttggtcgatgaggctaggaaatccccacgggtgaccgtgtcctagcctgcgtggcggccaacccagcatcagctgggacgccttttcagagacatggtgtgaagactcgcatgtgcttgattgtgattcctccggcccctgaatgcggctaacctcaaccccggagccttgtattgcaatccagcaatattaaggtcgtaatgagcaattctgggacgggaccgactactttgggtgtccgtgtttcctgtttttcataaatttttcttatggtcacagcatatagtacatatatactgtgatc

SEQ ID NO: 476 - DNA, 431 bp, Human enterovirus
  isolate EV/Human/CMRHP58/CMR/2014 polyprotein1
aggtcgatgagtcactgcattccccacaggcgactgtggcagtggctgcgttggcggcctgcctatggggcaacccataggacgctttaatgttgacacggtgcgaagagtctactgagctagttagtagtcctccggcccctgaatgcggctaatcctaactgcggagcgcacaccagcaaaccagctggtaatgcgtcgtaacgggcaactctgcagcggaaccgactactttgggtgtccgtgtttccttttattcttattatggctgcttatggtgacaatctaagattgttatcatatagctattggattggccatccggtgactaacagacacatcatttacctttttgttggatttgttccactaaactcactctcatatcaaaccttattgtacatccttaagtccaattatttaaagcaact

SEQ ID NO: 477 - DNA, 432 bp, Hepatitis G virus
  polyprotein precursor, gene, complete cds.1
gggtgatgacagggttggtaggtcgtaaatcccggtcatcttggtagccactataggtgggtcttaagggctggtcaaggtccctctggcgcttgtggcgagaaagcgcacggtccacaggtgttggccctaccggtgtgaataagggcccgacgtcaggctcgtcgttaaaccgagcccgttacccacctgggcaaacaacgcccatgtacggtccacgtcgcccttcaatgtctctcttgaccaataggctttgccggcgagttgacaaggaccagtgggggttgggcggtgggggaaggacccctttcgctgcccttcccggtggggcgggaaatgcatggggccacccagctccgcggcggcctgcagccggggtagcccaagaaccttcgggtgagggcgggtggcatttccttttctgtaccgatc

SEQ ID NO: 478 - DNA, 433 bp, Human parechovirus 17
  strain M36/CI/2014 polyprotein gene, complete1
ctctattagtgagataccacgcttgtggaccttatgctcacacagccatcctctagtaagtttgtaagacgtctggtgacgtgtgggaacttgtgggaatcaatattttgctttaaagcatccattagccagcggataaaacacctggtaacaggtgcctctggggccaaaagccaaggtttaacagaccctagtggattggtttcaaaacctgaaatattgtggaacacactcagtacctactgatctggtagtaatgcaagcactagttgtaaggcccacgaaggatgcccagaaggtacctgtagggaacaagagacactatagatctgatctggggctggctacctctattttggtgagtcagttaaaaaacgtctagtgggccaaacccaggggggaccctggtttccatttattttacaaaggcact

SEQ ID NO: 479 - DNA, 433 bp, Picornaviridae sp.
  isolate yc-4 polyprotein gene, partial cds.1
agtagtggccgtaagccacttttctttctttataacctatcactatactccaacttaatcttctctacttggactaggatctactggttatcgatgagtcgtgatgcttagtgatttggatagggaaatcccacctgagggtaccgatggtatcactcaaacgggtaggggagatacccatttgctattggctgaaccggattaccgatgtacgccagtattagcagtggggcaaatacctccccgagcattatggttagagacagaactacgggtgctagccccggtggcattgcctagtagggttccgacctaatggtattggaaaccacccgtagtaaggtgagtgttggggaacctcaccagtgtctgttactgcctgatagggtcgcggctggccgaatcataatgcttaatgtcagttgaactagtc

SEQ ID NO: 480 - DNA, 438 bp, Human rhinovirus C50
  strain human/Australia/SG1/2008, partial1
ttccccggacgtgtgaataggctccaccaggggctgaagctgtagcgttcgttacccgcactgctactacgcaagggttagtatctaactgaaaacattgtggagtttcgctcagcagaaccccactgtagatcggggtaatggggctacacaacccccaccggcgacggtggtgtagcccgcgtggtgccccgcctgaggcttgtgcctcaggacgccacaatgttgacagggtgagaaggcctacgtgtgctagcagtgagtcctccggcctctgaatgcggctaatcctaaccccatagccatcacacacaatccagtgtgcaggtggtcgtaacgggtaactatgggatggaaccgactactttgagtgtccgtgtttcctattttacctttacatgtcttatggtcacaatatagtgtatacatattgtgatc

SEQ ID NO: 481 - DNA, 439 bp, Human rhinovirus B
  strain HRV-B69_p1162_sR1549_2009_g1 polyprotein1
gttaccccggagcggagtatagatggccaccgctgtcaaaagctcttaaccgttacccgccagttaactacgcaacggctagtagcatcctgttgccttcatggcgttcgatcaggtgagacttccctcctcactagtctggtcgatgaggctgagaactccccacgggcgaccgtgtctcagcctgcgtggcggccagcccagcttttgctgggacgccttgattgagacatggtgtgaagacccgcgtgtgcttaactgtgagtcctccggcccctgaatgcggctaacctaaaccctggagccttgaaacacaatccagtgttcgcaaggtcgtaatgagcaattccgggacgggaccgactactttgggtgtccgtgtttcctttttacctttcaattgttcttatggtcacaatataagtgttatattgtgatc

SEQ ID NO: 482 - DNA, 439 bp, Human rhinovirus C
  strain HRV-C40_p1009_s3787_1999 polyprotein1
tccccggcatgagaggaatagactctttcagggttgaagccacgagtgtcgttacccgcactggtactacgcaaagcctagtaacatcttgaaactctttttggttggtcgttccactagttaccccctagtagacctggcagatgaggcaggacgctccccactggcgacagtggtcctgcctgcgtggctgcctgcacacccttcggggtgtgaagccaaaagaaagacaaggtgtgaagagccccgtgtgctaccagtgaatcctccggcccctgaatgcggctaatcttaccccacagctattgcacacaatccagtgtgtatgtagtcgtaatgagcaattgtgggacggaaccgactactttgggtgtccgtgtttccttttattcccatgtttctgcttatggtgacaatactgacgtatagtgttgttacc

SEQ ID NO: 483 - DNA, 439 bp, Coxsackievirus
  A20,isolate ETH_P10/A20_2016 polyprotein gene,1
tgtagatcaggctgatgagtcactgcactcctcacgggcgaccgtggcagtggctgcgttggcggcctgcctatggggcaacccataggacgctctaaagtggacatggtgcgaagagtctattgagctagttagtagtcctccggcccctgaatgcggctaatcccaaccacggagcaagtgctatcaaaccagagagtggcttgtcgtaatgcgcaagtctgtggcggaaccgactactttgggtgaccgtgtttccttttatttttatcgtggctgcttatggtgacaatctcagattgttatcataaagcaaattggattagccatccggtgaaagtcaaatcgattatttacttacttgttagtttttctccactaacaccacaaacacttaaaattattgaaatagtgctgctaattagataccactatcata

SEQ ID NO: 484 - DNA, 442 bp, Pasivirus A3
  isolate CS15-4016, complete genome.1R
aagcgactcttccgacgacgaggagcagtgggacgccttcgagtcaactgaccgcccgaagaaggagaaacggcgggaacagaagactcgagagatcacccagccccgatctccaaggaaaaagtcaccgccgcgacactaaacgacctccacccctgcattgagtctgccaataaaccctcgaatactttctgtcgtcctcttttttcctttaacctttcgtgggagagcagcgccgcgcggtcctcctcctctttccgacaccgttccatcgcattcaggaacgggtccaacccctcaccgcaattacgcacttccgcaaggccacgcaaaaagtgaccattgcaccgtgccaaacccctccctcagttaatattaacagccgtcctcaatatccttctaccttccgtgacaggacacagtctccgaacaacccagagca

SEQ ID NO: 485 - DNA, 443 bp, Porcine enterovirus 8
  strain V13, complete genome.1
acactcatttcccccctccacccttaaggtggttgtatcccctacaccctaccctcccttccacataggacgaataaacggacttgagattaaggcaagtacataaggtatggtttttggatacacttaaatggcagtagcgtggcgagctatggaaaaatcgcaattgtcgatagccatgttagcgacgcgcttcggcgtgctcctttggtgattcggcgactggttacaggagagtagacagtgagctatgggcaaacccctacagtattacttaggggaatgtgcaattgagacttgacgagcgtctctttgagatgtggcgcatgctcttggcattaccatagtgagcttccaggttgggaaacctggactgggtctatactgcctgatagggtcgcggctggccgcctgtaactagtatagtcagttgaaaacccccc

SEQ ID NO: 486 - DNA, 443 bp, Porcine sapelovirus 1
  isolate IVRI/PSV/SPF/C-6/2015, complete1
acacccatttcccccctccacccttaaggtggttgtatcccctataccctatcctcccttccaaacaggatggacaaatggacttgacattatggcaagtacataaggtatggtctttggatacacctgaatggtagtagcgtggcgagctatggaaaaatcgcaattgtcgatagccatgtcagtgacgcgcttcggtgtgctcctttggtgattcggcgactggttacaggagagtaggcagtgagctatgggcaaacccctgcagtattactcaggggaatgtgcaattgaggcttgacgagcgtctcttagagatgtggcgcatgctcttggcattaccatagtgagcttccaggttgggagacctggactgggcctatactacctgatagggtcgcggctggccgcctgtaactagtatagtcagttgaaaacccccc

SEQ ID NO: 487 - DNA, 443 bp, Enterovirus E4
  complete genome.1
ctacgtctgataagattgatctgaaatctgagaatagagatttatttagaattgtttcatattcgggaaccgtgcagtggagagcattgtgcggtccttgcagacggggggtggggacattgcctcaaatacctttgcttgaaaggcctttgccaacacagcctttgtgcaactgcagcttttgcagcccattgcttgcagaagcagcacctttagttactgtagattctggaggtggttccagatcagcgattcctactgggccttgcgactgcgaggagtgcagtggtaataggacacccgacggggaggaggaaccaggagcaagaaatacaagtagccctgacagttctgtttgtggttgtcctctttgcgagggagaaattattaacgtttaagcttcttgctcatatttggggcgtaggtataataaagcaaaaatt

SEQ ID NO: 488 - DNA, 445 bp, Unknown
  Description of Unknown: Hepatitis GB virus B subgenomic replicon neoRepB.1 sequence
accacaaacactccagtttgttacactccgctaggaatgctcctggagcaccccccctagcagggcgtgggggatttcccctgcccgtctgcagaagggtggagccaaccaccttagtatgtaggcggcgggactcatgacgctcgcgtgatgacaagcgccaagcttgacttggatggccctgatgggcgttcatgggttcggtggtggtggcgctttaggcagcctccacgcccaccacctcccagatagagcggcggcactgtagggaagaccggggaccggtcactaccaaggacgcagacctctttttgagtatcacgcctccggaagtagttgggcaagcccacctatatgtgttgggatggttggggttagccatccataccgtactgcctgatagggtccttgcgaggggatctgggagtctcgtagaccgtagcac

SEQ ID NO: 489 - DNA, 445 bp, Unknown
  Description of Unknown: Human coxsackievirus B3 polyprotein gene, complete cds.1 sequence
gcacaacccaagtgtagatcaggctgatgagtcaccgcattccccacgggtaaccgtggcggtggctgcgttggcggcctgcccatgaggcaactcatgggacgcttcaatactgacatggtgcgaagagtctattgagctaattggtagtcctccggcccctgaatgcggctaatcctaactgcggagcagatacccacatgccagtgggcagtctgtcgtaacgggcaactctgcagcggaaccgactactttgggtgtccgtgtttccttttatttctattttggctgcttatggtgacaattgagagattgttaccatatagctattggattggccatccggtgacaagtagagcaattatctacctatttgttggctttgttccactgaattttagagttctaaaaaccttaacttcattttagcactcaatacggcaaa

SEQ ID NO: 490 - DNA, 446 bp, Rhinovirus C
  isolate HRV-C55_ID529T_5UTR/2A polyprotein gene,1
gcacttctgtttccccggacgtgtgaataggcctcaccaaggctgaagctgtagcgttcgttatccgctcacctactgcgcaaagactagtaactaactagatacttagtggtgtttcgctcagcagtaccccactgtagatcggggcaatgaggctacgcatcccccactggcgacagtggcgtagcctgcgtggtgccctgcccaggcttcggtctgggacaccactatgttgacagggtgtgaagaccggcgtgcgctaggtgtgactcctccggcccctgaatgcggctaatcctaaccccgcagccaccgcatgcaacccagcatgtagatggtcgtaacgagtaattgtgggatggaaccgactactttgggtgtccgtgtttcctgtttttctttattgttgtcctatggttacaaatttgtgtatcagatttgtgacc

SEQ ID NO: 491 - DNA, 449 bp, Human rhinovirus C35 clone LRTI-metagenomic-1 polyprotein gene,1
agctctgcagatatctccccggacgtgtgaataggccctaccagggctgaagctgtagcgttcgttatccgcatgcctactgcgcaaaggttagtaactaactagatacttagtggtgtttcgctcagcagtaccccactgtagatcagggtaatgaggctacgcatcccccactggcgacagtggcgtagcctgcgtggtgccctgcccaggtttatacctgggacaccactatttggacagggtgtgaaggccagcgtgcgctaggcatgagtcctccggcccctgaatgcggctaatcctaaccctgcagccattgcatgcaaaccagcatgttggtggtcgtaatgagcaattgcgggatggaaccgactactttgggtgtccgtgtttcttgtttttccattaattgtcttatggttacaagtttgtgcaacaaatttgtgacc

SEQ ID NO: 492 - DNA, 450 bp, Simian pegivirus
  isolate VGA00020, complete genome.1
tagagtggttgcgctggaatctggacgaaagccagcggatgggtggtgacagggttggcaggtcgtaaatcccggccatcctggtacctggtataagtctgaaggaacgcgcaagcaactagtgcgatttgttggcaaagtttgagtgcacggtccacaggtgacgcctataccggtgtgaataataggccgactcgagcggagtcgttaaactgaggacccccttggcgatcgcaacttggcctgcgtacgggaacgccgctaaagtcacagtgggttaataccggcgggttgacaatcccagcagggcgggggggagctactgttgcatcctgcgagttccgtcttgggggtaggcatggggtggcccagctccgcggcgcgctacagccggggtaggccaaaaatccgaaaggtgaggccgggccacatgtccgtttttatttaccc

SEQ ID NO: 493 - DNA, 452 bp, Bat pegivirus
  isolate PDB-24 polyprotein gene, complete cds.1
taaatcccggtccaggtttattcagtatatgataggtggagtcgagccccccgaccggggctctgtgaccactgtccagccggacgaggtggtgaaagttgttcgggcacggtccacaggttgggttcaccggtgtgaatagagccccgtctcgagcggagacgttaaacttagatggtctgcaggatggcaacgcggcccgcgtacgggaacgtcgcaaaataccttcgggaacagtgcatgcagcgggttgtcaaacccagcggtggcgcgctccggagaggtggagccctcaatggaggccagttccctgcagaaccagcccttcggggcaggcatggccccccccagccggcgcggcgctacacgcggcaagaggaagagccttcgggtgacctcgggggggatttgtccctttcaacccaatgagagttcgtgcgttggtcgcagtc

SEQ ID NO: 494 - DNA, 455 bp, Porcine sapelovirus 1 PSV/Porcine/JPN/Ishi-Miya3/2015 gene for1
cgcatgtattccacactcatttcccccctccacccttaaggtggttgtatccacttaccctatcccccccctccaaagcggacggactcttggacctgaaactctggcaagttaaatgataagatatctggatacacttgaatggcagtagcgtggcgagctatggaaaaatcgcaattgtcgatagccatgttagtgacgcgcttcggcgtgctcctttggtgattcggcgactggttacaggagagtagacagtgagctatgggcaaactcctacagtattacttaggaggaatgtgcaattgagacttgacgagcgtctcttagagatgtggcgcatgctcttggcattaccatagtgagcttccaggttgggaaacctggactgggtctatactacctgatagggtcgcggctggccgcctgtaactagtatagtcagttgaaaccccccc

SEQ ID NO: 495 - DNA, 455 bp, Coxsackievirus
  A20,strain NGR_2016, complete genome.1
gcagtagagatgggagtgtagcttaggtcgatgagtctggacattcctcaccggcgacggtggtccaggctgcgttggcggcctacctgtggcccaaagccacaggacgctagttgtgaacaaggtgtgaagagcctattgagctacaaaagagtcctccggcccctgaatgcggctaatcccaaccacggagcaagtgctcacaaaccagtgagtggcttgtcgtaacgggtaactctgtggcggaaccgactactttgggtgtccgtgtttccatttatttttacaatggctgcttatggtgacaatcgttgattgttatcataaagcgatttggattggccatccggtgaaagtgaaatatattatttatctttttgttggattcgctccaatcaactcctttacttacaaactcatcacaacagtactactaattaggaacatataccact

SEQ ID NO: 496 - DNA, 455 bp, Rhinovirus C
  isolate HRV-C16_ID639T_5UTR/VP1 polyprotein gene,1
tgcacttctgtttccccggtactagggtgttaaacttccccagaggttgaagcccgatgtatcgttacccgcatggttactaagcagagcctagtagcatcttgctttgcatatgagctggtcgttcagtcagtaaaccccctgatagacctggcagatgaggctggaaataccccactggtaacagtgttccagcctgcgtggctgcctgcccctcttttgaggggaagcccatatgtagacaaggtgtgaagagccgcgtttgctaactatgagtcctccggcccctgaatgcggctaatccaaccccacagctactgcgcagaaaccactgcgtaggtagtcgtaatgagcaattgtgggacggaaccgactactttgggtgtccgtgtttcctgttttactttacattgctcatggacacaacatatataaaatcgtatatgttgttcacc

SEQ ID NO: 497 - DNA, 457 bp, Chicken picornavirus 3
  isolate 45C, complete genome.1
gggtatggtggttaaccccgtccactgggcatctttgccctctcagaagtggatcaatccaccccaactccccccctggttacctgagccacagtggactccggtgacgaagctagggaccccaatacctcaagtgccaagagagtccccccctcgcgagaggtgctcttgggcccaaaaggctagttggcagagtgaagtgaaggaagctgctaacgtggtgaccttaagcgtaattcgaagctgacctttgaggttaaccctagtggaccactggaggaatctgtggaggtggtggttaggaaagttggccacttgtgagtagatgcccagaaggcataaggctgatctggggccagtgactataccgttccggtaaacctggtataaaaaccatgaaagcaagtgggtgaaattttctctttttatccttcattcagcagttgatattggcaaa

SEQ ID NO: 498 - DNA, 460 bp, Picornaviridae sp.
  isolate ybb044pic01nc genomic sequence.1
aaaagactcgctaactcaaaactctctcactctcactctccactcccaaactattatccgactaagtgacccactaactaatccaaaattccaatcctacactatcttgcacctttcactctcctctatctaatctataaagctcttacaactaaacctctccataccccattacaaccgcaaaatctacgaattcaaataaactcccaattgcccgaaaattcacttccacctaattctctcaaaatttctgactcactctcagaacaaaccaattcagtgcaaactgaacatacactctcccctgaacaaacgcagcaactcctccaaaccactcttaagactgcgtctcaaatttttgctcaactccaagagaaacaaatctcttctccccagaaagttaatactccaacgctctctgattcctcctccgaccccactcttcaacaagcttcatatc

SEQ ID NO: 499 - DNA, 460 bp, Red-necked stint Picornavirus B-like
  polyprotein gene, complete1
ctccactctcctttctcccttccccctccctttaccttttccccctctgtaactaagttttgtccctgcagagcagtgatacgacataaccgagttggaacgcgtattgggtattggtgaatatctatctcatgtggttaagctaaggcttgaaatacctttggcattgggttatagtagggcattagtgttcccacatgagagaaccatctatccacttgacacagtgggtgtatagtacaaaggaccctatttggtatcctgacgcgtgggcgagtaagtcttgctggatttccgcgagcatcaaccacaccctgatagtctcaatggggtcactcccgagacggggcaagtcacctatacactacctatggttgggaagccatagctggactgtgacagcttgatagagtgtcggcgggcacagtggattggatgtaaagtccgttgaaatgccatt

SEQ ID NO: 500 - DNA, 464 bp, Sapelovirus A
  strain SZ1M-F/PSV/HUN/2013, complete genome.1
ttcggcacgcatgtattccacactcatttcccccctccgcccttaaggtggttgtatcccataacctttaccctcccccttcccagtcggacggaactatagttcatagacttagattctgtattaaggtgtgactaggatcaaccccatgtggcagtagcgtggcgagctatggaaaaatcgcaattgtcgatagccatgttagtgacgcgcttcggcgtgctcctttggtgattcggcgactggttacaggagagtaggcagtgagctatgggcaaacctctacagtgttacttagagggaatgtgcaattgaggcttgacgagcgtctccttgagatgtggcgcatgctcttggcattaccatagtgagcttccaggttgggaaacctggactgggcctatactacctgatagggtcgcggctggccgcctgtaactagtatagtcagttgaaaccccccc

SEQ ID NO: 501 - DNA, 465 bp, Rhinovirus C
  strain SCH-108 polyprotein gene, complete cds.1
cagcggtcaagcacttctgtctccccggcatagggatgttaggcttctcacgaggctgaagtcccgattgtcgttatccgcacaactactggacaaagcctagtaacaccctacgacgtagtatggttggtcgttccaccagtgaatccccccctggtagacctggcagatggggctagaaattcctcactggcgacagtgttctagcccgcgtggctgcctgctccctaacgggagaagccatcctactgacaaggtgtgaagagccccgtacgctagttgtgagtcctccggcccctgaatgcggctaatccaaccctgcagccattgcatggaagccaccatgtagatggtcgtaatgagtaattgcgggacggaaccgactactttgggtgtccgtgtttcttttatttcttgtatattgcttatggtgacaatatatatacagcatatatattgttcatc

SEQ ID NO: 502 - DNA, 466 bp, Genet fecal theilovirus
  isolate S15 polyprotein gene, partial cds;1
atggggaagggtatgacgtgccccttccttcttcggagaactcgctctagtggtctttccacttctggaaaagagtgagtgcacgtgatcaggaccgtcgaagacgacaaatacctggtgctctatctcatagacgtttcacagctgtagcgacccctcagtagcagcggaagccccctcctggtgacaggagcctctgcggccaaaagccacgtggataagatccactgctgagggcggtgcgaccctagcaccctgtgatgcatactagttgtagcgtgccggactattggtctgtcataagacacctgatagagagaccaagaatgtcctggaggtaccccgcgtgcgggatctgaccaggagaccattgcccaatgctttacaacgggtctatggtttaaaaactgtcgcagtctctccaaaccaagtggtcttggttttcaattactttgaatatttcact

SEQ ID NO: 503 - DNA, 468 bp, Picornaviridae sp.
  isolate ybb117hav01 genomic sequence.1
aaaaggagggatacaaatggtaccacggacaagcgtggaaaaccacctgtatccccccttttgggcttggcaacccattaatcaagatgccttctcttttgccggttttaagactccattttgcctgctgaatctgatgtgttctcactagacgtgtagcttagcacgatggccaggtcttgtttatactggcataagccgggagaacggtcttacagtgatcttggagtttggttagtatctgctagagtggcgtaactgcagacatgttgcccagggccgtaggctaggtaactagcaccctgggggccgcaagcctaggtggtcacaaccaccctcatgtaacccttgtcgggcattcttgtagtagaacccctaactccacttttgctgggaccaagtaccctgtgagagcaatgtaagtagatgccctgtaggtacccgtttaggatctgagcaggggccggg

SEQ ID NO: 504 - DNA, 475 bp, Sapelovirus A
  strain DIAPD5469-10, complete genome.1
gtacatgcgtattacggtacgcatgtattccacactcatttcccccctccacccttaaggtggttgtatccactcaccctaccctcccttccaaagcggatggactttatgtgtttgaaactttggcaaccataaaaggaatggtatttggatacggatgaatggcagtagcgtggcgagctatggaaaaatcgcaattgtcgatagccatgttagtgacgcgcttcggcgtgctcctttggtgattcggcgactggttacaggagagtaggcagtgagctatgggcaaacctctacagtattacttagagggaatgtgcaattgagacttgacgagcgtctctttgagatgtggcgcatgctcttggcattaccatagtgagcttccaggttgggaaacctggactgggcctatactacctgatagggtcgcggctggccgcctgtaactagtatagtcagttgaaaccccccc

SEQ ID NO: 505 - DNA, 476 bp, Enterovirus J
  strain NGR_NHP_1, partial genome.1
aacacatcgctcaacagcagttccacatccagtgggattatgagcaagcactcctgtttccccggaagggactaacggtacgctgtacccacggcggaagtatgtcctaccgttaaccggccatgtacttcgagaagcctagtaccattatgaaggttgattgatgttacgctccccggtatccccaaccggtagttctggtcgatgagtctcggcatcccccacgggcgaccgtggccgaggctgcgttggcggccagcctacacccaccagggtgtaggacgtcatgatactgacatggtgtgaagagcctattgagctacgtggtagtcctccggcccctgaatgcggctaatcctaactccggagcatccgctaacaatcccgttagaagggtgtcgtaacgcgaaagtctggagcggaaccgactactttgggtgtccgtgtttcctgttttacttactgtttggctgctt

SEQ ID NO: 506 - DNA, 478 bp, Shanbavirus A
  isolate BtMf-PicoV-1/SAX2011 polyprotein gene,1
tgaaaagggggcgcagggtggtggtggttactaaatacccaccatcgccctgcacttcccttttcccctgtggctcagggtcacttagccccctctttgggttaccagtagttttctacccctgggcacagggttaactatgcaagacggaacaacaatctcttagtccccctcgccgatagtgggctcgacccccatgtgtaggagtggataagggacggagtgagccgatacggggaagagtgtgcggtcacaccttaattccatgagcgctgcgaagaaggaagctgtgaacaatggcgacctgaaccgtacacatggagctccacaggcatggtactcgttagactacgcagcctggttgggagtgggtataccctgggtgagccgccagtgaatgggagttcactggttaacacacactgcctgatagggtcagggcctcctgtccccgccgtaatgaggtagaccatatgcc

SEQ ID NO: 507 - DNA, 478 bp, Human rhinovirus B
  strain HRV-B06_p1198_sR1308_2009 polyprotein1
gtgcgccacatccagtggtgttttgtacaagcacttctgtttccccggagcgaggtataggctgtacccactgccaaaagcctttaaccgttatccgccaaccaactacgtaaaagctagtaacatcttgtttgtaatctggcgttcgatcaggtggatttcccctccactagtttggtcgatgaggctaggaatccctcacgggcgaccgtgtcctagcctgcgtggcggccaacccagcatatgctgggacgcccttttatagacatggtgtgaagactcgcatgtgcttggttgtgattcctccggcccctgaatgcggctaaccttaaccctggagccttgtattacaaaccagtgatattaaggtcgtaacgagcaattccgggacgggaccgactactttgggtgtccgtgtttctctttttactcattattgtcttatggtcacagcatatttgttaaatatactgtgatc

SEQ ID NO: 508 - DNA, 478 bp, Human rhinovirus
  NAT001 polyprotein gene, complete cds.1
gtgacaatcagccagattgttaacggtcaagcacttctgtttccccggtacccttgtatacgcttcacccgaggcgaaaagtgaggttatcgttatccgcaaagtgcctacgagaagcctagtagcacttttgaagcctatggctggtcgctcaactgtttacccagcagtagacctggcagatgaggctagatgttccccaccagcgatggtgatctagcctgcgtggctgcctgcacactctattgagtgtgaagccagaaagtggacaaggtgtgaagagcctattgtgctcactttgagtcctccggcccctgaatgtggctaatcctaaccccgtagctgttgcatgtaatccaacatgtctgcagtcgtaatgggcaactatgggatggaaccaactactttgggtgtccgtgtttcttgtttttctttatgcttgcttatggtgacaactgtagttattacatttgttacc

SEQ ID NO: 509 - DNA, 480 bp, Rhinovirus C
  isolate RV-C45-cpz1-2013 polyprotein gene, complete1
gtggtaaatccataccactaatggtcaaacacttctgttcccccggcatgtgaggaataggctccaaaagggctaaagccactagtgtcgttatccgcattggtactacgcaaagcctagtatcactctggaagtctctcggttggtcgctccaccaggtaccccactggtagacctggcagatgaggcaggactcaccccactggcgacagtggtcctgcctgcgtggctgcctgcacacccctacggggtgtgaagcctagagatagacagggtgtgaagagccccgtgtgctaccaatgagtcctccggcccctgaatgcggctaatcttaccccacagctgttgcacgcaatccagcgtgtatgcagtcgtaatgagcaattgtgggatggaaccgactactttgggtgtccgtgtttccttttattcctattatttgcttatggtgacaatattgatagcatcagtgttgtcatc

SEQ ID NO: 510 - DNA, 480 bp, Rhinovirus C
  isolate E0-9 polyprotein gene, partial cds.1
gtgcttgaccgtcagtaacctggatggtcaccacctattggtcattgtgtacaagcttctatatgtttcaccagaggcgaaaaacgaggttatcgttatccgcaaagtgcctacgagaagcctagtagcactttcgaaacctatggctggtcgctcagctgcttgcccagcagtagacctggtagatgaggctagacattccccaccagcgatggtggtctagcctgcgtggctgcctgcacacccaatcgggtgtgaagccagaaagtggacaaggtgtgaagagcctattgtgctcactttgagtcctccggcccctgaatgtggctaatcctaaccccgtagctgttgcatgcaacccagcatgtatgcagtcgtaatgggcaactatgggatggaaccaactactttgggtgtccgtgtttcttgttttacttttcattgcttatggtaacaattgtagttgatacacttgttacc

SEQ ID NO: 511 - DNA, 487 bp, Hainan gekko similignum picornavirus
  strain LPXYC222841 polyprotein1
gtgtccgggaagcgactcaagcttttgactgagtctctacaccttcatccgtaacatctttaagtttatgtgcctatggacctctagtgcactgccatcaccgggggtgtattggactggtttttccacaatccattcatcctgaggaattttggctttgttactaggatggtcccaccacacgcttatctgtgcctattgtgtcaaccatgttcttaagtagttgtgcccgtgggtgagtagataaccacaacaatccgataaagcatctcgcaaggatgtgagtaatggagtgtatgtgctacagagacccacaacctgaaccaagagagacacagtgaggattgtaaagggggaactctttgaaagggcatgtcccgcaattcctactgactgacaccgggggttggtgtcggtggattttagcaaatcctgttactgggtgatagccttgtgcacttcacttggttcttgtataagtgctgta

SEQ ID NO: 512 - DNA, 488 bp, Avian encephalomyelitis virus
  strain Pf-CHK1/AEV, complete genome.1
tttgaaagaggcctccggagactccggaggtattctttcgacccaacccatactggggggagtgtgggaccgtacttggagcgcacggtatatatgtgttcccgcatggcaagggcgtgttaccttgctccctgacgcatggtatgtgtcgatttgattttcaacttatcctaaggtctaggcgtttcgtgccgaaaacctctttgcgtttcacagaaccatcctaaccatgggtgcagtatgggaatcgtgtatgggggtgattaggatctctcatagagggataggtatgtcatcaaaccggggagtactccggctctggcattgggacatttgaattaaccggacctggttcagtatccgggttgtcctgtattgttacggtgtatccgtcttggcatactgaaagggtattcttgggtaatcctttcctactgcctgatagggtggcgtgcccggccatgagagattaagggtagcatttaacc

SEQ ID NO: 513 - DNA, 489 bp, Sapelovirus A
  strain JXXY-a2, complete genome.1
ttgaaatgggtgtggggtacatgcgtattacggtacgcatatattccacactcatttccccccctccacccttaaggtggttgtatccccataccttaccctcccttctaaaacagatggacaaatggatttgaacttatggcaagtgaatatggtatgactttggatacactttaacggcagtagcgtggcgagctatggaaaaatcgcaattgtcgatagccatgttagtgacgcgcttcggcgtgctcctttggtgattcggcgactggttacaggagagtaggcagtgagctatgggcaaacctctacagtattacttagagggaatgtgcaattgagacttgacgagcgtctcttagagatgtggcgcatgctcttggcattaccatagtgagcttccaggttgggaaacctggactgggcctatactacctgatagggtcgcggctggccgcctgtaactagtatagtcagttgaaacccccc

SEQ ID NO: 514 - DNA, 489 bp, Cardiovirus B
  strain Ruian-Rn93-3 polyprotein gene, complete cds.1
gttcgtctgctttctgagtactattcatgaaaagggtatgtgctaccccttccttcttggagaatctgcgtggcggtctttccgtctcttgaaaagcgcagatgtagcatgctggaaccggtgaagaaaacagttctctgtggagacttagagcagacatcgaaacagctgtagcgacctcacagtagcagcggaaccccctcctggtgacaggagcctctgcggccaaaagccacgtggataagatccactgctgtgagtggtgcaaccccagcaccctggttcgatggttgttctctgtggaatcagggaatggttattctcaagccctccagtagagaagccaagaatgtcctgaaggtaccccgcgtgcgggatctgatcaggagatcagttaccagtgctctacactggtactctgatttaaaaaatgtcacagcttctccaaaccaagtggtcttggttttccttttacctacaaagttcatg

SEQ ID NO: 515 - DNA, 489 bp, Human rhinovirus A
  strain HRV-A28_p1292_s6470_2000 polyprotein1
gaagaccaataggcggtggttatccaaaccatcaacggtcaagcacttctgtttccccggttagattgatacgctccaacagggcgaaaacaactctaatcgttatccgcaagatgcctacgcaaagcttagtatcacctttgattctatttggttggtcgctcagctacaaacccagtagtagacctggcagatgaggctagaaacaccccactggtaacagtgttctagcctgcgtggctgcctgcacaccctatgggtgtgaagccgactagttgacaaggtgtgaagagccccgtgtgctcatcttgattcctccggcccctgaatgtggctaaccttaaacctgcagccaatgtacacgatccagtgtgctgttggtcgtaatgagtaattgcgggatgggaccaactactttgggtgtccgtgtttctctttttacctttattattgcttatggtgacagtatatggtatatatattgtcact

SEQ ID NO: 516 - DNA, 491 bp, Porcine sapelovirus
  isolate KS05151, complete genome.1
ttgaaatgggtgtggggtacatgcgtattacggtacgcatgtattccacactcatttcccccctccacccttaaggtggttgtatccacataccctaccctcccttccacacaggacggacttttggacttggaccttcggcaagcacatatggtatgattactggatacaccttgaatggcagtagcgtggcgagctatggaaaaatcgcaattgtcgatagccatgttagtgacgcgcttcggcgtgctcctttggtgattcggcgactggttacaggagagtaggcagtgagctatgggcaaacctctgcagtattactcagagggaatgtgcaattgagacttgacgagcgtctctttgagatgtggcgcatgctcttggcattaccatagtgagcttccaggttgggaaacctggactgggcctatactacctgatagggtcgcggctggccgcctgtaactagtatagtcagttgaaaccccccc

SEQ ID NO: 517 - DNA, 491 bp, Rhinovirus A
  isolate HRV_A_SK001, complete genome.1
aaagtgaccaataggcggcaatcacccagattgtcaaaggtcaagcacttctgtttccccggtcgaagctgatatgctccaacagggcaaaaacagctgagatcgttatccgcaaagtgcctacgcaaagcctagtaacattttcgaagttatatggttggtcgctcagccaaaccccatggtagacctggcagatgaggctagaaataccccactggtgacagtgttctagcctgcgtggctgcctgcacaccctctgggtgtgaagccatataatagacaaggtgtgaagagccccgtgtgctcactttgagtcctccggcccctgaatgtggctaaccttaaccctgcagctagtgcatgcaatccagcatgtatctagtcgtaatgagtaattgcgggatgggaccaactactttgggtgtccgtgtttcctttttatccttattgattgcttatggtgacaatatatagtactatatattgacacc

SEQ ID NO: 518 - DNA, 492 bp, Chicken picornavirus 2
  isolate 44C, complete genome.1
caccccctactgccctaacccccaaagttagttatagggtggctccctacccttactccacggggtaagccctaacccggttgaatctcaagatcagccttagcgaggactattagtaccgctcaaaccctttgcctgtagtgcccaggggtcacagaggggtgaccctctccctggggcccaaaaggctaggtggcaagacagggtccaagtgaggggctactctaagtagccccaagctgaacatcctgtctgaagccacccttgcagggccaggtttgattggggaaactagacaccagctttgtcctgggattggggggatatcgagttagtccaggaggtgcgagtagatgcccccgaaggtaccccaggcacatctgggatctgatcgggggcccgtgactatacaataggtaaaccgggttaaaaaacatgaaagcgcctctctctttcctacttcttttattgactggtgacaaaaatagcagt

SEQ ID NO: 519 - DNA, 493 bp, Avian encephalomyelitis virus
  strain van Reokel, complete genome.1
tttgaaagaggcctccggggtatccggaggtcctttttcgacccaacccatactggggggtgtgtggggccgtatttggagtgcacggtatatatgcattcccgcatggcaagggcgtgccaccttgccccttgacgcatggtatgtgtcatcatttgccttggttaaaccccataaaacgaggcgccacgtgccgaaaatccctttgcgtttcacagaaccatcctaaccatgggtgtagtatgggaatcgtgtatgggggtgattaggatctctcgtagagggataggtgtgtcattcaaatccagggagtactctggctctgacattgggacatttgatgtaaccggacctggttcagtatccgggttgtcctgtattgttacggtgtatccgtcttgacacactgaaagggtattcttgggtaatcccttcctactgcctgatagggcggcgtgcccggccacgagagattaagggtagcaatttaaac

SEQ ID NO: 520 - DNA, 494 bp, Quail picornavirus QPV1/HUN/2010
  complete genome.1
tttgcatcagttcgcccctcccctcaccatacctttttcccctctttaggactgatacttggttatgatgagcagaggatttcgcaagttatgcttcttgataaaaagtaattcacgaatcatgggattatagcctggaagtgaacactcatgtggcaagtgggttagtagctctccatgttcccatgtgcagtggactgacaacagtgagttcggggttgtgtagtaaagggaaagtattacttacccgcacctgctatacgtggtgtacgtaggatacgagttagtagtgcttagcaactttaaactggtgctgaaatattgcaaggtcactgaagttgtgaacgcgaacgctccgccactgccatgtatagcgtgcaatgcataaatggtgcactacatgatacgagggaatgggaaaccctccatggccgaatgcagggtgacagcctgccggcggatgcctgttgttagtataatccgttgtttgccac

SEQ ID NO: 521 - DNA, 494 bp, Avian encephalomyelitis virus
  strain L2Z, complete genome.1
tttgaaagaggcctccggagtgtccggaggctctctttcgacccaacccatactggggggtgtgtgggaccgtacctggagtgcacggtatatatgcattcccgcatggcaagggcgtgctaccttgccccttgacgcatggtatgcgttatcatttgccttggttaagccccatagaaacgaggcgtcacgtgccgaaaatccctttgcgtttcacagaaccatcctaaccatgggtgtagtatgggaatcgtgtatggggatgattaggatctctcgtagagggataggtgtgccattcaaatccagggagtactctggctctaacattggcacatttgatgtaaccgaacctggttcagtatccgggttgtcctgtattgttacggtgtatctgtcttggcacactcacagggtatttttgggtaatcctttcctactatctgatagggtggcgtgcccggccacgagagattaagggtagcaatttaaac

SEQ ID NO: 522 - DNA, 494 bp, Human enterovirus
  strain NYS/2006/1999/CVB2 polyprotein gene,1
atcgagaaacctagtaccaccatgaaggttgcgcagcgtttcgctccgcacaaccccagtgtagatcaggccgatgagtcaccgcgttccccacgggtgaccgtggcggtggctgcgttggcggcctgcccatggggcaacccatgggacgcttcaatactgacatggtgtgaagagtctattgagctaattggtagtcctccggcccctgaatgcggctaatcccaactgcggagcagatacccacacgccagtgggcagtctgtcgtaatgggcaactctgcagcggaaccgactactttgggtgtccgtgtttccttttattttttgtactggctgcttatggtgacaattgagagattgttaccatatagctattgggttggccatccggtgtcaaacagagcgatcatctatttgtttgttggattcatacccttaaaccttaaagccctaaacactcttaattttgtgttgcaactgaactcagcaaa

SEQ ID NO: 523 - DNA, 496 bp, Bat picornavirus 3
  strain TLC5F, complete genome.1
taagcggaaagcattcttgtcccccggtcagtaacctataggctgttcccacggctgaaagggtgaacatccgttacccgcctcagtacttcgagaaacctagtacgcctgatgattccaaattggtatgatccggtcaaccccagaccagaaactgtggatgggggtcaccattcctagtatggcaacatacaggtgtccccgcgtgtgtcacaggcccttacgggtgccatttcggatgagtctggccgaagagtctattgagctactgttgatacctccggccccctgaatgcggctaatctcaaccccggagccactgggtggtgaaccaaccacttggtggtcgtaatgagcaattctgggacggaaccgactactttggggtgtccgtgtttcttttgttcatattaaactgttttatggtcacaacacaacttggtacgatttgtgattattcactgctcacttgtcacagtaaatatacacaatcatc

SEQ ID NO: 524 - DNA, 496 bp, Enterovirus Stuttgart 97
  polyprotein gene, partial cds.1
tacttcgagaaacccagtaccaccatgaaggttgcgcagtgtttcgctccgcacaaccccagtgtagatcaggtcgatgagccaccgcattccccacgggcgaccgtggcggtggctgcgttggcggcctgcccatggagcaatccatgggacgcttcaatactgacatggtgtgaagagtctattgagctaattggtagtcctccggcccctgaatgcggataatcctaactgcggagcagacgctagcaaaccagcgagtagtctgtcgtaacgggcaactctgcagcggaaccgactactttgggtgtccgtgtttccttttattctcatactggctgcttatggtgacaattgaagaattgttgccatatagctattggattggccatccagtgacaaatagagcaattgtctatttatttgtcggttttgtaccgttaaactacaaagttctaaacactctcaatcttgttttatcactcaatacatcaaa

SEQ ID NO: 525 - DNA, 498 bp, Simian pegivirus
  isolate SPgVkrtg_RT11 polyprotein precursor, gene,1
gcttcggcgcctagccgaaaccgacaccctgttcgaaatctttccgaaacatagagcggttgtggggaaactggacgaaagccagcggatggggggtgacagggtaggcaggtcgtaaatcccggcctccctggtacctggtataagtctggtggaaccatagcttaactgtgtggactttggacgtaggcagagtgcacggtccacaggtgacgcctataccggtgtgaataataggccgactcgagcggagtcgttaaactgaggacccattctaggatcacaacttggctgccgtacggtgacgccgctaaagtcacagtgggttaagtccggcgggttgacaacaccaggcaggcggggggacgctactgttgcgccctgtgagttccctagttgggtaggcatggggggacccagctccgcggcgcgctacagccggggtaggccaaaaatccgaaaggtgaggccgggtcccatttttcctttttgagtctc

SEQ ID NO: 526 - DNA, 498 bp, Pestivirus J
  isolate NrPV/NYC-D23 polyprotein gene, complete cds.1
gtataagggttgggaaccttgtaccaagctacctctgccattcagtatttgggagtagaagtagatgtgtttacaaactcacacgtgtgggggcggggatagactgtgccagcggtcgtgtaccagcacctacgcatacgtgtggactgcgaaccaggagagcacctaggtctgacaagctgtgagaacacagtagtcgtcagtgagtcagctggtaaggatcacccacctggatactcacgtggacgagggagtttcccagtcagaaacctacaccagaggaggggtcctctggagacatggatggtctgagtaacagactatctactggggtgtgctgcctgacagggtctcggctgatagcctggctagcagtataaaaatcagttgaattggcatatgagttgtgaacatctagtaaacaatgaaagacaaaaacaaaaaatgagcataataaaaaaattgtacaatccactactcaggtgtggctgcagactt

SEQ ID NO: 527 - DNA, 500 bp, Kunsagivirus 1
  strain roller/SZAL6-KuV/2011/HUN, complete genome.1
tttcaaatcggactccggtagttataccggagcccggtttggacgcttgggccgcgttaacagccccccacccctttcccactgactgatttctcggattggactcatttgcattgctaactctgattctggatttccccgtttatgtcgtcgcggtcggaagtgcacgtacttcgacgttgatctgatggcgtttgtttccaggggggaggtggcggcagaaacgcccccgccgtaaacttcggcgggccacgcctgtcaagccactccctggggccgagcgcctgaggtgatacagagagataagcacactgggcgctgacaacgcccgggacctcagtgagaagagcagtagggccgtgtttatgggactccattggatatcccccgcttgtcggaactcacggctactccgggttgggaagcccgcgactggtactgtactgggtgatagcctggtgccttccctctcactgttgtatgaaggctgaaaaccccct

SEQ ID NO: 528 - DNA, 501 bp, GB virus C
  Hepatitis G virus, isolate D50 polyprotein gene, complete1
accgacgcctatcaaagtaggcaataaggcctcgcgccgaaccggcgaccggccaaaaggtggtggatgggtgatgccagggttggtaggtcgtaaatcccggtcatcttggtagccactataggtgggtcttaaggggaggctacagtccctctagtgcctgtggagagaaagcgcacggtccacaggtgttggtcctaccggtgtgaataaggacccgacgtcaggctcgtcgttaaaccgagcccgttaaccccctgggcaaacgacgcccacgtacggcccacgtcgcccttcaatgtctctcttgaccaataggcaaagccggcgagttggcaagggccagtgggggccgggggcagggagaaggactccctgtcctgcccttcccgggggtgcgggaaatgcatggggccacccagctccgcggcggcctgcagccggggtagcccaagagccttcgggtgagggcgggtggcatttttctttcctataccgatc

SEQ ID NO: 529 - DNA, 502 bp, Human rhinovirus A
  strain HRV-A71_p1047_sR141_2008 polyprotein1
ctttgtgtttgagggccaataggtgagtggtaaaccataccactaaaaggtcaagcacttctgtttccccggtgtgcagggaataagctctacccgggctgaagccttaaacatcgttatccgcacaattactacgcaaagcttagtagtaccttgaaagctccttgactggtcgctccgctagattacccatctagtagacctggcagatgaggctggatactccccactggcgacagtgatccagcctgcgtggttgcctgcacacctggtaacaggtgtgaagccaatgagtagacagggtgtgaagagccccgtgtgctaattgtgagtcctccggcccctgaatgcggctaatctaaccccacagctaatgcatacaaaccagtatgtatttagtcgtaatgggcaactgtgggacggaaccgactactttgggtgtccgtgtttcctttattctcattattttgcttatggtgacaaatacgatatatttgtcatc

SEQ ID NO: 530 - DNA, 506 bp, Phacovirus Pf-CHK1/PhV
  complete genome.1
gtgtgtcatttctcccctccccctcccaaaccttttccccctctaatcggattgattaacccggttaaagatgattaatggtttgtgagttgatatgatggcccggcattgaatccgggaattcttaagtaatggaattgcatccaatatgaaagtgagtgtggcaagctcacaagtagtacttggctctgcccattatttgaggaccaactcttcttgactacaatgtgtttaaagtaaactggaccacattgtgtatccagacaactccatttgataatgtacgctggaaacgttttcagtgcatagggtcctaaagtggtgctgaaatattgcaagctcaatgggatactgaacgctgaaaaccgccgctgttatcatatgggcccctagtgggtaaatgttggctttaggcatatactgcttgggaatgcagtactggttgtagacagggtgatagcctaccggctggcgtagttgagttggtatagccagttgattgccat

SEQ ID NO: 531 - DNA, 506 bp, Seal picornavirus type 1
  isolate HO.02.21, complete genome.1
ttcaaaggtggcgggagagttggcctcacgctgtttagcgtgagagctggctctcctgccccttcccctgagccggggatcttggctcattcccctcttttctatcctccctcattggactttacggatgacccggcataaacttgacaaccgatgttggatttcccttgtggctgtgatggaggacataccctcgggtgtagttgtgtgcgtgtcgctctgcgactcgagcttcaaagtggtgctgaaatattgcaagcgtcgttgctcgattaacggagtggtacaatcctatgaacccaagtgcattcatgcgaaagccccggaggggtgagtagcatggactcgaatcagaagagctggagctcgcttggtacggcacgtagcattgctttgcctaaagaccaagggggtatggctataggtgggggcctatagcttgtccagtgctggttgacagactcgtgctacgcgtctggttcgagtataagtagctgcaactcact

SEQ ID NO: 532 - DNA, 508 bp, Unknown
  Description of Unknown: Crohivirus B clone Bat/CAM/CroV-P25/2013, polyprotein gene, complete1 sequence
gtataagagacaggtgtttgccttgtcttcggactggcatcttgggaccaaccccccttttccccagccatgggttaaatggcaataaaggacgtaacaactttgtaaccattaagctttgtaattttgtaaccactaagctttgtgcacataatgtaaccatcaagcttgttagtcccagcaggaggtttgcatgcttgtagccgaaatggggctcgaccccccatagtaggatacttgattttgcattccattgtggacctgcaaactctacacatagaggctttgtcttgcatctaaacacctgagtacagtgtgtacctagaccctatagtacgggaggaccgtttgtttcctcaataaccctacataataggctaggtgggcatgcccaatttgcaagatcccagactgggggtcggtctgggcagggttagatccctgttagctactgcctgatagggtggtgctcaaccatgtgtagtttaaattgagctgttcatatacc

SEQ ID NO: 533 - DNA, 509 bp, Bear picornavirus 1
  isolate CH-1, complete genome.1
gctcaggggaaggggtagggtggctggacgcccgccatacaggcgggctccaaccaccccaccccttcccctgagccggggttctttggctcatcccccttctttatctatctccctcatgtacggattaaactggcataaatttgatatcgatgttggattatcccttaaatggttttggtgggggacatagccccgggcgacctctagtcggacatgctggctttcctagattcaaagtggtgctgaaatattgcaagcgtcgtttctaggtaggttggtatgaatggctttagtgaacccaactgcaatcatttgaacgcccctgaggggttagtaaaatggactcacagctggagagctggagtgagtgcaccacggtacatagcattgctctacctatagggtgtacttgcatggctaagggtgggggcccttagcttgtccagtgctgggtgacagcctcgtgccacgcgctggcctgtgagtataagtggctgaatatcgct

SEQ ID NO: 534 - DNA, 510 bp, GB virus C
  isolate P187 polyprotein gene, partial cds.1
aagccccagaaaccgacgccccacggaatagtgggactaaggcccaatcaaagccaggaattccggccgaaagggtgtggatggtggtgacagggttggcaggtcgtaaatcccggccattctggtagcacctataggtgggttgaactggcggcgagaagtccctaatacctcttgcacgtgttgcgcacggtccacaggattggtctttccggtgtgaatagagacccgacgccagtcacgtcgttaaacagagtgcctttccccatcgcaacgccggccctcgtacgggaacgtcgcccttttaataccactctggtcagtagcatgtgcggcgagttggcaatcccagggggcgggcggggcgtacacggtaggaccgtgccgcctgcgttgtcggggtctggtattaatgcatggggccacccagctccgcggcggactgcagccggggtagaccaagatccttcgggtgaggtcgggtggcatctttctttctttgacatcatg

SEQ ID NO: 535 - DNA, 512 bp, Bovine picornavirus
  genomic RNA, complete genome, strain:1
ttttctcccctccccctccacttaccttttccccctcttgtaacgctagaagtttgtgcaaatcgcctgtagggtactgcaatccagcagtgcataggcaaagcttttcttgttaccccaccccacattatactgaggaggatggtgaaattgtgttagtatgggttagtagcggtgacccgggtaaccccaacccagaaactcacggatgagatgaacaggaccccacatggtaacgtgtgtgttcgtctgccccgcaaggtgaggccgtgagagctccgcacgcgaaaaccttgaaaacccaaaagtaccttgagctcttcgctattttgtgtttcctccaggaccctgaatgcggctaaacccaacccgcgatccgcacgtagcaacccagctagagtgtggtcgtaatgcgcaagttgcgggcggtaccgactactttggtgttcctgtgtttcctttattttattttaaatttttatggtgacaacagctggaaaataagagtgatc

SEQ ID NO: 536 - DNA, 512 bp, Bovine picornavirus
  genomic RNA, complete genome, strain:1
ttttctcccctccccctccccttaccttttccccctctagtaacgttagaagctagcactaaccgcctgtagggtactgcaatccagcagtgcataggcaaagtctttcttgtcaccccaaccccacactatactgaggaggatgacgaaatttgactagtatgggttagtaacggtgatccgggtgaccctgacccagaaactcacggatgaggtgaacagaaccccgcacggtaacgtgtgtgttcgcctgccccgcaaggtgaggccgtgagagctttgcacgtaaaacccctgaaagtccgagagtagtttgagctcttcgctattttgtgtttcctccaggaccctgaatgcggctaaacctaacccgcgatccacacatggcaatccagctagggtgtggtcgtaatgcgcaagttgcggacggtaccgactactttggtgttcctgtgtttcttttattttattttaaatttttatggtgacagcaatccagaaaagagataaac

SEQ ID NO: 537 - DNA, 512 bp, Picornaviridae sp.
  isolate sru051pic1 genomic sequence.1
gagtgcttgatttgtaatggaaaaagcaaagcttatccaaatacaaatcaagcacccgtttggggagttcaccgtccccttaattcataggtgattggactgattttgatactgatttaggatttcctttgacctggattgggataaagacttaaacatgttgaataaggatggattagctcgatccattaggtgggtctcatatataccaccacagagccggagaataaccttacaaaggatgttagtaattaaatacacttgttgggtggcgtaactgcagaccatgtggacatgggcctatgttgtggtaacacaatcccatgtggccaaaagcctagtggataacaatccacccatggtaatccaatttggacactcaacatttaagtgtttagtgaaagtatctgatggggtgacactctgtgagaacccagggagtagatgcccaggaggtacccttttaaaggatctgacttggggcctagacacttaatgctaggttaaaaact

SEQ ID NO: 538 - DNA, 513 bp, Simian pegivirus
  isolate SPgVkob_OB23 polyprotein precursor, gene,1
cctccccctcccccgaccggagcggaactccggaaaaccgacacctagtgaacatttcggatcattggcgcggatctggtgttaatctggacgaaagcccgtggacgggcggtgacagggttggcaggtcgtaaatcccggccgccctggtagcgggtataagtctggaggaaaccagtgaaccctcagtgtgaagtcagactaacgaaagtgcacggtccacaggagacgccgattccggtgtgaataatcggccgactcgagcggagtcgttaaactgaggacctccttggggatggcaacttggcttgcgtacgggaacgccgcaaaagtcacagtgggttaagtccggcgggttgacaatcccagcaaggcgggggggcactattgttgtgccctgccagttcccccaagggggtaggcatggggggacccagctccgcggcgcgctacagccggggtagcccaaaatccttcgggtgagggcgggtcccatgtcccttttttgtatgc

SEQ ID NO: 539 - DNA, 513 bp, GB virus C
  isolate G3825 polyprotein gene, complete cds.1
cccccccccggcactgggtgcaagccccagaaaccgacgcctactgaagtagacgtaatggtccagcgccgaactggcgaccggccaaaaggtggtggatgggtgatgacagggttggtaggtcgtaaatcccggtcatcctggtagccactataggtgggtcttaaagggaggttatggtccctcttgcgcatatggagggaaagcgcacggtccacaggtgttggtcctaccggtgtaataaggacccggcgctaggcacgccgttaaaccgagcccgttactcccctgggcaaacgacgcccatgtacggtccacgtcgcccttcaatgtctctcttgaccaataggcttagccggcgagttgacaaggaccagtgggggccccccccgttgcccttcccggggaggcgggaaatgcatggggccacccagctccgcggcggcctacagccggggtagcccaagagccttcgggtgagggcgggtggcatttttctttcctgtaccgatc

SEQ ID NO: 540 - DNA, 513 bp, Picornaviridae sp.
  isolate wftcra74pic2 genomic sequence.1
gttaggcatagacacctacgaggcccaggacatacgcaatttcaattgcgaaaatgccctgggccccgtaggtgtctatgcctaacttcaacgagtagtggccgtaagccactttctttctaaactctctaactctacattttcctccttgtttgcaggttttatggtcttaaacttggaacgcgaatgacgatgaaactggaacaactttctgattgggctacccgccttccaaccggcaatggtgtaaaggtaaaagggtagattgctaccacttatggcatgtgaactggattaccaatgtagcatggaccctctaggtggggaatggcaatcgactatcctagctagattggaccactcatgggctttgggcgcgaattacgcagaacctaccgacaacatgtctggaaaccccatgagtggaggggaattgggaaaacccctttgatccaaactgcctgatagggtcgcggctggccgagttaggattagtagtcagtagaatttaac

SEQ ID NO: 541 - DNA, 516 bp, Rosavirus M-7
  polyprotein gene, complete cds.1
tatgcatcactggacggcctaacctcggtcgtggcttcttgccgatttcagcgctaccaggctttctggtctcgccaggcgttgattagtaggtgcactgtctaagtgaagacagcagtgctctctgtgaaaagttgatgacactcttcaggtttgtagcgatcactcaaggctagcggatttccccgtgtggtaacacacgcctctaggcccagaaggcacggtgttgacagcaccccttgagtggctggtcttccccaccagcacctgatttgtggattcttcctagtaacggacaagcatggctgctcttaagcattcagtgcgtccggggctgaaggatgcccagaaggtacccgcaggtaacgataagctcactgtggatctgatctggggctgcgggctgggtgtctttccacccagccaaaacccgtaaaacggtagtcgcagttaaaaaacgtctaggccccacccccccagggatggggggttcccttaaaccctcacaagttcaac

SEQ ID NO: 542 - DNA, 517 bp, Crohivirus A
  gene for polyprotein, complete cds, strain: ZM54.1
gttgaagtccatttcttgcttgcccccgatgaatcctgttaaggcctcacggccctaagggtgaaactcggttatcccctcctgtacttcgagaagattagtacaacactatgaaatctacatcttgtgatccgggataaccccaatcccagaaacctgtgatgggcgtcaccacccctcttatggtaacataagggtgtcgccgcgttggcacaggaccctttgggctggatgtttttagtaatggtgtcgaaggtcctattgagctacaggagtttcctccgccctggtgaatgcggctaatcttatccctgagcctaaggttgcgatccagcaacttgatggtcgtaatgcgtaagttgggggcggaaccgactactttccagaaggcgtgtttctttgttttgtctgttactatggtgcatgatatagatattgaatatttgatctttttgagctgtttcttatcttattgctacatcctttcaggtgttggatttacattttggttaataag

SEQ ID NO: 543 - DNA, 518 bp, Foot-and-mouth disease virus
  type SAT 2, isolate SAT2/EGY/24/20141
gacgtcagcgcacgaaacgcgccgccacttcggaacactcgtacaaacacgatcacacgcgggtttcccaactggcatcctcgtgcaacctggagtttcgcctggtctttccaggtctggagagatgacacgttgtactggaaccaactccacgatcggtctactggcgggtgctagtaacgacattgttgcttcgtagcggagcatgcaagccgtgggaactcccccctggcaacagggacccacggggccaaaagccacgttctccgaaccttgcatgtgtgcaaccccagcacggtaacactgttgtgaaacacgctttaaggtaacactgagactggtacttggtttctggggacaggctaaggatgccctccaggtaccctgaggtaacaagcgacactcgggatctgaggaggggactgggacttctataaaagtgcccagtttaaaaagcttctatgcctgaataggtgaccggaggccggcaccttttccttttacacacaaaccactac

SEQ ID NO: 544 - DNA, 518 bp, Encephalomyocarditis virus
  strain 1086C polyprotein gene, partial1
ccggtgtgcgtttgtatacatgttacttccaccacgttgtcgtcttttgacaacgtgagggcccggaacctggccctgtcttcttggcgagtattcctaggagtctttctcctctcgacaaaggaatacaaggtctgttgaatgtcgtgaaggaagcagttcctctggaagcttcttgaagacaagcaacgtctgtagcgaccctttgcaggcagcggaatcccccacctggtaacaggtgcctctgcggccgaaagccacgtgtataagatacacctgcaaaggcggcacaaccccagtgccacgttgtgagttggatagttgtggaaagagtcaaatggctctcctcaagcgtattcaacaaggggctgaaggatgcccagaaggtactccactggctggaatctgatctggggcctcggtgcacgtgctatacacgtgttgagtcgaggttaaaaaacgtctaggccccccgaaccacggggacgtggttttcctttgaaaaccacgaagataat

SEQ ID NO: 545 - DNA, 520 bp, Foot-and-mouth disease virus
  type SAT 1, isolate SAT1/ZIM/22/891
gggacgtcagcgcacgaaacgcgctgttgctctttgcattcttgtacaaacacgatctcacgcaggaatcttagaccaacccaacccgtgcaactgcaagtttcacccggtctttccgggcctagagagacgaacagctgtactgagactgactccacgatcggtctactagcgggtgctagtaacactcactttgcttcgtagcggagcacatgagcggtgggaacccccccatggtaacatggacccaccgggccaaaagccacgcctcacggcctcatgtgtgtgcaaccccagcacggcaacttgtttgtgaaacacatcttaaggtaacactgagactggtactcggtttctggagacaggctaaggatgcccttcaggtaccccgaggtaacaagagacactcgggatctgagaaggggaccaggagttctttaaaactgcttggtttaaaaagcttctatgcctgaataggtgaccggaggccggcaccttttcctttatccacaacaacttt

SEQ ID NO: 546 - DNA, 520 bp, Human enterovirus C105
  strain BU5 polyprotein gene, complete cds.1
ccagtgtggtttcgagcaagcacttctgtttccccggccgcgccctatatgctgtgcaaacggcagaaaggggcaacgtcgttacccgcttgcatactacgggaaacccagtaccaccattgattgtattgagagttgcgttcagcgcctctcccccctggcgtagctcgggccgatgaggctcagaagcccccacaggtgactgtgtctgagcctgcgttggcggcctgcccgcacctcttggtgtgggacgcttaatacatgacatggtgcgaagagtctactgtgctatgtaagattcctccggcccctgaatgtggataatcctaaccactgatcccatgtgcgcaaaccagcgtgcggtgggtcgtaacgcgcaagtcggtggcggaaccaactactttgggtgtccgtgtttcctttattacctattgaatgtttatggtgacaattgcttgattcagttgttgccatttattacattcgttgacctagactgaaaaccaactgaaccattaca

SEQ ID NO: 547 - DNA, 522 bp, Rabovirus A1
  strain HT5, complete genome.1
ccgggtataacccggagttttggggcaggtccaagccccacataggaacatacgatccacggatcgtgtgttcttttatgctttctaaccttaccctttgtaaccattacgctttacgccgcatggtgtttggcggcaccatgacgtggacaagaggttacgccattacgatatgtaccctccccttttggggagagaccgaccaattatggtacagtatccaactgtattgtggtcaagtacttctgtttccccggtgatgcgggataggctgtacccacggccaaaacctgctgatccgttacccgactcacatctacgaggaggctagtaaaaggcatgaagttcaagagtatgatccaaccagatccccactggtaaactagtgatgagggttcccgttccgaacatggcaacatgtgggttccctgcgttggcactaggccccttccgaggggtgctctgaagatggattgttgatgaagaccaatttgtgcatgtgtttatcctccggccctctga

SEQ ID NO: 548 - DNA, 523 bp, Simian pegivirus
  isolate SPgVkrc_RC58 polyprotein precursor, gene,1
ggggaatctcacccccccccgtccggttccggaagaatcggaaaccgacaccctgaccaatcattcttgatcatagagtggatgttagtgaaagccagacgaaagccggcggatgggtggtgacagggttggtaggtcgtaaatcccggccaccctggtacccggtataagttgggcggaagctgactgaagctccgtgctcttttctgtgcgttcttggtgcacggtccacaggtgacgcctataccggtgtgaataataggccgactcgagcggagtcgttaaactgagaacctccatacggatggcaacttggcttgcgtacggggacgccgctaaagtcacagtgggttaagtccggcgggttgacaaccccagcaaggcgagggggtcctattgttggactctgccagttcccggtggaggtaggcatggggtggcccagctccgcggcgcgctacagccggggtagcccaaaatccgaaaggtgagggcgggccacatgtccgaaatttagtcaagc

SEQ ID NO: 549 - DNA, 523 bp, Echovirus E19
  strain HAI/2016-23036E polyprotein gene, partial cds.1
ggaaaaaacgtccgttatccggccaattacttcaagaaacccagtaccaccatgaaggttgcgcagcgtttcgctccgcacaaccccagtgtagatcaggtcgatgagtcaccgcattcctcacgggcgaccgtggcggtggctgcgctggcggcctgcccatggggcaacccatgggacgcttcaatactgacatggtgcgaagagtcaattgagctaattggtagtcctccggcccctgaatgcggctaatcctaactgtggagcagattcccgcatgccagcgggtggtctgtcgtaacgggcaactctgcagcggaaccgactactttgggtgaccgtgtttccttttattcctatattggctgcttatggtgacagttgagagattgttaccatatagctattggattggccatccggtgacaaacagagcaattatctaccaatttatcggttttgtaccattgaatttcaacgcattcaaaaccctcaactttattttgactcttaatacagcaaa

SEQ ID NO: 550 - DNA, 524 bp, GB virus C
  isolate UU1, complete genome.1
cactgggtgcaagccccagaaaccgacgcctatctaagtagacgcaatgactcggcgccgacccggcgaccggccaaaaggtggtggatgggtgatgccagggttggtaagtcgtaaatcccggtcatcttggtagccactataggtgggtcttaagggaaggttaagattcctcttgtgcctgtggcgagacagcgcacggtccacaggtgttggccctaccggtgtgaataagggcccgacgtcaggctcgtcgttaaaccgagaccgacacccacctgggcaaacgacgcccacgtacggtccacgtcgcccttcaatgtctctcttgaccaataggctttgccggcgagttgacaaggaccagtgggggccggggacgggggggagggacccccccgccccgcccttcccggtgggacgggaaatgcatggggccacccagctccgcggcggcctgcagccggggtagcccaagagccttcgggtgagggcgggtggcatttttcctttctgtactaatc

SEQ ID NO: 551 - DNA, 524 bp, Carp picornavirus 1
  isolate F37/06, complete genome.1
agctacaggaaagagagagataatcacagcacataaatacaactacagaagagagcctttccctgagcactatttacagcaaaccacgctgggaaaagtggtagcatgacccacttacgggttacttagtataggattttaatatcttcgattctttattttcttttcttaactaagttcgcccggactttatccgtgttttattttagtttaagcaaaattgagtaactaagtttttaacctgccaaatggtgagaagtaactctgtgaaaataccatttgtgcatgaaattgtcttgaaaactcttaggcttttggggggtcccactgctgtttggaggactattgacagactctattgtagttgagtagtgactaatgataacgatttgcgtattacgcaatgggctgtacccgttagatttagtatgccggggggaggggtcccactggattgcactatgtaacctgacagggcgtctgccgacgcactacaatgaggataagatcggctgtttttattt

SEQ ID NO: 552 - DNA, 527 bp, Human pegivirus
  isolate GBV-C-ZJ-180501, complete genome.1
cccggcactgggtgcaagccccagaaaccgacgcctatttaaacagacgttatgaaccggcgccgacccggcgaccggccaaaaggtggtggatgggtgatgccagggttggtaggtcgtaaatcccggtcatcttggtagccactataggtgggtcttaagggttggtcaaggtccctctggcgcttgtggcgagaaagcgcacggtccacaggtgttggccctaccggtgtgaataagggcccgacgtcaggctcgtcgttaaaccgagcccattacccacctgggcaaacaacgcccacgtacggtccacgtcgccctacaatgtctctcttgaccaataggctttgccggcgagttgacaaggaccagtgggggctgggcgacgggggtcgtataggaagaaaaatgccacccgccctcacccgaaggttcttgggctaccccggctgcaggccgccgcggagctggggtagcccaagaaccttcgggtgagggcgggtggcatttttcttcctataccgatc

SEQ ID NO: 553 - DNA, 527 bp, Bat hepatovirus
  SMG18520Minmav2014 polyprotein gene, complete cds.1
ttcaaaagccccagcggggtttcattaccccgctgtggcttttggacttccctaggatggggaagtaaattaccatcctcgcgtttgccgtgcgttaacggctacttttcttctagctgtagaagtaaaattcagcatgttttatgtttgtttgtcttgtttgttatatacatttttacactcctacaaatgcacatgaagaacagtttgtagagattaacaaacgcttagctgaacctaggtggtgaatctagtagtaagataagtagaggaagctataccttaagttggttgggccctcgtgtttgctctataaacaaaaccaagtgagtagagtggatgaacagtactaaatccctgagtacagggaacctcacaggtgtgatacacttatgtctatgtgacctggttggaggttgggcgtgccctatgatactggagtgggagatcttttggggaacccacgttttcacactgcctgatagggtcttgccgagagactcacttgtttcggctgtacttgtaac

SEQ ID NO: 554 - DNA, 527 bp, Picornaviridae sp.
  isolate ecw123pic1 genomic sequence.1
gggctacacatgtgataccatgttctagcatggaaaatcacacatgcagcccgatttcgggcttgggaacccgttcatcaagatcccataacctttcttttcttttgtctatcccttgagtagctaggctcgcggcagggtcttgtatatacctgcactagctgccacgaagtgctacagaaaccattagtatatatttagaaaccacctgttgacgtaactgtgattgattgcctggggctgagggcatggtaacatgcaccccaggggccaaaagcctagtgggtaacaacccaccattcatgatgcccttcttggcacaacaagtggatctctctatctatagaacatgggagtatggtatggagtggtgtaaggagcacgctagtagatgccccataggtacccttctggatctgagtgggggccatgaggaggtctttccctctgaattggttaaaaaccatgaacgtttgctccgcccatctttcttctaattttatcaacttacttgaattctgatcaca

SEQ ID NO: 555 - DNA, 528 bp, Hepatovirus A
  isolate KibOB-1, complete genome.1
cttttcacgctttctgtcatcttatttcctgggctctccccttgcccaaggctctggccgttgcgcccggcggggtcaactccatggttagcatggagctgtaggagtctaaattggggacgcagatgctgggaacgtcaccctgcagtgttaacttggctttcatgaagctctttgatcttctacaagaggtaggctacgggtgaaacctcttagattaatactcctatggagagatatcttgaatagggtaacagcggtggatattggtgagttcctttgggacaagaaccattcaacaccggaggactggctctcattcagtagttgcattgagtgaattgtctgtcagggctgtctctgggtttaattcctggcctctctgtgcttagggcaaaccatttcctggccttaaatggagttctgtgagaggggactcctcctttatatgctggacatattttggggccttagggttctggtttgcctctgaggtactcaggggcatttaggtttttcctcacttat

SEQ ID NO: 556 - DNA, 529 bp, GB virus C
  isolate 62-11, complete genome.1
ccccccggcactgggtgcgagccccagaaaccgacgcctatcaaagtagacgtaatggccctgcgccgaaccggcgaccggccaaaaggtggtggatgggtgatgacagggttggtaggtcgtaaatcccggtcaccttggtagccactataggtgggtcttaaggctaggtaatggtccctcttgcgcttatggcgagaaagcgcacggtccacaggtgttggtcctaccggtgtaataaggacccggcgctaggcacgccgttaaaccgagcccgttatccccctgggcaaacgacgcccacgtacggcccacgtcgcccttcaatgtctctcttgaccaataggcttagccggcgagttgacaaaggccagtgggggccgggcgtagagggaaggaccctctgcgctgcccttcccgggggagcggtaaatgcatggggccacccagctccgcggcggcctacagccggggtagcccaagagccttcgggtgagggcgggtggcatttttctctcctataccaatc

SEQ ID NO: 557 - DNA, 529 bp, Simian sapelovirus 2
  strain VRDL1 polyprotein gene, complete cds.1
ctgacctgtttatgaacatgagcagcggcactgctccacgggctatccgtgtaagaaatattgattattcttatggatcatgatttcagggttggccgcccagtctaaaaggcaattgtggtaagctatgtaagtagttggctgttgaaaggagccaagtacatcctaggtctacgctgtgcgggccgaagtaagacttggaacaactctgagtaggcagtttttctctttagcccaacacgaccgcatactgaagagctagaggcactttggggcaaaggtaaaagcattgcttagaccgaatgttcaatgagaccttgacgagtgctgtcacagtgtcccctgatggcagtatggcgcatgctcttggcattacccatatgtgtatctatagggggggggccccctatacttagtctagtgctacctgacagggccgcggctggtcgtcggtgtgtggtataaccagtagtaatcccccatggattgctttaactccccctcctccctcaacaaaactttctctaag

SEQ ID NO: 558 - DNA, 529 bp, Encephalomyocarditis virus
  isolate KNP/17/94 5' UTR; and1
ttggaataagaccggtgtgcgtttgtctatatgttgcttctactacactgttgcctgtgacagtgtaagggcccagaacctggccctgtcttctcgacgagtgttcctaggggtctttcccctcttgacaaaggaatacaaggtctgttgaatgtcgtgaaggaagcagttcctctggaagcttcttgaagacaaacaacgtctgtagcgaccctttgcaggcagcggaatcccccacctggtaacaggtgcctctgcggccaaaagccacgtgtataagatacacctgcaaaggcggcacaaccccagtgccacgttgtgcgttggatagtttcggaaagagttaaacggctctccccaagcgtattcaacaaggggctgaaggatgcccagaaggtaccccactggttgggatctgatctggggccccggtgcacgtgctttacacgtgttgagccggggttaaaaaacgtctaagcccccctaaccacggggacgtggttttccttttgaaaaccacgataacaat

SEQ ID NO: 559 - DNA, 529 bp, Rhinovirus B
  strain 20692_33_HRV-B polyprotein gene, partial cds.1
ccccccacctaacatatccaagtaacttagaagatttgaacactgcacaatagggactattgcaaccagcaatagtcagtgcaagcacttctgtctccccggagcggagtatagacggccaccgctgtcaaaagctcttaaccgttatccgccagttaactacgcaacagctagtaacatcttgttgttcttagggtgttcgatcaggtgagtttaccccctcactagtctggtcgatgaggctgagaaatccccacgggtgaccgtgtctcagcctgcgtggcggccagcccagcatatgctgggacgccttaagtatgacatggtgtgaagactcgcgtgtgcttagctgtgagtcctccggcccctgaatgcggctaacctaaaccccggagccttgaggcacaatccagtgcccgcaaggtcgtaatgagtaattctgggacgggaccgactactttgggtgtccgtgtttccttttatctttttgatgttcttatggttacaatatatagagtatattgtaatc

SEQ ID NO: 560 - DNA, 529 bp, Human rhinovirus C
  strain HRV-C36_p1093_sR548_2008 polyprotein1
cccccctccttaatgtaacttagaagcttgaacaatcgcccaataggatatgaccactccatggttatgaagggcaagcacttctgtttccccgggtgtgtgaataggctctaacagggctgaagctgtagcactcgttatccgcgcatctactacgcagaggttagtagggccatgtcaatcctttaggcgtttcgctcagcgtgtacccccacgtagatcagggcaatggggctacacattccccatcggcgacgatggtgtagcccgcgtggtgccccgcctaggcctatttggcctaggacgccaaaggaaagacagggtgtgaagacccgagtgtgctaggtgtgagtcctccggcccctgaatgtggctaatcctaaccccgtagccatggtgtacaagccagtacaaacatggtcgtaatgggcaactatgggatggaaccaactactttgggtgtccgtgtttctctttttaccctttactgcatttatggttacaagcttgtgaatacagacttgtaatc

SEQ ID NO: 561 - DNA, 530 bp, Human pegivirus
  gene for polyprotein, isolate 56330272.1
cccccggcactgggtgcaagccccagaaaccgacgcctactaaagtagacgtgatggccccgcgccgaaccggcgaccggccaaaaggtggtggatgggtgatgccagggttggtaggtcgtaaatcccggtcatcttggtagccactataggtgggtcttaaggggaggtaaaggtccctctcgcgcttacggagggaaagcgcacggtccacaggtgttggtcctaccggtgtaataaggacccggcgataggcacgccgttaaaccgagcccgtaagccccctgggctaacgacgcccacgtacggtccacgtcgcccttcaatgtctctcttgaccaataggcttagccggcgagttgacaaggaccagtgggggccgggcgagggggggaaggaccccccctcgctgcccttcccgggggttgcgggaaatgcatggggccacccagctccgcggcggcctacagccggggtagcccaagagccttcgggtgagggcgggtggcattttttttcttgtaccgatc

SEQ ID NO: 562 - DNA, 530 bp, Rosavirus B
  strain RNYL1109081R polyprotein gene, complete cds.1
ggagtgtcttaagtgatcccctccagtctctttagtgcctatgcttcagagagcggtgaactgacaccgttgcttcttgcacagcccttcgtgccggtctttccggttctcgacagcgttgggcatcatggctagttaggctaagatggcaaatgatctggtgaaaagttttggattgtttggagctttgtagcgatgctagtagtgtgtgtggatctccccacgtggtaacacgtgccccacaggccaaaagccaaggtgttaaaagcacccctactagtcccagatacccccatctgggagctcctctcatgaaaaatcttagtaccctttgatttggctgttcatcaacctctctagtcaagggctgaaggatgcccggaaggtacccgcaggtaacgataagctcactgtggatctgatccggggccctggtgcgaccgtctgtccggcgtagctagggttaaaaaacgtctaggcccttccaccccaagggattggggtttccccaatcattttagaagttcact

SEQ ID NO: 563 - DNA, 530 bp, Rhinovirus A
  isolate E0-163 polyprotein gene, partial cds.1
cttccgatctcctaaagtaacttagaagttgagcacaatgaccaataggcgacatttctccagaatgtcaaaggtcaagcacttctgtttccccggtcaaggttgatatgctccaacagggcaaaaacagctgcgatcgttatccgcaaagcaactacacaaagcctagtatcacttttgagaatgtatggttggtcgctccactataaacccaatagtagacctggcagatgaggctagaagttccccactggtaacagtgttctagcctgcgtggctgcctgcgtgctccttgtgggcacgaagccatatatttgacaaggtgtgaagagccccgtgtgcttgttttgattcctccggcccctgaatgtggctaaccttaaccctgcagctagcgtgtgcaatccagcacaaagctagtcgtaatgagcaattgcgggatgggaccaactactttgggtgtccgtgtttcttgtttttcttttatacttgcttatggtgacaatatatataatatatatattggcatc

SEQ ID NO: 564 - DNA, 531 bp, Human pegivirus
  isolate NIG-N3559, complete genome.1
ccccccggcactgggtgcgagccccagaaaccgacgcctatcaaagtagacgttatggccccgcgccaaactggcgaccggccaaaaggtggtggatgggtgatgacagggttggtaggtcgtaaatcccggtcatcctggtagccactataggtgggtcttaaagggaggctacggtccctctagcgcttatggagagaaagcgcacggtccacaggtgttggtcctaccggtgtaataaggacccggcgctaggcacgccgttaaaccgagaccgttatccccctgggcaaacgacgcccatgtacggcctacgtcgcccttcaatgtctctcttgaccaataggcagttctgccggcgagttgacaagggccagtgggggccgggcggcgggggaaggacccccgtcgctgcccttcccgggggagcggtaaatgcatggggccacccagctccgcggcggcctacagccggggtagcccaagaaccttcgggtgagggcgggtggcattttctttcctataccgatc

SEQ ID NO: 565 - DNA, 531 bp, Rhinovirus C
  isolate E0-41 polyprotein gene, partial cds.1
accgcctattggtctttgtgtaaacttctaagttacgcaaaagggaaggggtggcaaatccataccactaacggtcaaacacttctgtttccccggcatgcgaggaataggctccaaaagggctgaagccactagtgtcgttatccgcattggtactacacaaagcctagtattaccttgaaaatttcttggctggtcgttccaccagataccccgctggcagacctggcagatgaggcaggacttaccccactggcgacagtggtcctgcctgcgtggctgcctgcacaccccttacggggtgtgaagcccagaaacagacagggtgtgaagagccccgtgtgctaccaatgagtcctccggcccctgaatgcggctaatcttaccccatagctgttgcacgcaaaccagcgtgtatgcagtcgtaatgagcaattgtgggatggaaccgactactttgggtgtccgtgtttctttttattcctattatttgcttatggtgacaatattgatattatcagtgttgtcatc

SEQ ID NO: 566 - DNA, 532 bp, Bakunsa virus
  complete genome.1
ttttgaacgccacctcggagcgatatccggggaccccctcccctttttccttcctaccttcttcccaaatttccctcttcccttgttattttggtttggatttcctggacatgactcggacggatctatctcatttgctttgtgtctgctccaccagtggcatggtcgaaagatcatcaacactggacgtgtactgtaatggccaaacgtgcccacaggggaaaccatgccggtcgctgtagcggcgggtggacgtggtggacccctctccctgctcataaactttgggtaggtgaagggttcaagcgacgcttgccgtgagggcgcatccggatggtgggaaccaacaaactaggctgtaatggccgacctcaggtggatgagctagggctgctgcaccaaaagggactcgattcgatatcccggcctggtagcctagtgcagtggactcgtagttgggaatctacgactggcctagtacagggtgatagccccgtttcccacgcccacctgttgtagggacacccccccc

SEQ ID NO: 567 - DNA, 532 bp, Human rhinovirus A
  strain HRV-A20_p1169_sR1200_2009 polyprotein1
cccctaccccttttatgtaacttagaagttttgtacacaccgaccaataggtggtatttaaccaaaataccaaaggtcaagcacttctgttaccccggtcaagattgatatgctctaccagggcaaaaacaatcgcgatcgttacccgcaaagcaactacgcaaagcctagtatcatttttgatggtgtatggttggtcgttccgctatgaacctgatagtagacctggcagatgaggctagaaaatccccactggtaacagtgttctagcctgcgtggctgcctgcgtaccccttgtgggtacgaagccgtacatttgacaaggtgtgaagagccccgtgtgcttgctttgagtcctccggcccctgaatgtggctaaccttaaccctgcagctagtgtgcacaagccagtgcatagctagtcgtaatgagcaattgcgggatgggaccaactactttgggtgtccgtgtttcttgtttttcttttatatttgcttatggtgacaatatattcaatacatatattgacacc

SEQ ID NO: 568 - DNA, 533 bp, GB virus C
  isolate EM110 polyprotein gene, complete cds.1
cccccccccggcactgggtgcaagccccagaaaccgacgcctactgaagtagacgtaatggtccagcgccgaactggcgaccggccaaaaggtggtggatgggtgatgacagggttggtaggtcgtaaatcccggtcatcctggtagccactataggtgggtctaaaagggaggttatggtccctcttgcgcatatggagggaaagcgcacggtccacaggtgttggtcctaccggtgtaataaggacccggcgctaggcacgccgttaaaccgagcccgttactcccctgggcaaacgacgcccacgtacggtccacgtcgcccttcaatgtctctcttgaccaataggcttagccggcgagttgacaaggaccagtgggggccgggcgggagggggaaggacccccaccgctgcccttcccggggaggcgggaaatgcatggggccacccagctccgcggcggcctacagccggggtagcccaagagccttcgggtgagggcgggtggcatttttctttcctgtaccgatc

SEQ ID NO: 569 - DNA, 533 bp, GB virus C
  isolate Hu_5, complete genome.1
cccccccacggcactgggtgcaagccccagaaaccgacgcctatctaagcaggcaataaggcctcgcgccaaaccggcgaccggccaaaaggtggtggatgggtgatgccagggttggtaggtcgtaaatcccggtcatcttggtagccactataggtgggtcttaaggggaggctacagtccctctgtcgcccgtggcgagaacgcgcacggtccacaggtgttgaccctaccggtgtgaataagggtccgacgtcaggctcgtcgttaaaccgagcccattatccccctgggcaaacgacgcccacgtacggtctacgtcgcccttcaatgtctctcttgaccaataggcaatgccggcgagttgacaaagaccagtgggggccgggggtgagggagaaggactccccaccctgcccttcccgggggagtgggaaatgcatggggccacccagctccgcggcggcctgcagccggggtagcccaagagccttcgggtgagggcgggtggcattttctttcttataccgatc

SEQ ID NO: 570 - DNA, 533 bp, Picornaviridae sp.
  isolate ybb150shi01 genomic sequence.1
ccttttaacgtaccgtagcacgttagctacaaacttagcatttattttattttaattctaaatttattttaatttacataatttcggctctagtaacaaaaaccttattatcgtatttatacgaacagcatttattatttaatacatatccttatttttaaattacaaatacataccccccttttaacttactataattgctaatcaccaacaaccttcaaatttgatctagtacacattttaaaattccgtttctaaattttattaacttgcatctttgattataactctgggagtctattcagacttggcaaacccttgagcagccctcaaaatttgtagaacacctcaggcgatcttttaatacatgacccctgttgtaataacgtattactgaaaacacaaacacaactgaattaacagaagacattaatacaacccaagaacaacaatttactttcgataaccaacgcacagttaagacagaaaactcttatctgttgcctccaataaattcaatttcggctcagaaa

SEQ ID NO: 571 - DNA, 534 bp, GB virus C
  isolate Hu_21, complete genome.1
cccccccccggcactgggtgcaagccccagaaaccgacgcctactaaagcaggcattaaggcctcgcgccgaaccggcgaccggccaaaaggtggtggatgggtgatgccagggttggtaggtcgtaaatcccggtcatcttggtagccactataggtgggtcttaaggggaggctacagtccctctattgcccgtggcgggaacgcgcacggtccacaggtgttggccctaccggtgtgaataagggcccgacgtcaggctcgtcgtaaaaccgagcccgttgtctccctgggcaaacgacgcccacgtacggctcacgtcgcccttcaatgtctctcttgaccaataggcttagccggcgagttgacaagagccagtgggggccgggggtgagggggatggaccccccaccctgcccttcccgggagagcgggaaatgcatggggccacccagctccgcggcggcctgcagccggggtagcccaagaaccttcgggtgagggcgggtggcattttcttttcctgtaccaatc

SEQ ID NO: 572 - DNA, 534 bp, Human rhinovirus 23
  complete genome.1
ccaaagtagttggtcccgtcccgcatgcaacttagaagctttgcacaaagaccaatagccagtaatcatccagattacttaaggtcaagcacttctgtttccccggtcaaagttgatatgctccaccagggcaaaaacaactgcgatcgttatccgcaaggcgcctacacaaagcttagtagcattctgaaagttgtctggttggtcgttccaccattccccctggtagacctggcagatgaggctagaaactccccactggcgacagtgttctagcctgcgtggctgcctgcacaccctctgggtgtgaagccatacgatggacagggtgtgaagagccccgtgtgctcgctttgagtcctccggcccctgaatgtggctaaccttaaccctgcagctagagcacacaatccagtgtgtttctagtcgtaatgagcaattgcgggacgggaccaactactttgggtgtccgtgtttccttgttctctttgaatatctgcttatggtgacaatatatacgtatatattgacacc

SEQ ID NO: 573 - DNA, 534 bp, Enterovirus D68
  isolate TOp-15-Ph068 polyprotein gene, partial cds.1
tttcaaatcaaagctcaataggtggggcacagacgtgcgcattaagtctcaagcacctctgtttccccggtgtggttgtataaactgttcccacggttgaaaacaacctatccgttatccgctatagtacttcgagaaacctagtatcacctttgaattgttgacgcgttgcgctcagcacactaacccgtgtgtagcttgggtcgatgagtctggacgtaccccactggtgacagtggtccaggctgcgtcggcggcctactcatggtgaaaaccatgagacgctagacatgaacaaggtgtgaagagtctattgagctactatagagtcctccggcccctgaatgcggctaatcctaaccatggagcaagtgttcacaggccagtgagttgcttgtcgtaatgcgcaagtctgtggcggaaccgactactttgggtgtccgtgtttcactttttacttttatgactgcttatggtgacaatttgatattgttaccatttagcttgtcaaattaattgcaaaagatcctaagt

SEQ ID NO: 574 - DNA, 535 bp, Rhinovirus C
  strain 20692_51_HRV-C polyprotein gene, complete cds.1
ccccgtttccatttacacccaaccctatgtaacttagaagcagtacactggaccaataggtggtaacaatccatgttgccaaaggtcaagcacttctgtctccccggcatgcgtggaataaacagtgcaaacggttgaaaccacaaatgtcgttatccgcgcatgaactacgcagagcctagtatctccctgaaaatctgttggttggtcgttcagctaatccccatagtagacctggcagatgaggcaagacgcaccccactggcgacagtggtcttgcctgcgtggctgcctgcacacccccccccggggtgtgaagccaattgatagacagggtgtgaagagccgagtgtgcttcatgtgagtcctccggcccctgaatgcggctaatctaaccccgcagctgtggcacacaagccagtgtgtatgcagtcgtaacgggcaactgcgggacggaaccgactactttgggtgtccgtgtttccttttattcttttatcaggtacttatggtgacaatagtgaatattgttacc

SEQ ID NO: 575 - DNA, 537 bp, Picornaviridae sp.
  isolate yc-6, complete genome.1
gccatccgtaggttctggtaaggttccatcaactgttggggcgctagttgctatgaccgcattcacggacggatgatttatagtatcacccaatccgggcacaacttctttagccacttcttccacattactaagggctctcttgccgagtttcaacgtctagtccacgacacggaccttcctacttttctatcttcttattttctctactaaattggtatctggtactgaagatatgcggattgtgattttgtgcctgtctaaactaaccctattctagggttaggtgggtaccatatactaatggtgaacaggattacctatgtatccattagtccctatggatctggcgacccacaaactcatgttcatagagaggctaagctgagtgctcgccgaataagcattgcttcaggtgccgactattgtctggaaaccactcagtgatagctataggggggggccccgtagcatctgccttactgcctgatagggtggcggctggtccatgaacatgcagtaaccagttgacttgac

SEQ ID NO: 576 - DNA, 538 bp, Rosavirus C
  strain NFSM6F polyprotein gene, complete cds.1
cagggagatctccatgaataatcttttccaccctctttagcgtctatgctattgaggacgggttggagccccgttgacccagcgtcagagtgtgtcggtagcaggctttctgctctcgccccatgccggccacacctcccattagtgatgtgaaggttgtaagttacatgtgaaaaggtttctaataattgagctgaatgtagcgattacctaaggtgagcggattcccccacgtggtaacacgtgcctctcaggccaaaagccaaggtgttaaaagcaccccttaggtaggccactaccccgtggcctcagttctcttagaagattcacttagtagtgtgtgcactggcaactcttaagcagagctagtgagtgggctaaggatgccctgaaggtacccgcaggtaacgttaagacactgtggatctgatcaggggctcgagtgctgaagctttacagaggtagctcgagttaaaaaacgtctatgcccctcccccacgggagtgggggttcccccacaccaattttagattgcact

SEQ ID NO: 577 - DNA, 539 bp, Bovine rhinitis A virus 2
  isolate H-1 polyprotein gene, complete1
tttgttttgcggctttgccgttgttcgggttttacctgttttcacacagcaaaacaggccttctagtttcgtgcttaaacgagatcatgctcgaactagaactacatagctggtcactggactcataccacaccttgtggagctttatgggaaaggtggctagtgggctgtggaagtgactctgaccacatgcctctcaagtgtgggaaatcacggatcggtgtagcgacgacaacaggccttgggacaccctctccagtaatggagacccaaggggccaaaagccacgcctcgtgccctgttgttcacaaccccagtgcgacccgtgttagtacctatttgcgagaactgtgtctggacagctaaacacaaccctagtgggagactaaggatgcccaggaggtacccggaggtaacaagtgacactctggatctgacctggggagagagggcttgctttacaggcgcctctctttaaaaagcttctatgtctcatcaggcaccggaggccgggccttttccttttaaaattacactta

SEQ ID NO: 578 - DNA, 539 bp, Bovine rhinitis A virus
  strain MexB15 polyprotein gene, partial1
tttgtttcgcggctctgccgctgttcgggttttacctgttttcacagagcaaaacaggacatctagtttcgtgcttaaacgatatcatgctcgaactagaactacaatgctggttaccgaacccgcaccacaccttgtggaactttgcggggaaagtgactagtgggctgtagaagtgactctgaccacatgccccatcagcgtgggaaaccacaaatcggtgtagcgacgacaacaggccttgggacaccctctccagtgatggagacccgaggggccaaaagccacgccttgtgccctgttgttcacaaccccagtgcgatttgtgttagtacctactcatgggaattgtgtttggacagctgaacacaaccctagtgggagactaaggatgcccaggaggtacccggaggtaacaagtgacactctggatctgacctggggagagggggcctgctgtacaggcgcccctctttaaaaaacttctatgtctcatcaggcaccggaggccgggccttttccttttaaaacaacatttt

SEQ ID NO: 579 - DNA, 540 bp, Human rhinovirus A
  strain HRV-A36_p1163_sR2897_2009_g2 polyprotein1
taactttgtgtttgactcccctaacatgtaacttagaagtttgaacgataagaccaataggtgataatcatccagattatcaaaggtcaagcacttctgtttccccggtcgatgaggatatgctttacccgaggcaaaaaccttagagatcgttatccacacactgcctacacagagcctagtaccacttttgacgtaactaggttggtcgctccctgcaaacccagcagtagacctggcagatgaggctggacgttccccactggcgacagtggtccagcctgcgtggctgcctgctcaccctattgggtgagaagcctatttattgacaaggtgcgaagagccgcgtgtgctcagtgtgcttcctccggcccctgaatgtggctaaccttaaccctgcagccgctgcccataatccaatgggtttacggtcgtaacgcgtaagtgcgggatgggaccaactactttgggtgtccgtgtttcttgtttttcctttatttgcattttatggtgacaatttatggtatatagattgtcatc

SEQ ID NO: 580 - DNA, 541 bp, Ovine picornavirus
  genome assembly, complete genome: monopartite.1
aaaatggggtgcatatagcatggttcccatgctgtatgctaccccattttcttccctccccctccaactaccttttccccctctattgtaacttagaagctaatacacatagcccaataggggcaccacacccagtggtgtatagggcaagcacttctgtttccccggctttgccgttaacccccacagtactacgcgactgttagtaggtaacgtaactagtgaaggttgatccggaggtaaaccccaacctccagaaacgtgagatgagggttcagtaaccccctatggtaacatagactgatccctgcgctggctcacgggcttcgtgcactgaatctaggtaaagttactgaagccacgagtgtgctactgtggtttcctccagcgccttgaatgcggctaaccctaaccccggagcacatgcatataatccaatatgtagtgtgtcgtaatgagtaattctgggacgggaccgactactttaggttgctgtgtttcctttatttttatatatcaatttatggtgacaagttacaag

SEQ ID NO: 581 - DNA, 541 bp, Human rhinovirus A
  strain HRV-A75_p1038_sR149_2008 polyprotein1
ccagttttatctcccccccccttttatgtaacttagaagttctgcacaccgaccaatagtgaacaatcagccagattgttttaggtcaagcactcctgtttccccggtcaacgttgatatgctccaacagggcaaaaacaacagcgatcgttatccgcaaggtgcctacacagagcctagtatcatcttagaagaattgtggttggtcgctcagttgcaaacccagcaatagacctggcagatgaggctggacattccccactggtgacagtggtccagcctgcgtggctgcctgcacacctctatgaggtgtgaagccagaatttcgacaaggtgtgaagagccgcgtgtgctcaccttgagtcctccggcccctgaatgcggctaaccttaaacccgcagccatggtccacaaaccagtggatgtgtggtcgtaatgagtaattgtgggatgggaccgactactttgggtgtccgtgtttcctgtttttctttttatactgcttatggtgacaatatatataggatatatattgacacc

SEQ ID NO: 582 - DNA, 542 bp, Bovine rhinovirus 1
  strain SD-1, complete genome.1
acgatctttgcggctctgccgccgttcgggttttacctgttttcacagagcaaaacaggacctctagtttcgtgcttaaacgagatcatgctcgaactagaactataacgctggtcactggacccgtgccgcgccttgcggatctttgcgggaatggtggctagtgggctgtggaagtgactctaaccacacgcccctcaagtgtgggaaaacacgaactggtgtagcgacgacgataggccttgggacaccctctccagtgatggagacccaaggggccaaaagccacgccttgtgccctgtcgttcacaaccccagtgcagttcgtgccagtacctgcttttgggaagtgtgctttggacagctgaaaacagtcctagtgggagactaaggatgcccaggaggtacccggaggtaacaagtgacactctggatctgacttggggagagcgggtctgctttacagacgccactctttaaaaaacttctatgtctcgtcaggcaccggaggccgggccttttcctttaaaacaatacacttt

SEQ ID NO: 583 - DNA, 542 bp, Human rhinovirus A
  strain HRV-A01_p1103_sR1167_2009 polyprotein1
cccccccctccccaacccttttatgtaacttagaagtttctaaacacaagaccaatagcaggcaactctccaggttgtctaaggtcaagcactcctgtctccccggttgacgttgatatgctccaacagggcaaaaacaactgatatcgttatccgcaaagtgcctacacagagcttagtagtgctctgaaagatttttggttggtcgctcagctgcatacccagcagtagaccttgcagatgaggctggacattccccactggtaacagtggtccagcctgcgtggctgcctgcacacctctcacgaggtgtgaagccaaagattggacagggtgcgaagagccgcgtgtgctcactttgagtcctccggcccctgaatgcggctaaccttaaacccgcagccatggttcacaaaccagtgaacttatggtcgtaatgagcaattgtgggatgggaccgactactttgggtgtccgtgtttcactttttcctttattgattgcttatggtgacaatatatatatagatatatattggcatc

SEQ ID NO: 584 - DNA, 544 bp, Mengo virus
  strain AnrB-3741, complete genome.1
atgtggtcgaagccacttggaataagaccggcgtgcgcttgtctatatgttacttccaccacattgccgtcttttggcaatgtgagggcccggaacctggccctgtcttcttgacgaacattcctaggggactttcccctctcgccaaaggaatgtaaggtctgttgaatgtcgtgaaggaagcagttcctctggaagcttcttgaagacaaacagcgtctgtagcgaccctttgcaggcagcggaaccccccacctggtaacaggtgcctctgcggccgaaagccacgtgtataagatacacctgcaaaggcggcacaaccccagtgccacgttgtgcgttggatagttgtggaaagagtcaaatggctttccccaagcgtattcaacaaggggctgaaggatgcccagaaggtaccccactggttgggatctgatctggggcctcggtgcaggtgctttacacctgttgagtcgaggttaaaaaacgtctaggccccccgaaccacggggacgtggttttcctagaaaaccactatgacaat

SEQ ID NO: 585 - DNA, 546 bp, Human pegivirus
  gene for polyprotein, isolate 56330265.1
ggggggttgatccccccccctcggcactgggtgcaagccccagaaaccgacgcctatctaagtagacgcaatgactcggcgccgactcggcgaccggccaaaaggtggtggatgggtgatgacagggttggtaggtcgtaaatcccggtcaccttggtagccactataggtgggtcttaagagaaggttaagattcctcttgtgcctgcggcgagaccgcgcacggtccacaggtgttggccctaccggtgtgaataagggcccgacgtcaggctcgtcgttaaaccgagcccgttccccacctgggcaaacgacgcccacgtacggtccacgtcgcccttcaatgtctctcttgaccaataggcgtagccggcgagttgacaaggaccagtgggggccgggggcctggagagggactccaggtcctgcccttcccggtgggccgggaaatgcatggggccacccagctccgcggcggcctgcagccggggtagcccaagaacccttcgggtgagggcgggtggcatttctcttttctataccatc

SEQ ID NO: 586 - DNA, 548 bp, Bat sapelovirus
  strain Henan-Mr221 polyprotein gene, complete cds.1
ggtaaactggtgttgcggcaccagtttatcctcatctcatttcccccctccccctccaaataccttttccccctcaatcggacggattctcaggcttaaacggtggaggataccccttcaaggtccgcaggtgccaagtctaaaacctgaattggaagccctttgctatcagctcatttggccgataacccctgaccgggtgtgtaggacaattgagacgctctgggtgtacgactgcctatggtagaggtagagtgtacaagtaaaggctcctttttggataccgctaggcgaatgttgagatttctcctaccctagcacttgtgcatatgactaaggggggggccccttagtttgtctactgctgcctgacagggtcgcggctggccgaccataggtagtatagtcagttgatttaacacatggattgcttcaagttccttacaacctacaaacaaaccttcaaagctcaccagtgccaccagtattggttcactgtgtgtgaacaaaaacaagtaactgtagcaaagaagagccccggccccaaa

SEQ ID NO: 587 - DNA, 548 bp, Turkey avisivirus
  strain turkey/M176-TuASV/2011/HUN polyprotein1
ttcactcgctttccccccctctctataggggcggtcttttaattcttattaatttcctactttactatcaaatttcttctaagtagggactgaggtcacttagccctccctctcctgggctttccagggttatagaggttctaaagctaagccatgtgtcttgagctacacttagtacaaaggtttagtaatgattgtacatgccagtaaccttctagtgcccatggattaaagagtggtaacactctccatggggcccgaaaggctagtgggcatagttggcatcaaggaaggggtccccaccccaacctgaattgctggctagaagctcaccttagaagaagtgctgggtgacaacgtgtccaatcgtgaacgactgatggaaacgtgtggagatggatatgtgggggttcactgagtagatgccctgaaggagaaatctgatcaggggcccgtgactatacgctaggtaaaccgggtataaaaaccatgaaaggtggcccaaaatctcttccttttattttatttctatgttggtgacagtcaag

SEQ ID NO: 588 - DNA, 548 bp, Human parechovirus 1
  isolate ETH_P16_2016 polyprotein gene,1
gatacactattcgaaggcatctagcaataagaagagtggatttagggcgcttaaagcatagtgcaaataatcatttctagcctgtgttttacacagggtggcagatggcgtgccataactctactagtgagataccacgcttgtggaccttatgctcacacagccatcctctagtaagtttgtaaagcgtctgatgacgtgtgggaacttattggaaacaatagtttgctgcaaagcatcctactgccagcggaataacacctggtaacaggtgcctctggggccaaaagccaaggtttaacagaccctttaggattggttcaaacctgaactattgtggaagatatttagtacctgctgatttggtagttgtgcaaacactagttgtaaggcccacgaaggatgcccagaaggtacccgtaggtaacaagtgacactatggatctgatctggggccaactatctctatcttgatgagttggttaaaaaacgtctagtgggccaaacctgggggggaccccagtttccttttattttataatgccact

SEQ ID NO: 589 - DNA, 548 bp, Human rhinovirus A
  strain HRV-A18_p036_s2916_1999_g1 polyprotein1
catgtacgccagttttatatcccctctccccttttgtaacttagaagataagcacaaagaccaataggtggtggctatcccagtcactaaaggtcaagcacttctgtttccccggtcgatgttgatatgctccaccagggcaaaaacaacagagatcgttatccgcaaagtgcctacacaaagcctagtaacactttgaatggtatgtggttggtcgctccgctattccccatagtagacctggcagatgaggctagaaatcccccactggcgacagtgttctagcctgcgtggctgcctgcgtgtcctaacgggcacgaagccatatacttgacaaggtgtgaagagccccgtgtgctcactttgagtcctccggcccctgaatgtggctaaccctaaccctgcagctgaggcacacaacccagtgtgaactcagtcgtaatgagcaattgcgggatgggaccaactactttgggtgtccgtgtttcacttttttttcttttataatgcttatggtgacaatatataacaatttatatattggcacc

SEQ ID NO: 590 - DNA, 548 bp, Human rhinovirus A
  strain HRV-A67_p1130_sR2849_2008 polyprotein1
cgtgaagccagttttgccacccttccctaatatgtaacttagaagtttgagcaacaagaccaataggtgataatcatccagattatcaaaggtcaagcacttctgtttccccggtcgatgaggatatgctttacccaaggcaaaaaccttaaagatcgttatccacacactgcctacacagagcctagtaccacttttgatgtaattaggttggtcgctccctgcaaacccagcagtagacctggcagatgaggctggacattccccactggcgacagtggtccagcctgcgtggctgcctgctcaccctattgggtgagaagcctacttattgacaaggtgtgaagagccgcgtgtgctcagtgtgcttcctccggcccctgaatgtggctaaccttaaccctgcagccgctgcccataatccaatgggtctacggtcgtaacgcgtaagtgcgggatgggaccaactactttgggtgtccgtgtttcttatttttcctatatatttgcttatggtgacaatatataattacttgtatattggcacc

SEQ ID NO: 591 - DNA, 550 bp, Human parechovirus 8
  isolate ETH_P25_2016 polyprotein gene, partial1
ggaccccattattcgagggcatctagcaataagaactggagattaaggacgctcaaagcatagtgtaagtattcttttctaacctgtgttttacacagggtggcagatggcgtgccataaccctattagtgagataccacacttgtggaccttatgctcacacagccatcctctagtaagtttgtaaggcgtctgatgacgtgtgggaacttgttggaaataatggtttgctgtaaagcatcctactgccagtgggtaaacacctggtaacaggtgcctctggggccgaaagccaaggtttaacagaccctttaggattggttcaaacctgaactattatggaagacacttagtacctgctgatttggtagttgtgcaaacactagttgtaaggcccacgaaggatgcccagaaggtacccttaggtaacaagtgacactatggatctgatctggggccaaccacctctatctcggtgggttggttaaaaaacgtctagtgggccaaacccaggggggaccctggtttccttttatttatcataaacaat

SEQ ID NO: 592 - DNA, 550 bp, Coxsackievirus
  A7,strain VEN/2018-23121A polyprotein gene, partial1
tatcagtagactgcttacgcggttgaaggagaaaacgttcgttacccggctaactacttcgggaaacctagtaacaccattgaagctgcagagtgtttcgctcagcacttcccccgtgtagatcaggtcgatgagtcactgcaaacctcacgggcgaccgtggcagtggctgcgttggcggcctgcctatggggtaacccataggacgctctaatgtggacatggtgtgaagagtctactgagctggttagtagtcctccggcccctgaatgcggctaatcctaactgtggagcgcatacttccaaaccagggagcagtgcgtcgtaatgggcaactccgcagcggaaccgactactttgggtgtccgtgtttccctttattcttatattggctgcttatggtgacaattgaagagttgttaccatatagctattggattggccatccggtgtgcaacagagcaattatatacctatttgttggatatattccactgacatttaagtcactcaatactctacagtacatcttgaatttaaacaccagaaa

SEQ ID NO: 593 - DNA, 550 bp, Rhinovirus C
  isolate E0-165 polyprotein gene, partial cds.1
ggctcttccgatctgccgcaactttctttcactctttgtttctggtaatttagaagttgacacagagtccaatagggtgcagctaatccaagactgctacggacaagcacttctgtctccccgggtgtgtgaatagactctaacagggttgaagctgtagcactcgttatccgcacaactactacgcgaatgttagtaacaccctctaagtatagtgggatttcgctccgcagataccccatctgtagattggggtaatgaggctacacataccccactggcgacagtggtgtagcctgcgtggtgccctacctggggttctttaccccaggattccactttactgacagggtgtgaaggcgctagtgtgctagttgtgagtcctccggtccctgaatgtggctaatcctaaccccgtggccattacatgtaacccaacatgcagatggtcgtaacgagtaatcacgggatggaaccaactactttgggtaaccgtgtttcctgttttactttaatgtgtgtatcttatggttacaactatagagtaacc

SEQ ID NO: 594 - DNA, 551 bp, Encephalomyocarditis virus type 2
  isolate RD 1338 (D28/05)1
aaatactggtcgaaaccgcttgggataagaccggggtttgttaatgtctcaatgttattctccacccaattgacgtcttttgtcaattggagggcagtgaaaccttgcccttgcttcttgcagaggattcccagtggtctttccgctctcgacaagggaattcatgatccaccaaaagttgtgaagagagcaggtcccatggaagctttctgacgactgatgatgactgtagcgaccctttgcaggcagcggacccccccacctggtgacaggtgcctctgcggccaaaagccacgtgtttaacagacacctgcaaaggcggcacaaccccagtgcctcatcaaaagtctgatgactgtggaaatagtcaaccggcttttcttaagcaaatttggtgtcggggctgaaggatgcccggaaggtaccacactggttgtgatctgatccggggccacagtacatgtgctttacacatgtagctgcggttaaaaaacgtctaggccccccgaaccacggggacgtggttttcctttgaaaaccacgattacaat

SEQ ID NO: 595 - DNA, 552 bp, Coxsackievirus
  A24, clone V19C2 polyprotein gene, partial cds.1
agactgtacccacggttgaaaacgactgatccgttatccgctttagtacttcgagaagcctattaacaccttggaatcttcgatgcgttgcgctcagcactcaaccccagagtgtagcttaggtcgatgagtctggacatacctcaccggcgacggtggtccaggctgcgttggcggcctacctgtggtccaaagccacaggacgctagttgtgaacaaggtgcgaagagcctattgagctactaaggagtcctccggcccctgaatgcggctaatcccaaccacggatcaggtgctcacgagccagtgagcggcctgtcgtaacgcgcaagtctgtggcggaaccgactactttgggtgtccgtgtttcctttttaactttatcatggctgcttatggtgacaatcgaagattgttatcataaagcgaattggattggccatccggtgaaaattaaatatatagtttacctgtttgttggatttattccactaacacaacatacttggaaattactcaactttgtgttgttaatcagacactgttaccaca

SEQ ID NO: 596 - DNA, 552 bp, Human rhinovirus A
  strain HRV-A55_p1275_s6474_2000 polyprotein1
ttccggtaactttgtatgccagttttatcacccttcccccacgtaacttagaagatgtacacttggaccaataggcgataatcctccagattatctaaggtcaagcacttctgtttccccggtctaaactgatatgctccaacagggcaaaaacagtgcagatcgttatccgcaggatgcctacgcaaagcctagtaattcctttgaagatatttggttggtcgttccactattccccatagtagacctggcagatgaggctagaaactccccactggcgacagtgttctagcctgcgtggctgcctgcacaccctcttgggtgtgaagccaaatattggacaaggtgtgaagagccccgtgtgctcatcctgagtcctccggcccctgaatgtggctaaccttaaccctgcagctagtgcatgcaatccagcatgtagctagtcgtaatgagtaattgcgggatgggaccaactactttgggtgtccgtgtttcactttttaccttatatttgcttatggtgacaatatatatagtatatatattggcatc

SEQ ID NO: 597 - DNA, 553 bp, Bovine picornavirus
  genomic RNA, complete genome,strain:1
ttgaaagacctcggcatatatcgttgtcacaacggtatatgtcgagatctttctccccaccccctccaattcccttttccccctcttgcaacttagaagtttgtacacacagggcaataggatacgtgatccagccaggacacgtgagctcaagcacttctgtttccccgtccccttcacgtactacgggaatgttagtaatttgtgtgcactttagtaaggttgatccgggattaaccccaaatcccagaaactggtgatgagcgttaccacccccgccgggcgaccggaaggtttcgctgcgttggcaccagggcttcggcaccagaaaaaggtaaagcaaatgaaggcgctactgtgctacgagaagtttcctccaggcccctgaatgcggctaatcctaaccagtgatccaccggtgcaaaaccatgtactaggtggtcgtaacgcgcaagtcgctggcggaaccgactactttgggtgtcctgtgtttccatattttattttattcaattttatggtgacaagagtaaagagatacagatttgcagcc

SEQ ID NO: 598 - DNA, 554 bp, Human rhinovirus A
  strain HRV-A23_p1216_sR3071_2008 polyprotein1
taggtaactttgtgtttgatgccagttttatcctcccctcccccatgcaacttagaagttttgcacagagaccaataggcagtaatcatccagattacttacggtcaagcacttctgtttccccggtcaaagttgatatgctccaccagggcaaaaacagctgcgatcgttatccgcaaagcgcctacgcaaagcttagtagcattctggaagttgtctggctggtcgctccaccatttcccctggtagacctggcagatgaggctagaaattccccactggcgacagtgttctagcctgcgtggctgcctgcacaccctctgggtgtgaagccatacaatggacagggtgtgaagagccccgtgtgctcgctttgagtcctccggcccctgaatgtggctaaccttaaccctgcagctagagcacacaatccagtgtgtttctagtcgtaacgagcaattgcgggatgggaccaactactttgggtgtccgtgtttccttgttttctttaaatatttgcttatggtgacaatatatacgcatatattgacacc

SEQ ID NO: 599 - DNA, 554 bp, Human poliovirus 1
  strain 3788ALB96 polyprotein gene, partial cds.1
gtataggctgtactcacggctgaaaacaaacgatccgttatccgcttaggtacttcgagaagcctagtaccatcttggaatcttcgacgcgttgcgctcagcactctaccccgagtgtagcttaggctgatgagtctgggcgttccccaccggtgacggtggcccaggctgcgttggcggcctacccatggctcacgccatgggacgctagttgtgaacaaggtgtgaagagcctattgagctacctaagagtcctccggcccctgaatgcggctaatcctaaccacggagcaagtgccttcagcccagaaggtagcttgtcgtaacgcgcaagtctgtggcggaaccgactactttgggtgtcccgtgtttccccttattttcattgtggctgcttgcgggactataattgattgccatcataaagcgatttggattggccatccggagaaagttaaacacgttgtttatttattcgttggattcacctcattaacccaaattacacccagcttgatatatatagtgttgccgactagacaaaatcaccacca

SEQ ID NO: 600 - DNA, 557 bp, Jotan virus
  isolate OTU7 RNA-dependent RNA polymerase gene,1
atcttattaacaatacgtattttaaaagctcttactctagtaagggtatgtggttaacataggatgtaatacccatttatggatattgcatcttgtggagttagtcctcacacatacttgtctagcacctgcattccaaggagtatttgcgaaaatcttattcttaaaaccaattcttaattttaagtacaaacctcgcagaacttacaaatcgtgctcacgccttttgttctatttagttaatttgtatttgaagaatttagacgaataatataacgtgcttattattcacgagaccctctaacgtttttaacgcattgatctcgtaaaatctaaagactgatcttacattgatattgaattaaactaaagaaacgcaccacgacagtagtgtggccttactgttaaaacaactaggcctaacgagtatttctaactgtgacgttcgatgaattattccgaactatgtactaactgatctaaatcgttgttctacaaggaacgtttcaccgcctcaatagatcctaactatagaggaaaagaaacaacaaacaaac

SEQ ID NO: 601 - DNA, 557 bp, Fathead minnow picornavirus
  strain 09-283, complete genome.1
ttgaaagagagtccatacggggaactgcggttctcctattggattctgctttcacagtttctgagcactggtaagagcttagacaaacgtttttaaaatttattttctctgcaacttttgtttgtgtttatttttatttgttaattttgtgcctaaacatttgttgcgaagtatttgattcattagcaatattcattattgtttatttagatggcattcaaagtggtgggagtatcgaacccaagcgtcgtatgttatctccttgaataattttggattttttcgacatgatcattgaaaaggataagtgtttaagaactcaaggagtgttaacaatggtgggtgacaggtgtccccatataatttgttaacatgatttggactggttatctagtaagaagaaccatcgaacgcacgagcgagcattgcttgcggggcagttaccctgcgtcgatgtaagtgtgtaccggggggtgcacatgttgattctttatggcctgatagggtgcgtcattcgcgcctagataattagtataatgcgaatggaataaatttac

SEQ ID NO: 602 - DNA, 557 bp, Foot-and-mouth disease virus
  type A, isolate A/ALG/3/2017, partial1
acaagttcagcagttttgcccgttttcaggagaaacgggacgtcagcgcacgaaacgcgccgccactttcggaacacttgtacaaacacgatctgacgcaggtatccctaactggcattctcgtgcaacttggagtctcgcctggtctttccaggtctagggaggcaacactttgtactgaaaccaactccacaactggtctactggcgggtgctagtaacgactttgttgcttcgtagcggagcatgcgagccgcgggaactcccccctggtaacagggacccgcggggccgaaagccacgtccctcggacctcgcatgtgtgcaaccccagcacggcaacactgtagtgaaacacactttaaggtaacactgagactggtacttggtttctggggacaggctaaggatgccctccaggtaccccgaggtaacaagcgacactcgggatctgaggaggggactggggcttctataaaagcgcccagtttaaaaagcttctatgcctgaataggtgaccggaggccggcaccttttcttttgtacacgaatcacttt

SEQ ID NO: 603 - DNA, 557 bp, Coxsackievirus
  A14, isolate ETH_P25/A14_2016 polyprotein gene,1
ggataaagaggctactcacgtggttgaaggagaaaacgtccgttacccgactaactacttcgagaaacctagtagcaccattgaacctgcggagcgtttcgctcagcacttcccccgtgtagatcaggctgatgagtcactgcactcctcacgggcgaccgtggcagtggctgcgttggcggcctgcctatggggcaacccataggacgctctaaagtggacatggtgcgaagagtctattgagctagttagtagtcctccggcccctgaatgcggctaatcctaactgcggagcgcataccctcaatccagggggtggtgtgtcgtaacgggcaactctgcagcggaaccgactactttgggtgtccgtgtttccttttattcttacactggctgcttatggtgacaattaaagaattgttaccatatagctattggattggccatccggtgtgcaacagagcgatcatttactcctttgttgcttttattcccttgaacttcacttctttgagcacactaaattatatactccatctcaactccaagaagcgagt

SEQ ID NO: 604 - DNA, 558 bp, Picornaviridae sp.
  isolate muf160pic1 genomic sequence.1
tttgtggggtgggctcccactttattcatagcccatctgctctgactctacctattgacccgtaactggtactcgtttgagattgactggtttaaagattttggtgtggttctttaggaaggattagctcgatcctttaggtgggacttatttttaccactacagagcacctatgattagttatagacagtggaggaaccattagtaactctttggaatgcgtaactgctaatcctgtgcccttggccaagacatagtaatatgttccaaggggcccaaaaggctagtgggtaaaaacccacctgggatggtcacttctgtgaattctgattagtgaagtttggattccgaatcctgtctagctaaaagtggggttagatggcactgagtagatgccctggaggtaccaattgatctgaccaggggcctagatacttaatgctaggttaaaaactatgaaaggtaagccatcgaaaattattttcctatttttactttgtttaactgattagtgaaatttactaatatttagctaggccttgctttattttattaagg

SEQ ID NO: 605 - DNA, 560 bp, Red-capped plover megrivirus
  polyprotein gene, complete cds.1
gggggttttccccctgggagtcttttccgttgggtctgtggcttggttgaaccatggatctggcgttagccggcatagtggtctgcggaaaagggccctcacgcggctgcggcttcgtgagctgttcttttccactagtgggccatctatgttggtataagctcaaccacccaaattttgtaacggccaattaagcttaggtcccgcacagattcgttctggcgtgctttataggaataggcggtctgactcggttttgtcttgacaactctcttgtttttccctttggctttgttttctttttaggctaacggttcagccttgttcagaacggccctatggcaagtgggcctagtaggttcttggtgttttccgttagtcgacccatccatagtgctagactaggtgggcgtgaggtaaaacgggacgcgtttttcgctatcccaatgaccggacctctgttgaatgcgctggatctccgcgtagccagaggaaaccacccgaaccctgatggcaactgacggtagtagggctcgtagtcagcctcatgttacccgtgg

SEQ ID NO: 606 - DNA, 560 bp, Hepatovirus G2
  isolate M32Eidhel2010 genomic sequence.1
gtcatgtttctctttaagaacactcaattttggccataagtgagactcttgtcgaacctttcatgtcaggaccatgttagggccattatccttttccctggggcattcttcttgcccctgtttcatctttctatcatctttcttccgggctctcacaatgccaatggagcgaccgatgcgcacgtcggggttaacccatggattagccatgggctgtagctgctaaaagttgtgactcctgaagcatactatcaatggtagtagatgtaactgaaacactgaagcttctctgatcttgaaagaagggtaggctacgggtgaaacccttcaggttaatactcatattgagagatacctttggtaggttaacgttggcggataatgttgagtttaacgacaataaacattcaacgcctgtgggcgaacctcaccaatttcatgctttgaagtgaatgtgcgtagggtctctatcggagatgctatgtggatggtgccctccctggaaacaggttgtaggggtactcaggtgcacttaggtttccacattttaaagatttttc

SEQ ID NO: 607 - DNA, 560 bp, Tortoise rafivirus A
  strain WHWGGF74766 polyprotein gene, complete1
tgcgaatttattcgcacagtctcttttcccccatcttgtgtgtgtgatggggtaagccgcagagtaatacctactctgctgcaaacacactcactcttttctatctactttatatcatgtaataataagtagggaacatattcaattcatattgttcatctcactgaacccgcatgaaggactgcattgcatatcctggacgaagtgacgtggaatatttggacatttatggattggacaccattacgctttgtgcctctacggagatgtaaccataatcttaagtagtagtaccccagcacaagaggataaagtggcatacacgacaacgggtgttgctcgcaccttagtaatgtggatgttcacccttggagcgtgctgaaactctgtgggtaaagacacacattagtacaaatgtgggggaactcactgaaagggcatgtcccgtgtactggtgtgccggaaagtgggggtcgctttctggagaacttagtagttcttgttattgggtgatagccttgcggcggatcaactcacagttttaatccgttgttttgcat

SEQ ID NO: 608 - DNA, 560 bp, Enterovirus A71
  isolate DK16-06 polyprotein gene, partial cds.1
tccccggactgagtatcaataggctgcttgcgcggctgaaggagaaaacgttcgttacccggccaactacttcgaaaagcctagtaccaccatcaatgaggcagagcgtttcgctcggcactaccccagtgtagatcaggctgatgagtcactgcaatccccatgggcgaccatggcagtggctgcgctggcggcctgcccatggaggaatccataggacgctctaatttggacatggtgcgaagagcctattgagctagttggtagtcctccggcccctgaatgcggctaatcctaactgcggagcgcacacccacaaaccagtgggcagtgcgtcgtaacgggcaactctgcagcggaaccgactactttgggtgtccgtgtttccttttattcctatattggctgcttatggtgacaaacgaagagttgttaccatatagctattggattggccatccggtgtgtaacagagcaattgtctatcagttcgttggttttgtaccattacattaaagtccttaacacattacatttatcttgaccctaaatacaaaagc

SEQ ID NO: 609 - DNA, 560 bp, Human rhinovirus C30
  strain USA/2015/CA-RGDS-1045 polyprotein gene,1
cggtacacttgcacgccagtttgcctccctttccctttcccttgccaaacccccttggaacttagaagcaatacattagaccaataggaggtaacgatccatgttacctaaggtcaagcacttctgtctccccggtatgcgtggaataaacagtgcaaacggttgaagccacaattatcgttatccgcgcacaaactacgcagagcctagtactaccctgaaagtctgtaggttggtcgatcagctaatccccatagtagacctggcagatgaggcaagacactccccactggcgacagtggtcttgcctgcgtggctgcctgcacaccctctggggtgtgaagcctactgacggacagggtgcgaagagccgagtgtgctttgtgtgagtcctccggcccctgaatgcggctaatccaaccccacagctgtggcatacaagccagtatgtacgcagtcgtaacgggtaactgtgggacggaaccgactactttgggtgtccgtgtttcctgtttttctttatatatatgcttatggtgacaatagtgaatattgttacc

SEQ ID NO: 610 - DNA, 561 bp, Avisivirus
  Pf-CHK1/AsV, complete genome.1
cattcccctttccccagccatgggttaaatggcccctcaccaggttcggtgctgtctaggcttccagtaaagaagtcaaccgagcattgaacaaaacctcagtgggtatggtagttaaccccgtccactggacaactttgtcctcttaaaagtggatcaatccaccccaactccccccctagccacctgagccatggtggatagcagtgacgaaactagggaccccaatacctctagtgccaagagaattcccccctcgcgagaggtgctcttgggcccgaaaggctagttggcagggtgaagtgaaggaagctgctagcgtggcaaccttaagcgtagcccgaagctgaccttagaggttaaccctagtggaccactggatgaagctgtggaggtggtggataggaaagttggccacttgtgagtagatgcccagaaggcataaggctgatctggggccagtgactataccgttccggtaaacctggtataaaaaccatgaaagcaagtgggtttaaaatttcttctaattccttcatttcagtagtgataactggcaga

SEQ ID NO: 611 - DNA, 564 bp, Poliovirus type 2
  mRNA for polyprotein, strain PV2_6526-1_ISR06.1
tgacgttgcatagactgctcacgcggttgaaagcgattgatccgttatccgcttgtgtacttcgagaagcctagtatcgccttgggatcttcgacgcgttgcgctcagcacccgaccccggggtgtagcttaggctgatgagtctggacattcctcaccggtgacggtggtccaggctgcgttggcggcctacctatggctaacgccataggacgctagatgtgaacaaggtgtgaagagcctattgagctacacaagagtcctccggcccctgaatgcggctaatcctaaccacggagcaggcggtcgcaaaccagcgattggcctgtcgtaatgcgcaagtctgtggcggaaccgactactttgggtgtccgtgtttcctgttatttttatcatggctgcttatggtgacaatcagagattgttatcataaagcgaattggattggccatccggtgagaattgtgtcaagcgtacaactgtttgttggaatcactgtgttagctttaattctcatttaaccgattaatcaaaactacacgagaacaaaacactagcatcact

SEQ ID NO: 612 - DNA, 565 bp, Coxsackievirus
  A9,strain VEN/2018-23122 polyprotein gene, partial1
ttaccccggactgagtatcaatatgctgctcacgcggctgaaggagaaaacgttcgttacccggccaattacttcgagaaacctagtaccaccatgaaggttgcgcagtgtttcgctccgcacaaccccagtgtagatcaggccgatgagtcaccgcaatcctcacgggcgaccgtggcggtggctgcgttggcggcctgcccatggggcaacccatgggacgcttcaataccgacatggtgagaagagtctattgagctaattggtagtcctccggcccctgaatgcggctaatcctaactgcggagcagatgcctgcatgccagcgggtagtctgtcgtaacgggcaactctgcagcggaaccgactactttgggtgtccgtgtttccttttattcttgtgttggctgcttatggtgacagttgagaagttgttaccatatagctattggattggccatccgttaacaaatagagcaattatcttctcttttgttggattcgttccactgaattacaaggcactaaacacacttaatttcattttaatacttaacacatcaaa

SEQ ID NO: 613 - DNA, 565 bp, Human poliovirus 2
  gene for polyprotein, isolate pv2_6056-3T_ISR04.1
tgacgttgcatagactgctcacgtggttgaaagcgatcgatccgttatccgctcgcgtacttcgagaagcctagtatcgccttggaatcttcgatgcgttgcgctcagcgcccgaccccggggcgtagcttaggctgatgagtctggacgttcctcaccggtgacggtggtccaggctgcgttggcggcctacctatggctaacgccataggacgctagatgtgaacaatgtgtgaagagcctattgagctacacgagagtcctccggcccctgaatgcggctaatcccaaccacggagcaagcggtcacaaaccagtggctggcttgtcgtaacgcgcaagtctgtggcggaaccgactactttgggtgtccgtgtttcctgttatttttatcatggctgcttatggtgacaatctgtgattgttatcataaagcgatttggattggccatccggtgagtgttatatcgaatacttgactgtttgtcagacccactgtattagaatcacttcatatttaagtagtcaatcaaaaacagcacgaagataagacaatagtaccaca

SEQ ID NO: 614 - DNA, 565 bp, Human poliovirus 2
  gene for polyprotein, isolate pv2_6316-1T_ISR05.1
tgacgttgcatagactgctcacgcggttgaaagcgatcgatccgttatccgctcgcgtacttcgagaagcctagtatcaccttggaatcttcgatgcgttgcgctcagcgctcgaccccggggcgtagcttaggctgatgagtctggacgttcctcaccggtgacggtggtccaggctgcgttggcggcctacctgtggctaatgccataggacgctagatgtgaacaaggtgtgaagagcctattgagctacacgagagtcctccggcccctgaatgcggctaatcctaaccacggagcaagcggtcacaaaccagtgactggcttgtcgtaatgcgcaagtctgtggcggaaccgactactttgggtgtccgtgtttcctgttatttttatcatggctgcttatggtgacaatctgtgattgttatcataaagcaatttggattggccatccggtgagtgttgtatcgaatacttgactatttgccaggactactatattaaattcattttatatttgagaaatcagttaaaaacagtaggaagataaaacaataataccaca

SEQ ID NO: 615 - DNA, 566 bp, Rosavirus B
  strain rat08/rRoB/HUN, complete genome.1
tgtcttctccggatgctgttacagcatgtggacccaggagtgttttaagtgatcttctacagtctctttagtgtctatactttagagagcggtgaactgacaccgttgcttcttgcacagcccttcgtgctggtctttccggttctcgacagcgttgggcatcatggctagtcaggctaagatagcagatgatttagtgaaaagttttggattgtttggagctttgtagcgatgctagtagtgtgtgcggacttccccacgtggtaacacgtgcctcacaggccaaaagccaaggtgttaaaagcacccctactagtcccaggctttcccacctgggagctcctctcatgaaaattcctagtaattaatgattgggctattcatcaacctttctagtcaatggcttaaggatgcccggaaggtacccgcaggtaacgatgagctcactgtggatatgatccggggctctggtgcgaccgtctgtccggcgtagtcagagttaaaaaacgtgtaagcccttccaccccaagggattggggtttccccaatcatttaacaggttcatt

SEQ ID NO: 616 - DNA, 567 bp, Enterovirus C
  strain 03-4101, complete genome.1
aaaccagtaccaccacgaacaagcacttctgtttccccggtgaagctgtatagactgttcccacggttgaaaatggcagatccgttatccgcttaagtacttcgagaagcctagtatcactttggaatcttcgatgcgttgcgctcagcactctaccccgagtgtagcttaggctgatgagtctgggcataccccaccggcgacggtggcccaggctgcgttggcggcctacccatggctaacgccatgggacgctagttgtgaacaaggtgtgaagagcctattgagctacttaagaatcctccggcccctgaatgcggctaatcccaaccacggagcaagtgcttacaaaccagtgagtagcttgtcgtaacgcgtaagtctgtggcggaaccgactactttgggtgtccgtgtttcctttttatttccattgtggctgcttatggtgacaatctaagattgttatcatatagctattggattggccatccggtgatttactgagatcaaacacttgcccatttccttgttgcacccacccatttgttatatttatacaattaca

SEQ ID NO: 617 - DNA, 568 bp, Human rhinovirus
  A57, strain SC9723, complete genome.1
gagttgtactctgttattccggtaactttgtatgccagttttatttccctccccaattgtaacttagaagatgtacataaagaccaataggtggtgatcacccagatcactaaaggtcaagcacttctgtttccccggtcaaagttgatatgctccaacagggcaaaaacaacttggatcgttatccgcaaagtgcctacgcaaagcttagtaccatctttgagagcctatggttggtcgctccactgaaccccacagtagacctggcagatgaggctagaagacccccactggcgacagtgttctagcctgcgtggctgcctgcacacccctacgggtgtgaagccatacgtttgacaaggtgcgaagagccccgtgtgctcactttgagtcctccggcccctgaatgtggctaaccttaaccctgcagctagtgcatacaaaccagtatgttgctagtcgtaacgagcaattgcgggatgggaccaactactttgggtgtccgtgtttcactttttacctttattttgcttatggtgacaatatatatagcatatatattgacacc

SEQ ID NO: 618 - DNA, 569 bp, Porcine kobuvirus
  gene for polyprotein, complete cds,strain:1
aagggggtgggggggcttcggccctctcaccctcttttccggtggccacccgcccgggccaccgttactccactccactccttcgggactggtttggaggaacacaacagggcttcccacccctgtttaccccgatttcatctacccttctcccgaactgaccctatccacaccccactgactaactcctttggattagacctcggaatgcctacttgacctcccacttgcctctccctttctggattgccggtggtgcctggcggaaaaagcacaagtgtgttgcaggctaccaaactcctacccgacaaaggtgcgtgtccgcgtgctgagtaatgggataggagatgcctacaacaggctcgcccatgagtagagcatggactgcggtgcatgcgacttcggtcgccacgggcatagcattgctcacccgtgaatcaagtcatcgagatttctctgacctctgaagtgcactgtggttgcgtggctgggaatccacgcttgaccatgtactgcttgatagagtcgcggctggccgactcatgggttaaagtcagttgacaagacac

SEQ ID NO: 619 - DNA, 571 bp, Picornaviridae sp.
  isolate yc-1, complete genome.1
ttcgtgttgggagaaccgtccaaaagaccctccggggttaaaccccggaagggcttttggacggttctcccaacacgaaagattgggacacttctcgtggtgagtgcttcactgcgacccgatggtgttatggagggcttccatcccgccgtttgcctaggctataggctgttttatttcttctttatttttctctatttccaggttgtctccataccgagagctgctaccgctgcgcccggcggggttaactccagggctagcctggagctgtggccgccaaaagtggagagagtgtgactaactgggatggtccgtcctgagtggctgtttccttgcacatactaaacattgatctgggtgctcaggtaggctacgggtgaaacctgaggtgtaataatgttcttctgttgaagaaactgcacgtcaaacgctaaccttatcagatatagctgagatttaagtgtcaaaaagctatcaatgattgcgggggggtgtaaggccaccttgcgatgtttggttgtgtgaggttaagaggccctcttgatggggtttccctaggcactcccct

SEQ ID NO: 620 - DNA, 571 bp, Human enterovirus
  isolate EV/Human/CMRHP52A/CMR/2014 polyprotein1
tttccccggtgatgttgtatagactgtacccacggttgaaaatgactgatccgttatccgcttttgtacttcgagaagcccagtatcatcttggaatctccgatgcgttgcgctcagcactcgaccccagagtgtagcttaggtcgatgagtctggacgttcctcaccggtgacggtggtccaggctgcgttggcggcctacctgtggcccaaagccacaggacgctaggtgtgaacaaggtgtgaagagcctattgagctacagaagagtcctccggcccctgaatgcggctaatcccaaccacggagcaagggtgcacgaaccagtgtatgccttgtcgtaatgcgcaagtctgtggcggaaccgactactttgggtgtccgtgtttccttttatttttatattggctgcttatggtgacaatcatagattgttatcataaagcgaattggattggccatccggtgaaagcaaaacacattatttacttatttgttggatttactccactcaataattttacctataaactcattacatcagtcttgctgattagaaataagtatcata

SEQ ID NO: 621 - DNA, 572 bp, Coxsackievirus
  A9, isolate NSW-V20-2008-CVA9, complete genome.1
acttctgtttccccggaccgagtatcaataaactgctcacgcggtcgaaggagaaaacgtccgttacccggccaactacttcgagaaacctagtaacaccatggaaattgcaaagtgtttcgctcagcacacccccagtgtagatcaggccgacgagtcaccgcgttccccacaggcgactgtggcggtggctgcgttggcggcctgcccgtgggacaacccatgggacgctttaatatggacatggtgtgaagagtctattgagctagttggtagtcctccggcccctgaatgcggctaatcctaactgcggagcatgcgcccccattccagagggtagcgtgtcgtaacgggcaactctgcagcggaaccgactactttgggtgtccgtgtttccttttatcttctcattggctgcttatggtgacaattgcgagattgttaccatatagctattggattggccatccggtgtctaacagagctataatataccaatttgtgggattcgttccattaagtttgaaagtcttacaaaccctcaacttgatactgcaactcaatagtgtaaa

SEQ ID NO: 622 - DNA, 573 bp, Encephalomyocarditis virus
  isolate Sing-M100-02, partial genome.1
cccccccctccccctcccccttattttcctggtcgaaaccgctcggaataagaccggggtcttgtaatgtctaaatgttacttctacccaaccattgtctatgatggttggagggctgtagaacctagcccttgcttcttgcagagaaatccaagtggtctttccactctcgacaatgggtttcatggctcgccaaaagttgtgaagaaagcaagtcctatggaagctttctgacgaccgatgatgtctgtagcgaccctttgcaggcagcggaatcccccacctggtaacaggtgcctctgcggccaaaagccacgtgtttaacagacacctgcaaaggcggcacaaccccagtgccacatcaagagtctgatgactgtggaaatagtcaactggcttttcttaagcaaatttggtgtcggggctgaaggatgcccggaaggtaccacactggttgtgatctgatccggggcccatgtgcatgtgctatacacatgtagcctgggttaaaaaacgtctaggccccccgaaccacggggacgtggttttccttttgaaaaccacaatgataat

SEQ ID NO: 623 - DNA, 574 bp, Dolphin pegivirus
  isolate DPgV, complete genome.1
cgcaccggtacttggtgcacacagtcaggttagtccgctgtgtgcaagtggtggtcccacaaaccgactgccgccctctaacgtggttttagaatgcggacgccaagtctgcaactggacgaagcgctaccggcagcgctctcctggtcgcttgagggactggagggttgcactgttagtgaataagtccggggggataagctaagggggccgtacccacggcccgcctcacgcctctgccctgctcacctaagctgatgcggacgactccatgctatggtagcagcacggtctcacaggttgtgcaaccggtggaaaaatgctccgtcaggcgcagctgacgttaaactcagtgcccccgcgctcttgcgtggtttccgggctggaagtacgccgccttcctaaagtcgttactcggccaatacattctcgggcgggttgacaaacggaaagcgcggacccatagctccgggcgggggggtatagtccatgggggggcccaggcggcacgcctgcgacacgtggcaaggggaaaaatccttcgggtgaccccgggccccatcttcttttcttt

SEQ ID NO: 624 - DNA, 574 bp, Human rhinovirus A
  strain HRV-A01_p1143_sR2058_2009 polyprotein1
ttgagtgctctgttattccggtaactttgcacgccaattttataacccctcttccccatgtaacttagaagttttacaaatagaccaatagcaagcagcgaaccagctgtacaaggtcaagcacttctgtttccccggtcaatgttgatatgcttcaacaaggcaaaaacaacagcgatcgttatccgcaagatgcctacacaaagcttagtacctccttcgatggtatttgtctggtcgctcaggtgtttccccaacactagacctggcagatgaggctagaaactccccactggcgacagtgttctagcctgcgtggctgcctgcacaccctttcgggtgtgaagccaaatactggacaaggtgtgaagagccccgtgtgctcatcttgagtcctccggcccctgaatgcggctaaccttaaacccgcagccattgctcacaatccagtgagcagatggtcgtaatgagcaattgtgggatgggaccgactactttgggtgtccgtgtttcactttttcctttatcaattgcttatggtgacaatatatatataaatatatatattggcatc

SEQ ID NO: 625 - DNA, 575 bp, Picornaviridae sp.
  isolate ybw202pic02 genomic sequence.1
cccgttggtagggggtgctaatacctaccacccgtttgccgtgggaaacggctatggagggtcgggacgcctcgttaatcacgttctagtaattgagtgtgttactttaaatcttacacttatctatttagagtagttaatgtttctactattctttactatatatatcatagctgtcgtcttgctaagagctccgaccactgcgcccggtggggttaaccaatggactagccattggctgtaggcgccagaagagacgacctcctgactatgattgagatttgtcttgcttcagggctgtggaccatggatgtgatcgatcgaaccagggaaggtaggctacgggtgaaaccttccatgtaatgatgatgtcatattgacataccgcatccatacgctaatgcagcggatattgctgagatgataagtcaataagcattcaacgttggtgcccaggtgtcatggctggggcgcggttgcgtgcgtggttcacagtataacttgaagtgtcccttaagataaatctcactctaagggaggaccctgctagtaatagtacagggctaatcaggggc

SEQ ID NO: 626 - DNA, 576 bp, Porcine kobuvirus
  strain KobuV/Pig-wt/ESP/P461/2017, complete1
tttggaaaaaggtggggggggcttcggccctctcaccctcttttccggtggccacccgcccgggccaccgttactccactccactccctcgggactggtttggaggaacacaacagggcttctcatccctgtttacccttattccacttacccttctccccgaactacccaacccactccccactgattgactcccttggattaagacctcggaatgtcttcctgaccttcttcttggttttcccttttcggattgccggtggtgcctggtggaaaaagcacaagtgtgttgttggctaccaaactcctacccgacaaaggtgcgtgtccgcgtgctgagtaatgggataggagatgccaataacaggctcgcccatgagtagagcatggactgcggtgcatgtgacttcggtcaccaggggcatagcattgctcacccctgaatcaagtcatcgagatttctctgacctctgaagtgcactgtggttgcgtggctgggaatccacgcttgaccatgtactgcttgatagagtcgcggctggccgactcatgggttaaagtcagttgacaagacac

SEQ ID NO: 627 - DNA, 576 bp, Encephalomyocarditis virus
  ZM12/14 gene for polyprotein, complete1
tccccccctttctcttccccttccttaatttaactggccgaaaccacttgggataaggccggtgtgtgtttgtctatatgtcacttctaccacaccactgtcttttggtggtgtgggggcccagaacctggccctgtcttcttgacgagcactcctaggggtctttcccctcttgccaaaggagtgtaaggtctgttggatgtcgcgaaggaagcaatctctctgtaagcttctggaagacaagcaacgtctgtagcgaccctttgcaggcagcggatttccccacctggtaacaggtgcctctgcggccaaaagccacgtgtataacatacacctgcaaaggcggcacaaccccagtgccacgttgtgagttggatagtcgtggaaagagtttgatggctttcctcaaacgtatccagcaaaagggctgaaggatgcccagaaggtaccccattttatgggatctgatctggggccacggtgcacgtgctttacacgtgtcgagccggggttaaaaaacgtctaagcccttaagtcacggggacgtggctttccctgttaaattaacactgaaac

SEQ ID NO: 628 - DNA, 576 bp, Echovirus E30
  strain 16-I10, complete genome.1
gcctattggtactcggtccggggtaacagaagtgcttggccaaggtggctgaaggggaaaacgttcgttaaccgactaataacttcgagaaacctagtaccaccatgaaagttgcgcagtgtttcgctccacacaaccccagtgtagatcaggtcgatgagtcaccgcgttccccacgggtgaccgtggcggtggctgcgttggcggcctgcccatggggcaacccatgggacgcttcaatactgacatggtgcgaagagtctattgagcttattggtagtcctccggcccctgaatgcggctaatcctaactgcggagcaggtacccacaagccagtgggtggcctgtcgtaacgggcaactctgcagcggaaccgactactttgggtgtccgtgtttccttttattcttaaattggctgcttatggtgacaattgaaaggttgttgccatatagctattggattggccatccggtgtctaatagagcaattatctacctttttgttggattcattccactcaactataaaacactcaaaacactcatatacattgtaggtctcaacacagcaaa

SEQ ID NO: 629 - DNA, 576 bp, Rhinovirus C
  isolate CO03302015 polyprotein mRNA, complete cds.1
acccaagtggtgtagtactcttgtatttcggtacacttgtacgccagtttgccaccccttccccaagcgaacgtagaagcttacaatcccggtcaataggaggtggtgaaccacaccacttaagaccaagcacttctgtttccccggctcaagaggaatatgctttgcaaagggctgaagccccgagagtcgttatccgcatacatactacgcaaagcctagtactgtcctggaagtctgttggttggtcgctccgtcaattccccattgatagacctggcagatgaggcaggaaatcccccactggcgacagtgttcctgcctgcgtggctgcctgcacaccctcacgggtgtgaagccaactgatggacagggtgagaagagccccgtgtgctatgtatgagtcctccggcccctgaatgcggctaatccaaccccacagctgccgcacacaaaccagtgtgttgacagtcgtaatgggtaactgtgggacggaaccgactactttgggtgtccgtgtttcctttattctttcaattgatgcttatggtgacaacatcaagtgatattgttacc

SEQ ID NO: 630 - DNA, 578 bp, Porcine kobuvirus
  strain CH/KB-1/2014, complete genome.1
tttgaaaagggggtgggggggcttcggccctctcaccctcttttccggtggccacccgcccgggccaccgttacttcactccactccttcgggactggtttggaggaacataacagggcttcccaatcccctgttatcctttatcccaaacaccttttcccttaaccaaccctatccacaccccactgactgattcctttggattttgacctcagaatgcctacctgacctcccactcgcctctcccttctcggattgccggtggtgcctggcggaaaaagcacaagtgtgttgcaggctaccaaactcctacccgacaaaggtgcgtgtccgcgtgctgagtaatgggataggagatgcctacaacaggctcgcccatgagtagagcatggactgcggtgcatgtgacttcggtcaccacgggcatagcattgctcacccgtgaatcaagtcatcgagatttctctgacctctgaagtgcactgtggttgcgtggctgggaatccacgcttgaccatgtactgcttgatagagtcgcggctggccgactcatgggttaaagtcagttgacaagacac

SEQ ID NO: 631 - DNA, 578 bp, Enterovirus C99
  polyprotein gene for polyprotein, VP4 and VP2 and1
gcacttctgtttccccggtacgacgacatagattgtgcccacggtcgaaagtcgtcaatccgttatccgctttggtacttcgaaaagcctagtatcaccttggaattctcgatgcgttgcgctcagcacccaaccccagagtgtagcttaggctgatgagtctgggcactccccaccggcgacggtggcccaggctgcgttggcggcctacccatggctaacgccatgggacgctagagttgaacaaggtgtgaagagcctattgagctaccaaagagtcctccggcccctgaatgcggctaatcccaaccatggatcaagtgcgtgcaatccagcatgtagcttgtcgtaatgcgcaagtccgtggcggaaccgactactttgggtgtccgtgtttccttttatttttattatggctgcttatggtgacaatctcggattgttatcatatagcaattggattggccatccggtgagagtgagagatattatctatttgtttgtggcatttactccactagatactaacacaccaattctaattagagcagttatactaattagatcaatacatcaca

SEQ ID NO: 632 - DNA, 579 bp, Porcine kobuvirus
  isolate OH/RV11/2011, complete genome.1
tttgaaaagggggtgggggggcctcggccccctcaccctcttttccggtggccactcgcccgggccaccgttactccactccactccctcgggactggtttggaggaacataacagggcttcccatccctgtttttacccttatttccatctaccctttcccttaaccaaccctatccacaccccactgactgactcctttggattttgacctcagaatgcctacttgacctcccacttgcctctcccttatcggattgccggtggtgcctggtggaaaaagcacaagtgtgttgttggctaccaaactcctacccgacaaaggtgcgtgtccgcgtgctgagtaatgggataggagatgccaatgacaggctcgcccatgagtagagcatggactgcggtgcatgtgacttcggtcaccaggggcatagcattgctcacccctgaatcaagtcatcgagatttctctgacctctgaagtgcactgtggttgcgtggctgggaatccacgcttgaccatgtactgcttgatagagtcgcggctggccgactcatgggttaaagtcagttgacaagacac

SEQ ID NO: 633 - DNA, 579 bp, Enterovirus sp.
  C99, polyprotein gene for polyprotein, VP4 and VP2 and1
gcacttctgtttccccggtgcgatgacatagactgtacccacggttgaaagtcgttaatccgttatccgctttggtacttcgagaagcctagtacctccttggaattttcgatgcgttgcgctcaacactcaaccccagagtgtagcttaggctgatgagtctgggcattcctcaccggcgacggtggcccaggctgcgttggcggcctacccatggctaacgccatgggacgctagatttgaacaaggtgtgaagagcctattgagctaccaaagaatcctccggcccctgaatgcggctaatcccaaccatggatcaagtgcatgcaaaccagcatgtggcttgtcgtaacgcgtaagtccgtggcggaaccgactactttgggtgtccgtgtttcctttttatttttataatggctgcttatggtgacaatctcagattgttatcatatagcgattggattggccatccggtgagaataagagatattatctatttgtttgtggcattcactccacttaactcatacacaccaagtttaatcaaagcagttttactaattagatcagcataccaca

SEQ ID NO: 634 - DNA, 581 bp, Picornaviridae sp.
  isolate muf159pic1 genomic sequence.1
aatgcaaataacaatcaaggacccgtttgtggggtgggctcccactttattcatagcccataacattggtatcctgttaaactgactactggctgttctactaggtatttcaactggtttaaagattttaattttgttgaaacaggaaggattagctcgatcctttaggtgggacttatttttaccaccacagagcgcccatgaacaattaaaggtagtggaggaactattagtaaccatgtgaaatgcgtaactgctatccctgtgcccttggccttggcatagtaatatgctccaaggggcccgaaaggctagtgggtagaaactcacctagggtggtcactctgtgaatttcacatggcgaagtttagattctgaatcctactttgttgtgagtggggtcaggtgacactgagtagatgccctggaggtaccaattgatctgaccaggggcctggatacttaatgccaggttaaaaattatgaaaagtaagtcaccgaactgaaatgtttttcctttttatttcatctcatactgctgtgttgtttggtgtaatagtttgaagacacaattttccagg

SEQ ID NO: 635 - DNA, 584 bp, Canine picodicistrovirus
  strain 236, complete genome.2
gtccgtataccaacggatcgatttccctgttacagcctctttgcttccccaccccactcctctccgtggagagcctagtaggattcttgaaagcaaatgtctgttgaccccaccttcaatcccggaaggaagaaaccgagaatgagactcgtctattcccccatggtgacatggagacttgtctgcgtgtgtctcgggctcccttatgagtattgtgggagaaccgctaccctgactccgaggagtctgatgggatatgttagtacctatgaaagtaaggtgacagactttgttagtatggatacgaagagccgactgccgttggagtgtatcctccggacccgtgaatgcggctaaccctaaccccggatcaagtgcccacaaaccagtgggtggcttgtcgtaatgcgtaagtctgggatgggaccgactactttcggtgttccgtgtttcctatttattttatcaataaagtatatggtgacaatattactagtgtgatatatagcctctattgtatttttattgatcaattttaataggttatttggtggtgatttaaatagagatagttactattagag

SEQ ID NO: 636 - DNA, 584 bp, Rhinovirus
  B14, strain SC0641, complete genome.1
tactctggtattatgtacctttgtacgcctgtttcttccctacaaccccttcctaaaactcccacccatgaaacgttagaagcttgacatttaagtacaataggtggcaccacatccagtggtgtctacgtacaagcacttctgtttccccggagcgaggtataggctgtacccactgccaaaagcctttaaccgttatccgccaaccaactacgtaacagctagtatcatcttgttcttcactggacgttcgatcaggtggattccccctccactagtttggtcgatgaggctaggagctccccacgggtgaccgtgtcctagcctgcgtggcggccaacccagctcatgctgggacgcccttttaaggacatggtgtgaagactcgcatgtgcttggttgtgagtcctccggcccctgaatgcggctaaccttaaccctggagccttatgccacgaaccagtggttgtaaggtcgtaacgagcaattccgggatgggaccgactactttgggtgtccgtgtttcctatttttctttatattgtcttatggtcacagcatatatataagtatatactgtgatc

SEQ ID NO: 637 - DNA, 587 bp, Human rhinovirus C
  strain QCE, complete genome.1
catggttacccacgaggtgcagtggtcttgtattacggtacatttccataccagttttataaaccctaccctgaaacttatagaagcttgtacacaccgaccgacaggtggcaatcatccagattgtcgaaggtcaagcacttctgtttccccggtatccttgtatacgcttcacccgaggcgaaaaccgaggttatcgttacccgcaaagtgcctacgagaagcctagtatcactttggaaacctatggttggtcgctcagctgttttcccaacagtagacctggcagatgaggctggacgctccccaccagcgatggtggtccagcctgcgtggctgcctgcacaccctgtggggtgtgaagccagaaagtggacaaggtgtgaagagcctattgtgctcactttgagtcctccggcccctgaatgtggctaatcctaaccccgtagctgttgcatgtaatccaacatgtatgcagtcgtaatgggcaactatgggatggaaccaactactttgggtgtccgtgtttcttgtttttctttatatactgcttatggtgacaatagtaattcattactcttgttacc

SEQ ID NO: 638 - DNA, 588 bp, Canine picodicistrovirus
  strain 209, complete genome.2
gttcgtatgccaacggattgatttccctgttacagcctctttgcttccccaccccactcctctctgtggagagcctagtaggattcttgaaagcaaatatctgttgaccccaccttcaatcccggaaggaagaaaccgagaatgagactcgtctattcccccatggtgacatggagacttgtctgcgtgtgtctcgggctcccttatgagtattgtgggagaaccgctaccctgactccgaggagtctgatgggatatgttagtacctatgaaaataaggtgacaggttttgttagtatggatacgaagagccgactgccgttggagtgtatcctccggacccgtgaatgcggctaaccctaaccctggatcaagtgctcacaaaccagtgagtggcttgtcgtaacgcgcaagtctgggatgggaccgactactttcggtgttccgtgtttctatttattttatcaataaagttttatggtgacaatcttgtgatattaagatataaagcttttatccttttgtttattgattatcttaaatagattgcttggtggtgatttaaaatagagatagttattattagag

SEQ ID NO: 639 - DNA, 588 bp, Rhinovirus A
  isolate E0-227 polyprotein gene, partial cds.1
ggctcttccgatctgggggttgtactctattattccggtaattttgtacgccagttttatctccccttcccccgactgtaacttagaagtttatcattacggccaataggtggtagttatccaaactaccaaaggtcaagcacttctgtctccccggtcaaagttgatatgctccaacagggcaaaaacaactaagatcgttatccgcaaagtgcctacgcaaagcctagtaatgtctttgaaaatttatggttggtcgctccgctattccccatagtagacctggcagatgaggctagaaattccccactggtgacagtgttctagcctgcgtggctgcctgcgcaccctttgggtgcgaagccatacattggacaaggtgtgaagagccccgtgtgctcactttgagtcctccggcccctgaatgtggctaaccttaaccctgcagctagtgcatgtaatccaacatgttgctagtcgtaatgagcaattgcgggacgggaccaactactttgggtgtccgtgtttcactttttccttttattattgcttatggtgacaatatatatagatatatatattgacacc

SEQ ID NO: 640 - DNA, 589 bp, Human rhinovirus
  A68, strain SC305, complete genome.1
ccatgtggagttgtactctattattccggtaattttgtacgccagttttatctcccctcccccttttacataacttagaagtttgtacacatcgaccgataggtggcatttatccaaaatgttgaaggtcaagcacttctgttaccccggttaaaattgatatgctccaacagggcaaaaacagttttaatcgttatccgcaaagcaactacgcaaagcctagtatcatttttgataatatacggttggtcgctccactgtgaacccgacagtagacctggcagatgaggctggaaaccccccactggtgacagtgttccagcctgcgtggctgcctgcgtacccctttgtgggtacgaagccatatgtttgacaaggtgtgaagagccccgtgtgcttgttttgagtcctccggcccctgaatgtggctaaccttaaccctgcagctagtgtgtacaatccagtacatagctagtcgtaatgagtaattgcgggatgggaccaactactttgggtgtccgtgtttcctgtttttcttttatatttgcttatggtgacaatatatatacatcacatatatattggcacc

SEQ ID NO: 641 - DNA, 591 bp, Bat picornavirus
  strain ITA/2017/189/18-155, complete genome.1
ccccccctccctccttttcatcggctgtccgttgccgtggagcttcactatccgtagtgttgttccggaaaacggacacagcaacaccttcctccgggttggtgcttgcaatccctttccccttttgttgacttcccggactcattcgttttggctttcacattggccctagaggctatcttgttggattcctgtaccctggcaatctgaactccttcgcatgccctcccacatggtcgaggacagtaaggcgcgggaccaagagagccgggcaccagacccatttctgaattggactgccaccgccaagaattgcggagcggctctgttgtgtgagatcctcctttcccacagatagcgcatcccagtgcgtgtgtatgggggttagggtgcatacagcatccgcgactgtggtcagatgagcggaagcatctgctaggataaaggggacgcgattcgctatccccgaagcatccctcattgaggtaaagccctagtaggtgacggtggactggaatgccaccctggttccgtgcagcttgacagagtgccggccggtgctctggccacagaaatcggctgttttgggac

SEQ ID NO: 642 - DNA, 591 bp, Rhinovirus C
  strain SCH-109 polyprotein gene, complete cds.1
cccgtaggcagtatgggtgtagtactcttgtattctggtacatttgtacgccagtttttcttcccacccccaagtaacctttagaagcaattgcatccagacgagcaggcgaccaacactccacgttggttcacgtcaagcacttctgtttccccggtattagagtgttaggcttctcaagaggctgaagctcgaggtatcgttatccgcacagttactaagcagagcctagtatcactctgaccttctcactggctggtcgttcaatgagagacccactcatagacctggcagatggggctggaagtaccccactggcgacagtgttccagcccgcgtggctgcctgtccccctttctgggggaaagccgatgttaagacagggtgtgaagagccgcgtttgctaactgtgagtcctccggcccctgaatgcggctaatcttaccccacagctattgcatggaaaccaccatgtggatagtcgtaatgggcaactgtgggacggaaccgactactttgggtgtccgtgtttccttttattccatttattatctcatggtgacaacgtataagagttatatgttgtttacc

SEQ ID NO: 643 - DNA, 591 bp, Rhinovirus C
  C18-NIID JPN-2014 gene for polyprotein, partial cds.1
ccgtctacggacgtagtactcttgtatttcggtacacttgtacgccagttttcctccctccaccccttatgcaacttatagaagcttgaacttacaggcgaataggaggccagcaatccatgctggtaaacgccaagcacttctgtatccccggtattagagtgttaggcttctcacgaggctgaagcttgatatatcgttatccgcacagttactaagcagagcctagtatcatcttactctttatgctggttggtcgctcagtcagtttcccctgatagacctggcagatggggctggaaatccctcactggtaacagtgttccagcccgcgtggctgcctgtccccctccttagggggaaagccaatataaagacaaggtgtgaagagccgcgtttgctaattgtgagtcctccggcccctgaatgcggctaatccaaccccacagctatcgcatggaatccaccatgtaggtagtcgtaatgggcaactgtgggacggaaccgactactttgggtgtccgtgtttccttttataccttatctgatctcatggtgacaacatatattgacaagtgtatgttgttcacc

SEQ ID NO: 644 - DNA, 596 bp, Enterovirus C
  strain 03-4209, complete genome.1
gtaccaccacgaacaagcacttctgtttccccggtgaagttgcatagactgtgcccacggttgaaagcgactgatccgttatccgctcttgtacttcgagaagcctagtaccatcttggaatcttcgacgcgttgcgctcagcactcaaccccagagtgtagcttaggctgatgagtctggacattccccatcggtgacgatggtccaggctgcgttggcggcctacctgtggcccaaagccacaggacgctagttgtgaacaaggtgtgaagagcctattgagctacatgagagtcctccggcccctgaatgcggctaatcccaaccacggagcaggtggtcataatccaatgactggcctgtcgtaacgcgcaagtctgtggcggaaccgactactttgggtgtccgtgtttccttttatttttacaatggctgcttatggtgacaatcatagattgttatcataaagcgaattggattggccatccggtgagaatcaaatcgcttgtatatttgtttgttggatttgctccattaacattaaacaccttaacacttattaaagtagttctattgataagacattgctattaca

SEQ ID NO: 645 - DNA, 596 bp, Human rhinovirus
  B4, strain SC165, complete genome.1
gacccactgggtgtagtgctctggtattttgtacccttgcacgcctgtttcccatttgtacccttccttgatttcctccccatgtaacgttagaagtttcggaattttaaagtacaataggaagcgccacatccagtggtgttgtgtacaagcacttctgtttacccggggcgaggtataggctgtgcccacggccaaaaacctttaaccgttatccgccaaccaactacgtaacggctagtatcatcttgtttctgacttggcgttcgatcaggtggtaacccccactagtctggtcgatgaggctaggaattccccacgggcgaccgtgtcctagcctgcgtggcggccagcccagcttttgctgggacgccttttcaaagacatggtgtgaagacccgcatgtgcttggttgtgagtcctccggcccctgaatgcggctaaccttaaccctggagcccagtgacataatccaatgttatttgggtcgtaatgagtaattccgggatgggaccgactactttgggtgtccgtgtttccttttattctttataatgtcttatggtcacagcatatatattgtatatactgtgatc

SEQ ID NO: 646 - DNA, 596 bp, Human rhinovirus
  C32, strain USA/CA/RGDS-2016-1008, complete genome.1
atcccaccatgattgttcactgaacgttgtactcttgtattacggtacacttgtacgccagttttataatcccctccccttgtaacttagaagcaagtacacacaggccaatagcaagtagcaagccatgctacttatggtcaagcacttctgtttccccggtctgacgggatatgcttcacccgaggcagaaactcagatgatcgttatccgcaaagtgcctacgggaagcctagtagcaccctggaaactgttaggttggtcgctcaattgctgaccccgagcaatagacttggcagatgaggctagacataccccaccagcgatggtggtctagcctgcgtggctgcctacccaccctaatagggtgggaagcctatcaatggacagggtgtgaagagcctactgtgctcactttgactcctccggcccctgaatgtggctaatcctaaccccgtatctatcgcatgcgcaccagcatgtaggtagtcgtaatgggcaactacgggatggaaccaactactttgggtgtccgtgtttcctgttttctttattatttgcttatggtgacaattgtatgaaatacgattgacacc

SEQ ID NO: 647 - DNA, 597 bp, Human rhinovirus
  56 polyprotein gene, partial cds.1
gttgttcccacctggacttcctatgtggagttgtacactgttatcccggtaaccttgtacgccagttttatacacccttccctgtaacttagaagttataagcacgaggaccaataggtagtgactttccaggtcactaaaggtcaagcacttctgtctccccggtcaaagttgatatgctctccccagggcaaaaacaattgagatcgttatccgcaatgtgcctacgcaaagcctagtaatatcttagatgatatatggttggtcgctccgccatttcccatggtagacctggcagatgaggctagaaactccccactggcgacagtgttctagcctgcgtggctgcctgcgcactctctgagtgcgaagccatatatttgacaaggtgtgaagagccccgtgtgctcacattgaatcctccggcccctgaatgtggctaaccttaaacctgcagctagtgcacacaaaccagtgtgtagctagtcgtaacgagcaattgcgggatgggaccaactactttgggtgtccgtgtttcacttttttccttttatatttgcttatggtgacaatatatataatacatatattgacacc

SEQ ID NO: 648 - DNA, 598 bp, WUHARV Enterovirus 2
  polyprotein gene, partial cds.1
cccagtaacgttagaagaaagtacaaatgacacttagcaaatccaccaacccaggtgggttttcgtcaagcacttctgtttccccggacctagtaccaataggctgtacccacggctgaaggggaaaacgttcgttacccggctacctacttcgaaaagcctagtatcatcatagaatgtctcaagtgttacgctcagcacaaccccagtgtagttcaggtcgatgagtcaccgaattccccacgggcgaccgtgtcggtggctgcgttggcggcctgcctgcgagtttcactcgcaggacgcttgattcatgacatggtgtgaagagcctattgagctaggtagtagtcctccggcccctgaatgcggctaatcctaaccacggagccatgcgtcacaatccagtgatgtcgtggtcgtaacgagcaattctgtggcggaaccgactactttgggtgtccgtgtttcctgttttatttaccttggctgcttatggtgacaattgtatagttgtcatcatatagctattggattggccatccggatatatacaagcaactagtgttcacactacctcttttgctataacacaagtatc

SEQ ID NO: 649 - DNA, 598 bp, Human rhinovirus
  C11, strain SC1065, complete genome.1
ccaccgggcacactgtgcgtagtactctgtgattacggtcactttgtacgcctgtttgcatccccaacccacatttcctatcatcttttatatccgtaacttagaagcataacacacagtccaataggaagcagctaaaccaagactgctaaggacaaatacttctgtttccccgggcgtgtgaatagactccaacagggttgaagctgtagcgctcgttatccgcacaactactacgcgactgttagtagcactttggatagcatgtggggttccgctccacagaaaccccatctgtaggtcagggcaatggggctacacataccccactggcgacagtggtgtagcccgcgtggtgccctgcctgggactgtgtcccaggactccacttgtttgacagggtgtgaaggcactagtgtgctagttgtgagtcctccggcccctgaatgcggctaatcctaaccctgcagccattgcaaacattccagtttgtgggtggtcgtaacgagtaattgcgggatggaaccgactactttgggtgtccgtgtttctctttttaacttgatgagtgtcttatggttacaattatacagtaacc

SEQ ID NO: 650 - DNA, 600 bp, Hunnivirus 83GR
  isolate 83GR-70-RAT106 polyprotein gene, complete1
agctttcttacccttcatttgtgaacccactagtctaagccgcttggaatacgatgagtggaaacgttcattctaaatggagtgaaacatgctcaattttctagctcgtgctggtctttccagtgcggggcggccctgtctggccgtaactctacagagtgtcacgccgtgcttgcggatctcacgtggcacatgacaaggctctcgctggaactgtgagtctgatgcatgtggagtaacagtgaaaagtgcatgatcacacatttgtgtgggctatgagcctgcggaacaacaactggtaacagttgcctcaggggccgaaagccacggtgttaacagcaccctcatagtttgatctatcccaggatagtgatgttgtgtacctagtaattgccaatcctcatgtcttggtatcacggcataccggagagttcgcgggtgaaggatgcccagaaggtacccgtaggtaaccttaagagactatggatctgatctggggccctgtctggagtgctttacacacagctcagggttaaaaaacgtctagcccgccaggacccgagggattcgggttttcccttaaaaacccgattagagcat

SEQ ID NO: 651 - DNA, 600 bp, Human enterovirus
  isolate EV/Human/CMRHP35B/CMR/2014 polyprotein1R
cggtaagccacccgagttctggccaagcacttctgtttccccggactgagtatcaataagttgctcgcgcggctgaaggagaaaacgttcgttacccgaccaactacttcaagaaacccagtatcaccatggaagttgcgcagtgtttcgctccgcacaaccccagtgtagatcaggtcgatgagtcaccgcaacccccacgggtgaccgtggcggtggctgcgctggcggcctgcccatggggcaacccatgggacgcttcaatactgacatggtgtgaagagtctattgagctagttggtagtcctccggcccctgaatgcggctaatcctaactgcggagcagacgctcgcatgccagcgggtagtctgtcgtaacgggtaactctgcagcggaaccgactactttgggtgtccgtgtttccttttattcttatactggctgcttatggtgacaattgaaaggttgttaccatatagctattggattggccatccggtgacaaacagagcgattatatactcttttgttgggttcatcccattgaattacaaggtattaaacaccctcagttttatcctgatactaaatacaacaaa

SEQ ID NO: 652 - DNA, 601 bp, Human rhinovirus
  C56, strain USA/2017/CA-RGDS-1003, complete genome.1
acccacaccgtctacggacgtagtactcttgtatttcggtacatttgtacgccagttttccctccctcccccctttcacgtaacttatagaagcttgaacatacaggcgaataggaagccaacaaaccatgttggtaaacgccaagcacttctgtttccccggtattagagtgttaggcttctcacgaggctgaagcttgatatatcgttacccgcacagttactaagcagagcctagtaacactttgatctctatactggctggtcgctccgtcagaaaccccctgatagacctggcagatggggctggaaattccccactggtgacagtgttccagcccgcgtggctgcctgtccccctttcttgggggaaagccaatatatagacaaggtgccaagagccgcgtttgctaattgtgagtcctccggcccctgaatgcggctaatccaaccccacagctatcgcatggattccaccatgtaggtagtcgtaatgggcaactgtgggacggaaccgactactttgggtgtccgtgtttccttttataccttattttatctcatggtgacaacatatattgacaagtatatgttgactacc

SEQ ID NO: 653 - DNA, 602 bp, Rhinovirus C
  strain HRV-C45_p1084_s3920_2000 polyprotein gene,1
ttaaaacagctgtgtggttgcacccaccaccaggcacaatgtgcgttgtacactgggattccggtcactttgtacgcctgtttgaccacccccccccatgcaacttagaaaatatacacatagcccaataggatgcggccaaaccaggttcgtcacgggcaagcacttctgtttccccgggtgtgtgaatagaccctaccagggttgaagctgtagcactcgttatccgcatggctactacgcaaatgttagtaacaccctctattgtacttgggatttcgttccgcagataccccatctgtagattagggcgatgaggctacacactccccactggcgacagtggtgtagcctgcgtggcgccctacctgggtctcctgacccaggattccacttacaagacagggtgtgaaggcacaagtgtgctagtcatgagtcctccggcccctgaatgcggctaatcttaaccccgtagccattgcaggcaaaccagtctgtggatggtcgtaatgggtaactacgggatggaaccgactactttgggtgaccgtgtttctcttttttctttatgtaggcactttatggttacaacataagtaacc

SEQ ID NO: 654 - DNA, 603 bp, Human rhinovirus
  A51, strain 12K5, complete genome.1
ttgtacccacccacactgtctacggacgtagtgctctcatattacggtatgcttgcacgccagtttttaccccccttttcccaatttgtaacattagaagtttgtactattaatttggtcaataggaggtagcaagccatgctatctaagaccaagcacttctgttaccccggtatacggagaatagactccaaaagggttgaagctccaaatatcgttatccgcacaattactacgcaaagcctagtaacatcttgataagctctttggttggtcgctcagctgttacccccagtagacttggcagatgaggctgggtattccccactggcgacagtgacccagcctgcgtggctgcctacacacctggcgacaggtgtgaagccaaaagtggacaaggtgtgaagagccccgtgtgctaattgtgattcctccggcccctgaatgcggctaatccaaccccacagccaatgcatgtaaaccaacatgtatttggtcgtaacgggcaactgtgggacggaaccgactactttgggtgtccgtgtttccttttattttaaatgacttgcttatggtgacaaatattggtgtatatttgtcatc

SEQ ID NO: 655 - DNA, 603 bp, Human rhinovirus A
  strain HRV-A80_p1187_sR2954_2009 polyprotein1
ggcttgacctttgacaactttgtgtttgaggagcagtactctactattccggtagttttgtacaccagttttatctcccttcccctatgtaacttagaagacaagcactcaagaccaataggatgataactaaccaagttgtcaaaggtcaagcacttctgtttccccggtcaaaattgatatgctccaccagggcaaaaacagttttggtcgttatccgcaaagtgcctacgcaaagcttagtaacactttgaagaatgtatggttggtcgttccgctattccccatagtagacctggcagatgaggctagaaaatccccactggcgacagtgttctagcctgcgtggctgcctgcgcacctctttgaggtgcgaagccattcctttgacaaggtgcgaagagccccgtgtgctcactttgagtcctccggcccctgaatgtggctaaccttaaccctgcagctagtgcatgcaatccagcatgtctctagtcgtaatgagcaattgcgggatgggaccaactactttgggtgtccgtgtttctctttttacttttaaattgcttatggtgacaatatatataacacatatatattgacacc

SEQ ID NO: 656 - DNA, 604 bp, Duck picornavirus GL/12
  complete genome.1
ttgaaagggggtgctcagggtagctccctgagctcttccctccaccctctttcaacgtctggcccacgatacgggccacctttcaatcttaactaactatccctttaatctatttggattttctggtttagaataatttggaacacataattggattatcttttaggattgtggataggatttgttcgggatatcactcccttcctgtgctaacacatattctaattccctcctttgtctattatctcttggaggtggtgctgaaatattgcaagccacttgagtgtatagatgaagtaggctcaagatgaatgttgtgttactcaaggcaagtgtagctatcactaagatattggtaacgtgaaacggattaccggtagtagcgtgatcttccgtcttagtgctctagtgactagaggacaacgacatggcatcacatatcttaaccctccagttttggcatccgggacagaatgggctggatatccgctttctttctggggtatgtgatgggtggtattggggtaaccaccttgaccatgacgctcgataagagtgaccgcctgatcattgaaacctctagtataaaattcaggctgaaatc

SEQ ID NO: 657 - DNA, 605 bp, Coxsackievirus
  A19, strain BBD26 polyprotein gene, complete cds.1
aactttagaagcaattcaaagagttcaatacagggggtacaaaccagtaccaccacgaacaagcacttctgtttccccggtgaggctgtatagactgtgcccacggtctaaaacggcagatccgttacccgctcaagtacttcgagaagcctagtatcaccttggaatcttcgatgcgttgcgctcagcaccctacccccgggtgtagcttaggtcgatgagtctgggcatgccccaccggcgacggtggcccaggctgcgttggcggcctacccatggctaacgccatgggacgctagttgtgaacaaggtgtgaagagcctattgagctacttgagagtcctccggcccctgaatgcggctaatcccaaccacggagcaagtgcctgcatgccagcaggtagcttgtcgtaacgcgcaagtctgtggcggaaccgactactttgggtgtccgtgtttccttttattcttataatggctgcttatggtgacaatctaagattgttatcatatagcttttggattggccatccggtgattatttgacttttgagcacttgtttaccttatctcatcacatattcatttaattgcttgattgcata

SEQ ID NO: 658 - DNA, 606 bp, Human rhinovirus
  A31, strain SC1031, complete genome.1
taataatagtgtactactccacgtgggaagtacgggtggagtagtacactattattacggtaatcttgtacgccagttttataaccccttcccctatgtaacttagaagtttgaactcaagaccaacaggtggtaatcaaccagattactaaaggtcaagcacttctgtttccccggtcaatattgatatgctccaccagggcaaaaacaattgcgatcgttatccgcaaagtgcctacgcaaagcttagtaacattttgaataatatatggttggtcgttccgctattccccatagtagacctggcagatgaggctggaaactccccactggcgacagtgttccagcctgcgtggctgcctgcgcactctcacgagtgcgaagccatatatttgacaaggtgtgaagagccccgtgtgctcactttgagtcctccggcccctgaatgtggctaaccttaaccctgcagctagtgcatacaagccagtatgtagctagtcgtaatgagcaattgcgggatgggaccaactactttgggtgtccgtgtttcacttttatctttattatttgcttatggtgacagtatatagtgtatatattgttacc

SEQ ID NO: 659 - DNA, 607 bp, Human rhinovirus
  C54, isolate D3490 polyprotein gene, complete cds.1
ttaaaacagctgtgtggttgttcccaccaccaggcacactgtgcgttgtacactgggattccggtcactttgtacgcctgtttgctatcccccccaacttatgtaatttagaagatgtacacaacgcccattaggatgcggccaaaccaggtccgcttagggcaagcacttctgtttccccgggtgtgtgaatagactctaacagggttgaagctgtagcactcgttatccgcgcaactactacgcgaatgttagtagcatcctgtgttgcatttgggatttcgctccgcagaaaaccccatctgtagattagggcaatgaggctacacataccccactggcgacagtggtgtagcctgcgtggtgccctacccaggccttcttggcctgggattccacttacaagacagggtgtgaaggcactagtgtgctagttgtgagtcctccggcccctgaatgcggctaatcttaaccccgtagcccccgcaagtaaaccaacttgtaggtggtcgtaatgagtaattacgggatggaaccgactactttgggtgtccgtgtttccttttattctttatatttgcatcctatggttacaacataagtaatc

SEQ ID NO: 660 - DNA, 608 bp, Human rhinovirus C
  isolate LZY79, complete genome.1
ttaaaactgggtataggttgttcccacctgtaccacccacgtggtgtagtgctcctgtattccggtacacttgcacgccagtttgccctcccttcctgtaacgtagaagtaatataaacagaccaataggggatggcgaaccacgccgttcaaggtcaagcacttctgtttccccggcatgcgaggaatagaccttttcaagggttgaagccacaagtgtcgttacccgcattggtactacacagagcttagtaccgctctggaaacttattggttggtcgttcagccattttcccctggtagacccggcagatgaggcaagaagctccccactggtaacagtgttcttgcctgcgtggctgcctgcacaccctaatgggtgtgaagccaataagtagacagggtgtgaagagccgcgtgtgctaccaatgagtcctccggcccctgaatgcggctaatccaaccccacagctatggcatgcaatccagcatgtgcgtagtcgtaatgagtaattgtgggacggaaccgactactttgggtgtccgtgtttcccttattctcttatgtcttgcctatggtgacaatattaagtattaatattgctacc

SEQ ID NO: 661 - DNA, 608 bp, Human rhinovirus
  C47, isolate CA-RGDS-1001, complete genome.1
ggcatgggttgtacccacccatgccacccaagtggtgtagtgctcctgtatcccggtacacttgcacgccagtttgccctcccttttccccaagtaacttagaagcttacacacaggccactaggaggtggtaatccataccactgatggtcaagcacttctgtctccccggcacgcatggaatagaccttgaaaagggttgaagccataaatgtcgttatccgcattggtactacacaaagcctagtaatgccttgaaacttctacggttggtcgttccgctagatgcacccctctagtagacctggcagatgaggcagggcaaaccccactggcgacagtggccctgcctgcgtggctgcctgcgcgcccacttgggtgcgaagccgatgaacagacaaggtgtgaagagccccgtgtgctaccaatgagtcctccggcccctgaatgcggctaatccaaccccacagctattgcacacaaaccagtgtgtatgtagtcgtaatgagtaattgtgggacggaaccgactactttgggtgtccgtgtttccttttattctttaaatttgcacatggtgacaatattggtagtatcagtattgtcatc

SEQ ID NO: 662 - DNA, 608 bp, Human rhinovirus C
  strain NY-074 polyprotein gene, complete cds.1
ttaaaactgggttatagttgctcccactataaccacccacgcggtgttgtggacttgtatttcggtacacttccatgccagttttatcttcccccctgcaacacttagaagaaatgtacttatggaccaataggcggcggccacccaggtcgttgacggtcaagcacttctgtctccccggtgatactggatacgctttacccaaggcgaaaaccgggctcatcgttatccgcaaagtgcctacgagaagtctagtagcactctgaaaacctatgactggtcgctccactgcaatcccagcagtagacctggcagatggggctagacataccccaccagcgatggtggtctagcccgcgtggctgcctgcacaccctatgggtgtgaagccagaaagtggacagggtgtgaagaacctattgtgctcactttgagtcctccggcccctgaatgtggctaatcctaaccctgcaaccgttgcgcacaacccagtgcgtatgcggtcgtaatgagcaattgcgggatggaaccaactactttgggtgtccgtgtttcttgttattcttttatttgcttatggtgacactgtatagctatacattgtcatc

SEQ ID NO: 663 - DNA, 609 bp, Rhinovirus C
  strain 20692_90_HRV-C polyprotein gene, complete cds.1
taaaactgggtacaggttgttcccacctgtaccacccacgtggtgtggtgctcttgtattccggtacatttgcacgccagtttgctacccctcaccctttgtaacctagaagctattaactcgaccaataggcggtggtaaaccataccacttacggtcaagcacttctgtttccccggtatgcgaggaatagactctcacagggttgaagcctcaagtatcgttatccgcattggtactacgcaaagcctagtagcgcctcggaaatcccttggttggtcgttccgctagtttcccctagtagacctggcagatgaggcaggacattccccactggtgacagtggtcctgcctgcgtggctgcctgcgcacccttcggggtgcgaagccaagtgatggacaaggtgtgaagagccccgtgtgctactaatgagtcctccggcccctgaatgcggctaatccaaccccacagctattgcacacaaaccagtgtgtatatagtcgtaatgagcaattgtgggacggaaccgactactttgggtgtccgtgtttccttttattctcattatcttgcttatggtgacaatactgtgatatagtgttgttacc

SEQ ID NO: 664 - DNA, 609 bp, Human rhinovirus C
  strain HRV-C49_p1277_s6237_2000 polyprotein1
aactgggcttgggttgtgcccacccaagctgcccacgtggcgttgtgctcttgtattccggtacacttgcacgccagtttgcctcccctaccctgcaacgaatttagaagaatggacacaaatagaccaataggtggtgacaatccatgtcactaatggtcaagcacttctgtttccccggtgtgatgtggaataaactcccccagggttgaagccataagcatcgttacccgctacgtgcctacgcaaaacctagtagcattctggagtctacttggttggccgttcagccactaacccgtggtaggcctggcagatgaggctgggcgtaccccactggtaacagtggcccagcctgcgtggctgcctgcccctctttgaggggaagccaattaggtgacagggtgtgaagagtcccgtgtgctcacgtagagtcctccggcccctgaatgtggctaatcctaaccccgcagctattgcacacaatccagtgtgttagtagtcgtaatgggcaactgtgggatggaaccaactactttgggtgtccgtgtttcttgtttttcttttatacttgcttatggtgacaaatagtgcatactgtttgacacc

SEQ ID NO: 665 - DNA, 610 bp, Mouse kobuvirus M-5/USA/2010
  complete genome.1
gtaacttcaagtgtgtgtgctcgtaatcttgactcctgccggaatgccgcccggttcagtgaacaaacagctaggcaagtccctcccttcccctgtggtcggttctcaccggccaccatccctcccccagcctgacgtgttacaggctgtgcaaagcccccgcgaaagctgctcacgtggcaattgtgggtcccccctttgtcaagacaccgagtctttctcccttaaggctagcccggtcccacgaacgtggaactggcaactagtggtgtcactacacgcctccgacctcggacgcggagtgctgttccccaagctgtaaccctgacccaagactgtgctgcctggcaagcaccgtctgggaagatgttccgctgtggctgccaaacctggtaacaggtgccccagtgtgtgtagtcttcctccagtctccggactggcagtcttgtgtaaagatgcagtgtaaggttcaagtgccaaatccctggaaggagtgaccctctactgccctaggaatgctgtgcaggtacccccaacttcggttggggatctgagcacaggctaattgtctacgggtagtttcatttcccatcctctcttttttggcatc

SEQ ID NO: 666 - DNA, 610 bp, Human rhinovirus C
  strain HRV-C02_p1264_s3775_1999 polyprotein1
ttaaaactgggtacaggttgttcccacctgtatcacccacgtggtgtggtgctcttgtattccggtacacttgcacgccagtttgccacccctcacccgtcgtaacttagaagctaacaactcgaccaacaggcggtggtaaaccataccacttacggtcaagcactcctgtttccccggtatgcgaggaatagactcctacagggttgaagcctcaagtatcgttatccgcattggtactacgcaaagcttagtagtgccttgaaagtcccttggttggtcgctccgctagtttcccctagtagacctggcagatgaggcaggacactccccactggcgacagtggtcctgcctgcgtggctgcctgcgcacccttaggggtgcgaagccaagtgacagacaaggtgtgaagagccccgtgtgctaccaatgagtcctccggcccctgaatgcggctaatccaaccccacagctattgcacacaagccagtgtgtatgtagtcgtaatgagcaattgtgggacggaaccgactactttgggtgtccgtgtttccttttattcttatcattctgcttatggtgacaatactgtgaaatagtgttgttacc

SEQ ID NO: 667 - DNA, 610 bp, Human rhinovirus
  54, isolate F05, complete genome.1
ttaaaactggatctaggttgttcccacctagatctcctacatggagttgtactctattattccggtaattttgtacgccagttttatatccctacccccatgtaacttagaagttaagcacaacgaccaataggaggcaattgaccaaattgctaaaggtcaagcacttctgtttccccggtcaagattgatacgctccaccagggcgaaaacaattgagatcgttatccgcaaagtgcctacgcgaagcctagtaacactttgaagagtttatggttggtcgctccgctattccccatagcagacctggcagatgaggctagaagctccccactggtgacagtgttctagcctgcgtggctgcctgcacacccttatgggtgtgaagccatatacttgacagggtgtgaagagcctagtgtgctcactttgagtcctccggcccctgaatgtggctaaccttaaacccgtagctagtgcacacaatccagtgtgtggctagtcgtaatgagcaattacgggatgggaccaactactttgggtgtccgtgtttcactttttccttttgtatttgcttatggtgacaatatatagattatatattgacacc

SEQ ID NO: 668 - DNA, 610 bp, Human rhinovirus
  98, strain ATCC VR-1298, complete genome.1
ttaaaactgggtctaggttgttcccacctaggcctcctacatggagttgtactctattattccggtaattttgtacgccagttttatatcccttcccccatgtaacttagaagtttgacacactgaccaataggtggcaattaaccaaattgctaaaggtcaagcacttctgtttccccggtcaagattgatacgctctaccagggcgaaaacaattgagatcgttatccgcaaagtgcctacgcgaagcctagtaatatcttgaagaatttatggttggtcgctccgccattacccatggtagacctggcagatgaggctagaaattccccactggtgacagtgttctagcctgcgtggctgcctgcacaccctcacgggtgtgaagccatacgtttgacaaggtgtgaagagcctagtgtgctcactttgagtcctccggcccctgaatgtggctaaccttaaacccgtagctggtgcacacaaaccagtgtgtagctagtcgtaatgagcaattacgggatgggaccaactactttgggtgtccgtgtttcactttttccttttatatttgcttatggtgacaatatatagattatatattggcacc

SEQ ID NO: 669 - DNA, 610 bp, Human rhinovirus
  74, complete genome.1
ttaaaactgggtttgggttgatcccacccaaacctcccaagcggagtggtactctgttatttcggtaactttgtacgccagttttatattccctcccccctttaaactgtaaagctaagcacacagaccaatagctgacaatcatccagattgttaatggtcaagcacttctgtttccccggtcaacgttgatatgctccaacagggcaaaaacaactgcgatcgttatccgcaaagtgcctacgcaaagcctagtagcacctttgaagtcatttggttggtcgctccgctgttccccacagtagacctggcagatgaggctagaaataccccactggtgacagtgttctagcctgcgtggctgcctgcacaccctttgggtgtgaagccaaatcatggacaaggtgtgaagagccccgtgtgctcactttgagtcctccggcccctgaatgtggctaaccttaaccctgcagctagagtgcacaatccagtgcatttctagtcgtaatgagcaattgcgggatgggaccaactactttgggtgtccgtgtttcactttttacctattatttgcttatggtgacaatatatataattatatattggcacc

SEQ ID NO: 670 - DNA, 610 bp, Human rhinovirus
  50, strain ATCC VR-517, complete genome.1
ttaaaactgggtccaggttgttcccacctggatctcctaatgggagttgtactctgttattccggtaactttgtatgccagttttatctccctacccccaatgtaacttagaagatgtacacaacgaccaataggtgatgatcaaccagattatcaaaggtcaagcacttctgttttcccggttagagttgatatgctccaacagggcaaaaacaactttaatcgttatccgcaaagcgcctacgcaaagcctagtaacagcttcgaagatttatggttggtcgttccgctgttccccacagtagacctggcagatgaggctagagattccccactggtaacagtgttctagcctgcgtggctgcctgcgcacccttcgggtgcgaagccatatttcggacaaggtgcgaagagccccgtgtgctcgctttgagtcctccggcccctgaatgtggctaaccttaaccctgcagctagtgcatacaaaccagtatgtggctagtcgtaatgagcaattgcgggatgggaccaactactttgggtgtccgtgtttctctttttccttttattattgcttatggtgacaatatatagtttatatattggcacc

SEQ ID NO: 671 - DNA, 610 bp, Human rhinovirus
  C43, strain SC174, complete genome.1
ttaaaactgaaccatagttgttcccactgtggttgcccaaggggcgtggtggtcttgtattacggtacatttccatgccagttttatcaccccttcccgaaacatagaagaaatgcacacaccgaccaataggaggtggtcaaccagaccactaaaggtcaagcacttctgtttccccggttggcttggatatgcttcacccgaggcaaaaaccgagccaatcgttatccgcaaagtgcctacgagaagcctagtagcacccttgaagccaatggttggtcgctccgttgcaaccccagcagcagacctggcagatgaggctgagcattccccaccagcgatggtggctcagcctgcgtggctgcctgcgcatccttcgggatgcgaagccagaaagtggacaaggtgtgaagagcctattgtgctcactttgagtcctccggcccctgaatgtggctaatcctaaccccgcagctactacacataagccaatgtgcaggtagtcgtaacgggcaactgtgggatggaaccaactactttgggtgtccgtgtttccttgttatctttttgaatgcctatggtgacaattgtacagtatacatttgttacc

SEQ ID NO: 672 - DNA, 611 bp, Human rhinovirus
  100, strain ATCC VR-1300, complete genome.1
ttaaaactgaatccagattgttcccatctggatttcctacatggagttgtactctattattccggtaattttgtacgccagttttatcaccccttcccccgtaacttagaagtttgaaacaaaagaccaataggaggtaactatccaagttactataggtcaagcacttctgtttccccggtcaaagttgatatgctccaccagggcaaaaacaattgagatcgttatccgcaaagtgcctacgcaaagcctagtagtatcttgaaaagcatgtggttggttgctccgctgtaccccacagtaaacctggcagatgaggctagaagttccccactggtgacagtgttctagcctgcgtggctgcctgcgcactctttgagtgcgaagccatatgtttgacaaggtgtgaagagccccgtgtgctcactttgagtcctccggcccctgaatgtggctaaccttaaccctgcagctagtgcatgcaatccagcatgtggctagtcgtaatgagcaattgcgggatgggaccaactactttgggtgtccgtgtttcacttttttccttttataattgcttatggtgacaatatatagtgatatatattgacacc

SEQ ID NO: 673 - DNA, 611 bp, Human rhinovirus
  67, strain ATCC VR-1177, complete genome.1
ttaaaactggatctaggttgttcccacctagatctcccaagtggagtggtacactattatcacggtaattttgtacgccggttttatctccccttaccccaagtaacttagaagtattacataaagaccaacaggcagtgattatccagatcactaaaggtcaagcacttctgtctccccggtcaaagttgatatgctccaacagggcaaaaacaactgagatcgttatccgcaaagtgcctacgcagagcctagtaactaccttgaaattacttggttggtcgttccaccaaaccccatggtagacctggcagatgaggctagaaattccccactggtaacagtgttctagcctgcgtggctgcctgcacaccctttgggtgtgaagccaagtaatggacagggtgtgaagagccgagtgtgctcactttgagtcctccggcccctgaatgtggctaaccttaaccctgcagctagagcgcgcaaaccagcgtgtatctagtcgtaatgagcaattgcgggacgggaccaactactttgggtgtccgtgtttctttttattcttatatttgcttatggtgacaatatataattatttgtatattggcacc

SEQ ID NO: 674 - DNA, 611 bp, Human rhinovirus
  A22, strain SC1029, complete genome.1
ataaaactggcgtgcatagttcccatccagatcacccaagtggtgtagtgctctgttattccggtaactttgcacgccagttttattacccctttccccagtaacttagaagctttaatacactgaccaatagggtgcgacaaccagtcgtacaaggtcaagcacttctgtttccccggtcaatgttgatatgctcctccagggcaaaaacaatagcgatcgttatccgcaagatgcctacgcaaagcctagtagcatctttgaaaatacttggttggtcgctcatgtgcaaccccagcattagacctggcagatgaggctagaaattccccactggcgacagtgttctagcctgcgtggctgcctgcacaccctaacgggtgtgaagcctggtattggacaaggtgtgaagagccccgtgtgctcatcttgagtcctccggcccctgaatgcggctaaccttaaacctgcagccattgcttacaatccagtgagtttatggtcgtaatgagcaattgcgggatgggaccgactactttgggtgtccgtgtttctctttttacttaaatttgagcttatggtgacaatatatagcaatatatattggcatc

SEQ ID NO: 675 - DNA, 611 bp, Human rhinovirus C
  isolate LZ651, complete genome.1
ttaaaactgaatcatggttgttcccaccatgattacccacgcggtgcagtggtcttgtattacggtacatttccataccagttttatacaccccaccccgaaacatatagaagtttgtacacaatgaccaataggtggtggccatccaggttactgacggtcgagcacttctgtttccccggtacccttgtatacgcttcacccgaggcgaaaaacgaggttatcgttatccgcaaagtgcctacgagaagcctagtaacacttttgaaacctatggctggtcgctcagctgctcacccagcagtagacctggcagatgaggctagacattccccaccagcgatggtggtctagcctgcgtggctgcctgcacaccctattgggtgtgaagccagaaagtggacagggtgtgaagagcctattgtgctcactttgagtcctccggcccctgaatgtggctaatcctaaccccgtagctgttgcatgcaacccagcatgtatgcagtcgtaatgggcaactatgggatggaaccaactactttgggtgtccgtgtttctcgtttcacttttcattgcttatggtgacaattgtagttgatacacttgttacc

SEQ ID NO: 676 - DNA, 611 bp, Human rhinovirus
  31, strain ATCC VR-506, complete genome.1
ttaaaactgggtgcgagttgttcccactcgcacttcctacgtggagtagtacactattattacggtaattttgtacgccagttttataacccttccccttttgtaacttagaagtttgaacttgagaccaataggtggtgatcaaccagatcgccaaaggtcaagcacttctgtttccccggtcaacattgatatgctccaccagggcaaaaacaattgcgatcgttacccgcaaagtgcctacgcaaagcttagtaatatcttgaacgatatatggttggtcgctccactaatccccatagtagacctggcagatgaggctggaaactccccactggcgacagtgttccagcctgcgtggctgcctgcgcactctcacgagtgcgaagccatatatttgacaaggtgtgaagagccccgtgtgctcactttgagtcctccggcccctgaatgtggctaaccttaaccctgcagctagtgcatacaaaccagtatgtggctagtcgtaatgagcaattgcgggacgggaccaactactttgggtgtccgtgtttcactttttcttttatggtttgcttatggtgacagtatatagtgtatatattgttacc

SEQ ID NO: 677 - DNA, 611 bp, Human rhinovirus
  34, complete genome.1
ttaaaactgggtccaggttgttcccacctggacttcccacgtggagttgtgcactgttattccggtaactttacacgccagttttatctcccttcccaaatgtaacttagaagatgtacacagcgaccaataggtggcaactagccaagttgcttaaggtcaagcacttctgtccccccggtcaatgttgatacgctctcccagggcgaaaacaactgagatcgttatccgcaaggcgcctacacaaaacctagtaacatcttgaatggtatgtggctggtcgttccgctaaaccccatagtagacctggcagatgaggctagaaattccccactggcgacagtgttctagcctgcgtggctgcctgcgtgtccttacggacacgaagccatatacttgacaaggtgtgaagagtcccgtgtgctcgtcttgagtcctccggcccctgaatgtggctaaccttaaccctgcagccagtgcgcacaaaccagtgtgtagctggtcgtaatgagtaattgcgggatgggaccaactactttgggtgtccgtgtttcactttttaccttttattatgcttatggtgacaatatatagatgcatatattgacacc

SEQ ID NO: 678 - DNA, 611 bp, Human rhinovirus
  18, strain ATCC VR-1128, complete genome.1
ttaaaactgaatccaggttgttcccacctggatttcccatgtggagtagtacactgttattccggtaactttgtacgccagttttataaccccttccccttatgtaacttagaagataagcacaaagaccaataggtggtggctatcccagtcactaaaggtcaagcacttctgtttccccggtcaacgttgatatgctccaccagggcaaaaacaaccgagatcgttatccgcaaagtgcctacgcaaagcctagtagcactttgaatagcatgtggttggtcgctccactattccccatagtagacctggcagatgaggctagaaatcccccactggcgacagtgttctagcctgcgtggctgcctgcgtgtcctaacggacacgaagccatatgtttgacaaggtgtgaagagccccgtgtgctcactttgagtcctccggcccccgaatgtggctaaccttaaccctgcagctggggcatacaatccagtgtgaactcagtcgtaatgagcaattgcgggatgggaccaactactttgggtgtccgtgtttcacttttttttataatgcttatggtgacaatatataataatttgtatattggcacc

SEQ ID NO: 679 - DNA, 611 bp, Echovirus
  E1, strain E1_NR-CPE capsid protein gene, partial cds.1
attagctggcccggtacaccaatcgggtcttgaccaagcacttctgttaccccggactgagtatcaataggctgctcacgcggctgaaggagaaaacgttcgttatccggccaattacttcgagaaacctagtaacaccgtgaaggttgcgcagcgtttcgttccgcactaccccagtgtagatcaggtcgatgagtcaccgcatcccccacgggtgaccgtggcggtggctgcgttggcggcctgcccatggggaaacccatgggacgcttcaatattgacacggtgcgaagagtctattgagctaattggtagtcctccggcccctgaatgcggctaatcctaactgcggagcagatacccgcacaccagcgggcagtctgtcgtaatgggtaactctgcagcggaaccgactactttgggtgtccgtgtttccttttatttttatattggctgcttatggtgacaattgaaagattgttaccatatagctattggattggccatccagtgagcaacagagcgattgtatttctctttgttggattcataccactaaactacaatagttataacactctattgtatatcattcatctgaacacaaaaag

SEQ ID NO: 680 - DNA, 612 bp, Canine kobuvirus
  strain UK003, complete genome.1
tttcccctgttcgtaactaagtgtgtgcccaatctcctcactcctgctggcttcaccgaccggcagtgtccaaaatgctaggtgaatcccctccctttcctctgggcttctgcccagcttcctccccccagcctgacgtgacacaggctgtgcaaagaccccgcgaaagctgccaaaagtggcaattgtgggtcccccctttgtaaaggcgtcgagtctttctccctcaaggctagacccgtcagtgaattctgtcgggcaactagtgacgccactgcacgcctctgacctcggccgcggagtgctgccccccaagtcgtgcccctgaccacaagttgtgctgtctggcaaacattgtctgtgagaatgttccgctgtggctgccaagcctggcaacaggctgccccagtgtgcgtagttctcatccagacttcggtctggcaacttgctgttaagacacggcgtaaggggcgtgtgccaacgccctggaacgagtgtccactctaataccccgaggaatgctacgcaggtacccctggttcgccagggatctgagcgtaggctaattgtctaagggtattttcatttcccattctttctttcttgttcata

SEQ ID NO: 681 - DNA, 612 bp, Human rhinovirus
  46, complete genome.1
ttaaaactggatctgggttgttcccacccagatttcccatgtggagtagtactctattattccggtaattttgtacgccagttttatattccctaccccgagtaacttagaagataagcacacaaggccaatagtgggtgattagccaaatcatcaaaggtcaagcacttctgtttcccccggtcaaggttgatatgctctaccagggcaaaaacaactgagatcgttatccgcaaaatgcctacacaaagcctagtatcatcttggaaggcacagagttggtcgctccactattccccatagtagacctggcagatgaggctagaaaatccccactggcgacagtgttctagcctgcgtggctgcctgcgtgccttgcgaggcacgaagccctgtgtttgacaaggtgtgaagagccccgtgtgctcattttgattcctccggcccctgaatgtggctaaccttaaccctgcagctagtgcacacaaaccagtgtgtatctagtcgtaatgagtaattgcgggacgggaccaactactttgggtgtccgtgtttcactttttaccttttaattgcttatggtgacaatatatataaatatatattgacacc

SEQ ID NO: 682 - DNA, 612 bp, Human rhinovirus
  53, complete genome.1
ttaaaactggatctgggttgctcccacccagattacccaagtggtgtagtactctgttattacggtagctttgtacgccagttttatcacccctccccacaatgtaacttagaagttttacacttacagaccaataggatgtgattatccaaatcactaaaggtcaagcacttctgtttccccggttagatttgatacgctccaacagggcgaaaacagatctgatcgttatccgcaagatgcctacgcaaagcttagtagcgctctgaatgctttttggctggttgttccactacaaacccagtagtaaacctggcagatgaggctagaagttccccactggcgacagtgttctagcctgcgtggctgcctgcacaccctatgggtgtgaagccaatcagttgacagggtgtgaagagccccgtgtgctcatcttgagtcctccggcccctgaatgtggctaaccttaaacccgcagccaaggtgtgcaaaccagcacattcttggtcgtaacgagtaattgtgggatgggaccaactactttgggtgtccgtgtttctttttattcttttacaatgcctatggtgacaatatatagtatatattgtcatt

SEQ ID NO: 683 - DNA, 612 bp, Human rhinovirus
  A40, strain 7D5, complete genome.1
ttaaaactgggtccaggttgttcccacctggatctcctacatggagttgtactctgttattccggtaaccttgtacgccagttttatatcccctccccaaatgtaacttagaagttatacacacagaccaataggcggtgatcctccagatcactaacggtcaagcacttctgtctccccggtttgaattgatacgctccaacagggcgaaaacaatttgaatcgttacccgcaaagtgcctacgcaaagcctagtagcactttagaaaatttatggttggtcgctcagctataccccctagtagacctggcagatgaggctagaagtaccccactggcgacagtgttctagcctgcgtggctgcctgcacaccctcacgggtgtgaagccatatatttgacaaggtgtgaagagccccgtgtgctcactttgagtcctccggcccctgaatgtggctaaccttaaccctgcagctagtgcatgtaatccaacatgttgctagtcgtaatgagcaattgcgggatgggaccaactactttgggtgtccgtgtttcactttttaccttttatttgcttatggtgacaatatatataatatatatattggcatc

SEQ ID NO: 684 - DNA, 612 bp, Human rhinovirus A
  isolate N13, complete genome.1
ttgaaactgagtgtgggttgttcccacccacacttcccatgtggagtagtacactgttattacggtaaccttgtacgccagttttatcatccctttccctttgtaacttagaagttttaaacttgagaccaataggtggtgatcagccagatcactaaaggtcaagcacttctgtctccccggtcaacgctgatatgctccgccagggcaaaaacagctgcgatcgttatccgcaaagtgcctacgcaaagcctagtaatatcttgaatgatatatggttggtcgttcagctaaaccccatagtagacctggcagatgaggctggaaataccccactggtgacagtgttccagcctgcgtggctgcctgcgcactcttgcgagtgcgaagccatatatttgacaaggtgtgaagagccccgtgtgctcactttgagtcctccggcccctgaatgtggctaaccttaaccctgcagctagtgcatacaatccagtgtgtggctagtcgtaatgagcaattgcgggatgggaccaactactttgggtgtccgtgtttcactttttcctttataatttgcttatggtgacagtatatagcttatatattgttacc

SEQ ID NO: 685 - DNA, 612 bp, Human rhinovirus
  C3, strain HRV-QPM, complete genome.1
ttaaagctggatcatggttgttcccaccatgattacccacgcggtgcagtggtcttgtattacggtacatttccataccagttttatacaccccaccccgaaactcatagaagtttgtacacaatgaccaataggtggtggccatccaggtcgctaatggtcaagcacttctgtttccccggcacccttgtatacgcttcacccgaggcgaaaaatgaggttgtcgttatccgcaaagtgcctacgaaaagcctagtaacactttgaaaacccatggttggtcgctcagctgtttacccaacagtagacctggcagatgaggctagacattccccaccagcgatggtggtctagcctgcgtggctgcctgcacaccctgccgggtgtgaagccagaaagtggacaaggtgtgaagagcctattgtgctcactttgagtcctccggcccctgaatgtggctaaccctaaccccgtagctgttgcatgtaacccaacatgtatgcagtcgtaatgggcaactatgggatgggaccaactactttgggtgtccgtgtttcctgttttactttttcattgcttatggtgacaattgtatctgatacacttgttacc

SEQ ID NO: 686 - DNA, 612 bp, Human rhinovirus
  44, complete genome.1
ttaaaactgggtccaggttgttcccacctggatctcctacatggagttgtactctattatcccggtaatcttgtacgccagttttatatcccttccctttttgtaacttagaagttaaacacacagaccaataggtggtggctatccaagtcattaatggtcaagcacttctgtttccccggtttagattgatacgctccaccagggcgaaaacaatttaaatcgttatccgcaaaatgactacgcaaagcctagtaatatcttgaaggacttatggttggtcgctccactaaaccccatagtagacctggcagatgaggctagaaataccccactggagacagtgttctagcctgcgtggctgcctgcacaccctatgggtgtgaagccatactttcgacaaggtgtgaagagccccgtgtgctcattttgagtcctccggcccctgaatgtggctaaccttaaccctgcagctagtgcatgcaatccagcatgttgctagtcgtaacgagcaattgcgggatgggaccaactactttgggtgtccgtgtttcactttttccttttatttgcttatggtgacaatatatatagtacatatatattggcatc

SEQ ID NO: 687 - DNA, 613 bp, Human rhinovirus
  9, isolate F01, complete genome.1
ttaaaactggatctgggttgttcccactcaggtctcccacgtggagtagtacactgttattacggtaactttgtacgccagttttacatcccctccccccaagtaacttagaagataagcacacaggccaataggagatgatcagccagatcattatgggccaagcacttctgtttccccggtcgaagttgatatgctccaacagggcaaaaacaactgagatcgttatccgcaaagcgcctacgcaaagcctagtaactatctggaaattacttggttggtcgctccgccataccccatggtagacctggcagatgaggctagaaattccccactggcgacagtgttctagcctgcgtggctgcctgcacaccctttttgggtgtgaagccaagtaatggacagggtgtgaagagccccgtgtgctcgctttgagtcctccggcccctgaatgtggctaaccttaaccccgcagctagagcacacaacccagtgtgtatctagtcgtaatgagcaattgcgggatgggaccaactactttgggtgtccgtgtttcttgtttttcttttatatttgcttatggtgacaatatatagtgatatatattggcatc

SEQ ID NO: 688 - DNA, 613 bp, Human rhinovirus
  12, complete genome.1
ttcaaactgggttgtggttgatcccaccacaactgctcactgagcgtagtgctctcatattccggtatgcttgcacgccagttttactcccctcccctcattgtaacttagaagcaaagcacacctgatcaataggagataacttgccaggttatctaagatcaagcacttctgtttccccggcaagtgtgaatatgctttacccaaggcaaaagctgatcttgtcgttatccgcaaggtgcctacgagaagcctagtaatgctcaagatgtggtttgactggtcgctccgctgttccccacagtagacctggcagatgaggctggacattccccaccagcgatggtggtccagcctgcgtggctgcctgcacaccctatgggtgtgaagccaaatttactgacagggtgtgaagagcctattgtgctcaccttgattcctccggcccctgaatgtggctaatcctaaccccgctgctattgcacacgaaccagtgtgtagatagtcgtaatgagcaatagtgggatggaaccaactactttgggtgtccgtgtttcttgtttttctttatttgtcttatggtcacaatatatatataacgtatattgtgatc

SEQ ID NO: 689 - DNA, 613 bp, Rhinovirus C
  strain 20692_83a_HRV-C polyprotein gene, complete cds.1
tgtggttgtacccaccaccgggcatactgtgcgtggtacactgtgattccggtcaccttgtacgcctgtttgctaccctaccccaactttctttcgttctttacttccagtaacttagaagttgacacagagtccaataggatgcagctaatccaagtctgccacggacaagcacttctgtttccccgggtgtgtgaatagactccaacagggttgaagctgtagcactcgttatccgcataactaccacgcgaatgttagtaacaccctctaggtatagtgggatttcgctccgcagaaaccccatctgtagattagggcaatgaggctacacggaccccactggcgacagtggtgtagcctgcgtggtgccctacctggggtttcataccccaggattccactttactgacagggtgtgaaggcgctagtgtgctagttgtgagtcctccggtccctgaatgtggctaatcctaaccccgtggccatttcatgtaaaccaacatgcaggtggtcgtaacgagtaatcacgggatggaaccaactactttgggtaaccgtgtttcctgttttactttaatgtgtgtcttatggttacaactatagagtaacc

SEQ ID NO: 690 - DNA, 614 bp, Human rhinovirus
  64, complete genome.1
ttcaaactggatctgggttgttcccacccagatcacccaagtggtgtagtactctgtcattccggtgactttgtacgccagtttttacaccccccccttcttgtaacttagaagaattaagttcagaccaataggaaaacgacaaaccagtcgtttaaggtcaagcacttctgtttccccggtcaatgctgatatgcttcaccaaggcaaaaacagcagcgatcgttacccgcaagacgcctacgcaaagcctagtaatgcctttgaagatatttgtctggtcactcaggtacaatcccagtactagacctggcagatgaggctggaaaatccccactggcgacagtgttccagcctgcgtggctgcctgcacacccatacgggtgtgaagccaaatattggacaaggtgtgaagagccccgtgtgctcgtcttgagtcctccggcccctgaatgcggctaaccttaaccccacagccattgcttgcattccagcaagtctatggtcgtaatgagcaattgtgggatgggaccgactactttgggtgtccgtgtttcactttttaccttttattatgcttatggtgacaatatatagcgttatatattggcatc

SEQ ID NO: 691 - DNA, 614 bp, Human rhinovirus
  A22, strain HRV-A22/Lancaster/2015, complete1
cacttgggtgatctgggtgggaacaacccagatcccccaagtggtgtagtgctctgttattccggtaaccttgcacgccagttttatcacccctttccccatgtaacttagaagttttaaacacagaccaatagggagcgacaaaccagtcgtgaaaggtcaagcacttctgtttccccggtcaacgttgatatgctctcccagggcaaaaacaacagcgatcgttacccgcaagatgcctacgcaaagcttagtaacgccctcgaagatactcggttggtcgttcatgtgcaaccccagcattagacctggcagatgaggctagaaattccccactggcgacagtgttctagcctgcgtggctgcctgcacaccctgacgggtgtgaagcctagtattggacaaggtgtgaagagccccgtgtgctcatcttgagtcctccggcccctgaatgcggctaaccttaaacctgcagccattgctcacaatccagtgagtttgtggtcgtaatgagcaattgcgggatgggaccgactactttgggtgtccgtgtttctctttttaccttacattttagcttatggtgacaatatatagtgatatatattggcatc

SEQ ID NO: 692 - DNA, 614 bp, Rhinovirus C
  isolate 7383-MY-10, complete genome.1
ttaaaactgaaccatggttgttcccaccatggttacccacgtggtgcagtggacttgtattacggtacatttccataccagttttataacccctaccctgaaacttttagaagcatgtacacatacagaccaacaggtggcaatcagccagattgctaacggtcaagcacttctgtttccccggtaatcttgcatacgcttcacccgaggcgaaaagtgagattatcgttatccgcaaagtgcctacgagaagcccagtagcacattgaaagcctatggttggtcgctcagctgttcacccaacagtagacctggcagatgaggctagatattccccaccagcgatggtgatctagcctgcgtggctgcctgcacaccctatcgggtgtgaagccagaaagtggacaaggtgtgaagagcctattgtgctcactttgagtcctccggcccctgaatgtggctaatcctaaccccgtagctgttgcatgtaacccaacatgtctgcagtcgtaatgggcaactacgggatggaaccaactactttgggtgtccgtgtttcttgtttttctttatatttgcttatggtgacaattgtagatactacacttgttacc

SEQ ID NO: 693 - DNA, 615 bp, Unknown
  Description of Unknown: Human coxsackievirus A16, strain shzh99-79 polyprotein gene, partial1 sequence
cgaccaatagtgggcgtgacgcaccagtcacgtcttggtcaagcacttctgtttccccggaccgagtatcaatagactgcttacgcggttgaaggagaaaacgttcgttacccggctaactacttcgagaaacctagtagcaccatgaaagttgcagagtgtttcgctcagcacttcccccgtgtagatcaggtcgatgagccactgtgaaccccacgggcgaccgtgacagtggctgcgttggcggcctgcccatggggcaacccgtgggacgctctaatacagacatggtgtgaagagtctattgagctagttagtaatcctccggcccctgaatgcggctaatcctaactgcggagcacgcaccctcaatccagggggcagtgtgtcgtaacgggtaactctgcagcggaaccgactactttgggtgtccgtgtttccttttattccttactggctgcttatggtgacaatcaaagagttgttaccatatagctattggattggccatccggtgtctaacagagctattgtctacctgttcattggatacgtccctctcaattacaagactctccaaactcttaactacatactgctacttaatcataagaa

SEQ ID NO: 694 - DNA, 615 bp, Human rhinovirus
  41, complete genome.1
ttaaaactgggtttgggttgatcccacccaaaccacccacgtggtgtagtacactgttatctcggtaactttgtacgccagttttatctccccctcccccctttgtaacttagaagtcatgcacaatgaccaatagcaggcaatcatccagattgtcatcggtcaagtacttctgtttccccggttcagattgatatgctccaacagggcaaaaacaacctggatcgttatccgcaagatgcctacgcagaacctagtatcacactggaagattctcggttggtcgctcagttacaaccccagtaacagacctggcagatgaggctagaaattccccactggcgacagtgttctagcctgcgtggctgcctgcacacccgtttgggtgtgaagcctagaattggacagggtgcgaagagtcgagtgtgctcatcttgagtcctccggcccctgaatgcggctaaccctaaccctgcagccattgcccacaaaccagtgggtctatggttgtaatgagcaattgcgggatgggaccgactactttgggtgtccgtgtttcactttttacttattatttgcttatggtgacaatatatagatacatatattgacacc

SEQ ID NO: 695 - DNA, 615 bp, Human rhinovirus
  73, complete genome.1
ttaaaactgggtttgggttgttcccacccaaaccacccacgcggtgttgtacactgttattccggtaaccttgtacgccagttttatatcccttcccccccttgtaacttagaagacatgcgaatcgaccaatagcaggcaatcaaccagattgtcaccggtcaagcacttctgtttccccggctctcgttgatatgctccaacagggcaaaaacaattggagtcgttacccgcaagatgcctacgcaaaacctagtagcatcttcgaagatttttggttggtcgctcagttgctaccccagcaatagacctggcagatgaggctagaaataccccactggtgacagtgttctagcctgcgtggctgcctgcacacccacacgggtgtgaagccaaagattggacaaggtgtgaagagtcacgtgtgctcatcttgagtcctccggcccctgaatgcggctaaccttaaccccgtagccattgctcgcaatccagcgagtatatggtcgtaatgagtaattacgggatgggaccgactactttgggtgtccgtgtttcactttttacttatcaatttgcttatggtgacaatatatatagatatatattgacacc

SEQ ID NO: 696 - DNA, 615 bp, Human rhinovirus
  15, complete genome.1
ttaaaactgggttcaggttgatcccacctgaacctcccaagcggagtagtactctgttatttcggtaactttgtacgccagttttatatccccctccccatgtaacttagaagatgagctcacagaccaatagccggcaatcatccagattgtcaatggtcaagcacttctgtttccccggtcaacgttgatatgctccaacagggcaaaaacaactgagatcgttatccgcaaagtgcctacgcaaagcctagtaatgctttcgaagtcatttggttggtcgctccgctgtaacccacagtagacctggcagatgaggctagaaactccccactggcgacagtgttctagcctgcgtggctgcctgcacaccctttgggtgtgaagccaaattacggacaaggtgtgaagagccccgtgtgctcactttgagtcctccggcccctgaatgtggctaaccttaaccctgcagctagagtgcacaatccagtgtatttctagtcgtaatgagcaattgcgggatgggaccaactactttgggtgtccgtgtttcactttctttttttatcttttatttgcttatggtgacaatatattgaattatatattgacacc

SEQ ID NO: 697 - DNA, 615 bp, Human rhinovirus
  94, complete genome.1
ttcaaactggatctgggttgttcccacccagatcacccaagaggtgtagtgctctgtcattccggtgaccttgcacgccagttttatcaccccttccctcttgtaacttagaagaattaaactcagaccaataggaagcgacaagccagtcgtgacaggtcaagcacttctgtttccccggtcaaagttgatatgcttcaccaaggcaaaaacaacagcgatcgttatccgcaagatgcctacgcaaagcctagtagtgcctttgaaaatatttgtctggttgctcaagtacaaccccagtactaaacctggcagatgaggctggagcttccccactggtaacagtgttccagcctgcgtggctgcctgcacacccttacgggtgtgaagccaaatattggacaaggtgtgaagagccccgtgtgctcatcttgagtcctccggcccctgaatgcggctaaccttaaccccacagccattgctcacaatccagtgagtgtatggtcgtaacgagcaattgtgggatgggaccgactactttgggtgtccgtgtttctcttttttcctttttaattctgcttatggtgacaatatatagtgttatatattggcatc

SEQ ID NO: 698 - DNA, 615 bp, Human rhinovirus A
  isolate hrv-A101, complete genome.1
ttaaaactggatcatggttgttcccaccatgattacctacgggtgtagtatacttgtatcccggtacatttatacgccagttttataacccccaccccaaatgtaacttagaagcatgtacacaatgatcaatagggtggtggctatccaagtcatctaagatcaagcacttctgtctccccggtgagtgtgaatatgctttacccaaggcaaaagctaatctcatcgttatccgcaaggtgcctacgggaagcctagtaacattctgaagatattttggttggtcgatcagttgcactcacccatgcaatagacctggcagatggggctaggcatacctcactggtaacagtggcctagcccgcgtggctgcctgcacaccttcgggtgtgaagccataatattgacagggtgcgaagagcctactgtgctcaccttgagtcctccggcccctgaatgtggctaatcctaaccccgtatccattgcacacaaaccagtgtgtctatggtcgtaatgggtaactacgggatggaaccaactactttgggtgtccgtgtttcttgtttttctttaatactgcttatggtgacattatatattgatatagtgtcatc

SEQ ID NO: 699 - DNA, 615 bp, Rhinovirus C
  isolate 8713-MY-10, complete genome.1
ttaaaactgggcaggagttgttcccactcttgccacccacagggtgtggtgctcttgtattacggtacacttgcatgccagttttatctcccccctccccacaatgtaatttagaagccaatcacatgaccaataggaagtggtaagccataccacttaaggtcaagcacttctgtttccccggtatgcgtggaataggcctcttaaggggctgaagccacaattatcgttacccgcatgtgaactacgcgaaacctagtactaccttgaaagtacattgtctggtcgctcagccaatccccatggtagacctggcagatgaggcaagaggtaccccactggtaacagtgttcttgcctgcgtggctgcctgcacacccttaccgggtgtgaagccaatgtatagacagggtgagaagagtcgagtgtgcttcacatgagtcctccggcccctgaatgcggctaatccaaccccgcagctgtagtatgcaagccagcatatgtgcagtcgtaatgggtaactgcgggacggaaccgactactttgggtgtccgtgtttcctgtttttcctttattcatgcttatggtgacaatattgagaattaatattgtcact

SEQ ID NO: 700 - DNA, 615 bp, Human rhinovirus
  49, isolate F04, complete genome.1
ttaaaactggatctgggttgttcccacttggatctcccaaagggagtggtactctgttattacggtaactttgtacgccagttttatcctccccttaccccatgtaacttagaagtttttcataaagaccaatagttggtaatcatccagattacttaaggtcaagcacttctgtttccccggtcaatgttgatatgctccaacagggcaaaaacaactgcgatcgttatccgcaaagcgcctacgcaaagcttagtagcacctttgagattgtttggttggtcgttccgccatttcccctggtagacctggcagatgaggctagaagtaccccactggcgacagtgttctagcctgcgtggctgcctgcacaccctgtgggtgtgaagccaaataatggacaaggtgtgaagagccccgtgtgctcgctttgagtcctccggcccctgaatgcggctaaccttaaccctgcagctagagcatacaaaccagtgtgtatctagtcgtaatgagcaattgcgggatgggaccgactactttgggtgtccgtgtttcactttttttttacttataattgcttatggtgacaatatatatatagtatatattgacacc

SEQ ID NO: 701 - DNA, 616 bp, Human rhinovirus
  13, isolate F03, complete genome.1
ttaaaactgggtctgggttgttcccacccaaaccacccacgcggtgtagtacactgttattccggtaactttgtacgccagttttatatccccaccccccttttgtaacttagaagttatgcacactgaccaatagtgggcaatcatccagattgtcatcggtcgagcacttctgtttccccggtttgagttgatatgctccaccagggcaaaaacaactcagatcgttatccgcaagatgcctacacagaacttagtaccattctggaaaattcttggctggtcgttcaattactaccccagtaatagacctggcagatgaggctagaagttccccactggcgacagtgttctagcctgcgtggctgcctgcacacccttctggggtgtgaagcctagaattggacagggtgtgaagagtcgcgtgtgctcatcttgagtcctccggcccctgaatgcggctaaccctaaccctgcagccattgcccacaatccagtgggtttatggtcgtaatgagcaattgcgggatgggaccgactactttgggtgtccgtgtttcactttttacttattatttgcttatggtgacaatatatagatacatatattgacacc

SEQ ID NO: 702 - DNA, 616 bp, Human rhinovirus
  36, complete genome.1
ttaaaactgggagtgggttgttcccactcactccacccatgcggtgttgtacactgttattacggtaaccttgtacgccagttttgccacccttccccattatgtaacttagaagtttgtacaacaagaccaataggtgataattatccagattatcaaaggtcaagcacttctgtttccccggtcgatgaggatatgctttacccaaggcaaaaaccttaaagatcgttatccccacactgcctacacagagcctagtaccacttttgatgtaattaggttggtcgctccctgcaaacccagcagtagacctggcagatgaggctggacactccccactggtgacagtggtccagcctgcgtggctgcctgctcaccctattgggtgagaagcctacttattgacaagatgtgaagagccgcgtgtgctcagtgtgcttcctccggcccctgaatgtggctaaccttaaccctgcagccgctgcccataatccaatgggtttacggtcgcaacgcgcaagtgcgggatgggaccaactactttgggtgtccgtgtttcctatttttcttttatttgcattttatggtgacaatttatagtatatagattgtcgtc

SEQ ID NO: 703 - DNA, 616 bp, Human rhinovirus
  66, strain ATCC VR-1176, complete genome.1
ttaaaactggatctaggttgttcccacctagatctcccatgtggagtagtactctattattacggtaattttgtacgccagttttatatccccttccccttttgtaacttagaagtcgtgaacacagaccaataggtggcgatcacccagatcgcttaaggtcaagcacttctgtttccccggtcaacgttgatatgctccaccagggcaaaaacaacggagatcgttatccgcaaggtgcctacgcaaagcctagtaacctcttggaggatatatggttggtcgctcagctataccccatagtagacctggcagatgaggctagaaactccccactggcgacagtgttctagcctgcgtggctgcctgcgcactcttatgagtgcgaagccatatatttgacaaggtgtgaagagccccgtgtgctcaccttgagtcctccggcccctgaatgtggctaaccctaaccctgcagctagtgcatgaaatccatcatgttgctagtcgtaatgagcaattgcgggatgggaccaactactttgggtgtccgtgtttcactttttccttttatatttgcttatggtgacaatatatatataacatatatattggcatc

SEQ ID NO: 704 - DNA, 616 bp, Human rhinovirus
  90, strain ATCC VR-1291, complete genome.1
ttaaaactgggttcaggttgttcccacctgaatctcctacatggagttgtactctattatcccggtaattttgtacgccagttttatcctcccctccccatgtaacttagaagctgtacacaacgaccaacaggtaacattcatccagagtgttaaaggtcaagcacttctgtttccccggtcaaagttgatatgctccaacagggcaaaaacaactgcgatcgttatccgcagagcaactacgcaaagcttagtaccactttcaatggtgtatggctggtcgctccactataaacccaatagtagacctggcagatgaggctagaaactccccactggtaacagtgttctagcctgcgtggctgcctgcgtgcccttttgggcacgaagccttacatttgacaaggtgcgaagagccccgtgtgcttgctttgagtcctccggcccctgaatgtggctaaccttaaccctgcagctagtgtgtgcaatccagcacatggctagtcgtaatgagcaattgcgggatgggaccaactactttgggtgtccgtgtttcttgtttttcttttatatttgcttatggtgacaatatatatagaatatatatattggcatc

SEQ ID NO: 705 - DNA, 616 bp, Human rhinovirus C
  strain 025, complete genome.1
ttaaaactgggtacaggttgttcccacctgtaccacccaagtggtgtagtgctcttgtattccggtacatttgcacgccagtttgccacccctaccctctatgtaacttagaagcttacacaaagaccaataggcggtggtaaacccataccactaacggtcaaacacttctgtttccccggcatatgaggaataggctccaaaagggctgaagccactagtgtcgttatccgcattggtactacgcaaagcctagtatcggcctgaaaatttcttggttggtcgttcggccagttaccccactggtagacctggcagatgaggcaggacttaccccactggcgacagtggtcctgcctgcgtggctgcctgcacacccttatggggtgtgaagcctaggaacggacagggtgtgaagagccccgtgtgctaccaatgagtcctccggcccctgaatgcggctaatcttaccccgcagctgttgcacacaatccagtgtgtatgcagtcgtaatgagcaattgtgggatggaaccgactactttgggtgtccgtgtttccttgttttccttatatttgcttatggtgacaatattgatattatcagtgttgtcatc

SEQ ID NO: 706 - DNA, 617 bp, Theiler's disease-associated virus
  isolate HorseA1_serum, complete1
tgataccgtgtcccggtacgacctcgcgcgtccccaagctcgccctgaggggggagcgtaagggcgcgtagtggggtagccccccaaaccgagccaccctagtgagtgactttagaatggttagggagactaccgccttcgctgtttggggacctaatgatccgcgtgccagggttcttcgggtaaatcccggcgcggtgttttgggttcagggcagtaggggcagacgggccagcagtcgctggttcctggtaccaccaccctatccggacgacctccctcacgaaaggtcgccacggtctgtggctcgacgacgcctataattcagtccgaggggcgcagccctcgttaaacttaggcaaggttcctcgccattgatttggccaggggtttaagtgaacgccgcccttttaatgtttaatagggttctttcccggcgggttgacaaacacttccctgggctcttcgttggcctcggttccttgatgcttcggcacccatgagcgcacaggggggggaccctgcgacagtccgccaagaggaaaatccttcgggtgacctcgtgcgcaacccaatcccttcttcttccacatggcgtgtctgtggtgcatgctgtg

SEQ ID NO: 707 - DNA, 617 bp, Human rhinovirus
  96, strain ATCC VR-1296, complete genome.1
ttaaaactgggtctgggttgtccccacctagatcacccaagtggtgtagtacactgttatttcggtaaccttgtacgccagttttataaccccctccccaaatgtaacttagaagctgtacacaacgaccaatagagggtaatcatccagattacttacggtcaagcacttctgtctccccggtttactttgatatgctccaacagggcaaaaacaaagtgaatcgttacccgcaagatgcctacgcaacgcctagtaacatcctgaattgtttatggttggtcgctcaattacaaccccagtaatagacctggcagatgaggctagatattccccactggcgacagtgatctagcctgcgtggctgcctgcacaccccttgtgggtgtgaagccataatcatgacagggtgcgaagagccacgtgtgctcatcttgagtcctccggcccctgaatgcggctaaccctaaccctgcagccattgcctacaaaccagtgggtatgtggtcgtaacgagaaattgcgggatgggaccgactactttgggtgtccgtgtttcactttttaccttatatttgcttatggtgacaatatatacgagtttatatattgacacc

SEQ ID NO: 708 - DNA, 617 bp, Rhinovirus C
  isolate 3805-MY-10, complete genome.1
ttaaaactgagtgtgggttgcacccacccacactgtctacggacgttgtacacttgtatcccggtacatttgtacgccagtttgcctccccttccctttatgtaacgtaagaagcctcagcacaatggccaacaggtggtaacaatccatgttacctacggtcaagcacttctgtctccccggtacgaagagtgttaagtcttacccaagaccgaagctttgagtatcgttatccgcataactactggacaaagcccagtaacaccccacgatgtaggatggttggtcgttccaccagtgtaaccccctggtagacctggcagatgaggctagagtttccccactggtgacagtgttctagcctgcgtggctgcctgctcccttatgggagaagccattctattgacaaggtgtgaagagccccgtgcgctagttatgagtcctccggcccctgaatgcggctaatccaaccctgcagccattgcatggaaaccaccatgtagatggtcgtaatgagcaattgcgggacggaaccgactactttgggtgtccgtgtttcttgtttttcttatcaattgcttatggtgacaatatatacagctaatatattgttcacc

SEQ ID NO: 709 - DNA, 617 bp, Human rhinovirus
  81, isolate F06, complete genome.1
ttaaaactggatctgggttgttcccacccagatcacctacatggtgttgtacactattattacggtaattttgtacgccagttttatatccccttccccaaatgtaacttagaagcaatgcaaactgatcaatagggggcaatcatccagattgctaatgatcaagcacttctgtttccccggtcaaggttgatatgctccacaagggcaaaaacaaccgagatcgttatccacaagatgcctacgcaaagcctagtaatgcttttgaagatacttggttggtcgctcagctgtgcacccgacagtagacctggcagatgaggctagaagtacccctctggcgacagagttctagcctgcgtggctgcctgcacacccttttgggtgtgaagccaagtattggacaaggtgtgaagagccccgtgtgctcatcttgaatcctccggcccctgaatgtggctaaccttaaacctgcagccagtgcacacaaaccagtgtgtagctggtcgtaatgagcaattgcgggatgggaccaactactttgggtgtccgtgtttcactttttacctttatattgcttatggtgacaatatatatagcacatatatattgttatc

SEQ ID NO: 710 - DNA, 617 bp, Human rhinovirus C
  strain WA823M02, complete genome.1
ttaaaactgaatcatggttgttcccaccatgattgtctactggacgttgtactcttgtattccggtacacttgtacgccagttttataaccccttcccctttgcaacttagaagaaagtaaacactggccaataggaaatagcaaaccacgctatttacggtcaagcacttctgtttccccggtctgacgggatatgcttcacccgaggcagaaactcagatgatcgttatccgcaaagtgcctacgggaagcctagtagcactttggaagttgttgggctggtcgctcaattgctgaccccgagcaatagacttggcagatgaggctggacgtgccccaccagtgatggtggtccagcctgcgtggctgcctactcaccctaacagggtgagaagcctatcaatagacaaggtgtgaagagcctactgtgctcactttgattcctccggcccctgaatgtggctaatcctaaccccgtatctatcgcatgcacaccagcatgtaggtagtcgtaatgggcaactacgggacggaaccaactactttgggtgtccgtgtttccttgttcttttattacttgcgtatggtgacaattgtatgaaatacgattgacacc

SEQ ID NO: 711 - DNA, 618 bp, Unknown
  Description of Unknown: Human rhinovirus type 89 (HRV89), complete genome.1 sequence
ttaaaactgggagtgggttgttcccactcactccacccatgcggtgttgtactctgttattacggtaactttgtacgccagtttttcccacccttccccataatgtaacttagaagtttgtacaatatgaccaataggtgacaatcatccagactgtcaaaggtcaagcacttctgtttccccggtcaatgaggatatgctttacccaaggcaaaaaccttagagatcgttatccccacactgcctacacagagcccagtaccatttttgatataattgggttggtcgctccctgcaaacccagcagtagacctggcagatgaggctggacattccccactggcgacagtggtccagcctgcgtggctgcctgctcacccttcttgggtgagaagcctaattattgacaaggtgtgaagagccgcgtgtgctcagtgtgcttcctccggcccctgaatgtggctaaccttaaccctgcagccgttgcccataatccaatgggtttgcggtcgtaatgcgtaagtgcgggatgggaccaactactttgggtgtccgtgtttcctgtttttcttttgattgcattttatggtgacaatttatagtgtatagattgtcatc

SEQ ID NO: 712 - DNA, 618 bp, Human rhinovirus
  7, complete genome.1
ttaaaactgggagtgggtgttcccactcactccacccacgtggtgctgtacactgttattccggtaactttgtacgccagtttttccctcccttccctcattatgtaacttagaagcatgaacatatggaccaataggcaataatcatccagattattgaaggtcaagcacttctgtttccccggtcaataaagatatgctttacccaaggcaaaaacttttgagatcgttacccgcacatcaactacgcaaagcctagtatcacctttgatgtactaagactggtcgtttcctgcaaccccagcagtagacctggcagatgaggctggacgtaccccactggcgacagtggtccagcctgcgtggctgcctgctcgcccatatgggcgagaagccttattattgacaaggtgtgaagagccgcgtgtgcttggtgtgagtcctccggcccctgaatgtggctaaccttaaccctgcagccattgctcataatccaatgagttagtggtcgtaatgcgcaagtgcgggatgggaccaactactttgggtgtccgtgtttcttattttttctttcatgtgtgttatatggtgacaatttatagtatataagttgtcatc

SEQ ID NO: 713 - DNA, 618 bp, Human rhinovirus
  63, strain ATCC VR-1173, complete genome.1
ttaaaactgggtccaggttgttcccacctggacctcctaagtggagtggtacactattattccggtaattttgtacgccagttttatctccccaccccccttttgtaatttagaagttatgaacacagaccaataggtggcaactagccaagttgttaaaggtcaagcacttctgtctccccggctgacgttgatatgctccaacagggcaaaaacaatgaaagtcgttatccgcaaagtgcctacgcaaagcctagtaacactttgaaatgtctatggttggtcgctcagctattccccatagtagacctggcagatgaggctagaaataccccactggtaacagtgttctagcctgcgtggctgcctgcgcaccctccccgggtgcgaagccatatatatgacaaggtgcgaagagccccgtgtgctcactttgaatcctccggctcctgaatgtggctaaccttaaccccgcagccagtgcacataagccaatgtgtggctggtcgtaatgagcaattgtgggatgggaccaactactttggatgtccgtgtttcctgtttttcttttattcttgcttatggtgacaatatatatagtttatatatattggcatc

SEQ ID NO: 714 - DNA, 618 bp, Human rhinovirus
  C11, strain CL-170085, complete genome.1
ttaaaactggatacaggttgttcccacctgtatcacccaagtggtgtggtgctcttgtatttcggtacgtttgcacgccagtttgctaccccttcccttttacgtaacttagaagtttacacaaagaccaataggcggtggtaaatccataccactaacggtcaaatacttctgtttccccggcatgcgaggaataggctccaaaagggctgaagccactagtgtcgttatccgcattggtactacgcaaagcctagtattaccttgaaaatttcttggctggtcgctccaccagataccccactggtagacctggcagatgaggcaggacttaccccactggcgacagtggtcctgcctgcgtggctgcctgcacaccccttacggggtgtgaagcccagaaacagacaaggtgtgaagagccccgtgtgctactagtgagtcctccggcccctgaatgcggctaatcttaccccacagctgttgcacgcaaaccagcgtgtatgcagtcgtaatgagcaattgtgggatggaaccgactactttgggtgtccgtgtttctttttattcctattatttgcttatggtgacaatattgatattatcagtgttgtcatc

SEQ ID NO: 715 - DNA, 619 bp, Bat picornavirus
  isolate BtRs-PicoV/YN2010 polyprotein gene,1
tttcaaaaggccctgggcatacggcgttattcgtaacgtcgtatgtccagggcggtagcatcaggccaaggcctgatgctaccacgtgtggactaaaccacacactcttcttgtgacacgttgtgtcacctatccctttcttggtaacttagaagcttgtacacttacgcacgtaggtgccccacatccagtggggtttgtgcaaagcaatcttgttccccggtaaaccctgataggctgtaaccacggccgaaacaaggtttgtcgttacccgactcactactacacaaagcctagtaaagttcaatgaaagtgcgcagcgtgatccggtcaaaacccccttgaccagaaacacatgatgagggtcaccaacccccactggcgacagtgtggtgtccctgcgttggcatgtggcctcgtagaggcgttgcaatctggatttgctccgaagagccccgtgtgctagtgtttatacctccggccccttgaatgcggctaatcctaacccccgagcatgtacacacaagccagtgtgtagcatgtcgtaatgagcaatttggggatggaaccgactactttagggtgtccgtgtttctcattattctttgtttgatgtttt

SEQ ID NO: 716 - DNA, 619 bp, Echovirus
  E9, strain USA/CA/RGDS-2017-1011, complete genome.1
cacacggtcaatagataactcagcaaaccagctgggtcttgaccaagcacttctgttaccccggactgagtatcaataagctgctcgcgcggctgagggagaaaacgtccgttacccggccaattacttcgagaaacccagtatcaccatgaaggttgcgcagcgtttcgttccgcacaaccctagtgtagatcaggtcgatgagccaccgcgttccccacgggcgaccgtggcggtggctgcgctggcggcctgcccatggggtgacccatgggacgcttcaacactgacatggtgcgaagagtctattgagctaattggtaatcctccggcccctgaatgcggctaatcctaactgcggagcagatacccacacaccagtgggcagtctgtcgtaatgggcaactctgcagcggaaccgactactttgggtgtccgtgtttcctcttattcttgattggctgcttatggtgacaattgggagattgttaccatatagctattggattggccatccagtgacaaacagagcaattatctactcgttcattggttttgtgccactgaattataaggttttaatcaccctcaaattcatattagcactcaacacatcaaa

SEQ ID NO: 717 - DNA, 619 bp, Human rhinovirus
  33, strain ATCC VR-330, complete genome.1
ttaaaactggatctaggttgttcccacctagatctcctacacggagttgtactctgttattccggtaactttgtacgccagttttatacccccttccccctttgtaacttagaagctgaacatactgaccaataggcggcattcaaccagaatgtcaaaggtcaagcacttctgtttccccggttaaagctgatatgctccaacagggcaaaaacagccttaatcgttatccgcaagacaactacgcaaagcctagtatcatctttgaaagtatgtggttggtcgctccgctataaactcaatagcagacctggcagatgaggctagaaactccccactggcgacagtgttctagcctgcgcggctgcctgcgtgccctatacgggtacgaagccatatatttgacaaggtgtgaagagccccgtgtgcttgtcttgagtcctccggcccctgaatgtggctaaccttaaccctgcagctggtatgcacaatccagtacatggccagtcgtaatgagcaattgcgggatgggaccaactactttgggtgtccgtgtttcctattttacctttatatttgcttatggtgacaatatatatataacatatatattggcatc

SEQ ID NO: 718 - DNA, 619 bp, Human rhinovirus
  A61, strain SC628, complete genome.1
ttaaaactgggtctgggttgtccccacccagaccacccacgtggtgttgtacactgttattccggtaactttgtacgccagttttgaactccccttaccccttttgtaacttagaagttaaacaaaccgaccgatagcaggcaatcacccagattgcttatggtcaagcacttctgtctccccggtctcctttgatatgctccaccagggcaaaaacagagtagatcgttatccgcaagatgcctacgcaacgcctagtagcattttgaagtaattttggctggtcgctcatttacaaccccagtaatagacctggcagatgaggctagatactccccactggtgacagtgatctagcctgcgtggctgcctgcacaccctttccgggtgtgaagccaaacttatgacaaggtgtgaagagccacgtgtgctcatcttgagtcctccggcccctgaatgcggctaaccttaaccctgcagccattgcctacaagccagtgggtatgtggtcgtaatgagaaattgcgggatgggaccgactactttgggtgtccgtgtttcactttttaccttatatttgcttatggtgacaatatatatatagatatatattgacacc

SEQ ID NO: 719 - DNA, 619 bp, Human rhinovirus C
  isolate N4, complete genome.1
ttaaaactgagtatgggttgttcccacccatactgcctacgggcgtagtactcttgtgctccggtacatttgtacgccagtttttcacccccaccccctaggtaactcttagaagcacttgcacacagacgaataggcagccaacactccacgttggtcaacgtcaagcacttctgtttccccggtattaggggttaggcttttcaagaggctgaagcctgaagtatcgttacccgcgcaattactaagcagagcctagtatcacttcgacccttccactggctggtcgttcaatgagaaaacccactcatagacctggcagatggggctggaaataccccactggcgacagtgttccagcccgcgtggctgcctgtcccccattttgggggaaagccaatgtaaggacaaggtgtgaagagccgcgtttgctaattgtgagtcctccggcccctgaatgcggctaatcttaccccacagctattgcatggaagccaccatgtggatagtcgtaacgggcaactgtgggacggaaccgactactttgggtgtccgtgtttccttttattccatttattatctcatggtgacaacgtatacagattatatgttgtttacc

SEQ ID NO: 720 - DNA, 620 bp, Human rhinovirus
  69, strain ATCC VR-1179, complete genome.1
ttaaaacagcggatgggtatcccaccatccgacccactgggtgtagtactctggtactttgtacctttgtacgcctgtttctccctcccttcccaacctaaacaatccttgtaacttagaaggtttcgattatcgcacaatagggactattgcaaccagcaatagtcagtgcaagcacttctgtttccccggagcggagtgtagatggccaccgctgtcaaaagctcttaaccgttatccgccagttaactacgcaacggctagtagtgccttgttgcttttatggcgttcgatcaggcgagatttaccccctcgctagtctggtcgatgaggctgagaattccccacgggcgaccgtgtctcagcctgcgtggcggccagcccagcctttgctgggacgccttgattgcgacatggtgtgaagacccgcgtgtgcttaactgtgagtcctccggcccctgaatgcggctaacctaaaccctggagccttgaaacacaacccagtgttcgcaaggtcgtaacgagcaattccgggacgggaccgactactttgggtgtccgtgtttcctttattctttcaattgttcttatggtcacaatataagtgttatattgtgatc

SEQ ID NO: 721 - DNA, 620 bp, Human rhinovirus A
  complete genome.1
ttaaaactgggagtgagttgtccccactcactctacccacgcggtgttgtacactgttattacggtaactttgtatgccagtttttgttcccctatccccctttaaagtaacttagaagcatgaacttacagaccaaaaggtgatgatcacccagatcattaaaggtcaagcacttctgtttccccggtcaatgttgatatgcttcaacaaggcaaaaacaacagcgatcgttatccgcaagatgcctacacaaagcttagtacctcctttgatggtatttgtctggtcgctcaggtgtttccccaacactagacctggcagatgaggctagaaactccccactggcgacagtgttctagcctgcgtggctgcctgcacaccctttcgggtgtgaagccaaatactggacaaggtgcgaagagccccgtgtgctcatcttgagtcctccggcccctgaatgcggctaaccttaaacccgcagccattactcacaatccagtgagcagatggtcgtaatgagcaattgtgggatgggaccgactactttgggtgtccgtgtttcatgttttactttatgacttgcttatggtgacaatatatagagatatatattggcatc

SEQ ID NO: 722 - DNA, 620 bp, Rhinovirus C
  isolate 1570-MY-10, complete genome.1
ttaaaactgagtgtgggttgttccccacccacactgtctacgggacgttgtactcttgtattccggtacacttgtacgcccagtttgccaccctaaacaccccgtaacaatagaagtctacgcacacttagaccaatagggggtgttcatccagttcacccaaggtcaagcacttctgtttccccggcataggggtgttaggcttcgcccgaggccaaagctctgattgtcgttatccgcacaactactggacaaagcctagtagcaccctacgatgtagcatggttggttgttccgccagtatcccctggtaaacctggcagatggggctagaagttcctcactggcgacagtgttctagcccgcgtggctgcctgctcccttatgggagaagccattctactgacaaggtgtgaagagccccgtacgctagttgtgattcctccggcccctgaatgcggctaatccaaccctgcagccattacatggaagccaccatgtggatggtcgtaatgagtaattgcgggacggaaccgactactttgggtgtccgtgtttcttgtttttcttttactgacgtttatggtgacaatatatatataacgtatatattgttcatc

SEQ ID NO: 723 - DNA, 621 bp, Moran virus
  polyprotein gene, complete cds.1
gggggctcttcaagcccccccaaccgaattttcttcaacaactactatgtaagttgcattatactctccagatcaattcgaatttgtataatgtactttagtttttgttgtcgactacagtgattataagtaagtagcaatatgtgtccagatcaattcgaatcacaatattgttcattataattgtatgtaggtctcagttgagagaaaaattttgttttgaaaacccagttttttcacaccggaggaatgaatctcaaatcttgggttttcgaggttgtcgtgcggacacttctcgagtagttgaatgatgctgatttgactgctttggaatgttgtcttttgcgatgatgtcggattcacacgggcttcacatgccgagagatggcttcgaacacgctcgtgataatgtcagtggttgcttcgagatttacaaatgtatgcgtacccggaaacagaacttggaaattgatgtcacggtgattgagttctgcacgatggcgatagtacctctttgtactgatcgttgaactggtcaaggcccctgcaggaagtacctgtttcgggctagttgactggcattgagcaccagagtcgaagtttgcccttcaaattgcaaca

SEQ ID NO: 724 - DNA, 621 bp, Human rhinovirus
  103, strain WA327E/09 polyprotein gene, complete1
ttaaaactgagtgtgggttgtccccacccacactgtctacggacgtagtactctcatatcacggtatgtttgtacgccagtttgcctcccctcccaagtgtaacttagaagtttgtactttataaaggccaataggcgggtagtcaaccacactactcatggtcaagcacttctgtttccccggtatgcgaagaataagctttaacaaaggctgaagcttcaattatcgttatccgcatgataactacgcaaagcttagtagcattttgaaagtttattggttggtcgctccactggaaaacccccccagtagacctggcagatgaggctaagtaatccccactggcgacagtgacttagcctgcgtggctgcctgcacacctggagacaggtgtgaagccaagtaatggacaaggtgtgaagagccccgtgtgcttatcatgagtcctccggcccctgaatgcggctaatccaaccccacagctattgcacataatccaatgtgtatttagtcgtaacgggcaactgtgggacggaaccgactactttgggtgtccgtgtttcctttattctcatttaagtttcctatggtgacaaatataagtgattatatctgtcatc

SEQ ID NO: 725 - DNA, 621 bp, Human rhinovirus sp.
  isolate 12MYKLU0081 from Malaysia polyprotein1
tctgcagatatcttaaaactgggttcaggttgttcccacctgaacttcccacgtggagtagtacactattattacggtaattttgtacgccagttttgcttccctccccaatggtaacttagaagatgtacacaacgaccaacaggcggtggttacccaaaccatcaaaggtcaagcacttctgtttccccggtcaacgttgatatgctccaacagggcaaaaacaaccacgatcgttacccgcaagatgcctacgcaaagcctagtaatacactggaagatttatggctggtcgctccactataccccatagtagacctggcagatgaggctagaagtaccccactggcgacagtgttctagcctgcgtggctgcctgcgcaccctatgggtgcgaagccatatattggacagggtgtgaagagccccgtgtgctcatcttgagtcctccggcccctgaatgtggctaaccttaaccccgcagccagagcacgcaatccagtgtgtttctggtcgtaatgagtaattgtgggatgggaccaactactttgggtgtccgtgtttcacttttttcctttattatgcttatggtgacaatatatacacatatatattgacacc

SEQ ID NO: 726 - DNA, 621 bp, Human rhinovirus
  88, complete genome.1
ttaaaactgggagtgagttgtccccactcactctacccacgcggtgttgtacactgttattacggtaactttgtatgccagtttttgttcccctatccccctttaaagtaacttagaagcatgaacttacagaccaaaaggtgatgatcacccagatcattaaaggtcaagcacttctgtttccccggtcaatgaggatatgctttacccaaggcaaaaaccttaaagatcgttatccgcacattaactacgcaaagcctagtatcgcctttgatgtattaagactggtcgttccctgcatacccagcagtagacctggcagatgaagctggacgttccccactggcgacagtggtccagcctgcgtggctgcctgctcacccatttgggtgagaagccttattattgacaaggtgtgaagagccccgtgtgcttaatgtgaatcctccggcccctgaatgtggctaaccttaaccccgcagccgttactcacaatccagtgaaatgacggtcgtaacgcgaaagtgtgggatgggaccaactactttgggtgtccgtgtttcctattttttccttaatgtgtgttatatggtgacaatttatagcgtataagttgtcatc

SEQ ID NO: 727 - DNA, 621 bp, Human rhinovirus
  24, complete genome.1
ttaaaactggatctaggttgttcccacctaaatctcctacatggagttgtactctattattccggtaattttgtacgccagttttatcctcccctccccttaaagtaacttagaagttggacatatcgaccaataggtaacatttatccaaaatgttaaaggtcaagcacttctgtttccccggtcaaggttgatgtgctctaacagggcaaaaacagctgcgatcgttatccgcaaagcaactacgcaaagcctagtagcattttttgagagtatgtggttggtcgctccactataaacccaatagtagacctggcagatgaggctagaaattccccactggtaacagtgttctagcctgcgtggctgcctgcgtgctccttgtgagcacgaagccatatatttgacaaggtgtgaagagccccgtgtgcttgctttgagtcctccggcccctgaatgtggctaaccttaaccctgcagctagcgtgtacaatccagtacaaagctagtcgtaatgagcaattgcgggatgggaccaactactttgggtgtccgtgtttcctgtttttcttttatatttgcttatggtgacaatatatatataacatatatattggcatc

SEQ ID NO: 728 - DNA, 622 bp, Human rhinovirus
  35, complete genome.1
ttaaaacagcggatgggttccctaccatccgacccactgggtgtagtactctggtactctgtacctttgtacgcctgtttatccactacccttttcctaaattttccacccgtgtaaccttagaagcaaacaaattgtacaatagggtgcatcacaaccagtgatgtacagtacaagcacttctgtttccccggagcggggtatagacggtcaccactgtcaaaagcccttaaccgttacccgccaaccaactacgtaacggctagtaacaccatgaatttgtcttgacgttcgatcaggtggtaaccccccactagtttggtcgatgaggctgagaactccccacgggtaaccgtgtctcagcctgcgtggcggccaacccagcttctgctgggacgccaattcattgacatggtgtgaagacctgcatgtgcttggttgtgattcctccggcccctgaatgcggctaaccctaaccccggagccacgcggcataatccaatgtcgtatgggtcgtaatgagtaattctgggatgggaccgactactttgggtgtccgtgtttcctgtttttccaaattattcttatggtcacagcatataaatagatatatactgtgatc

SEQ ID NO: 729 - DNA, 622 bp, Human rhinovirus
  48, complete genome.1
ttaaaacagcggatgggtatcccaccatccgacccactgggtgtagtactctggtactctgtacctttgtacgcctgtttctcctcaaccctcccctacccgttatatatctcagtaacttagaagatatcattaccgcacaatagggaccgttgtaaccagcaacggtcagtgcaagcacttctgtttccccggagcggagtatagacggccactgctgtcaaaagctcttaaccgttacccgccagttaactacacaacagctagtaacatcttgttgttcttagggcgttcgatcaggtgagtttaccccctcactagtctggtcgatgaggctgagaaatccccacgggtgaccgtgtctcagcctgcgtggcggccagcccagcttatgctgggacgccttaagtatgacatggtgtgaagactcgcgtgtgcttagctgtgagtcctccggcccctgaatgcggctaacctaaaccccggagccttgaggcacaatccagtgcccgcgaggtcgtaacgagaaattctgggacgggaccgactactttgggtgtccgtgtttccttttatctttttgatgttcttatggttacaatatataaagtatattgtaatc

SEQ ID NO: 730 - DNA, 622 bp, Human rhinovirus
  68, strain ATCC VR-1178, complete genome.1
ttaaaactgggtccaggttgttcccacctggatctcctacgtggagttgtactctattattccggtaattttgtacgccagttttatctcccctacccctctatgtaacttagaagtttatgcacagcggccaataggtgacatttatccaaaatgtcaaaggtcaagcacttctgttaccccggttagaattgatatgctccaacagggcaaaaacaattttgatcgttatccgcaaggcaactacgcaaagcctagtaccatttttgatgatgtgtggttggtcgctccactgtgaacccgacagtagacctggcagatgaggctagaaattccccactggtaacagtgttctagcctgcgtggctgcctgcgtacccttttgcgggtacgaagccatacatttgacaaggtgtgaagagccccgtgtgcttgccttgagtcctccggcccctgaatgtggctaaccttaaccctgcagctagtgtgcacaatccagtgcatggctagtcgtaacgagcaattgcgggatgggaccaactactttgggtgtccgtgtttcttgtttttcttttatatttgcttatggtgacaatatatacataatatatatattggcacc

SEQ ID NO: 731 - DNA, 622 bp, Human rhinovirus
  78, complete genome.1
ttcaaactgaatcatggttgttcccaccatgattacctacgggtgtagtacacttgtatcccggtacatttgtgcgccagttttatatcccctaccccaattgtaacttagaagttaagcaacacaagatcaataggcggtggttatccaaaccatcaatgatcaagtacttctgtctccccggtaggtgtgaatatgctttaaccaaggcagaagctaatcctatcgttatccgcaaggtgcctacgggaagcctattaacactttgaaagaaatttggctggtcgctcagttgcgcaatcccacgcaatagacctggcagatggggctagacaaaccccaccagcgatggtggtctagcccgcgtggctgcctgcacacccttttttgggtgtgaagccagaaattggacagggtgcgaagagcctactgtgctcaccttgagtcctccggcccctgaatgtggctaatcctaaccctgcagctgttgcacaagatccattgtgtatacagtcgtaatgagcaattgcgggatggaaccaactactttgggtgtccgtgtttccttgttttcttttatcattgcttatggtgacaagtatatatagatatatttgtcatc

SEQ ID NO: 732 - DNA, 623 bp, Duck hepatitis A virus 1
  isolate HB02, complete genome.1
tttgaaagcgggtgcatgcatggccattttccagcacaggttcagctggtatggcatgcatgcatcgactgcttgggggtgtccctgacccccttaattcaacgtctagcccacgatacgggcaccctatccaatttgtatccctttacctcccatggactgacttgtatggacttggatctaaattggattatcctttacttgtggtggttagccaaccatgctctggtgtaatgattccatgtgttcatttggctaagtgccgaccttggaggtgggggtgaaattttgcaagccactagcgtcgtcaactttagcctctggagatgttggattagttgcattctggacagaccaagcctcgtctataccgtgggctaatggtcttcgttgtgaagcggattaccggtagtagcatcttagacttccaaggttgtcatgagtgtgtctgtagagtaggcacacatctgtccaggcacaagcacatctctcgatcgctccagactagttcctgagggacagatgttgtggggggcttgggaaaacccccttaacctacactaccggatagggtcgcggctggtcgagtcccacacactataatatcactagactttcatgca

SEQ ID NO: 733 - DNA, 623 bp, Human rhinovirus B102
  strain HRV-B92_p1044_sR122_2007 polyprotein1
aaaacagcggatgggtatcccaccatccgacccactgggtgtagtactctggtactttgtacctttgtacgcctgttcttcccattgtaccctcccttaacttccaacccaagcaacattagaagttatcaattttcagtacaataggaagcatcacatccagtgatgttgtgtacaagcacttctgtctccccggagcgaggtataagcagtacccactgctaaaagcctttaaccgttacccgccaatcaactacgtaacagctagtatcatcatgtttttgactggacgttcgatcaggtggttcccccccactagtttggtcgatgaggctaggaataccccacgggtaaccgtgtcctagcctgcgtggcggccaacccagcatttgctgggacgcccttttaaagacatggtgtgaagactcgcatgtgcttgattgtgattcctccggcccctgaatgcggctaaccttaaccccggagccttgtgttgcaatccagcaaaagcaaggtcgtaatgagcaattctgggacgggaccgactactttgggtgtccgtgtttctcattttacattacttttcttatggtcacagcatatataataaatatactgtgatc

SEQ ID NO: 734 - DNA, 623 bp, Human rhinovirus
  65, strain ATCC VR-1175, complete genome.1
ttaaaactgggtgtgggttgcacccacccacactgtctacggacgtagtgctctcatattacggtatgcttgcacgccagtttgtttcccctttccccttttgtaactatagaagattgcacttaatctcgaccaataggcagtagtgatccacactacttacggtcaagcacttctgttaccccggtatgcggagaataggctctgaaaagggctgaagcttcaattatcgtcatccgcgcaattactacgcaaagcttagtaacttcccaagaaattctttggttggccgttccgctggtaccccaccagtaggcttggcagatgaggctgagtaatccccactggcgacagtgactcagcctgcgtggctgcctacacacctggtaacaggtgtgaagccatagaaaggacagggtgtgaagagccccgtgtgctaattgtgattcctccggcccctgaatgcggctaatctaaccccacatccaatgcgcataagccaatgcgtatttggtcgtaatgggcaactgtgggacggaaccgactactttgggtgtccgtgtttctttttattccttataattagttcatggtgacaagtataagtgtttatatttgtcatc

SEQ ID NO: 735 - DNA, 624 bp, Picornaviridae sp.
  isolate wftcra73pic2 genomic sequence.1
ttttcatgttgtataattcgagttctccaattatatttaatagaagattttcatttatgatcatgcaataatataatgaattcatgtagaaaatgttatattattccttcgtcctttgtgaaccggagagttagtattggaaatgagggatttattttaaaacaaatgtcttatttcctctctttaacgttatatttattgacagtttgtgatttatatatcatggttattgagagaaaattagcttttatataaattagtgtttttatttaaaagttttaattcttggcagtgtattaatgaatttaatttggcagtataagtttattcaaaacataccttccatatgtagtagggaacttgctgtatttaatacaatactgattattaagtgtttttcttgtcgtataataattgaagtagaatcttttgttattccgactatagacttgattaataactgataatctttattttattttgtatagtattattaggttctagggaagtttccccctatgagaacctcctaaccttttggcaattaggcgaactaagaaaattgcctggacaatgggaagacccatataatattcccttttcctttataaatttaaatcaagt

SEQ ID NO: 736 - DNA, 624 bp, Salivirus A
  strain SH1 polyprotein gene, complete cds.1
ttcccctgcaaccattacgcttactcgcatgtgcattgagtggtgcatgtgttgaacaaacagctacactcacatgggggcgggttttcccgccctacggcttctcgcgaggcccacccctcccctttctcccataactacagtgctttggtaggtaagcatcctgatcccccgcggaagctgctcacgtggcaactgtggggacccagacaggttatcaaaggcacccggtctttccgccttcaggagtatccctgctagcgaattctagtagggctctgcttggtgccaacctcccccaaatgcgcgctgcgggagtgctcttccccaactcaccctagtatcctctcatgtgtgtgcttggtcagcatatctgagacgatgttccgctgtcccagaccagtccagtaatggacgggccagtgtgcgtagtcgtcttccggcttgtccggcgcatgtttggtgaaccggtggggtaaggttggtgtgcccaacgcccgtactcaggggatacctcaaggcacccaggaatgccagggaggtaccccgcttcacagcgggatctgaccctggggtaaatgtctgcggggggtcttcttggcccacttctcagtacttttcagg

SEQ ID NO: 737 - DNA, 624 bp, Human parechovirus 1
  isolate 146Chzj02, complete genome.1
tattagagttatggcacgccatctgccaccccacacaaatgtgggttagaaaagaaaactgtccctatgcctggtctccactattcgaaggcaacttgcaattagaagagtggaattaagacgcttaaagcatagagacagttttcttttctaacccacatttgtgtggggtggcagatggcgtgccataactctaatagtgagataccatgcttgtggaccttatgctcacacagccatcctctagtaagtttgtgagacgtctggtgacgtgtgggaacttattggaaacaacgttttgctgcaaagcatcctactgccagcggaaaaacacctggtaacaggtgcctctggggccaaaagccaaggtttaacagaccctttaggattggttctaaacctgagatgttgtggaagatatttagtacctgctgatctggtagttatgcaaacactagttgtaaggcccacgaaggatgcccagaaggtacctgtaggtaacaagtgacactatggatctgatttggggccagatacctctatcttggtgatctggttaaaaaacgtctagtgggccaaacccgggggggacccccggtttcctcttatcctattaatgccact

SEQ ID NO: 738 - DNA, 624 bp, Human rhinovirus
  79, strain ATCC VR-1189, complete genome.1
ttaaaacagcggacgggtatcccaccatccggctcactgagcgtagtactctggtattgtgtacctttgtacgcctgttttccccaaatcccctaccctttatatctcctaccccgtaacgtaagaagttttcaaacagtacaataggaagcaccacatccagtggtgttatgtacaagcacttctgtttccccggagcgaggtataggtggtcaccaccgccaaaagcctttaaccgttacccgccaaccaactacgtaatggctagtaacatcattgatttagattggcgttcgatcaggtggtatccccccactagtttggtcgatgaggctaggaataccccacgggtgaccgtgtcctagcctgcgtggcggccaacccagcatacgctgggacgccagtttactgacatggtgcgaagacttgcatgtgcttggttgagagtcctccggcccctgaatgcggctaaccttaaccccggagcctcgcagcataatccaatgttgtagaggtcgtaacgagtaattctgggatgggaccgactactttgggtgtccgtgtttcctgtttttctttaaaatgtcttatggtcacagcatatatactgtatatactgtgatc

SEQ ID NO: 739 - DNA, 624 bp, Human rhinovirus
  B86, strain SC9826, complete genome.1
acagcggatggataccccaccatccgacccactgggtgtagtacactggtactctgtacctttgtacgcctgtttctccccttgcaccctccctcattatcctaacccttgtaacattagaagatgagcaacccgtgcaataggagataccacaaccagtggtgttaagcacaagtacttctgtttccccggagcggagtatagacggtccccactgtcaaaagctcttaaccgttatccgccaaccaactacgtgacgactagtagcatcattttgacactttgacgttcgatcaggtaggttcaccccacctactagtttggtcgatgaggctgggagtccctcacaggtaactgtgtcccagcctgcgtggcggccaacccagcaattgctgggacgccaatttgttgacatggtgtgaagatcctaatgtgcttggttgtgagtcctccggcccctgaatgcggctaaccttaaccccggagccttgtggcacaagccagtgacattaaggtcgtaaggagcaattctgggatgggaccgactactttgggtgtccgtgtttcctatttttctttaaattgtcttatggtcacagcatatattaattatatactgtgatc

SEQ ID NO: 740 - DNA, 625 bp, Sapelovirus A
  strain NGR_2017_NHP_SV, complete genome.1
ccccatttctccccttcggcttcgtgccgtcgcacccctttacccttttccttaccctcttaagaatgattgtagattgttttagaaaggaaggttagtacacctgaaagtacaacaatttgcttctctggtttggataaaaggttaaagacattagaaggttaacacaggtccttgcaaaacctgagtacaattttgttttgacgacgagactggattatgatttcacggttggtcgccgaggttaaaagactattgtgctagctagagtaagtggttggcaattgaaagctaccaaaggggtgtaggtctacgctttgcgggctgaagctaccaatggattaatagtgagtatgttgtttttcccttctagtgatgcgcgaccgcacacaaaagagctaggggcacataggggcaaaaggaaaagtattacttatcctgaatgtgcaattgagtcggtgacgagtgcgtcagatgtgaatccagcatactggcgtatggcgcatcctcttggcattaccctaatgtgtatcttggtagggggggccctatcaacttagcctagtgctgcctgacagggttgcggctggtcatttgtgtgtggtataaccagtagtaatccctc

SEQ ID NO: 741 - DNA, 625 bp, Human rhinovirus 4
  complete genome.1
ttaaaacagcggatgggtttcccaccatccgacccactgggtgtagtgctctggtattttgtacctttgcacgcctgtttcccatttgtacccttccttaatctccttcccccgtaacgttagaagttttggaattttaaagtacaataggaagcgccacatccagtggtgttgcgtacaaatacttctgtttacccggagcgaggtataggttgtacccacggccaaaagcctttaaccgttatccgccaatcaactacgtaacggctagtatcatcttgcttttgatttggtgttcgatcaggtggtatcccccactagtctggtcgatgaggctaggaattccccacgggcgaccgtgtcctagcctgcgtggcggccagcccagcttttgctgggacgccttttcaaagacatggtgtgaagacctgcatgtgcttggttgtgagtcctccggcccctgaatgcggctaaccttaaccctggagcccagcagcataatccaatgttgtttgggtcgtaatgagcaattccgggacgggaccgactactttgggtgtccgtgtttccttttattcttacattgtcttatggtcacagcatatatattatatatactgtgatc

SEQ ID NO: 742 - DNA, 625 bp, Human rhinovirus
  99, strain ATCC VR-1299, complete genome.1
ttaaaacagcgggtgggtatcccaccacccgacccactgggtgtagtacactggtattttgtacctttgtatgcctgtttgccatccctccctctcctcttacccttacccttattttgcggtaactttagaagtttgtaaatcacgcgcaatagggtataccacatccagtggtatgaagcacaagcaattcttgttccccggagctggatataaactgctaacgtggttgaaagtccttaaccgttatccgccagttaactgcgagaagactagtaactccatgtttgtttttaagcgttcgatcaggtggataccccattcactagtttggtcgatgaggctgggaatcccccacaggtaactgtgtctcagcctgcgtggcggccaacccagcttttgctgggacgcttactgacagacatggtgtgaagatcctattgcgcttaactgtgagtcctccggcccctgaatgcggctaacctcaaccccggagccttgtggtgtaaaccaacactcgcaaggtcgtaacgagtaattctgggacgggaccgactactttgggtgtccgtgtttcctttatttcttattgattgtctcctatggttacaaatttactgtaatc

SEQ ID NO: 743 - DNA, 625 bp, Human rhinovirus
  97, strain ATCC VR-1297, complete genome.1
ttaaaacagcggatgggtttcccaccatccgacccactgggtgtagtgctctggtattttgtacctttgcacgcctgtttcccctttgtacccatcctgaatttcctccctctgcaacgttagaagtttgtgaaattaaaagtacaataggaagcatcacatccagtggtgttcagtacaagcactcctgtttccccggagcgaggtataggttgtacccacgaccgaaagcctttaaccgttatccgccaatcaactacataacggctagtatcatcatgtttttgatctggcgttcgatcaggtggtttcccccactagtctggtcgatgaggctaggatttccccacgggcgaccgtgtcctagcctgcgtggcggccagcccagcttatgctgggacgcctttttaaagacatggtgtgaagacctgcatgtgcttgattgtgagtcctccggcccctgaatgcggctaaccttaaccctggagcccgacagcataatccaatgttgtttgggtcgtaatgagcaattccgggatgggaccgactactttgggtgtccgtgtttctttttattcttatattgtcttatggtcacagcatatatagtatatatactgtgatc

SEQ ID NO: 744 - DNA, 625 bp, Human rhinovirus
  71, strain ATCC VR-1181, complete genome.1
ttaaaactgagtgtgggttgttcccacccacactgtctacggacgtagtgctctcatattccggtatgtttgcacgccagtttgcctctccttttcccacgtaacgttagaagcttatgcactaaatcgaccactaggtgagtgataaaccatatcattctttggtcaagcacttctgtttccccggtatgcagggaataggccctccccagggctgaagccttaattatcgttatccgcacatttactacgcaaagcctattagcgttctggaagttcactggctggtcgttccgctagactaacccgtctagtagacctggcagatgaggctggataaaccccactggcgacagtgatccagcctgcgtggctgcctgcacacctggaaacaggtgtgaagcccatgaatggacagggtgtgaagagccccgtgtgctaagtgtgagtcctccggcccctgaatgcggctaatctaaccccacagctaatacacacaaaccagtgtggatttagtcgtaatgggtaactgtgggacggaaccgactactttgggtgtccgtgtttccttttattccttttatattgcttatggtgacaggtatatagatatatatttgttacc

SEQ ID NO: 745 - DNA, 625 bp, Human rhinovirus
  type 16 polyprotein gene, complete CDS.1
ttaaaactggatctgggttgttcccacccagatcacctacatggtgttgtacactattattacggtaatcttgtacgccagttttatactccctttcccaaatgtaacttagaagcaaagcaaactgatcaataggggacaatcatccagattgtcaaagatcaagcacttctgtttccccggtcaaagttgatatgctccacaagggcaaaaacaactgagatcgttatccgcaagatgcctacgcaaagcctagtaatacattgaaagatacttggttggtcgctcagctgttaacccaacagtagacctggtagatgaggctagagattcccctccggcgacggagttctagcctgcgtggctgcctgcacacccactgggtgtgaagccaagtattggacaaggtgtgaagagccgcgtgtgctcatcttgagtcctccggcccctgaatgtggctaaccttaaacctgcagccagtgcacacaatccagtgtgtagctggtcgtaatgagcaattgcgggatgggaccaactactttgggtgtccgtgtccgtgtttcactttttttccttttattattgcttatggtgacaatatatatagcatatatatattgttatc

SEQ ID NO: 746 - DNA, 625 bp, Rhinovirus C
  isolate 2536, complete genome.1
ttaaaactgggtaggggttgttcccacccctaccacccacgtggtgtagtgctcctgtattacggtacacttgcacgccagtttgcctccctacccccttcccattcacacccaaccctgcgtaacttagaagctatgcacaagaccaataggtggtaacaatccatgttactaaaggtcaagtacttctgtttccccggcatgcgtggaataaacagtgcaaacggttgaggccacaaatgtcgttacccgcgcatgaactacgcagagcctagtatccccctgaaagtccattggttggtcgctcagctaatccccatagtagacctggcagatgaggcaagacgcaccccactggcgacagtggtcttgcctgcgtggctgcctgcacacccttcggggtgtgaagccaattgatagacagggtgtgaagagccgagtgtgcttcatgtgagtcctccggcccctgaatgcggctaatccaaccccgcagctgtggcacacaatccagtgtgtatgcagtcgtaacgggcaactgcgggacggaaccgactactttgggtgtccgtgtttccttttattctttaatcaagtacttatggtgacaataataaatattgttacc

SEQ ID NO: 747 - DNA, 626 bp, Human rhinovirus
  83, strain ATCC VR-1193, complete genome.1
ttaaaacagcggatgggtatcccaccatccgacccactgggtgtagtactctggtattttgtacctttgtacgcctgtttcttccctttgtacccgccccttaaacttccaccccacgtaacgttagaagtttatacaagcagtacaataggttgcaccataaccagtggtgtttcgtacaagcacttctgtttccccggagcggggtatagacggtacccactgtcaaaagcccttaaccgttatccgccaatcaactacgtaatggctagtaacaccatgaaggtaagttgacgttcgatcaggtggtaacccccactagtttggtcgatgaggctaggaattccccacgggtaaccgtgtcctagcctgcgtggcggccaacccagcatttgctgggacgccaatttactgacatggtgtgaagacttgcatgtgcttgattgtgactcctccggcccctgaatgcggctaaccttaaccccggagccttgcagcataatccaatgttgtggaggtcgtaatgagcaattctgggatgggaccgactactttgggtgtccgtgtttcctgttttctttaagttgtcttatggtcacagcatatatactatatatactgtgatc

SEQ ID NO: 748 - DNA, 626 bp, Human rhinovirus
  3, complete genome.1
ttaaaacagcggatgggtaccccaccatccgacccactgggtgtagtactctggtacttcgtacctttgtacgcctgttcttcccattgtacccttcctgaacttccaacccaagtaacgttagaagctcaacatttagtacaacaggaagcaccacatccagtggtgtttagtacaagcacttctgtttccccggagcgaggtataggctgtacccactgccaaaaacctttaaccgttatccgccaaccaactacgtaaaagctagtagtattatgtttttaactaggcgttcgatcaggtggatttcccctccactagtttggtcgatgaggctaggaattccccacgggtgaccgtgtcctagcctgcgtggcggccaacccagcttatgctgggacgcctttttatagacatggtgtgaagactcgcatgtgcttggttgtgattcctccggcccctgaatgcggctaaccttaaccctggagccttgtgtcacaaaccagtgatgataaggtcgtaatgagcaattccgggacgggaccgactactttgggtgtccgtgtttcttatttttcttattattgtcttatggtcacagcatatatataacatatactgtgatc

SEQ ID NO: 749 - DNA, 626 bp, Rhinovirus C
  strain 20692_6_HRV-C polyprotein gene, complete cds.1
aacagccgtctggttgatcccaccagcgggcacaatgtgcgttgtacactgcgatctcggtcgctttgtatgcctgtttttaccacccaccccaactttactatcttctttacttcacaagtaacatagaagcatgtacatgacgcccaataggacaacgtctcacccagagatgttaagggcaagcacttctgtttccccggatgtgtgaataggcttcacccgaggctgaaactgtagcattcgttatccgcatgactactacgcgactgctagtagcgttctgtgtgacatgtggggtttcgttcagcagagacccagtctgtagatcagggtaatgaggctacacaatccccactggtgacagtggtgtagcctgcgtggtgccctgcccgaggttcgtcctcgggaccctccatgttagacagggtgtgaagacactagtgtgctagtcatgagtcctccggcccctgaatgcggctaatcttaaacctgcagccaccacatgcacgccagcatgcaggtggtcgtaatgagcaattgcgggatggaaccgactactttgggtgtccgtgtttctctttttacatttatgtgtctcttatggttacatcattggtgtaatc

SEQ ID NO: 750 - DNA, 627 bp, Picornaviridae sp.
  isolate zftegr01hep2nc genomic sequence.1
ttcaaggttcagccggccgggggttttgaggggttttggctggtccctatggaggcatagttatcgggactgtattcccgatggtttgagttagggccgacctgctcctgtattgcccacagctttgggctatcttgaggtgtttgtttgtgggaccctctcttgggtctcatttgtttttcttctgttttatgtctatcttttcccggttgtctccatacctatgctgctaccgctgcgcccggcggggttaaccctggggctagcccatggctgtggccgccaaaagtggagatgtcatgactattccatggcttgggctttgggtgtgtccagcaggtgacaggaacttagctgatcttggcaggggggtaggctacgggtgaaacccccccgtcctctcactcatattgagtgatgtcgtgtacacgtgaaccttggtggataggggtgagatcgtttggtcaaaaacccctcaacgcctggtgcgggcatgtcgtcatgtcatgcggctttgttcgtgtttcctgtctgttggcacccagtgctgaactcatggtaattggcaccctatgagtttagggctaatcaggggcatttaggtttttagcaccactgcttaatttg

SEQ ID NO: 751 - DNA, 627 bp, Human rhinovirus
  92, strain ATCC VR-1293, complete genome.1
ttaaaacagcggatgggtatcccaccatccggcccactgggtgtagtactctggtacattgtacctttgtacgcctgttttccccctcttgtacccgcccttcaagctccttgcccaagtaacgttagaagtttgaacattggtacaataggaagcatcacatccagtggtgtactgtacaaacacttctgttgccccggagcgaggtatagatggtccccaccgtcaaaagcctttaaccgttatccgccaatcaactacgtaatggctagtagcaccttggatttaagttggcgttcgatcaggtggtaacccccactagtttggtcgatgaggctaggaattccccacgggtgaccgtgtcctagcctgcgtggcggccaacccagcatccgctgggacgccaatttaatgacatggtgtgaagacctgcatgtgcttgattgtgagtcctccggcccctgaatgcggctaaccctaaccccggagccttgcagcacaatccagtgttgttaaggtcgtaatgagcaattctgggatgggaccgactactttgggtgtccgtgtttcttatttttcttgaatttttcttatggtcacagcatatatacattatatactgtgatc

SEQ ID NO: 752 - DNA, 627 bp, Human rhinovirus
  27, complete genome.1
ttaaaacagcggatgggtatcccaccatccgacccacagggtgtagtgctctggtattttgtacctttgcacgcctgtttccccattgtacccctccttaaatttcctccccaagtaacgttagaagtttaaggaaacaaatgtacaataggaagcatcacatccagtggtgttatgtacaagcacttctgtttccccggagcgaggtataagtggtacccaccgccgaaagcctttaaccgttatccgccaatcaactacgtaatggctagtattaccatgtttgtgacttggtgttcgatcaggtggttccccccactagtttggtcgatgaggctaggaactccccacgggtgaccgtgtcctagcctgcgtggcggccaacccagcttttgctgggacgcctttttacagacatggtgtgaagacctgcatgtgcttgattgtgagtcctccggcccctgaatgcggctaaccttaaccccggagccttgcaacataatccaatgttgttgaggtcgtaatgagtaattctgggatgggaccgactactttgggtgtccgtgtttccttttattctttatattgtcttatggtcacagcatatatagcatatatactgtgatc

SEQ ID NO: 753 - DNA, 628 bp, Human rhinovirus
  93, complete genome.1
ttaaaacagtggatgggtttcctaccatccgacccactgggtgtagtgctctggtatattgtacctttgcacgcctgttttcccattgtacccttccttaaattcctccccatgtaacgttagaagtttaagaacataaatgtacaataggaagcatcacatccagtggtgtatggtacaagcacttctgtttatccggagcgaggtataagcggtacccactgctgaaagcctttaaccgttaaccgccaatcaactacgtaacggctagtattaccttgtttgcaatctggcgttcgatcaggtggttccccccactagtttggtcgatgaggctaggagttccccacgggcgaccgtgtcctagcctgcgtggcggccaacccagcatttgctgggacgcctttttgtagacatggtgtgaagacctgcatgtgcttgattgtgagtcctccggcccctgaatgcggctaaccttaaccccggagccttgtgacataatccaatgtcattaaggtcgtaatgagcaattctgggacgggaccgactactttgggtgtccgtgtttctctttattctttacattgtcttatggtcacagcatatataatacatatatactgtgatc

SEQ ID NO: 754 - DNA, 628 bp, Human rhinovirus
  type 14 (HRV14), complete genome.1
ttaaaacagcggatgggtatcccaccattcgacccattgggtgtagtactctggtactatgtacctttgtacgcctgtttctccccaaccacccttccttaaaattcccacccatgaaacgttagaagcttgacattaaagtacaataggtggcgccatatccaatggtgtctatgtacaagcacttctgtttcccaggagcgaggtataggctgtacccactgccaaaagcctttaaccgttatccgccaaccaactacgtaacagttagtaccatcttgttcttgactggacgttcgatcaggtggattttccctccactagtttggtcgatgaggctaggaattccccacgggtgaccgtgtcctagcctgcgtggcggccaacccagcttatgctgggacgcccttttaaggacatggtgtgaagactcgcatgtgcttggttgtgagtcctccggcccctgaatgcggctaaccttaaccctagagccttatgccacgatccagtggttgtaaggtcgtaatgagcaattccgggacgggaccgactactttgggtgtccgtgtttctcatttttcttcatattgtcttatggtcacagcatatatatacatatactgtgatc

SEQ ID NO: 755 - DNA, 630 bp, Human rhinovirus
  72, strain ATCC VR-1182, complete genome.1
ttaaaacagcggatgggttctcccaccatccgacccactgggtgtagtactctggtatgatgtacctttgtacgcctgtttattcccaaacccccacccgttattcgcccaacccctgtaacgttagaagtttggaacttaattgtacaatagggagcaccatatccaatggtgtaacgtacaagcacttctgtttccccggagcgaggtataggtggtacccactgccgaaagcctttaaccgtcatccgccaatcaactacgtaacagctagtaacatcttgttgttgattggacgttcgatcaggtggttcaccccccactagtttggtcgatgaggctgggaatcccccacgggtgaccgtgtcccagcctgcgtggcggccaacccagcttatgctgggacgccctttcaatgacatggtgtgaagactcgcatgtgcttgattgtgagtccgccggcccctgaatgcggctaaccctaaccctggagccttgcaccacaatccagtggtgtctgggtcgtaatgagtaattctgggatgggaccgactactttgggtgtccgtgtttctcatttttcttttaattgtcttatggtcacagcatatagtattatatactgtgatc

SEQ ID NO: 756 - DNA, 631 bp, Human rhinovirus
  5, strain ATCC VR-485, complete genome.1
ttaaaacagcgggtgggtatcccaccacccgacccactgggtgtggtacactggtactttgtacctttgtatgcctgtttgcttccactcccctttacctaatattcttccccaagtatattttgcggtaacgttagaagaagcaaagttagtgcaataggatgtatcacaaccagtggtataaagcacaagcaattcttgttccccggagctggatatagactgctaacgtggtcaaaagtccttaaccgttatccgccagctaactgcgagaagactagtaacaccatgtttgtttttagacgttcgatcaggtgaataccccattcactagtttggtcgatgaggctgagaataccccacaggtaactgtgtctcagcctgcgtggcggccaacccgactcatgtcgggacgcctactaatagacatggtgtgaagatcctattgcgcttagttgtgagtcctccggcccctgaatgcggctaaccctaaccccggagccttgtggtgtaaaccaacatttgcaaggtcgtaatgagtaattctgggatgggaccgactactttgggtgtccgtgtttcctttatttttattgtgtgtgtcttatggttacaaatacaatttgtaatc

SEQ ID NO: 757 - DNA, 632 bp, Duck picornavirus
  duck/FC22/China/2017, complete genome.1
ttgaaaactggcccccctggggatctttgcacctttgaagtgcatatcctcaggggttaaccaggtggtggacataatgtccacctttgtttcaacatggttctttggcattttctccagagtaactaaaagataaatgccatctggatggattttctggttataaaatgactttctcgttgatcggtttttccactatcttcattgccgggtggttgccaagcccggaagtgctatcactctaggattcgagtcttcatccgtcgcggatttctagggcccatatctggtgctgaaatattgcaaggaatggtgaaccctagttgtctaacactgtaagtctcgatgtcttagaccaggtagccttggcacaattcctaaccaccaacatgtttctcgtgaaattccctcgccggggtgtagtagcgagtctcctctgttgggctcatggttaggggatgctcctaggtagagtggaacctcttcttcattttaaggtgggacctgattcagtatcccactggaagttagaggtctgggtattggggtaacccagcttggtccacactgcttgatagagtcgcggctggccgacctaggacatctttaaaaagtcagttgattttaacctt

SEQ ID NO: 758 - DNA, 633 bp, Pink-eared duck megrivirus
  polyprotein gene, complete cds.1
gggggctcttccccctgggctcttttccggtaatccgattggcgaccggattatcgtgactctgctgagtcgtccgtgcctctaggaaacttgttggctccggctgacactttttctggacatcggatgggcggcttggtggggctagccaaccctgactgactttatgtgtatgacctcttttcctcttgcgctttagtctgtcgcgtctgatccacgtacggattaaatggtatgtcataaggctaagcctcgttctgaaatcccctagccaaaggggcctagtaggatcttggtgtttccttatgacctctaccgaccatgttagctagagctagggctgaataggatgcatcccagactcctttttggatatctggagcaagacaccggagtttaactatgtacgctggataaggctcgaacacacccagattgaaggtggtgctgaaatattgcaagcctaggtctgtgtagtgttagtagatgcccgccgctatagttttctccgccccctgtgggttagtagtgtacctatttggacgcagagccggcaatctctgcctttgcctagtactggttgatagacccgcggctggtcgagttaacatggtataaccagttgaaacggct

SEQ ID NO: 759 - DNA, 633 bp, Swine vesicular disease virus
  strain SVDV Itl. 2-97 polyprotein1
cacccacagggcccactgggcgctagtacactggtatcacggtacctttgtgcgcctgtttgacccaccttccccaaacgtaacttagaagcacaactcaaatgatcattagacggctcagtatgccaactgggtctcgatcaagcacttctgttaccccggactgagtaccaataggctgctcacgcggctgaaggggaaaccgttcgttacccgaccaactacttcgagaaacctagtaccaccatgaaagttgcgcagcgtttcgctccgcacaaccccagtgtagatcaggccgatgagtcaccgcaaaccccacgggcgaccgtggcggtggctgcgctggcggcctgcccatgggacaactcatgggacgctacaatactgacatggtgtgaagagtctattgagctagttggtagtcctccggcccctgaatgcggctaatcctaactgtggagcagatacccacgcaccagtgggcagtctgtcgtaatgggcaactccgcagcggaaccgactactttgggtgtccgtgtttcttttattcctacgctggctacatatggtgacgatttgtaccataaagccttaaccgctcctcaacaccgtcataacacttaacacgctgag

SEQ ID NO: 760 - DNA, 633 bp, Human rhinovirus
  1B, strain 12J7, complete genome.1
ttaaaactgggtgtgggttgttcccactcacaccacccaatgggtgttgtactctgttattccggtaactttgtacgccagttttccctcccttctccccctcctacccttttacgtaacttagaagctttaaacatgagaccaatagcaggcaactttccaggttgtctaaggtcaagcacttctgtttccccggttgacgttgatatgctccaacagggcaaaaacaactgatatcgttatccgcaaagtgcctacacagagcctagtaggattctgaaagatctttggttggtcgctcagctgcatacccagcagtagacctcgcagatgaggctggacattccccactggtaacagtggtccagcctgcgtggctgcctgcacacctcttacgaggtgtgaagccaaggattcgacagggtgtgaagagccgcgtgtgctcactttgagtcctccggcccctgaatgcggctaaccttaaacctgcagccatagctcataagccaatgagtttatggtcgtaatgagtaattgcgggatgggaccgactactttgggtgtccgtgtttcattttttccttttatcaattgcttatggtgacaatatatatatatatatatattggcatc

SEQ ID NO: 761 - DNA, 634 bp, Ljungan virus
  M1146 polyprotein gene, complete cds.1
agaatagccaatctgtaacttcaacacctaagcgcatcttgcccgccgttatctggtcgaaggcacttgcaataagactggttaaccctccatgcgtgattcacaatcctatctgtctctcgagtgctttacgctcgggtaggggctcacccaggaggtcccactctttacagaggtctgcgcaggtggctttcacctctcgacagcgcccctcaatcctgccttaggtgtgaaggttgcacgtattccaatgtgaacagtgcttgaattttgttggtaggtgtagcgaccacacatgagccagcggatttcccctggtggtaacaccagcctctgggcccaaaaggcatgtctttgacctcatgtgtgcacaatcccagtgatgccaatgattagtaaagcacttagtatatatatgggatataccaatctcaagcacctaagggtgtaggtatggtaggctgaaggatgccctggaggtacccgcaggtaacgattggttcactgtggatctgaccaggggcccaccggaacttcgttctgggtagaagctctcgagccttgggttaaaaaacgtctaggcctatcccccggggggacccggggtttcccttataaccccatattttgcatc

SEQ ID NO: 762 - DNA, 636 bp, Bovine viral dirrhea virus
  nonstructural proteins (p125/p80, p10,1
tggagtctatacgaggaggacagcctgttaataacccagttagaaatatcaaataatttactcatatcagaagacttgccagccgctgtcaagaacataatggccaggactgatcacccagagccgatccaacttgcttacaacagttatgaggtccaggtcccagtcctgttcccaaaaataaggaacggagaggttacagacacctacgaaaactactcatttctaaacgctaggaagttaggagaggatgtgcccgtatacatctatgccactgaagatgaggacctggcagttgacctcctagggctggactggcccgaccctgggaatcagcaggtcgtggagaccagcaaagcactgaagcaagtggccggattgtcttcagctgagaatgccttgctcatagctttatttgggtatgtaggttaccaagctctatcaaagaggcatgtcccaatggtcacagatatatacactatagaggaccagagactggaagacaccacccacctccagtatgcacccaacgccataaaaaccgaagggacagagactgaattgaaggaattgccggcgggtgacgtggagaaaatcatgggagccatctcggattatgcagctggaggactggaa

SEQ ID NO: 763 - DNA, 637 bp, Unknown
  Description of Unknown: Human coxsackievirus A16, strain shzh01-17 polyprotein gene, partial1 sequence
acttagaagcttcacacaatcacgaccatcagtaggcctggcatcccagtcacgtcttggtcaagcacttctgttccccctgactgagtatcaataaactgctcacgcgggtgaaggagaaaacgttcgttatccggctaagtacttcgagaaccccagtagcaccgtgaaagttgcggagtgtttcgctcagcacttcccccgtgtacatcaggtcgatgagttactgttaaccccacgggcgaccgtgacagtggctgcgttggtagcctgcccatggggttacccttgggacgctctcatacagacctggtgtgaagagtctattgagctagttagtagtcctccggcccctgaatgcggctaatcctaactgcggagcacgcaccctcaacccagggggcggcgtgtcgtaacgggtaactctgcagcggaaccgactactttgggtgtccgtgtttccttttattccttactggctgcttatggtgacaattgaaaagttgttaccatatagctattggattggccatccggtgtctaacagagctattgtttacctatttattggatacgtccctcttaatctcaaggccattcaaactcttaattatatattgctccttaactgtaagaa

SEQ ID NO: 764 - DNA, 638 bp, Phopivirus
  strain NewEngland_USA/2011, complete genome.1
gggagtaaacctcaccaccgtttgccgtggtttacggctacctatttttggatgtaaatattaattcctgcaggttcaggtctcttgaattatgtccacgctagtggcactctcttacccataagtgacgccttagcggaacctttctacacttgatgtggttaggggttacattatttccctgggccttctttggccctttttcccctgcactatcattctttcttccgggctctcagcatgccaatgttccgaccggtgcgcccgccggggttaactccatggttagcatggagctgtaggccctaaaagtgctgacactggaactggactattgaagcatacactgttaactgaaacatgtaactccaatcgatcttctacaaggggtaggctacgggtgaaaccccttaggttaatactcatattgagagatacttctgataggttaaggttgctggataatggtgagtttaacgacaaaaaccattcaacagctgtgggccaacctcatcaggtagatgcttttggagccaagtgcgtaggggtgtgtgtggaaatgcttcagtggaaggtgccctcccgaaaggtcgtaggggtaatcaggggcagttaggtttccacaattacaatttgaa

SEQ ID NO: 765 - DNA, 639 bp, Chicken megrivirus
  strain chicken/B21-CHV/2012/HUN, complete1
ttcccgaccggtctggcaaaccggacggttatcctggttagatgtctgatggttgctggaacgtggtggctactgctgccaccttctggcttcctttaatgggcatctagctgggttctttgccacaatccatcttactctcttacccattttctattacccagacttgttgttaactggtaaagttgacctactggcttcgttttgagactattctggtgttggtggacactctttccacaagtagattgtatggagttcatgctcgttttgaaccgggaatggcacaacccgtagtaggatcttgcctctgccatactaatctgcgcctgttgcttttagactatgggctgctaaggatgacattggaacccctttttggatattccatgtcaagtcaactgtttcatctggtgtacgctggaaatccttgttccgaggtcttgtctggaggtggtgctgaaatattgcaagccacaggcagttccttggacttggtgccgctatcagatgctacaccctctatgggcaaatgttgaaccttagtggacgcgtgagatgggaatccacgccggccatagactggctgataagctcgcggctgatcgagttgcaacagtaatcagttgatttgccact

SEQ ID NO: 766 - DNA, 639 bp, Human rhinovirus C
  isolate N10, complete genome.1
ttaaaacagccgtgtggttgtacccaccaccgggcacattgtgcgtggtacactggaattacggttcctttgtacgcctgttttcccttcccactttctttcttccttcacttcctaattgtaacataattagaagcatgacatacagtccaataggaggcggttaatccataaccgtcatagacaagcacttctgtttccccggatgtgtgaataggcttccaccgaggctgaagctgtagcattcgttatccgcacacgtactacgcgaaaactagtaacaccttgattggtggtgtggtgtttcactcggcgctaccccagcgtagatcagggcaatggggctacggaaaccccaccggcgacggtgtcgtagcccgcgtggtgccctgcccagatccttgcgatctgggacaccatatcattgacagggtgtgaagattctagtgtgctacgtgtgagtcctccggcccctgaatgtggctaaccttaaccccgcagctatggtgtgcaaaccagcacattcgtagtcgtaatgggcaactgtgggatgggaccaactactttgggtgtccgtgtttccttttattcttataattttccttatggttacaagcttatggttataggtttgtaacc

SEQ ID NO: 767 - DNA, 639 bp, Rhinovirus C
  strain USA/WI/2014-20992 polyprotein gene, partial1
gacataagcgccgggtttgttaaaacagctgcgtggttgttcccaccaccaggcacacagtgcgtggtacactggaatttcggttcctttgtacgcctgttttcccaccctcatgtttgtttgtctttacgcgtaacttagaagcattgcaaacagctcaataggaatagtccatccaggactgttacgagcaagcacttctgtctccccggacgtgtgaatagacctcaccaaggttgaagctgtagcgttcgttatccgctcatctactgcgcaaagactagtaactaactgaagccttaatggtgtttcgctcagcagtaccccactgtagatcagggcaatgaggctacgcattccccactggtgacagtggcgtagcctgcgtggtgccctgcccaggtttcggcctgggacaccattttgacgacagggtgtgaagaccggcgtgcgctaggtgtgagtcctccggcccctgaatgcggctaatcctaaccctgcagccattgcatgtgatccaacatgtggatggtcgtaatgagtaattgcgggatggaaccgactactttgggtgtccgtgtttcctgttttaccaattactgtctcatggttacaaatttgtgtatcaagtttgtaact

SEQ ID NO: 768 - DNA, 640 bp, Pigeon mesivirus 2
  strain pigeon/GALII5-PiMeV/2011/HUN, complete1
ttttgaaaagggtcccagggggatcttttattccctctgggcccttttcacgtagtagggagtggcgcccctactgcgttactctgccaggtagtctgggtaggtaaacgggagatcggcttcgggcttatcttcttaatagcctacgtaactgggctgactggtgggggagctactagatccgggaaaggactagttaccccttgtaactctccttcgtgtcaccccatccacttaccctttttccctaccccttagaatcttaagtagatgtgcaggcctggccccccggaaatgggcaaatcggacgtttgcgtgtagggtcgttctgaaaggtggggcccactccaccgtagtaggatcttcctgtttcacgtttaaacctctccgggcaggtgtcgctagacactaggctgtataggatggcaagcacttaggtttcgcaccttcctagtgcgccaagaccccgtcttttagttttagtacatggttctttgtaagatgtctaaccagaggaggtggtgctgaaatattgcaagccactctggcgaacgtccgctgcattgcctggaacgaactttctgacgtctagcactggtagcgcggtactagattagtagggtacctatatggacagggg

SEQ ID NO: 769 - DNA, 640 bp, Rhinovirus C
  isolate 8097-MY-11, complete genome.1
ttaaaacagccgtgtggttgttcccaccaccggacacactgtgtgttgtgcactggaatctcggttcctttgcatgcctgttttataaccccttcccctttactttctatcattcttttcttccaagtaacttagaagctgaacaacagtccaataggaagtgaccaacccatggtcactaaggacaagcacttctgtttccccggatgcgtgaatagactctaaaagggttgaagctgtagcattcgttatccgcacttgtactacgcgatggctagtatcatcctgctctttccattggcgtttcgctcagcgtggtatcccccacgtagatcagggtaatgaggctacatgtaccccaccggcgacggtgatgtagcctgcgtagtgccccgcctgggtcttgtgcccaggacgccataggtcagacagggtgtgaagacttgagtgtgctacaagtgagtcctccggcccctgaatgcggctaatcctaaccccgcggctatcgtacgcaatccagcgtattggtagtcgtaatgagcaattgtgggatggaaccgactactttgggtgtccgtgtttcctttatttcttgacatgttgcttatggtcacaagtttatggttataaatttgtgatc

SEQ ID NO: 770 - DNA, 641 bp, Grey squirrel kobuvirus
  isolate UK 2010 polyprotein gene, complete1
ggatttaggccgtggtgcccgtgggcacgacggccacggctccagccgcactcctctccacgccttgtcccacgggacataaagtggagccctaagccctaaacccccatgttacccaattttcttatccacttccctttttccctttgactcacatttttcttgaccgcgcttgtgaggcggttcccgtacagttgagttgacgggtcccgcgcgggacctgaaaattactccatactgattaggaaaggttctagtacgcttgtacccttaaggccagcgggctacctcctttaggtcttatagccccaactggttagaaccactccagctcacctctatcggtgcgggagtgctaccacccctgcctgcgtcaagcccgtttttctagtgatctgtccacaaacacttggattcccgtcgcgactgacagaacctggcgacaggtgtctcgatgtgtgtgaccaagtggcatgagaatcggaaactaacgctggtaagatggtaagtgcccaatccctgtggggtgatgtttttctctgcataggaatgctgcgaaggtaccccggccttgagtcgggatctgatcgcaggctaattgtcctctgtgcagttcatttccttttcttttcattggcatc

SEQ ID NO: 771 - DNA, 641 bp, Human rhinovirus
  C51, isolate LZ508, complete genome.1
ttaaaacagccgtgtggttgtacccaccaccggacacactgtgtgttgtgcactggaatctcggttcctttgcatgcctgttttaaaccccccttcccccactctttctatcattcttttcttcctaatgtaacttagacgttataccacagtccaataggacgtggccaatccaggccatgacggacaagcacttctgtctccccgggcgtgtgaataggcctcaacaaggctgaagctgtagcgctcgttatccgcatttgtactacgcgatggctagtatcatccttctcttggtcttggcgtttcgctcagcgtggtaaccccccacgtagatcagggcaatgaggctgcatatgccccaccggcgacggtgatgcagcctgcgtggtgccccgcctgggttaacccccaggacgccacaatcaagacagggtgagaagacctgagtgtgctacagatgagtcctccggcccctgaatgcggctaatcctaaccctgcagctatcgtatgcaaaccagcatattggtagtcgtaacgagcaattgcgggacggaaccgactactttgggtgtccgtgtttctctttttatttgaaatgttgcttatggttacaagttttggtattaaacttgtgacc

SEQ ID NO: 772 - DNA, 641 bp, Rhinovirus C
  strain 20692_95_HRV-C polyprotein gene, complete cds.1
tgtgtacatctcttctagtttcggggaggggtttaaaactgaaccacggttgttcccactgtggttacctaaagggtgtagtggtcttgtattacggtacatttccatgccagttttatcacccctccccgaaattagaagagatgtacacaccgaccaatagggagtggccaaccaggtcgctaaaggtcaagcacttctgtttccccggttggtttggatatgctttacccaaggcaaaaaccgaaccagtcgttatccgcaaagtgcctacgagaagcctagtagcatcttcgaaaccaatggttggtcgctccattgcaaccccagcaatagacctggcagatgaggctgagcagtccccgccagcgatggtggctcagcctgcgcggctgcctgcgcaccccttagggtgcgaagccagaaagtggacaaggtgtgaagagcctattgtgctcactttgagtcctccggcccctgaatgtggctaatcttaaccccgcagctatcgcacataaaccaatgtgtaggtagtcgtaatgggcaactgtgggatggaaccaactactttgggtgtccgtgtttccttgttttctttacaaatgcttatggtgacaattgtgtgatatacagttgtcgcc

SEQ ID NO: 773 - DNA, 642 bp, Echovirus
  E3, strain 2-E6-TW, complete genome.1
taatgtaacgtagaagttttacacactgatcaacagtaggcacagcgcaccagttgtgtctcgatcaagcacttctgtctccccggaccgagtatcaatagactgctcacgcggttgaaggagaaagcgttcgttacccggctgactacttcgagaaacctagtagcactatgaaagttgcgaagtgtttcgttcagcacttcccccgtgtagatcaggtcgatgagtcactgtattccctacgggtgaccgtagcagtggctgcgttggcggcctgcccatggggcaacccatgggacgcttcaatacagacatggtgcgaagagtctattgagctagtcagtagtcctccggcccctgaatgcggctaatcctaactgcggagcatgtgccttcgatccagagggtagcatgtcgtaatgggcaactctgcagcggaaccgactactttgggtgtccgtgtttccttttattcttatactggctgcttatggtgacaattgagagattgttgccatatagctattggattggccatccggtgagtaatagagctattatctactcctttgtgggttttgtatcattgaactataaggtcttgaagactctcaactttattttgacactcaacaccgcaaa

SEQ ID NO: 774 - DNA, 643 bp, Echovirus
  E25, strain USA/CA/RGDS-2017-1010, complete genome.1
aagcgtaacttagaagcttacctcacgtggtcaataggcggctcagtacaccaactgggtcttgaccaagcacttctgttaccccggaccgagtatcaataggctgcccacgcggctgaaggagaaaacgttcgttacccggccaattacttcgagaaacctagtatcaccatggaagttgcgcggcgtttcgctccacacaaccccagtgtagatcaggctgatgagtcaccgcactcctcacgggcgaccgtggcggtggctgcgttggcggcctgcccatggggcaacccatgggacgcctcaatactgacatggtgtgaagagtctattgagctaattggtagtcctccggcccctgaatgcggctaatcctaactgcggagcagacactcacaagccagtgggcggtctgtcgtaacgggcaactctgcagcggaaccgactactttgggtgtccgtgtttccttttattcctacattggctgcttatggtgacaattgagagattgttaccatatagctattggattggccatccggtgacaaacagagcgattgtctattcatttgtcggttttgtaccattaaactccaaagtcttgaaaaccctcaacctaatcatcctacttaactcagtaaa

SEQ ID NO: 775 - DNA, 643 bp, Enterovirus sp.
  D68, isolate NY510_18 polyprotein gene, complete cds.1
ccaagggcccacgtggcggctagtactctggtacttcggtacctttgtacgcctgttttatctcccttcccaatgtcaataggtggggcgcaaaccagcgctctcatgagcaagcactcctgtctccccggtgtggttgtataaactgttcccacggttgaaaacaacctatccgttatccgctatagtacttcgagaaacctagtatcacctttggattgttgacgcgttgcgctcagcacactaacccgtgtgtagcttgggtcgatgagtctggacataccccactggcgacagtggtccaggctgcgttggcggcctactcatggtgaaaaccatgagacgctagacatgaacaaggtgtgaagagtctattgagctactatagagtcctccggcccctgaatgcggctaatcctaaccatggagcaagtgctcacaggccagtgagttgcttgtcgtaatgcgcaagtccgtggcggaaccgactactttgggtgtccgtgtttcactttttacttttatgactgcttatggtgacaatttgatattgttaccatttagctgtcaaattaattgcaaaagatcctaagtcttacttaccaatttgcattttgataaccttgatttgaaaattttaata

SEQ ID NO: 776 - DNA, 643 bp, Rhinovirus B
  strain 20692_64_HRV-B polyprotein gene, complete cds.1
cggataacgtttaaaacagcggatgggttcccccaccatccgacccactgggtgtagtactctggtattatgtacctttgtacgcctgtttactcccaaaccccccctcccgttacatttccaacccctgtaacgttagaagtttggaatttaacagtacaataggaggcaccatacccaatggtgtaatgtacaagcacttctgtttccccggagcgaggtataggtggtacccaccgctgaaagcctttaaccgttatccgccaatcaactacgtaacagctagtagcattttgtcgttgactggacgttcgatcaggtggtttacccccccactagtttggtcgatgaggctggaaattccccacgggtgaccgtgttccagcctgcgtggcggccaacccagctcatgctgggacgccctttcaatgacatggtgtgaagactcgcatgtgcttggttgtgaatcctccggcccctgaatgcggctaaccctaaccccggagccttgcatcgcaatccagtgatgttggggtcgtaatgagtaattctgggatgggaccgactactttgggtgtccgtgtttctcatttttctttgaattatcttatggtcacagcatatagtaatatatactgtgatc

SEQ ID NO: 777 - DNA, 644 bp, Picornaviridae sp.
  isolate thr106pic1 genomic sequence.1
gaaaagagtcccaggaggaattccccctgggaacccttttccgttgggaaggcttggcaaccttcctggcgttaggctgcttagtagtctgcgtattgcgcgccagtttggcttcggctgagctgccgttcaatacactagtgggctattctaggtggctgtagttgccctacagtggccggccagtgaaaccacactgtagtttacccctaccccaaaatctctaatttatgaccgtaatccctaagtgactttcttgtttgctctcacacatgggctttggatcttgttttggattttggtatctgatctctatctggatgtatcagtaatctgaagtgcggacgcaatccgcctagtaggatgactgttgtccttttagaggaaaacctctgtggctagacatagtggtgtatagattcaacaggactcctttttggatatcctaactcccggacccttgttgaatgggctggatttccgcctagccaagggaaaccaccggaacggggatggcaactgaacctagtacggctagtaggaggtctatacatacgatgggctgggaaacccatcctggactatgactgggtgatagcctcgcggcggatcgagtcacagttgtaatccgttgttttgcactc

SEQ ID NO: 778 - DNA, 644 bp, Human rhinovirus B
  strain HRV-B70_p1085_sR469_2008 polyprotein1
aattggcggataacggttaagagcttaaaacagcggatgggttccccaccatccgacccaatgggtgtagtactctggtattctgtacctttgtacgcctgtttctcccctccctcccatcctaaattgtcccagtaacttagaagacttgaattaccgtacaataggtgctgtcacatccagtgatggcttgtacaagcacttctgtttccccggagcggagtatagatggccaccgctgtcaaaagctcttaaccgttatccgccaattaactacgcaacggctagtaacatcttgttattcttagggcgttcgatcaggtgagtacacccctcactagtctggtcgatgaggctgagaattccccacgggcgaccgtgtctcagcctgcgtggcggccagcccagcttatgctgggacgccttaattgtgacatggtgtgaagacccacgtgtgcttaattgtgagtcctccggcccctgaatgcggctaacctaaaccctggagccttgagacacaatccagtgttggcaaggtcgtaatgagcaattccgggacgggaccgactactttgggtgtccgtgtttcctgttatttccaaattgttcttatggtcacaatataagctatatatattgtgatc

SEQ ID NO: 779 - DNA, 644 bp, Human rhinovirus C
  strain HRV-C42_p1053_s3040_1999 polyprotein1
cgaatccttgtagtaatttatgttaaagtacttgatgagacctccattggtggcagtaatagcattctcatgtgatccggtggtattccggtacacttgtacgccagtttgccaccctaaataccccgtaacaatagaagtctacacacacttagaccaatagggggtgttcatccagttcacccaaggtcaagcacttctgtttccccggcataggggtgttaggtttcacccgagactgaagctctgattgtcgttatccgcacaactactggacaaagcctagtaacaccctacgatgtaccatggttggttgttccgccagtaccccctggtaaacctggcagatggggctagaagttcctcactggtgacagtgttctagcccgcgtggctgcctgctcccttatgggagaagccattttactgacaaggtgtggagagccccgtacgctagttgtgactcctccggcccctgaatgcggctaatccaaccctgcagccattgcatggaagccaccatgtagatggtcgtaatgagtaattgcgggacggaaccgactactttgggtgtccgtgtttcttgtttttcttttactgacgtttatggtgacaatatatatataacatatatattgttcatc

SEQ ID NO: 780 - DNA, 645 bp, Human rhinovirus C
  isolate JAL-1, complete genome.1
ttaaaactgggcattggttgtccccaccaatgcacaccaagtgtgttagtgctctggaatcttcgttcctttgcacgccagtttgccctcccttccccaagtctttctatcattcttttcttcctaatgtaacttagacgttataccacagtccaataggacgtggccaatccaggccatgacggacaagcacttctgtctccccgggcgtgtgaggaataggcctcaaaaaggctgaagctgtagcgctcgttatccgcattggtactacgcgatggctagtatcatcctggaagtctcttggttggtcgctcagcgtggtaaccccccacgtagatcagggcaatgaggctgcatatgccccaccggcgacggtgatgcagcctgcgtggtgccccgcctgggttaacccccaggaagccaatgagtggacagggtgtgaagagccgcgtgtgctaccaatgagtcctccggcccctgaatgcggctaatccaaccccacagctatggcatgcaagccagcatgtgcgtagtcgtaatgagtaattgtgggacggaaccgactactttgggtgtccgtgtttcctttattctttgaaatgttgcttatggtgacaatattggtattataccattcttgtcatc

SEQ ID NO: 781 - DNA, 647 bp, Enterovirus C
  strain 04-1438, complete genome.1
tgtgacctcaccggggaaacagaagtgcttgttcgtggtggtactggtttgtaccaccacgaacaagcacttctgtttccccggtgaggtcacatagactgttcccacggttgaaagtgatcaatccgttatccgctcatgtacttcgggaagcctagtatcacctttggatcttcgacgcgttgcgctcagcactcaaccccagagtgtagcttaggctgatgagtctggacgttccccactggtgacagtggtccaggctgcgttggcggcctacctgtggttcaaagccacaggacgctagttgtgaacaaggtgtgaagagcctactgagctacctgagattcctccggcccctgaatgcggctaatcctaaccacggagcaggtgatcataaaccaatgataggcctgtcgtaatgcgcaagtctgtggcggaaccgactactttgggtgtccgtgtttccttttattctttacattggctgcttatggtgacaatcatagattgttatcataaagcgaattggattggccatccggtgaaaatcagagcgattatatatttgtttattggattcactccattaacaccaatttctcctacactcattaagctagtcctattaataaggtactattatcata

SEQ ID NO: 782 - DNA, 647 bp, Unknown
  Description of Unknown: Human coxsackievirus A22, strain BBD58 polyprotein gene, partial1
cggtacctttgtacgcctgttttatatcccctcccccatgcaactttagaagcaattcaaacagttcaatagagggggtacaaaccagtaccaccacgaacaagcacttctgtttccccggtgaagctgtatagactgtgcccacggttgaaaatggctaatccgttatccgcttaagtacttcgagaagcctagtatcaccttggaatcttcgacgcgttgcgctcagcactctaccccgagtgtagcttaggctgatgagtctgggcataccccaccggcgacggtggcccaggctgcgttggcggcctacccatggctaacgccatgggacgctagttgtgaacaaggtgtgaagagcctattgagctacttgagagtcctccggcccctgaatgcggctaatcccaaccacggagcaagtgctcacaaaccagtgagtggcttgtcgtaacgcgcaagtctgtggcggaaccgactactttgggtgtccgtgtttccttttatttttatcatggctgcttatggtgacaatctaagattgttatcatatagcgtttggattggccatccggtgatttcaaaagtgatatatttgacctatcgccttactgtgtttacctactcattacatccactcaaccata

SEQ ID NO: 783 - DNA, 648 bp, Coxsackievirus
  A1 clone V18A polyprotein gene, complete cds.1
tcacggtacctttgtacgcctgttttacatcccctccccaagtaactttagaagtaaatcataaagttcaatagaagggggtgcaagccagcaccaccacgaacaagcacttctgtttccccggtgaagccgtatagactgcccccgcggttgaaaatggcagatccgttatccgctcacgtacttcgagaagcctagtatcaccttggaatcttcgacgcgttgcgctcagcactctaccccgagtgtagcttaggtcgatgagtctgggcataccccaccggtgacggtggcccaggctgcgttggcggcctacccatggttaacaccatgggacgctagttgtgaacaaggtgtgaagagcctattgagctacctgagagtcctccggcccctgaatgcggctaatcccaaccacggagcaagtgctcacaaaccagtgggtagcttgtcgtaacgcgcaagtctgtggcggaaccgactactttgggtgtccgtgtttccttttatttttatcatggctgcttatggtgacaatctaagattgttatcatatagctattggattggccatccggtgatttttgaaagtgatatttgccttgctatttcattgcatttgcttacttataatactgcaaactcaca

SEQ ID NO: 784 - DNA, 648 bp, Rhinovirus B
  take1 genomic RNA, complete genome.1
tactaatacagagtactacacccagtgggtcggatgggtatcccaccatccgacccactgggtgtagtactctggtattatgtacctttgtacgcctgttcttcccattgtaccctccctaaatttccaacccaagtaacgttagaagttccacataacagtacaataggaagcaccacatccagtggtgttttgtacaagcacttctgtctccccggagcgaggtataggctgtacccactgccaaaagcctttaaccgttatccgccaaccaactacgtaaaagctagtaacatcttgtttgtaacttggcgttcgatcaggtggattccccctccattagtttggtcgatgaggctaggaattccccacgggcgaccgtgtcctagcctgcgtggcggccaacccagcatttgctgggacgcccttttatagacatggtgtgaagactcgcatgtgcttggttgtgactcctccggcccctgaatgcggctaaccttaaccccggagccttgtgttgcaagccagcaacattaaggtcgtaatgagtaattctgggacgggaccgactactttgggtgtccgtgtttccaatttttcttattattgtcttatggtcacagcatatttgacaaatatactgtgatc

SEQ ID NO: 785 - DNA, 649 bp, Echovirus
  E7, isolate Env_2016_Sep_E-7b, complete genome.1
ccaccccgtcgtaacttagaagctaatcaactatggtcactaggcggcccagtatgccaactgggtcttgaccaagcacttctgttaccccggactgagtatcaataggctgctcacgcggctgaaggagaaaacgttcgttacccggccagttacttcgagaaacctagtaccaccatgaaggttgcgcagcgtttcgctccgcacaaccccagtgtagatcaggccgatgagtcaccgcatccctcacgggcgaccgtggcggtggctgcgttggcggcctgcccatggggcaacccatgggacgcttcaatactgacatggtgcgaagagtctattgagctaattggtagtcctccggcccctgaatgcggctaatcctaactgcggagcagatacccgcgtgccagcgggcagtctgtcgtaatgggcaactctgcagcggaaccgactactttgggtgtccgtgtttccttttattcttacactggctgcttatggtgacaattgaaagattgttaccatatagctattggattggccatccggtgactaacagagcgattatctatcaatttgttggttttgtgccattggatttcccaaccctaagaacccttaattttatattggtacttaacacgacaag

SEQ ID NO: 786 - DNA, 651 bp, Gallivirus A1
  isolate 518C, complete genome.1
ggttaacttgtttaaccaaggcttccgtgcagggcttgcacgttaggagttcatgttgattcatgctccaatgcccaaaactttgtgtgtttgtttatgtctttcccaaagtttcccccaaggtttcggtactcaaaccttaattcctagtcccatcttttgggccttagtatctaggaaatgtacccgtgccttgacgaacgtaagaaagctgtcttttattgaacggttctaatgaactaagtataactggctcgcgccacctggtgtgtgccgttggaattcccccatggtaacatggtccaacgggcccgaaaggctagtgggcaatcggtcctccaaggaaggggttcccaccccgacctgaacaggatttgatgaagctcacctcccaggctcctaaccccaaggaagtttacttatagtaattagaatttagtatgtaattgctggcaatcttgctagtagtcaggaacgttatgaccaaatgagtagacccccagaaggtaccccattatatgggatctgatctgggcctcatactgtgtgtctccccacatatgaggttaaaaccatgaaagtttggtccaaaatattcttttccttttatcttttctttagtggtgacgccattatatcagcagtttgctg

SEQ ID NO: 787 - DNA, 651 bp, Human poliovirus 2
  complete virion genome,isolate1
ccccgtaacttagaagcataaaaccaagttcagcaggaaggggtgcaaaccagtacctctatgaacaagcacttctgtttccccggtgacattgcatagactgctcacgcggttgaaagcgatcgatccgttatccgcttgtgtacttcgaaaagcctagtatcgccttggaatcttcgacgcgttgcgctcagcacccgatcccggggtgtagcttaggctgatgagtctggacgtccctcaccggcgacggtggtccaggctgcgttggcggcctacctatggctaacgccataggacgctagatgtgaacaaggtgtgaagagcctattgagctacacgagagtcctccggcccctgaatgcggctaatcctaaccacggagcaagcggtcacgaaccagtggctggcttgtcgtaacgcgcaagtctgtggcggaaccgactactttgggtgtccgtgtttcctgttatttttatcatggctgcttatggtgacaatctgtgattgttatcataaagcgatttggattggccatccggtgagtgttgtatcgaacatttgactgttcatcagaactactgtgttagattcacttcttattcaactaattaatcaaaaacagtacgaagacaaaacaacaatactaca

SEQ ID NO: 788 - DNA, 651 bp, Human enterovirus
  isolate EV/Human/CMRHP52B/CMR/2014 polyprotein1
cccctaccccttgcaacatagaagcattgtaccacggatcaatagcaggtgtgtcgatccagacgcatcttgatcaagcacttctgttcccccggaccgagtatcaataagctactaacgtggctgaaggagaaaatgtccgttacccggccaactacttcgagaagcccagtaccaccatgaacgttgcagagtgtttcgctcagcacaaccccagtgtagatcaggccgatgagtcaccgcattcctcacgggcgaccgtggcggtggctgcgctggcggcctgcctatggggaaacccataggacgctctaatactgacatggtgcgaagagcctattgagctagttggtagtcctccggcccctgaatgcggctaatcctaactgcggagcatgtgctcacaatccagtgagtggcatgtcgtaacgggtaactctgcagcggaaccgactactttgggtgtccgtgtttccttttatatttatactggctgcttatggtgacaatcaaggaattgttaccatatagctattggattggccatccggtgactaatagagctataatttacctatttgttggattcgtccccctgaacacaaaaacagttcagactctacagtacatcttatttttgaacttgaagaa

SEQ ID NO: 789 - DNA, 652 bp, Enterovirus E
  strain NGR_2018, complete genome.1
gggggttgtacccacccctggggcccacgtggcgccagtactctggtacgctagtacctttgtacgcctgttttcccctcccgtaaataaatcaagattgctggtcctgtggggagtagtccgactccgcaccgatacgtcgcaccagtactccggtacgcctagtaccctagtacggaggtaccagtactcctctcccgtaacttagaagcaaagcaccaaaccgacccaaaaggacgcgttgcacccagcagcgtgatggtcaagcacttctgtttccccggccgcaaggtcgttacccacccgcaccactacgagaagcctattagacagccaagcttgcaaagcgttgcgttcaaccacaaccccagtggtagctctgagagatgggactcgtcgttcccccatggcaacatggtgacttgtccgcgtgtgctctcgggttcgccaataggcgttcacgccgcacaagtgtaactgttgaagagcctattgtgctggagcggttttcctccggagccgtgaatgctgctaatcccaacctccgagcgtgtgcgcacaaaccagtgttgctacgtcgtaacgcgtaagttggaggcggaacagactactttcggtactccgtgtttccttattttatattactcaatct

SEQ ID NO: 790 - DNA, 652 bp, Human rhinovirus A
  strain HRV-A44_p1191_sR1286_2009 polyprotein1
gagcctggtggagcgtatcaatctaaaccggggagacagaagtgcttgaccgttaatgacttggatagccatctcctacatggagttgtactctattattccggtaatcttgtacgccagttttatatcccttccccctttgtaacttagaagttaagcacacagaccaataggtgatggctatccaagtcattaacggtcaagcacttctgtctccccggtttagattgatacgctccaccagggcgaaaacaatctaaatcgttatccgcaaagtgactacgcaaagcctagtaataccttgaagaacttatggttggtcgctccactaaaccccatagtagacctggcagatgaggctagaagtaccccactggtaacagtgttctagcctgcgtggctgcctgcacaccctttgggtgtgaagccatatttttgacaaggtgtgaagagccccgtgtgctcactttgagtcctccggcccctgaatgtggctaaccttaaccctgcagctagtgcatgcaatccagcatgttgctagtcgtaacgagcaattgcgggatgggaccaactactttgggtgtccgtgtttcactttttaccttttatttgcttatggtgacaatatatatagtacatatatattggcatc

SEQ ID NO: 791 - DNA, 654 bp, Simian enterovirus J103
  isolate cg8227 polyprotein gene, partial1
tttgtacgcctattttaaaacccctacccccgtaacttagaagcatttgacacaagttcaatagtaggaccatcatccaggtggttcatcgaacaagcacttctgttaccccggtcctagtacctgtgaagctgtacccacggcggaaggggaaaacgatcgttacccggctatctacttcgagaagcctagtaacagcattgaaactcttgagcgttgcgttcagcacagtaacccctgtgtagctttggctgatgagtctgggcattccccactggcgacagtggcccaggctgcgttggcggccaaccgatccgggcaaccgggtcggacgcttatttgtggacatggtgtgaagagcctattgagctagatagtagtcctccggcccctgaatgcggctaatcctaactccggagcaaatgcacgcaacccagcgtgtagtttgtcgtaacgcgtaagtctggagcggaaccgactactttgggtgtccgtgtttcctgttttaccttatttggctgcttatggtgacaatatagtattgttaccatatagctattggattggccatccggtgaacagatttcgacaaactctattttactgttgttcacagcctaaagttacaaatcttactctgactcagtagtaatc

SEQ ID NO: 792 - DNA, 655 bp, Human parechovirus 1
  isolate 152478, complete genome.1
ctggatttctctaggagagtccctttcccagccctgaggcggctggtaaataaaagcctcaattgtaacaaacatctaagaacactacattaaccccatgcctggtctccactagttgaaggcgacttgcaataagatgagtggaaacaagacgcttaaagcatggtgtaaatcaacttttctaacctgtacattgtatggggtggcagatggcgtgccataattctatcagtgagataccacgcttgtggaccttatgctcacacagccatcctctagtaagtttgtgagacgtctggagacgtgtgggaacttattggaaacaacattttgctgtaaagcatcctactgccagcggaacaacacctggtaacaggtgcctctggggccaaaagccaaggtttaacagaccctctaggattggtttaaaacctgagatgttgtggaaaatattcagtacctaccaatctggtagtagtgcaaacactagttgtaaggcccacgaaggatgcccagaaggtacccgtaggtaacaagtgacactacggatctgatctggggccaggtacctctatctaggtgacctggttaaaaaacgtctagtgggccaaacccgggggggaccccggtttccttttattttatcaatgccact

SEQ ID NO: 793 - DNA, 655 bp, Simian enterovirus 46
  isolate cg4119 polyprotein gene, partial cds.1
ctgttttatctcccctcccccgtaacgttagaagattaaacaaatgacaaatagcaaatccaccaacccaggtgggttttcgtcaagcacttctgtttccccggacctagtaccaataggctgtacccacggctgaaagggaaaacgttcgttacccggctacctacttcgagaagcctagtaccatcattgaatgtctcaagtgttacgctcagcacaaccccagtgcagttcaggctgatgagtcaccgaatcccccacgggcgaccgtgtcggtggctgcgttggcggcctgcctgcgagttccactcgcaggacgcttgattcatgacatggtgcgaagagcctattgagctaggtagtagtcctccggcccctgaatgcggctaatcccaaccacggagcatccactgacaaaccagtcagcagggtgtcgtaatgggcaactctgtggcggaaccgactactttgggtgtccgtgtttcctgttttatttactctggctgcttatggtgacaatttacggattgttaccatatagctattggattggccatccggattacaagcaagtaatattactgtttgtgggatttttacccttgaatcacattaactacttcattctactaatagtcttgaagttaagtacatc

SEQ ID NO: 794 - DNA, 656 bp, Rhimavirus A
  complete genome.1
cgaattccggacatctcctttcgggggcgagcgtcaccgtgcccctcatggaggcaactgtgcctctaatcggtgacccactgagaaaattttctttctacgtggctaaacaatgcaactttataataacacaaatttaatgcttaatcttaacaccaaagatttgaacatatgtttggaaagtggcacacttcaaacattgcatagttgctaggggtgaagtccctttaaggggttgcagaggatctttcctctttatgagcggctaggagtatcttcttgatattatgtggtcgtgcaactcacttcccagatgtatgacggtgtactaagcgattggaactagtcataacctctttgaattttggtattgcgagtctagcagggggatatttaccgctaaagggtgacacactcgtgagggtggcctttggtgtgtgtatatttattccgcccatcttgcatggggtgctaaaattctaatgctgtgaaataaccattttctgaatacattctctacatttggagtcaaatatgaggaatgccactcaggtacccttgacatgatcttggatctgagagtgggctaattatctaattatttggcgactttctaaaatcttctgtttttagtggtgacaatttatggttataaa

SEQ ID NO: 795 - DNA, 656 bp, Rhinovirus C
  strain 20693_83_HRV-C polyprotein gene, complete cds.1
gaaaggaggggaaggggttttaaaacagtcgaccggttgttcccaccggcgagcacactgtgcgttgtacactggaattacggttcctttgtatgcctgttttataaccccttcccctcctttctatcacctctaacttccatgtaacttagaagcaacgtacatgagcccaataggagcggctaatccacagccgtatagggcaagcacttctgttaccccggatgtgtgaatagacttctcacgaggttgaagctgaagcattcgttatccgcgcttgtactgcacggaaattagtagcactcttgccagcctcatggtgtttcgctcagcgtttcccccacgtagatcagggcaatggggctacacaacccccaccggcgacggtggtgtagcccgcgtggtgccccgcccgagctactagctcgggacgccatgatgaagacagggtgtgaaggttcgagtgcgctacaagtgagtcctccggcccctgaatgcggctaaccttaaccccgtagctgtggtgtgcatgccagtacaaacacagtcgtaatgggtaactacgggatgggaccgactactttgggtgtccgtgtttcactttttcctttaaatttgtcttatggttacaggtttatgcaaatagatctgtaatc

SEQ ID NO: 796 - DNA, 657 bp, Human enterovirus 73
  isolate 2776-82 polyprotein (pol) gene,1
gcggccccctcccccactgtaacttagaagcaatgcataccgatcaacagtgggcgtggcaaaccagccatgtcttgatcaaacacttctgtttccccggactgagtatcaatagactgctcgcgcggttgaaggagaaaacgttcgttatccggccaactacttcgagaagcttaagtaacatcatgaaagttacggagcgtttcgttcagcacatccccagtgtagatcaggccgatgagtcactgctctccccacgggcgaccgtggcagtggctgcgctggcggcctgcccatggggtgacccatgggacgctctaagatggacatggtgcgaagagcctattgagctagttggtagtcctccggcccctgaatgcggctaatcccaactgcggagcatgtgtcttcactccagaagatagcatgtcgtaacgggcaactctgcagcggaaccgactactttgggtgtccgtgtttccttttattcctacactggctgcttatggtgacaattcaagaattgttaccatatagctattggattggccatccggtgagcaatagagcaattatctaccaatttgttggatttgtacccctcgattttacagccattggaacacttaaatacatcttagtactcaacacgacaaa

SEQ ID NO: 797 - DNA, 660 bp, Enterovirus SEV-gx
  complete genome.1
acatgggccagcccaccacacccactgggtgtagtagtctggttctatggaacctttctacgcctcttttgcttccctcccccatttctccttcgattgctccacctgtgatctttgcaacttagaagaaataatgaacccgcacaatagcgggcgctgagccacagcgtcaatgtgcaagcacttctgtttccccggaatgggcccataggctgtacccacggctgaaagggaccggcccgttacccgccttggtactgcgagaatgttagtaactccctcgatagctttaggcgttacgctcagccctttgagcccgaagggtagttcgggtcgatgaggctcgtcattccccactggcgacagtgtgacttgcctgcgttggcggcccggggtggggggcaacccccatccacgcctactgaaggacagggtgtgaaggcgctattgcgctactaaggagtcctccggcccctgaatgcggctaacccgaaccccgagcccacggtggtaaacccgccacaagtgggtcgtaatgagtaatttggggcagggaccgactactttgggtgtccgtgtttcctgtttttccatacgatggctgcttatggtgacaaccataagcaattggattggccatccggtgttcatattgcgaat

SEQ ID NO: 798 - DNA, 662 bp, Encephalomyocarditis virus
  isolate SG-G15150-19, complete genome.1
ctctttccgagggaaaggaagcgccccagtctgcattcacaagctggtgcttccccgcccagactaagcgccgcacggagggaatcagggtcccggtgccccccctccctaacagtactggtcgaaaccacttgggataagaccggtgtcttgtttagtctatatgttatttctactcatctggtttctttgccagatgatgggcagtgtaaccttgccctcgcttcttgcggagaattcctagtggtctttccactctcgacaaaggaattcatgttccaccaaaagttgtgaagaaagcaagtcctatggaagctttctgatgactgatgatgactgtagcgaccctttgcaggcagcggactcccccacctggtaacaggtgcctctgcggccaaaagccacgtgtttgacagacacctgcaaaggcggcacaaccccagtgcctcatcaaaagtctgatgactgtggaaatggtcaactggcttttcttaagcaaatttggtgtttggggctgaaggatgcccggaaggtaccacactggttgtgatctgatccggggctttagtgcatgtgctttacacatgtagctaaggttaaaaaacgtctaggccccccaaccacggggacgtggttttcctttgaaaaccacaatttataat

SEQ ID NO: 799 - DNA, 663 bp, Norway rat hunnivirus
  isolate NrHuV/NYC-E21 polyprotein gene,1
gccctcacctgtcaattgggaccaccactttcagtgaccccatgcgaagtgctgagagaaggaagctttcttacccttcatttgtgaacccactagtctaagccgcttggaatacgatgagtggaaaagttcattctaaatggagtgaaacatgcttaatttttctagtcaggcacacccttgtgtgtctgagcgccactgtcttggcgtaagtcttcagagtgtcacgccgtgcttgcggatctcacgtggcacatgacgaggctctcgctggaactgtgagtctggaacaagtgaagtaacagtgaaaagtgcatgatcacacattgtgtgggctatgagcctgcggaacaacaactggtaacagttgccccaggggccgaaagccacggtgttaacagcaccctcatagtttgatccatcccaggatggtgatgttgtgtacctagtaattgccaatttgcttgttttggtatcatggcataccggagagtttgcgggtgaaggatgcccagaaggtacccgtaggtaaccttaagagactatggatctgatctggggccctgtctggagtgctttacacacagctcagggttaaaaaacgtctagcccgcatcaacccgagggattcgggttttccctttaaaaacccgactggcattt

SEQ ID NO: 800 - DNA, 663 bp, Human enterovirus 109
  isolate NICA08-4327, complete genome.1
tttaaaacagcctgggggttgttcccacccccagggcccactgggcgttagtactctggtatcgcggtaccttagtatgcctgttttatgtctcctttcccccgcaactttagaagtaatcaagttatggctcaacagtcgccacacccccagtgtggttccgagcaagcacttctgttccccggttgcgtcttatatgctgtgtgaacggcagaaagggacaatatcgttatccgctcaactactacgggaagcctagtaccaccatggattgacctgaaagttgcgttcagcgcacccccagcgcagctcaggccgatgaggctccgaataccccacgggcgaccgtgtcggagcctgcgttggcggcctgcccacgttgcaaaacgtgggacgctcatttcatgacatggtgcgaagagcctactgtgctagttgagagtcctccggcccctgaatgtggataatcctaaccactgaacctacgggcgcaaaccagcgtctggtaggccgtaacgcgcaagtcggtggcggaaccaactactttgggtgtccgtgtttccttttatctttttgaatgtttatggtgacaattgttgtgtacagttgttaccatagtttgcattcagaaataaacctaacactttccaattatttgttaca

SEQ ID NO: 801 - DNA, 664 bp, Swine picornavirus
  Tottori-WOL gene for polyprotein, complete cds.1
cccctttacgtaactgcaacttaaagagtaccctactgcattggatgtgtggtaaacttttacgcacacatttgtagtagtgttagttatgttctacctaatgagtatgcatgcacccgtcgaaacacgcttgtgataagataggtgagtccatgtgactaatctcattaagataaataagcaccctacaacgcacggcacgctcgtgtcttccgtgcggggccgggacaacagcggcctaaatcttctaggtgaccaccatgcttttgggactatggcaccactgtggacgtgagtacctggcagtaagtctgtgaaaagatggaaggtgtcccaagctatggggcgtatgcatatagcctgcggaacaaacaacggcgacgttgtccccagggcccaaaaggcacgtggataagatccacctatatgtttaccccatagtgtaagtcactggaagtcctagtaatggatgtctggagtaaggctcacggggtagggcgaaggatgcccagaaggtacccgtaggtaaccttaagagactatggatctgatctggggaccggatggcgccatcaccatgacgtggaggccggtttaaaaaacgtctaagcccgaccaacaacctaggggactaggttttccttttttattcatgtatgacgtt

SEQ ID NO: 802 - DNA, 664 bp, WUHARV Enterovirus 1
  polyprotein gene, complete cds.1
ccacgcggcgttagtactctggtatcacggtacctttgtatgcctgttttatctcccttcccccgtaacgttagaagaaaacacaaccgacaactagcagattcaccaatccaggtgagtcttcgtcaagcacttctgtttccccggacttagtaccaataggctgtacccacggctgaaggggaaaacgttcgttatccggctacctacttcgagaagcctagtaccaccattgaatgtctcaagtgttacgttcagcacaaccccagtgtagttcaggtcgatgagtcaccgaattccccacgggcgaccgtgtcggtggctgcgttggcggcctgcctgcgggtttcacccgcaggacgcttgattcatgacatggtgcgaagagcctattgagctaggtagtagtcctccggcccctgaatgcggctaatcctaaccacggagccatgcgttacaatccagtaacgttgtggtcgtaacgagtaattctgtggcggaaccgactactttgggtgtccgtgtttcctgttttactcattttggctgcttatggtgacaatctagggttgtcatcatatagcgattggattggccatccggatttgtctttgtgtgatttatctcttgctcacaagcaattttcataggtcatagcatcatc

SEQ ID NO: 803 - DNA, 665 bp, Pelodiscus sinensis picornavirus 1
  strain CNSR2011, complete1
ttcaaatggcccctgggttgatacccagtggtcatttggacactttggtaaggaggtgtaattatccttcccatgtggaacctagtgcttaggtttactttatatgttctttgtttgtcctttgtactttctatcgggcaatcttgttgttcaatacaatatgtatttgaactgcctaagataaattcagttttcaaccaacccctctcttggggttgtgtctttctttctttcttatatcctcttaagctgacttacttgctaatccgactcctcgtcaacgggagggtaaagcagtatcactagggtattgtgatgtaggagaaaaagtaagtagagatagtgcatgtaacgaaagtgacttggtactttaaactctcttaatcccaaagtgtggtattggtcatgttggagtaggctacgggtgaaactccttcacatttagtaatgtgttcacacgctaacgctacggtagatgacagactaggtcttattctcaacgtagggggacgggtgtatgttcatgattagccacatattaaggttttgaggggctgagtcatataagtatgtgcattaatttctggtactggtccctggggactggcccttttctaggttgattttagtttccccaatttttaaaaactaatgagatttacgac

SEQ ID NO: 804 - DNA, 666 bp, Niviventer confucianus hunnivirus
  strain Wencheng-Nc42-11
cggcggctgagatgatgttcattctaatggagtgaaacatgtctttgattttctagtgcgtgttaggctttctagcacgcagcggcactgtcttgccgtaactctccagaccgtcacgccgtgcttgcggatctcacgtgccggatgacaaggctgtagctggaactgagtgtctagtgcacattgtgtaacagtgaaaactttgtgatcaccgaaaggtgggctagtagcctgcggaacaacaactggtaacagttgcctcaggggccaaaagccacggtgttaacagcaccctactagtttgatggaagcaattcctgatgttgcagagctagtaattgccaagctttgtacattagtatctcggcataccgtgcagtctgtgccagtgaaggatgccctgaaggtacccgtaggtaaccttaagagactatggatctgatcaggggctctctccgtactgctttacaggcggctgagagttaaaaaacgtctagctggccccagcccaagggattgggctttccctttaaagcccacaactcgcatatggtgacaataattgctgttcagacgaacagtgttattgttgtctattctcagagctttttccagacgcactcacacaacggaacttcttggcaagcaaatccaacaacagtcaat

SEQ ID NO: 805 - DNA, 666 bp, Seneca valley virus
  isolate SVV-001 polyprotein gene, complete cds.1
tttgaaatggggggctgggccctgatgcccagtccttcctttccccttccggggggttaaccggctgtgtttgctagaggcacagaggggcaacatccaacctgcttttgcggggaacggtgcggctccgattcctgcgtcgccaaaggtgttagcgcacccaaacggcgcacctaccaatgttattggtgtggtctgcgagttctagcctactcgtttctcccccgaccattcactcacccacgaaaagtgtgttgtaaccataagatttaacccccgcacgggatgtgcgataaccgtaagactggctcaagcgcggaaagcgctgtaaccacatgctgttagtccctttatggctgcaagatggctacccacctcggatcactgaactggagctcgaccctccttagtaagggaaccgagaggccttcgtgcaacaagctccgacacagagtccacgtgactgctaccaccatgagtacatggttctcccctctcgacccaggacttctttttgaatatccacggctcgatccagagggtggggcatgacccctagcatagcgagctacagcgggaactgtagctaggccttagcgtgccttggatactgcctgatagggcgacggcctagtcgtgtcggttctataggtagcacatacaaat

SEQ ID NO: 806 - DNA, 666 bp, Simian enterovirus SV4
  strain 1715 UWB, complete genome.1
ttaaaatagctgctgggttgttcccatccagcaggcccactgggcgtgatactctggtattgcggtacctttgtatgcctattttacctcccttccccctgaaacttagaagaaagaaacaaacacgctcactaggtacactgcatccagcagtgtaatgagcaagcacttctgtttccccggaagggatatatggtacgctgtgcaaacggcggaaattaatcctaccgttaaccgcccatctactccgagaagcctagtacctaattgaacttatcaatggagttgcgctcagcaggtgaccctgacctgccagctccggctgatggacctgggcatcccccacaggcgactgtggcccaggtcgcgtggcggccggcccactcttttgagtgggacgccttgataatgacaaggtgggaagagcctattgggctagctggtttcctccggcctcctgaatgcggctaaccctaaccccggagcatatggtggcaacccagccactggtatgtcgtaacgcgtaagtctgggatgggaccgactactttggagagtccgtgtttccattattttctttattgaatcttatggtgacaaattgggagttactcgggtgacgattgattattacttctgaaaacgtagagatatagaatcaacaca

SEQ ID NO: 807 - DNA, 667 bp, Picornaviridae sp.
  rodent/RL/PicoV/FJ2015 polyprotein gene,1
gggtttctctgccctgtgctttggacgcccgccatggcgttaaactggcaatccccccttttccctacccgtaactaagtttttcctcggtcctttaggctgctaagacgcttgttgctacagcatattggaaccaccgagtcctccataagtaatcatttccacctctttgggtgtctatgcccttagagacggtttggagccccgttgactatgtcagagtgtgtcggtagcaggctttctgctctggacccatgccggccacacctcccagtagtgttgtgaaggaagtaagggattagtgaaaagattaggaatgttgccttggaatgtagcgattactgtaggtgagcggacttccccgggtggtaacacccgcctctcaggccaaaagccacggtgttaacagcacccctacagtaggccactaccccgtggtctccaagaatacagacctcttcttagtaactatccccctagctttcctgaagcatgctgctgtaaaggctaaggatgccctgaaggtacccgcaggtaacgttaagacactgtggatctgatcaggggcttgagtactgaagctttacagaagtagctcaagttaaaaaacgtctatgcctttcccccacgggagtgggggttcccccacacaatttcaacaggcact

SEQ ID NO: 808 - DNA, 667 bp, Canine picornavirus
  strain 6D, complete genome.1
ttatttttcaaaatgccactggcattacaccatattcgtatggtgtaatgtcagtggttggatgctcagtcctgagggactgtgcatccagtggttaagagccacattctttatttatcaactattgatctttgtaactaagtttaagccagagttctattatggttccacatccagtgggattcagaacaagtacttctgttaccccggtcattattagctgttaagacgtacccacgtctgaaggctgagaagatcgttacccggctgttgtctacgggaaggttagtaacttttagtgaaaggtgatttcattgatccgagaggtgaccccgacctctcagaaactagtgatgagtgtccacatccctcttatggtaacataaggtggtcgctgcgctggcactagggcccaaaaggcatgaatgaaccaagatctgattgtgaagacccaactgtgcacttcagtattcctccggcccctgaatgcggctaatcctaacccatctgcatgtgcctacaacccagtaggtagcatgtcgtaatgcgtaagagatggatggaaccgactactttgggtgaccgtgtttcttttatttttatcaagtctcttatggtcacaagcatagaaaacaagatgcctgtgatcacacgtgagacatccaat

SEQ ID NO: 809 - DNA, 667 bp, Human parechovirus 17
  isolate 157Chzj058, complete genome.1
cttgtttccactcattttattgcaagttgccttcaactagtggagaccaggcatgaggttaatgctataatcttagatgtttgttacagttgaggtttttattaacctcatgcctggtctccactagttgaaggcaacttgcaataaaatgagtggaaacaagacgcttaaagcatggtgtaaattagcttttctaacccacactttgtgtggggtggcagatggcgtgccataactctattagtgagataccacgcttgtggaacttatgctcacgcagccatcctctagtaagtctgtgagatgtctggtgacgtgtgggaacttattggaaacaacattttgctgtaaagcatcctattgccagcggaacaacacctggtaacaggtgcctctggggccaaaagccaaggtttaacagaccctttaggattggttcataacctgaaatgttgtggaagatacttagtacctaccgatctggtagtattgcagacactagttgtaaggcccacgaaggatgcccagaaggtacccgtaggtaacaagagacactatcgatctgatctggggccaggtacctctatcttggtggcctgttaaaaaaacgtttggggggccagcccggggggggtccccgggtttcttttatcttacaactgctata

SEQ ID NO: 810 - DNA, 668 bp, Picornaviridae sp.
  isolate cra070pic1 genomic sequence.1
ctgtctcttatacagatgtcagtcagccaacaggctggctgggatgtgcccattttggacgcatgcccccgcgagagtggggcaccttgggggcgggtgagccccccatgttcgccaggtgttactgtcggcccttttatagaggcttttgtgggtatcagaagccgtttttgggtttggtgatggcgaccagcattgtcttgctggttgtgactgtctttttctcctgtttcttttcttattatctccaggctgtctccatgccaatgctgctaccgctgcgcccggcggggttaacccctggattagccaggggctgtggccgctagaagtggagatgcggtgactaatgtagtgtcatgggtaattgatgaggtcatggctgtggtgtggattggtgatcttccattgggggtaggctacgggtgaaacccccacgattgcaccatactatgtatggtgtccggtggtacgtgaaccccctggataggtttgagttttacgacaagaaagcctcaacagggagcgcaggcacggtacgcgtggatgcgccctccactaagcagtcatgcatcatttgttgtctgtcacactactaagccgtaccctatgagtttagggctactcaggggcatttaggtttttaaagcgcatgttgtaaatcactt

SEQ ID NO: 811 - DNA, 671 bp, Human parechovirus 1
  isolate 2007-863, complete genome.1
cgtcgggccttataccccgatttgctgagcttctctaggagagtccctttccccagccagaggtggctggtcaaataataccaattgtaacaaaacatctaagatacaacaaccacacacctggtctccaccagtcgaaggcaactagcaataagataggtgggttgagacgcttaaagtgtgtagtacatttacttttccaacctgtgctttgcacagggtggcagatggcgtgccataactctaatagtgagataccacgcttgtggaccttatgctcacacagccatcctctagtaagtttgcaagacgtctgatgacgtgtgggaacttgttggaaataatagtttgctgtaaagcatcccattgccagcggaatcacatctggtaacaggtgcctctggggccaaaagccaaggtttaacagaccctttgggattggttcaaacctgaactattatggaaaatatttagtacctgccgatttggtagtagtgcaaacactagttgtaaggcccacgaaggatgcccagaaggtacccgtaggtaacaagtgacactatggatctgatctggggccaactacctctatcttggtgagttggttaaaaaacgtctagtgggccaaacccgggggggaccccggtttccttttatttaataatgccact

SEQ ID NO: 812 - DNA, 672 bp, Ista virus
  isolate OTU18 RNA-dependent RNA polymerase gene,1
gggagagcttattgctctcccgccgtcttgcctatctataggtccaatctgtgtgatattccctaattaattaggtttgtcagttttcagatggatataatagtcattaatttatatttaatcatattagttcaaagggctataacttacccctgaatagtaacaaaatataaaatactcggtaccgaccggggtccgatctaatactaattattatatgatttgaccttatgataagttcaagaagtttctcttgattccagataaacccccctggaatttccccttatctttttcatataataactagtaatttcggatgcataaatactagttgtaagtcaaggtataattattaaaccgaacatttaattacttattagcactaatgaatgcccccatataaatagttatgggtatgagttcgcgattttcaacaacgatgcatgatttagagtaatgttaataagtgattttattagtaaagttttctaatgtatatgtcggcagttgcctacaacacgttaacctctgtgttaaaacctcgatgatatgtttatccatagacttcgggcatatacttctaaagtatgcgtgttcttctgaaaactcggtatgattgtcgcatgagtaagatagcgttccaatcaattccttttaatttctttcacg

SEQ ID NO: 813 - DNA, 672 bp, Senecavirus A
  isolate Sichuan HS-01, complete genome.1
ccctttttgaatggggggctgggccctcatgtccagcccttcctttccccttccggggggtaaaccggctgtgtttgctagaggcacagaggagcaacatccaacctgcttttgtggggaacggtgcggctccaattcctgcgtcgccaaaggtgttagcgcacccaaacggcgcatctaccaatgctattggtgtggtctgcgagttctagcctactcgtttctcccctgctcactcatttacacacaaaaactgtgttgtaactacaagatttggccctcgcacgggatgtgcgataaccgcaagactgactcaagcgcggaaggcgctgtaaccacatgctgttagtccctttatggctgcgagatggctatccacctcggatcactgaactggagttcgaccctccttagtaagggaaccgagaggccttcccgcaacaagctccgacacagagtccacgtgattgctaccaccatgagtacatggttctcccctctcgacccaggacttctttttgaatatccacggctcgatccagagggtggggcatgatccccctagcatagcgagctacagcgggaactgtagctaggccttagcgtgccttggatactgcctgatagggcgacggcctagtcgtgtcggttctataggtagcacatacaaat

SEQ ID NO: 814 - DNA, 672 bp, Human enterovirus C117
  strain LIT22, complete genome.1
tttaaaacagcttgagggttgttcccaccctcaaggcctactgggcgctagtacaccggtatctcggtacccttgtacgcctgttttatcttccctccccaaaagtaactttagaagcaagtaaactcacagctcaatagccgtcgcaccgccagtgcgactatgagcaagcactcctgtttccccggttgcgtcctatatgctgtggaaacggcagaaggggacaatatcgttacccgcttatctactacgggaagcctagtaacaccattgaacactttgagggttgcgttcagcgccaaacccggcgtagctcaggccgatggggcttcggaatccccacgggtgaccgtgtcgaagcccgcgttggcggcctgcccacaccaatgggtgtgggacgctcaatttgtgacatggtgcgaagagcctactgtgctaggtgagagtcctccggcccctgaatgtggctaatcccaaccaccgaacccgtggttgcaatccagcaactagcgggccgtaatgcgcaagtcggtgacggaaccaactactttgggtgaccgtgtttcctttatctcttatattgcaattttatggtgacatttatagtatttaagtgttaccatatattgcgcaaacatattgtaataatacagagttactactgcagaaatc

SEQ ID NO: 815 - DNA, 673 bp, Falcovirus A1
  strain kestrel/VOVE0622/2013/HUN, complete genome.1
taaaaggggacgcggtgtggcagctttggctgtcatgccgtgttctccttttaccccaaggactagccttgggggttttccaaattcctttccctgtaggctttacttctctttatctatcttttctgtaactaagttttgcctattctaaaaatattttagaatgtgtttggatgtaactaagtttgtgcctgccctaaaaatattttagggcttgtttggataacctcgtcccttgtgttcagtgccgcacaatttgctaggcactgttcacttcctttgtttgtccattatgtatgctaaggtatgaattccatcatatgcttagcctctacatgcataatcttattccctccctggtgcaaactacgcccccaacatatgtgaatcttttaagcatattcctgaccccacacatatatatgtgttctcgtgaattcccccaccgtgaggtggtcacttggacgtggtgtgtgtcacacagcatatatatgatgcaggatgttgtttttaagataagcatatgtccttagtgctttgcatcatttcctccacaccccgtgaatgcggctaatcttaaccctgttgggtccgtgggtaaaccaacccattaaccacaggacggaaccgactactttcgggagtgtgtgtttctttttcttcttttgtcact

SEQ ID NO: 816 - DNA, 673 bp, Enterovirus J
  strain Sev-nj1, complete genome.1
agggcccacgtggcgtagtactctggtatcacggtacctttgtacgcctattttacccccccttccccattgtaacttagaagataatcaaacagttcaatagtcgggctgccacccaggtagcttactgaacaagcacttctgttaccccggtcttagtacctgagaagctgtacccacggcggaaggggaaagtgatcgttacccggctatctacttcgagaagcctagtaacaccattgaacttgctgagtgttgcgctccacacagtaaccccctgtgtagctttggctgatgagtctgggcattccccactggcgacagtggcccaggctgcgttggcggccaaccgatccaggcaactgggtcggacgctgagtaacggacatggtgtgaagagcctattgagctagatagtagtcctccggcccctgaatgcggctaatcctaaccccggagcaggtacgcacaatccagtgtggagcctgtcgtaatgcgtaagtccgggacggaaccgactactttgggtgtccgtgtttcctgttttatttaccttggctgcttatggtgacaaactagtgttgtcatcatatagcgtttggattggccatccggttttgtacacgagtgtttcactacccgagactctatcacctctaccttattgagaaaa

SEQ ID NO: 817 - DNA, 675 bp, Human enterovirus
  isolate EV/Human/CMRHP35A/CMR/2014 polyprotein1
gtattggtactggtttatactcccttcccctgtaacttagaagatataaaccaagttcaatagaagggggtacaaaccagtaccaccacgaacaagcacttctgtttccccggtaaagttgcatagactgtacccacggttgaaggcgactgatccgttatccgctcttgtacttcgagaagcctagtaacatcttggaatcttcgatgcgttgcgctcatcactcaaccccagagtgtagcttaggtcgatgagtctggacattccccaccggtgacggtggtccaggctgcgttggcggcctacctgtggtccaaagccacaggacgctagttgtgaacaaggtgtgaagagcctattgagctacaagagagtcctccggcccctgaatgcggctaatctcaaccacggagcaagtgctcacaaaccagtgagtggcttgtcgtaacgggtaactctgtggcggaaccgactactttgggtgtccgtgtttccttttatttttataatggctgcttatggtgacaatcacagattgttatcataaagcgaattggattggccatccggtgaaagtgagatatattatttatctttttgttggatttactccgattacttctttcacttacaaaatcatcaccacagttttgctaattagaaatacataccata

SEQ ID NO: 818 - DNA, 679 bp, Enterovirus C
  isolate 5-05 polyprotein gene, complete cds.1
ggtacctttgtgcgcctgttttatactcccttccccgagtaactttagaagcaattcaacaagttcaatagagggggtgcaatccagcgccaccacaacaagcacttctgtctccccggtgactttacataagctgtacccacggctgaaagtgaatgatccgttatccgcttgtgtacttcgagaagcctagtaccaccttggaatctccgacgcgttgcgctcagcactctaccccgagtgtagcttaggttgatgagtctgggcattccccaccggcgacggtggcccaggctgcgttggcggcctacccatagctaacgctatgggacgctagttgtgaacaaggtgtgaagagccgattgagctactcaagagtcctccggcccctgaatgcggctaatcccaaccacggagcaagtgccttcaaaccagagggtggcttgtcgtaatgcgcaagttcgtggcggaaccgactactttgggtgtccgtgtttccttttattccattactggctgcttatggtgacaatcatagattgttatcataaagcgacttggattggccatccggtgaaatataaacacattgtctacttgtttgtcgggtttaccccactcactcagtccaccctcagcataataaacattgtgtcactgataagatattactactaca

SEQ ID NO: 819 - DNA, 682 bp, Human echovirus 1
  polyprotein precursor, gene, partial cds.1
ggtacctttgtgcgcctgttttatatacccttccccctctacagtaacttagaagtttgaatcatacggtcaatagacaacccagtgcaccagctgggccctgaccaagcacttctgttgccccggaccgagtatcaataagctgctcacgcggctgaaggagaaaacgttcgttacccggccatttacttcgagaaacctagtaacaccatgaaggtagcgcagcgtttcgctccgcacaaccccagtgtagatcaggtcgatgagccaccgcactccccacgggtgaccgtggcggtggctgcgttggcggcctgcccatggggcaacccatgggacgcttcaatactgacatggtgcgaagagtctattgagctaaatggtagtcctccggcccctgaatgcggctaatcccaactgcggagcagatacccacacaccagtgggcagtctgtcgtaacgggcaactctgcagcggaaccgactactttgggtgtccgtgtttccttttattctcacattgactgcttatggtgacaattgaaagattgttaccatatagctattggattggccatccagtgacaaacagagcaattgtgtatctttttgttggtttcataccactgaactgcaaagttttgaaaacccttgacctcattttgctactcaacacaacaaa

SEQ ID NO: 820 - DNA, 683 bp, Caprine kobuvirus
  isolate 12Q108, complete genome.1
tttgaaaagggggtggggggggcctcggccccctcaccctcttttccggtggccacgcccgggccaccgatacttcccttcactccttcgggactgttggggaggaacacaacagggctcccctgttttcccattccttcccccttttcccaaccccaaccgccgtatctggtggcggcaagacacacgggtctttccctctaaagcacaattgtgtgtgtgtcccaggtcctcctgcgtacggtgcgggagtgctcccacccaactgttgtaagcctgtccaacgcgtcgtcctggcaagactatgacgtcgcatgttccgctgcggatgccgaccgggtaaccggttccccagtgtgtgtagtgcgatcttccaggtcctcctggttggcgttgtccagaaactgcttcaggtaagtggggtgtgcccaatccctacaaaggttgattctttcaccaccttaggaatgctccggaggtaccccagcaacagctgggatctgaccggaggctaattgtctacgggtggtgtttcctttttcttttcacacaactctactgctgacaactcactgactatccacttgctctcttgtgcctttctgctctggttcaagttccttgattgtttttgactgcttttcactgcttttcttctcacaatccttgctcagttcaaagtc

SEQ ID NO: 821 - DNA, 683 bp, Foot-and-mouth disease virus
  - type SAT 2, isolate ZIM_22/20031
cccccccataaagaacgttaccgtcttttccgacgttaaagggatgcaaccaaacgcctcttaccgtcctttccgacgttaaaggattgcaaccatacgacttgccttcttttccgaagtaaaaggatacaagcatacagttttgcccgttttcatgagaaatgggacgtccgcgcacgaaacgcgccgttgctctttgcattcttgtacaaacacgatcttgacgcaggaatcctagaccaacccaacccgtgcaactgcgagtttcgcccggtctttccgggtcttgagagacaaacagatgtactgagaccaactccacgattggtctactagcgggtactagtaacactcattttgcttcgtagcggagcacatgagcggtggggactcccccatggtaacatggacccaccgggccaaaagccacgcctcacggcctcatgtgtgtgcaaccccagcacggcaacttgtttgtgaaccacaccttaaggtaacactgagactggtacttggtttctggagacaggctaaggatgcccttcaggtaccccgaggtaacacgagacactcgggatctgagaaggggaccgggagttctatcaaactgcccgatttaaaaagcttctatgcctgaataggtgaccggaggccggcaccttttctttattttaaaccacttt

SEQ ID NO: 822 - DNA, 685 bp, Didelphis aurita hepatitis A virus
  complete genome.1
cttttggagttctttggtctggggaactaaaataccagacccgcgtttgcctagcgatataggctttaattgttgtttgtcattgtgcgtttgatatgtgttttaatgtaaataataattctagcaggttctagttcttgatcatgtcctctttaaggcactcatttcaacttgctatctttcttttcttccttggttctccctacaccaaatgcactggccgctgcgcccggcggggtcaaccacatgattagcatgtggctgtaggtgttgaaggctgggacatgaacatcaatggaatagtgcgcatgcttactggggtccattgaagtagtgggatctttctattggggtaggctacgggtgaaaccccttaggttaatactcatattgagagataccttggataggttaactgtgctggatatggttgagtttaacgacaaaaagccatcaacagctgtggacagaacctcatccttagattgctcactatggatatgtgctctgggcgtgtttcttgcatgatggccattggtcaattcatgcctgggccaatgtaggattagccttaaattactttttaaaagtagcctcatttagctggactaatggtggggcgtatgatcctgcatttggcctctggggtaatcaggggcatttaggtttccacataatagcaaat

SEQ ID NO: 823 - DNA, 686 bp, Human enterovirus
  113, isolate BBD-83 polyprotein gene, complete1
caccccagaggcccacgtggcggccagtactctggtatcacggtacctttgtacgcctgttttatatcccttccccatgtaactttagaagcaattcacatagttcaatagagggggtacaaaccagtgccaccacgaacaagcacttctgtttccccggtgaagctgtatagactgtccccacggtcaaaaacggcagatccgttatccgctcatgtacttcgagaagcctagtagcatcttggaatcttcgatgcgttgcgttcagcactctaccccgagtgtagcttaggtcgatgagtctgggcataccccaccggcgacggtggcccaggctgcgttggcggcctacccatggctaacgccatgggacgctagttgtgaacaaggtgtgaagagcctattgagctacatgagagtcctccggcccctgaatgcggctaatcctaaccacggagcaagtactcacaacccagtgagcagcttgtcgtaacgcgtaagtctgtggcggaaccgactactttgggtgtccgtgtttccttttatttttgatatggctgcttatggtgacaatcaaagattgttatcatatagcttttggattggccatccggtgatttttgagactataacgtttacttgccttaccacacaacttagtactttgctacattcacacagtcata

SEQ ID NO: 824 - DNA, 687 bp, Echovirus
  E14, isolate ETH_P19/E14_2016 polyprotein gene, complete1
tggtatcacggtacctttgtgcgcctgttttatctacccctccccaatgtaatttagaagcatatgaaaagcggtcaatagccggctcagtatgccaactgagtcttgaccaagcacttctgttaccccggactgagtatcaataagctgctcgcgcggctgaaggagaaaacgttcgttacccggccaattacttcgagaaacccagtaccaccatggaggttgcgcggcgtttcgctccacacaaccccagtgtagatcaggtcgatgagtcaccgcgttccccacgggcgaccgtggcggtggctgcgttggcggcctgcccatgggttagcccatgggacgcttcaatactgacatggtgcgaagagtctattgagctaattggtagccctccggcccctgaatgcggctaatcctaactgcggagcagacgcctacatgccagtgggtagtctgtcgtaacgggcaactctgcagcggaaccgactactttgggtgtccgtgtttccttttatctttgtattggctgcttatggtgacaattgaaagattgttaccatatagctattggattggccatccagtgacaaacagagcgattgtttactcatttataggttttgtaccacttgactacaaggccctaatcactctcaattatatattgatactaaatacgacaaa

SEQ ID NO: 825 - DNA, 687 bp, Enterovirus B
  complete genome.1
tggtatcacggtacctttgtgcgcctgttttatttaccctctccccagtgtaacttagaagcacgcttcatgcggtcaataggcggctcagtataccaactgagtctcgaccaagcacttctgttaccccggaccgagtatcaataagctactcacgtggctgaaggagaaaacgtccgttacccggccaactacttcgagaaacctagtaccaccatgaatgttgcgcggcgtttcgctccgcacaaccccagtgtagatcaggtcgatgagtcaccgcatccctcacgggcaaccgtggcggtggctgcgctggcggcctgcctatggggcaacccataggacgcttcaatacggacatggtgagaagagtctattgagctagttggtagtcctccggcccctgaatgcggctaatcctaactgcagagcagattcccacacgccagtgggtagtctgtcgtaacgggcaactctgcagcggaaccgactactttgggtgtccgtgtttccttttattcttgtactggctgcttatggtgacaattgaaagattgttaccatatagctattggattagccacccagtgtctaatagagcaattatttatctttttgttggatttatcccacttgactataaagcacttgtaacgctcaagtatattatagatctcaacacaacaa

SEQ ID NO: 826 - DNA, 689 bp, Human enterovirus sp.
  C116 polyprotein gene, complete cds.1
ttcccactccagaggcccacgtggcggctagtactctggtattgcggtacctttgtacgcctgttttataccccctccccaagtaactttagaagcaattcacaaagttcaatagagggggtacaaaccagtaccaccacgaacaagcacttctgtttccccggtgaagctacatagactgtccccacggtcgaaggtggcagatccgttatccgctcaagtacttcgagaagcctagtaccaccttggaatcttcgatgcgttgcgctcagcactctaccccgagtgtagcttaggtcgatgagtctgggcatgccccaccggtgacggtggcccaggctgcgttggcggcctacccgtggctaacgccatgggacgctagttgtgaacaaggtgtgaagagcctattgagctacttgagagtcctccggcccctgaatgcggctaatcctaaccacggagcaagtgctcacaaaccagtgagtggcttgtcgtaacgcgtaagtctgtggcggaaccgactactttgggtgtccgtgtttccttttattttcattatggctgcttatggtgacaatctaagattgttatcatatagcttttggattggccatccggtgatttgaaagagatatatttaccttattgttctaccatatctaattactcatcacagccacataatcaca

SEQ ID NO: 827 - DNA, 689 bp, Human enterovirus
  isolate EV/Human/CMRHP45/CMR/2014 polyprotein1
gacagttgggtagcattgtgcgcctgttttatacaccctttcccacaatgcaacttagaattataactaaaccggccaatagaaagctcggcaaaccagccgagttctggtcaagcacttctgttgccccggactgagtatcaataagctgctcgcgcggctgaaggagaaaacgttcgttacccgaccaactacttcgagaaacccagtatcaccatgaaagctgcgtagcgtttcgttccgcacaaccccagtgtagatcaggccgatgagtcaccgcaatccccacgggcgaccgtggcggtggctgcgctggcggcctgcccatggggcgacccatgggacgcttcaataccgacatggtgtgaagagtctattgagctagttggtagtcctccggcccctgaatgcggctaatcccaactgcggagcagacgcttgcataccagcaagtagtctgtcgtaacgggcaactctgcagcggaaccgactactttgggtgtccgtgtttccttttattttttatactggctgcttatggtgacaattgaaagattgttgccatatagctattggattggccatccggtgacgaacagagctatcatatactcttttgttgggtttgtcccattgaactacaaggcattgaataccctcaatttcattctagcactaaatacaataaa

SEQ ID NO: 828 - DNA, 691 bp, Human cosavirus
  isolate Cosavirus-zj-1, complete genome.1
tggaatactgcaaagatgtcaccgtgctatacacggtctttgaaccacacaccggctacttggcacttgcagcgcagtaagtttattttccacttatccttgatttttagccgtacagtttctctctgcatgggcggcgtgatactcccgttccttcttggacagattgcctccgcgttctctgtggatctcaaggtggtcaagtcactggtgagtagagcgaaggttaaggagatctgaggcattcccacgtggcgttgccgggagttgtagcaatgctgcgtgtgtgtacggatctcgcctcatggcgtcatgagcctcacacgccaaaagctctgtccgagaggacctacacagtcgagcaaccctagctccttcctacaaagccttgtgtgaatgagctcacgtttactcaactttattctctactcacatcaggcgccaaagatgtcttgaaggtacctcgtgtatctgggcacgagcaccatcgactacccggacttgcacttcggtgcagacacatgtggtgtcccagcccccttgctccggcaagggggctctgctcgctcagcacgagatctgatcaggagtctcccccggtgtaaagcaccttgacagggatttaaaaattgaccaaggccttgcacacaacctaggggactaggttttcctttttatttacaaggttttc

SEQ ID NO: 829 - DNA, 693 bp, Coxsackievirus
  A12, isolate 283 polyprotein gene, complete cds.1
gttgtacccactcacagggcccactgggcgttagcactctggtaccccggtacctttgtgcgcctgttttatatccccccaagtaatgcacctcgatcaatagcgggcgtggcgcaccagccacgtcatgatcaagcacttctgtttccccggaccgagtatcaatagactgctaacgcggttgagggagaaaacgtccgttacccggccaactgcttcgagaaatccagtaacatcatgaaaattgcagagtgtttcgctcagcacttccccagtgtagatcaggtcgatgagtcaccgcgttccccacgggcgaccgtggcggtggctgcgttggcggcctgcctgtggggcaacccgcaggacgctctaatatggacatggtgtgaagaatctattgagccagttggtagtcctccggcccctgaatgcggctaatcctaactgcggagcacgcgccttcaatccagtgggtagcgtgtcgtaatgggtaactctgcagcggaaccgactactttgggtgtccgtgtttccatttattcttacattggctgcttatggtgacccatatagctattggattggccatccggtatcgaatagagcgattatctatcagtttgttggatttattccgttgagtgtgcagcagtatcgcactttgcttttaatagtgagactgaatagtgcaaa

SEQ ID NO: 830 - DNA, 693 bp, Coxsackievirus
  A2 clone V18A polyprotein gene, partial cds.1
ctgattctgcggaatctttgtgcgcctgttttatactccctcccccaacacagtaacttagaagtcataaactcacatgaccaatagtgggcatgacgcaccagtcatgtctcggtcaagcacttctgtctccccggactgagtatcaataagctacttgcgtggctgaaggagaaaacgttcgttatccggctaactacttcgagaagcttagtagcaccatgaaagttgcggagtgtttcgctcagcacttcccccgtgtagatcaggtcgatgagtcactgcgttcctcacgggagaccgtggcagtggctgcgttggcggcctgcctatggggcaacccataggacgctctaatatggacatggtgtgaagagcctattgagctagttagtggtcctccggcccctgaatgcggctaatcctaactgcggagcacataccctcaacccagggggcagtgtgtcgtaacgggcaactctgcagcggaaccgactactttgggagtccgtgtttccttttattcttatattggctgcttatggtgacaattgagagattgttaccatatagctactggattggccacccggtgtctaatagagccctggtttaccaatttattggatttgtgcctttatcacccacagtttattcaaccttagtatttttgatatatcttaacaataggcg

SEQ ID NO: 831 - DNA, 693 bp, Coxsackievirus
  A20, isolate ETH_P16/A20_2016 polyprotein gene,1
tacgttatcgcggtacccttgtacgcctgttttatactcccttcacccgtaacttagaagcaagcaaaccaagttcaatagaagggggtacaaaccagtaccaccacgaacaagcacttctgtttccccggtgaggttgcatagactgtacccacggtcaaaagcgattgatccgttatccgctctagtacttcgagaagcctagtatcaccttgggatcttcgatgcgttgcgctctgcactcgaccccggagtgtagcttaggtcgatgagtctggacacccctcaccggtgacggtggtccaggctgcgttggcggcctacctgtggcccaaagccacaggacgctagttgtgaacaaggtgtgaagagcctattgagctaccagagagtcctccggcccctgaatgcggctaatcccaaccacggagcaagtgctctcaaaccagagagtggcttgtcgtaacgcgcaagtctgtggcggaaccgactactttgggtgaccgtgtttccttttatttttatcatggctgcttatggtgacaatctcagattgttatcataaagcaaattggattagccatccggtgaaagtcaaatcgattatttacttatttattggtttttctccactaacaccacaaacacttaaaattattgaaatagtgctgctaattagataccactatcata

SEQ ID NO: 832 - DNA, 694 bp, Human rhinovirus A
  strain HRV-A82_p1126_sR1024_2009 polyprotein1
cgtcgaccggggagacagaagtgcttgaccttatacagctggtatgctgcttgctattggtctgtgtgcaaaacttctaagttaaaattgggtctgggttgctcccacccagatcacccacgtggtgttgtgctctgttattccggtaactttgcacgccaattttataaccccttcccccatgtaacttagaagttttgcacacagaccaatagcaagcagcataccagctgtataaggtcaagcacttctgtctccccggtcgacgttgatatgcttcaacaaggcaaaaacaacagagatcgttatccgcaagatgcctacacaaagcctagtacctcctttgacggtgtttgtctggtcgctcaggtgcttccccagcactagacctggcagatgaggctagaaactccccactggcgacagtgttctagcctgcgtggctgcctgcacacccttctgggtgtgaagccaaatactagacaaggtgtgaagagccccgtgtgctcatcttgagtcctccggcccctgaatgcggctaaccttaaacccgcagccattgctcacaatccagtgggtagatggtcgtaatgagcaattgtgggatgggaccgactactttgggtgtccgtgtttcatgttttactttatgatttgcttatggtgacaatatatagtgatatatattggcatc

SEQ ID NO: 833 - DNA, 694 bp, Coxsackievirus
  A13 clone V7B polyprotein gene, partial cds.1
tccggtattacggtacccttgtacgcctgttttatactcccctcccccgtaacttagaaaacttcaaaatcaaagttcaataggagggggtacaaaccagtaccaccacgaacaagcacttctgtttccccggtgatgttgtatagactgtctccacggttgaaaacgactgatccgttatccgctctagtacttcgagaagcccagtaccaccttggaatcttcgatgcgttgcgctcagcactcaatcccagagtgtagcttaggttgatgagtctggacatccctcaccggcgacggtggtccaggctgcgttggcggcctacctgtggcccaaagccacaggacgctagttgtgaacaaggtgcgaagagcctattgagctactagagattcctccggcccctgaatgcggctaatcccaaccacggagcaggtactcacaacccagtgagcagcctgtcgtaacgcgcaagtctgtggcggaaccgactactttgggtgtccgtgtttccttttatttttatatggctgcttatggtgacaatcattgattgttatcataaagcgaattggattggccatccggtgaaagttagacttatcatttacttgtttgttggattcactcctttgactaaattcacccctgacatcatcttagttgtgatactgattaggagacttcatcata

SEQ ID NO: 834 - DNA, 695 bp, Enterovirus sp.
  A71 gene for polyprotein, complete cds, isolate: 10857.1
tctgattctgcggaatccttgtgcgcctgttttatatcccctttcccaatttgaaacatagaagtgatgcgcaccattgatcaatagtaggcgtaacgcgccagttacgtctcgatcaagcacatctgtttccccggaccgagtatcaatagactgctcacgcggttgaaggagaaagcgttcgttacccggctaactacttcgagaaacccagtagcaccatggaagctgcagggtgtttcgctcagcacttcccccgtgtagatcaggtcgatgagccactgcaatccccacgggcgaccgtggcagtggctgcgttggcggcctgcctatggggagacccataggacgctctaatgtggacatggtgcgaagagtctattgagctagttagtagtcctccggcccctgaatgcggctaatcctaactgcggagcacatgccttcaacccagaaggtggtgtgtcgtaacgggcaactctgcagcggaaccgactactttgggtgtccgtgtttcctttcattcttatatcggctgcttatggtgacaattacggaattgttaccatatagctattggattggccatccggtgtgtaatagagctattatatatctgtttgttggctttgtgccattaactttaaagtctacaactactcttgattttatattgaccctcaacacagttaaac

SEQ ID NO: 835 - DNA, 696 bp, Encephalomyocarditis virus
  EMCV-30 polyprotein gene, complete cds.1
ttgccagtctgctcgatatcgcaggctgggtccgtgactacccactccccctttcaacgtgaaggctacgatagtgccagggcgggtactgccgtaagtgccaccccaaacaacaacaacaaaacaaactccccctccccccccttactatactggccgaagccacttggaataaggccggtgtgcgtttgtctacatgctattttctaccgcattaccgtcttatggtaatgtgagggtccagaacctgaccctgtcttcttgacgaacactcctaggggtctttcccctctcgacaaaggagtgtaaggtctgttgaatgtcgtgaaggaagcagttcctctggaagcttcttaaagacaaacaacgtctgtagcgaccctttgcaggcagcggaaccccccacctggtgacaggtgcctctgcggccaaaagccacgtgtataagatacacctgcaaaggcggcacaaccccagtgccacgttgtgagttggatagttgtggaaagagtcaaatggctctcctcaagcgtattcaacaaggggctgaaggatgcccagaaggtaccccattgtatgggatctgatctggggcctcggtgcacgtgctttacacgtgttgagtcgaggtgaaaaaacgtctaggccccccgaaccacggggacgtggttttcctttgaaaaccacgattacaat

SEQ ID NO: 836 - DNA, 697 bp, Echovirus
  E2, strain USA/2013-19511, complete genome.1
ctagcactccggtattgcggtacccttgtgcgcctgttttatcctccctccccctaacgtaatttagaagcaagactttaacggtcattaggtggctcagcacaccagccgagtcaagaccaagcacttctgttaccccggactgagtatcaataagctgctcacgtggctgaaagagaaaacgttcgttacccggccaattacttcgagaaacctagtaccaccatggaggttgcgcagcgtttcgctccgcactaccccagtgtagatcaggtcgatgagtcaccgcattccccacgggcgaccgtggcggtggctgcgttggcggcctgcccatggggaaacctatgggacgcttcaatactgacatggtgtgaagagtctattgagctaattggtaatcctccggcccctgaatgcggctaatcctaactgcggagcagacacccacaagccagtgagcagtctgtcgtaacgggcaactctgcagcggaaccgactactttgggtgtccgtgtttccttttattccattactggctgcttatggtgacaattgagagattgttaccatatagctattggattggccatccggtgagcaacagagcacttatatatctctttgttggattcataccactagacaccaggagttttacgtctttggtttatattttaaggttgaacacagcaaa

SEQ ID NO: 837 - DNA, 697 bp, Human rhinovirus A
  strain HRV-A38_p1266_s3799_1999 polyprotein1
aacagaagtgcttgaccattgacaatttggttaattgccgcctattggtcgttatgtactttcttctaagttacaaggggggggtgttaaaactggatctgggttgttcccactcaggtctcccacgtggagttgtactctattattccggtaatcttgtacgccagtttttacacccccccccttgtaacttagaagaaagtacataacgaccaataggcggcaattaaccaaattgtcaatggtcaagcacttctgtttccccggtcaagattgatacgctccaacagggcgaaaacaatcgagatcgttatccgcaaagtgcctacgcaaagcttagtaacattttggaaagtttatggttggtcgctcagctaaaccccatagtagacctggcagatgaggctagagactccccactggcgacagtgttctagcctgcgtggctgcctgcacaccctcacgggtgtgaagccatatactcgacaaggtgcgaagagccccgtgtgctcactttgagtcctccggcccctgaatgtggctaaccttaaccccgcagctagcgcatgcaaaccagtatgtagctagtcgtaatgagcaattgtgggatgggaccaactactttgggtgtccgtgtttcactttttaccttttatttgcttatggtgacaatatatatatagtatatattgacacc

SEQ ID NO: 838 - DNA, 697 bp, Human rhinovirus A
  strain HRV-A19_p1294_s6535_2000 polyprotein1
ggcaccttgcggataacgatcgctgttgtttttgccctgttggagcatatcaacattgaccggggaaacagaagtgcttgacctattaaaactggatctgggttgttcccacccagatcatccacgtgatgttgtgctctattattccggtaattttgcacgccagtttttcatccctttccctttgtaacttagaagattgaacaaatgaccaataggacgcaacaaaccagttgtaataggtcaagcacttctgtttccccggtcaatgttgatatgctccaacagggcaaaaacaacagcgatcgttatccgcaaggtgcctacgcaaagcctagtagcactcttgaaattgcttggttggtcgctcaggtgcaaacccagcactagacctggcagatgaggctagaaaatccccactggtgacagtgttctagcctgcgtggctgcctgcacacccatttgggtgtgaagccaaacaatggacagggtgtgaagagccccgtgtgctcatcttgattcctccggcccctgaatgcggctaaccttaaacctgcagccattactcacaatccagtgagttggtggtcgtaatgagtaattgcgggatgggaccgactactttgggtgtccgtgtttcactttttaccttattttatgcttatggtgacaatatattgtaatatatattgacacc

SEQ ID NO: 839 - DNA, 698 bp, Simian enterovirus SV43
  strain OM112t (P12), complete genome.1
ttaaaacagcctgtgggttgttcccacccacagggcccactgggcgctagtactctggtattacggtacctttgtacgcctgttttacaacccttcccccatgtaacttagaagcaacaaataaacgaccaatagcacactcaccaatccagatgagtgatggtcaagcacttctgttaccccgggcttagtaccaatagactgccatcgcggttgaaggggaaaacgctcgttatccggctctctactgcgagaagcctagtaacgccttagaaatgctcaagcgttgcgctcagcacaaccccagtgtagctcaggtcgatgagtcactgcattccccacgggcgaccgtggcagtggctgcgtttgcggcctgcctacagctctacgctgtaggacgcttgtgtatggacatggtgtgaagagcccattgcgctagggagtagtcctccggcccctgaatgcggctaatcctaaccccggagctggtgcttgtaaaccaacaagtggccagtcgtaatgggcaactctgggatggaaccgactactttgggtgtccgtgtttcctgttttatttaccttggctgcttatggtgacaatctagtgttgttgccatatagcgattggattggccatccggatattgttttagacacttgtgtttgtgagtagatctcttctgacataggatataaca

SEQ ID NO: 840 - DNA, 698 bp, Enterovirus sp.
  D68, isolate CF569939-FRA-2018, complete genome.1
ttaaaacagccttggggttgttcccactccaagggcccatgtggcggctagtactctggtacttcggtacctttgtacgcctgttttatctcccttcccaatgtaatttagaagctcttaaatcaaggctcaataggcggggcgcaacccagcgctctcatgagcaagcacttctgtctccccggtgtggttgtataaactgttcccacggttgaaaacaacctatccgttatccgctatagtacttcgagaaacctagtatcacctttggattgttgacgcgttgcgctcagcacactaacccgtgtgtagcttgggtcgatgagtctggacataccccactggcgacagtggtccaggctgcgttggcggcctactcatggtgaaaaccatgagacgctaaacatgaacaaggtgtgaagagtctattgagctactatagagtcctccggcccctgaatgcggctaatcctaaccatggagcaagcgctcacaagccagtgagttgcttgtcgtaatgcgcaagtccgtggcggaaccgactactttgggtgtccgtgtttcactttttacttttatgactgcttatggtgacaatttgatattgttaccatttagcttgtcaaattaattacaaaaggttctaaatcttacttaccaacctgcattttgataaccttgatttgaaaattttaata

SEQ ID NO: 841 - DNA, 699 bp, Enterovirus J
  strain 1631, complete genome.1
ttaaaatagcctcagggttgttcccaccctgagggcccacgtggcgtagtactctggtatcaaggtacctttgtacgcctattttatttcccttcccccacagtaacttagaagcttatctcatagttcaacagtagggtcactaaccaagtggctcagcgaacaagcacttctgtttccccggtcctagtacctgtgaagctgtacccacggcggaaggggaaaaagatcgttatccggccccctacttcggaaagcctagtaacaccattgaagcaatcgagtgttgcgctcagcacagtaacccctgtgtagctttggttgatgagtctgggcactccccactggcgacagcggcccaggctgcgttggcggccaaccgactcgggcaaccgggtcggacgctcgtttgtggacatggtgtgaagagcctactgagctagagggtagtcctccggcccctgaatgcggataatcctaaccccggagcacccacactcaatccagagtgcaggatgtcgtaacgcgtaagtctgggacggaaccgactactttgggtgtccgtgtttcctgttttacttactttggctgcttatggtgacaatctagtgttgttaccatatagctattggattggccatccggtgttttgaattgtgtgtttatactaattcttttacatatcacagacaaccaaat

SEQ ID NO: 842 - DNA, 699 bp, Enterovirus C
  strain 04-1450, complete genome.1
tagtactccggtatcgcggtacccttgtacgcctgttttatactcccttcccccgtaacttagaagcaatcaaaccaagttcaatagaagggggtacaaaccagtaccaccacgaacaagcacttctgtttccccggtgaggttgcatagactgtacccacggttgaaagcgactaatccgttatccgctcaagtacttcgggaagcctagtaccaccttcggatcttcgatgcgttgcgctcagcactcaaccccagagtgtagcttaggctgatgagtctggacattcctcactggcgacagtggtccaggctgcgttggcggcctacctgtggcccaaagccacaggacgctagttgtgaacaaggtgtgaagagcctactgagctacttgagattcctccggcccctgaatgcggctaatcccaaccacggagcaggtggtcataaaccaatggctggcctgtcgtaatgcgcaagtctgtggcggaaccgactactttgggtgtccgtgtttccttttatcttttcattggctgcttatggtgacaatcatagattgttatcataaagcaaattggattggccatccggtgaaaatcagagcgattatatatttgtttactggatttacatcactgacaccatactctccaatactcattaggttggttttattaataaggtattattaccata

SEQ ID NO: 843 - DNA, 700 bp, Simian enterovirus SV19
  strain M19s (P2), complete genome.1
ttaaaacagcctgtgggttgtacccacccgcagggcccactgggcgctagtacactgatatcacggtacctttgtacgcctgttttatctccctacccccatcgtaacttagaagcttaacaatacagatcaatagcctctgcaccaaaccaggtgtggaatgatcaagcatttctgttaccccggacctagtaccaataggctgtgtcaaacggctgaaggggaaaaagttcgttacccggccacctacttcgagaagcctagtagcatcactgaagctgtgaagcgttacgatcagcacaaccccagtgtagttcaggtcgatgagtcactgcattccccacaggcgactgtagcagtggctgcgttggcggcctgcccttggtctctgaccaagggacgctttggagtggatatggtgcgaagagcctattgagctaggtggtagtcctccggcccctgaatgcggctaatcctaaccccggagctggtgcacacaaaccagtgtgtggccagtcgtaatgagcaattctgggatggaaccgactactttgggtgtccgtgtttcctgtttcacttaccttggctgcttatggtgacaattgtatagttgtcatcatatagctattggattggccatccggatattattcttgtgtttatttgtgtaatttgatataatttagaaccctgtataaga

SEQ ID NO: 844 - DNA, 702 bp, Coxsackievirus
  A16, isolate CVA16/Shenzhen189/CHN/2017, complete1
gcgttagcacactgattctacggaatctttgtgcgcctgttttataaccccttccccaagcagcaacttagaagcttcgcgccaccacgaccagtagtgggcgtgacacaccagtcacgttttggtcaagcacttctgtttccccggactgagtatcaatagactgctcacgcggttgaaggagaaaacgttcgttatccggccaactacttcgagaaacctagtagcatcgtggaagttgcggagtgtttcgctcagcacttcccccgtgtagatcaggtcgatgagtcactgtaaaccccacgggcgaccgtgacagtggctgcgttggcggcctgcccatggggcaacccatgggacgctctaatacagacacggtgtgaagagtctattgagctagttggtagtcctccggcccctgaatgcggctaatcctaactgcggagcgcgcaccctcaacccagggggcagtgcgtcgtaacgggtaactctgcagcggaaccgactactttgggtgtccgtgtttccttttattctctattggctgcttatggtgacaattgaaaagttgttaccatatagctattggattagccatccggtgaccaacagagctattatttacctgtttgttgggtatatccctctcactctcaaggccattcaaactcttaactatatattactccttaactgtaagag

SEQ ID NO: 845 - DNA, 704 bp, Mengo virus
  strain 3761IMP, complete genome.1
tgtgctcttccgatctgggagatccagattgccagtctgctcgatatcgcaggctgggtctgtgactacccactccctctttcaacgtgaaggctacgatagtgccagggcgggtactgccgaaagtgccaccccaaagtacacaaccccccccgtacattactggccgaagccgcttggaataaggccggtgtgtgtctgtctacatgttatttctactacattgtcgtctatggcaatgtaagggcccggaacctggccctgtcttcttgacgaatattcctaggggtctttcccctctcgacaaaggaatataaggtctgttgaatgtcgtgaaggaagcagttcctctggaggcttcttgaagacaaacagtgtctgtagcgaccctttgcaggcagcggaaacccccacctggtaacaggtgcctctgcggccaaaagccacgtgtataagatacacctgcaaaggcggcacaaccccagtgccacactgtgcgttggatagttgcggaaagagccaaatggctctccttaagcgtattcaacaaggggctgaaggatgcccagaaggtaccccactagttgggatctgatctggggcctcggtgcacgtgctctacacgtgttgagtcgaggttaaaaaacgtctaggccccccgaaccacggggacgtggttttcctttgaaaaccacgatgacaat

SEQ ID NO: 846 - DNA, 704 bp, Human poliovirus 2
  strain CHA1219346, complete genome.1
tagtactccggtatcacggtacccttgtacgcctgttttaaactcccttccctcgtaacttagaagcaaacaaaccaagttcaatagaaaggggtacaaaccagtaccaccacgaacaagcacttctgttgccccggtgatgtcgtatagattgtacccacggtcgaaaacgattgatccgttatccgcttttgtacttcgagaagcctagtaccaccttggaatcttcgatgcgttgcgctcggcactcaatcccagagtgtagcttaggtcgatgagtctggacataccccaccggtgacggtggtccaggctgcgttggcggcctacctgtggcccaaagccacaggacgctagttgtgaacaaggtgtgaagagcatattgagctacaaaagagtcctccggcccctgaatgcggctaatcctaaccacggagcaagggtgcacaaaccagtgtataccttgtcgtaacgcgtaagtctgtggcggaaccgactactttgggtgtccgtgtttcctgttattttttatcatggctgcttatggtgacaatcagagattgttatcataaagcaaattggattggccatccggtgagtgttgtgtcaagtatacaactgtttgttggaaccactgtgttagcttcacttctcatttaaccaattaatcaaaaacaatacgaggataaaacaataatactaca

SEQ ID NO: 847 - DNA, 704 bp, Echovirus
  E7, strain Nigeria/AFP/2014, complete genome.1
atgggcgctagcacactggtatcccggtacctttgtgcgcctgttttatctacccctccccaaacgtaacttagaagcacatcacacatggtcaacaggtggcacagtacaccaactgggccgtgaccaagcacttctgttaccccggaccgagtatcaatagactgctcgcgcggttgaaggagaaaacgttcgttacccggccaattacttcgagaaacccagtaccaccgtgaaggttgcgcagcgtttcgctccgcacaaccccagtgtagatcaggtcgatgagccaccgcattccccacgggtgaccgtggcggtggctgcgttggcggcctgcccatggggcaacccatgggacgcttcaatactgacacggtgcgaagagtctattgagctaattggtattcctccggcccctgaatgcggctaatcctaactgcggagcagatacccacaagccagtgggcagtctgtcgtaacgggtaactctgcagcggaaccgactactttgggtgaccgtgtttccttttattcttatattggctgcttatggtgacaattgaaagattgttgccatatagctattggattggccacccagtgacaaacagagctattgtttacctatttgttggctttataccactgaatcttaaagttttagaaactctcaacctgatcttattactcaattcggtaaa

SEQ ID NO: 848 - DNA, 705 bp, Echovirus
  E9, strain 61253-70985 polyprotein gene, complete cds.1
cacggggcgcaagcacactggtattacggtacctttgtgcgcctgttttacccacccttccccaatgaaatttagaagcttgacttaaacggtcagtagacaacccagtatgccaactgggtcccgaccaagcacttctgtctccccggactgagtatcaataggctgcttgcgcggctgaaggagaaaacgttcgttacccgaccaactacttcgagaaacctagtaccaccatgaacgttgcgcagcgtttcgctccacacaaccccggtgtagatcaggtcgatgagtcaccgcaatccccacgggcgaccgtggcggtggctgcgctggcggcctgcccatggggcaacccatgggacgcttcaacactgacatggtgcgaagagtctattgagctagttggtagtcctccggcccctgaatgcggctaatcctaactgcggggcagatacccacataccagtgggcagtctgtcgtaacgggcaactctgcagcggaaccgactactttgggtgtccgtgtttccttttatccttatattggctgcttatggtgacaattgaaagattgttaccatatagctattggattggccatccagtgagcaacagagcgatcatactcctctttgttgggtttataccacttgactacagcagttacaacaccttgttgtacatcgtttatttgaatacgagaaa

SEQ ID NO: 849 - DNA, 707 bp, Enterovirus C
  strain 04-4491, complete genome.1
aggctagtacaccgggtaccgtgataccggtgtactagcctgttttatactcccttcccccgtaacttagaagtaaataacacaagttcaatagaagggggtacaaaccagtaccaccacgaacaagcacttctgttcccccggtgaggtcacatagactgtctccacggttgaaagtgactgatccgttatccgctcttgtacttcgggaagcctagtagcatcttcggatcttcgatgcgttgcgctcagcactcaatcccagagtgtagcttaggtcgatgagtctggacatccctcactggcgacagtggtccaggctgcgttggcggcctacctgtggcccaaagccacaggacgctagttgtgaacaaggtgtgaagagcctactgagctacttgagagtcctccggcccctgaatgcggctaatcccaaccacggagcaaatgactgcaatccagcagttagtttgtcgtaatgcgtaagtctgtggcggaaccgactactttgggtgtccgtgtttccttttatattttatattggctgcttatggtgacaatcactgattgttatcataaagcgacttggattggccatccggtgaaaataagagttattatctacttatttgttggatttactccactatcaacctacacaccagagctcatacgcattgttatagtactaagaaatatacatcaca

SEQ ID NO: 850 - DNA, 707 bp, Coxsackievirus
  A19, strain BBD66 polyprotein gene, complete cds.1
taaaacagctctggggttgttcccaccccagaggccacgtggcggccagtactctggtatcaaggtacctttgtacgcctgttttatatcccctcccccaagtaactttagaagcaattcaaacagttcaatagagggggtacaaaccagtaccaccacgaacaagcacttctgtttccccggtgaggctgtatagactgttcccacggttgaaaatggctgatccgttatccgctcatgtacttcgagaagcctagtatctccttggaatcttcgatgcgttgcgctcagcactctaccccgagtgtagcttaggctgatgagtctgggcataccccaccggtgacggtggcccaggctgcgttggcggcctacccatggctaacgccatgggacgctagttgtgaacaaggtgtgaagagcctattgagctacttgagagtcctccggcccctgaatgcggctaatcccaaccacggagcaagtgcctgcataccagcaggtagcttgtcgtaacgcgcaagtctgtggcggaaccgactactttgggtgtccgtgtttccttttattcttatcatggctgcttatggtgacaatctaagattgttatcatatagcttttggattggccatccggtgattgtttgatatttgaacacttgtttaccttatcttattacacaccaatttacatacctaacttcatt

SEQ ID NO: 851 - DNA, 708 bp, Coxsackievirus
  B5 polyprotein gene for polyprotein, VP4 and VP2 and1
cccactgggcgctagcacactggtattacggtacctttgtgcgcctgttttatctaccctccccccaacgcaacttagaagcataacttaaatggtcaacagataactcagtatgccaactgagccctgaccaagcacttctgttatcccggactgagtaccaataggctgctcacgcggccgaaggggaaaccgttcgttacccggccaattacttcgagaaacctagtaccaccatgaaagttgcgcagtgtttcgctccgcacaaccccagtgtagatcaggtcgatgagtcaccgcaaaccccacgggcgaccgtggcggtggctgcgttggcggcctgcccatggggcaacccatgggacgcttcaatactgacatggtgcgaagagtctattgagctaattggtagtcctccggcccctgaatgcggctaatcccaactgcggagcagatacccacacaccagcgggcagtctgtcgtaatgggcaactctgcagcggaaccgactactttgggtgtccgtgtttccttttattctcatactggctgcttatggtgacaattgagagattgttaccatatagctattggattggccatccggttacaaacagagcaattatttacttatttgttggttttgtaccactgaactacagagtcctgaaaaccctcaatctcattataacactcaatacgttaaa

SEQ ID NO: 852 - DNA, 708 bp, Enterovirus sp.
  B69 isolate 15_491 polyprotein gene, complete cds.1
gcccactgggcgttagcactctggtattaaggtacctttgtgcgcctgttttataatcccttcccaacttgcaacttagaagtaacacactatgaccaatagggggcgtggcaaaccagccatgccttggtcaagcacttctgtttccccggactgagtatcaataagctgtccacacggctgaaggagaaaacgtccgttacccggccagttacttcgagaaacctagtaccaccatgaaagttgcgtagcgtttcgctccgcacatccccagtgtagatcaggtcgatgagtcaccgcaatccccacgggcgaccgtggcggtggctgcgctggcggcctgcccatggggcaacccatgggacgctacaatactgacatggtgtgaagagtctattgagctaactggtagtcctccggcccctgaatgcggctaatcctaactgcggagcagatacccacacgccagtgggcagtctgtcgtaacgggcaactctgcagcggaaccgactactttgggtgtccgtgtttccttttattcatattttggctgcttatggtgacaattgagagattgttaccatatagctattggattggccatccggtgacaaacagagctatcatctatcttttcatcggcttcgtaccgctgaaccacaaagtatttaacaccctcaatttagtattggccttcaatatagcaaa

SEQ ID NO: 853 - DNA, 708 bp, Enterovirus B
  isolate E0-150 polyprotein gene, partial cds.1
ccactgggcgttagcacactggtatcacggtacccttgtgcgcctgttttatatacccttccccgtagagtaacttagaagcttgactacgacggtcaataggaaacccagtgcaccaactggggcgcgaccaagcactcctgtaaccccggactgagtatcaataagctgcttgcgtggctgaaggagaaaacgttcgttacccggccaattacttcgagaaacctagtaccaccatgaaagttgcgcagcgtttcgctccgcacaaccccagtgtagatcaggccgatgagtcaccgcattccccacgggcgaccgtggcggtggctgcgttggcggcctgcccatgggataacccatgggacgcttcaatactgacatggtgcgaagagtctattgagctaattggtagtcctccggcccctgaatgcggctaatcctaactgcggagcagacacccacaagccagtgggcagtctgtcgtaacgggtaactctgcagcggaaccgactactttgggtgtccgtgtttccttttatttctatactggctgcttatggtgacaattgaaaggttgttaccatatagctattggattggccatccggtgtctaacagagcaatcatttatttatttgttggattcgtacccctaaatcctaaagtctttaacactctcaacttcatattacgattaaatacagcaag

SEQ ID NO: 854 - DNA, 709 bp, Coxsackievirus
  A9 polyprotein gene for polyprotein, VP4 and VP2 and1
gggcccactgggcgctagcactctggtattacggtacctttgtgcgcctgttttacgctccttcccccaagtgcaacttagaagccaaacaccacgaccaatagtaggcaaggcgcaccagccgtgtctcggtcaagcacttctgtctccccggactgagtatcaataaactgctcacgtggttgaaggagaaaacgttcgttacccggctaattacttcgagaagcctagtaacaccatggaggttgcgaggcgtttcactcagcacgcccccggtgtagttcaggtcgatgagtcaccgcgttccccacaggcgactgtggcggtggctgcgttggcggcctgcccatggggcaacccatgggacgcttcaatgtcgacatggtgtgaagagcctattgagctagttagcagtcctccggcccctgaatgcggctaatcctaactgcggagcacgcgcccccaacccagagggtagcgtgtcgtaacgggtaactctgcagcggaaccgactactttgggtgtccgtgtttctttttatcttttattggctgcttatggtgacaattgagagattgttaccatatagctattggattggccatccggtgacgaacagagctataatttaccaatttgtaggatttattccattaagtttgaaagccttaaagacccttagtttaatactattgctcaatagtgtaaa

SEQ ID NO: 855 - DNA, 709 bp, Echovirus
  5 polyprotein gene for polyprotein, VP4 and VP2 and VP31
ggcccactgggcgccagcacactggtatcacggtacccttgtgcgcctgttttatttacccccccccaacgtaacttagaagcacaacctaatcggtcaatagataactcagtacaccaactgagtccagaccaagcacttctgttaccccggaccgagtatcaataagctgctcgcgcggctgaaggagaaaaggttcgttacccgaccaattacttcgagaaacccagtaccaccatggaagttgcgcagtgtttcgctccgcacaaccccagtgtagatcaggtcgatgagtcaccgcgttccccacgggcgaccgtggtggtggctgcgttggcggcctgcccatgaggtaacccatgggacgcttcaatactgacatggtgcgaagagtctattgagctaattggtagtcctccggcccctgaatgcggctaatcctaactgcggagcagatacctacacgccagtaggcagtctgtcgtaatgggcaactctgcagcggaaccgactactttgggtgtccgtgtttccttttattcttacattggctgcttatggtgacaattgagagattgttaccatatagctattggattggccatccagtgacaaacagagcgatcatctacttgtttgttggttttataccactaaattacaaagtcttaaacacactcaatttcattctgtcacttaatacattgag

SEQ ID NO: 856 - DNA, 710 bp, Encephalomyocarditis virus
  strain pEC9, complete genome.1
ttgaaagccgggggtgggagatccggattgccagtctgctcgatatcgcaggctgggtccgtgactacccactccccctttcaacgtgaaggctacgatagtgccagggcgggtactgccgtaagtgccaccccaaaataacaacagaccccccccctaacgttactggccgaagccgcttggaataaggccggtgtgcgtttgtctatatgttattttccaccatattgccgtcttttggcaatgtgagggcccggaaacctggccctgtcttcttgacgagcattcctaggggtctttcccctctcgccaaaggaatgcaaggtctgttgaatgtcgtgaaggaagcagttcctctggaagcttcttgaagacaaacaacgtctgtagcgaccctttgcaggcagcggaaccccccacctggcgacaggtgcctctgcggccaaaagccacgtgtataagatacacctgcaaaggcggcacaaccccagtgccacgttgtgagttggatagttgtggaaagagtcaaatggctctcctcaagcgtattcaacaaggggctgaaggatgcccagaaggtaccccattgtatgggatctgatctggggcctcggtgcacatgctttacatgtgtttagtcgaggttaaaaaacgtctaggccccccgaaccacggggacgtggttttcctttgaaaaacacgatgataat

SEQ ID NO: 857 - DNA, 710 bp, Unknown
  Description of Unknown: Human coxsackievirus A22, strain ban99-10427, complete genome.1 sequence
ttaaaacagctctggggttgttcccaccccagaggcccacgtggcggctagtactctggtattgcggtacctttgtacgcctgttttatacccccttccccagtaactttagaagcaattcattcagttcaatagagggggtacaaaccagtaccaccacgaacaagcacttctgtttccccggtgaagccgtatagactgtacccacggttgaaaatggcagatccgttatccgctcatgtacttcgagaagcctagtatcatcttggaatcttcgatgcgttgcgctcagcactctaccccgagtgtagcttaggctgatgagtctgggcataccccaccggcgacggtggcccaggctgcgttggcggcctacccatggctaacgccatgggacgctagatgtgaacaaggtgtgaagagcctattgagctacttgagagtcctccggcccctgaatgcggctaatcctaaccacggagcaagcgcttacaaaccagtaagtagcttgtcgtaacgcgcaagtctgtggcggaaccgactactttgggtgtccgtgtttccctttatttttattgtggctgcttatggtgacaatctaagattgttatcatatagctattggattggccatccggtgatttgtcgagtttcaaacgcttgtttatttctccacaacacttgcctactcaatacatttacaaaccata

SEQ ID NO: 858 - DNA, 710 bp, Enterovirus sp.
  D68, isolate 2016-R5080, complete genome.1
tttaaacgcttctaaggttgtttacattgggggaggggagataaaaaccgtatttctgggtcttcggtacctttgtacgcctgttttatctccctccccaatgtaacttagaagctttcaaatcaaagctcaataggtggagcgcaaaccagcgctttcgtgagcaagcactcctgtttccccggtgcggttgtatagactgttcccacggttgaaaacaacctatccgttatccgctatagtacttcgagaaacctagtatcacctttggattgttgatgcgttgcgctcaacacactaacccgtgtgtagcttgggtcgatgagtctggacataccccactggtaacagtggtccaggctgcgttggcggcctactcatggtgaaaaccatgagacgctagacatgaacaaggtgtgaagagtctattgagctactatagagtcctccggcccctgaatgcggctaatcttaaccatggagcaagtgctcacaaaccagtgagttgcttgtcgtaatgcgcaagtccgtggcggaaccgactactttgggtgtccgtgtttcactttttacttttatgactgcttatggtgacaatttaatattgttaccattcagctagtcgaaataatcgcataaaactttaaatcctatctaacaattcacatttggatagtttcattttgaggactttaaacctacttacaaag

SEQ ID NO: 859 - DNA, 711 bp, Rodent hepatovirus
  RMU101637Micarv2010 polyprotein gene, complete1
ttcaaagggtggtgggcggtttccccgccctcccctctttggatgcccatagtgcgggggtataaataccgcactccctttagctgttccgagggtatcggaacctatatgtttgttttctgtctgtctgtcagctttatgtgtgctcgtcccctttagggcactcatttcagcttgctttcattcttttcttccccggttctcaccttaccggaggcactggccgttgcgcccggcggggtcaacctagtgattagcactaggctgtaggtgtctaaagtggtgacattaagacttggtaactgatttcagcactgttaactgatgttggggatgacttgattgatcttctggaaggggtaggctacgggtgaaaccccttatcttaataccactatgtagagatagattcagtaggttaagggcagtggataaggttgagttcattttggacaataaaccttcaacactggtggacccaatctcactgaccagatgctttcttgactgatccttcagaggggtgattcttctgaataggttgccttgacactgatgcctgagacccattgggtcgggccttaaatcatggaactccactggactttcatggcctagcttctgccttagacagactctggggccccacgaccctctgggcccttcggggtactcaggggcatttaggtttttccacaattaaaagagtta

SEQ ID NO: 860 - DNA, 711 bp, Rodent hepatovirus
  KEF121Sigmas2012 polyprotein gene, complete cds.1
ttcaaagggtggctgggattttgtcccagcctccctttggagttccttggctctggggaactaaattaccaggcccgcgtttacctagcgcttaggttaaaacccccatcccttatttgtaaatattgatttctgcaggttcagagtttcttaatcatgttccctttaggacactcactccacttgctttcattcttgtttccgtggttctcccatcaccacaagcactgaccattgcgcccggtggggttaaccatatgattagcatatggctgtaggtgtttaagggtgggacaataatggaaggtcaaatagcaggcttgtttaacttccttttgtttcatctcatgtatctttctgaaggggtaggctacgggtgaaaccccttaggttaatactcatattgagagatacctgtggtaggttaattgccctggataaacttgagttgttagacaataaagtttcaacaggggtggacaagatctcaccaccagactggcatgttgtgggacatctgggaggcaagtttcttcctgtgatgttggcctttacatattgcctgggtgttaagaaggagcccttaaattcacttttctgtgagcctagcttccgctggacggactttgggggcagcatccttcttgatgcttctggggtactcaggggcatttaggtttttccacattataaatatatagatgaatagag

SEQ ID NO: 861 - DNA, 711 bp, Unknown
  Description of Unknown: Human coxsackievirus A22, strain USA75-10624, complete genome.1 sequence
ttaaaacagctctggggttgttcccaccccagaggcccacgtggcggctagtactctggtatcgaggtacctttgtacgcctgttttacaccccttcccctgtgcaactttagaagcaaatcacaaagttcaatagagggggtgcaaaccagcaccaccacgaacaagcacttctgtttccccggtgatgctgtatagactgttcccacggtcaaaaatggcagatccgttatccgcttgagtacttcgagaagcctagtaccaccttggaatcttcgatgtgttgcgctcagcactctaccccgagtgtagcttaggctgatgagtctgggcataccccaccggcgacggtggcccaggctgcgttggcggcctacccatggctaacgccatgggacgctagttgtgaacaaggtgtgaagagcctattgagctactcaagagtcctccggcccctgaatgcggctaatcctaaccacggagcaagtactcacaaaccagtgagcggcttgtcgtaacgcgtaagtctgtggcggaaccgactactttgggtgtccgtgtttccttttatttttattgtggctgcttatggtgacaatctaagattgttatcatatagcttttggattggccatccggtgattgttgagattatattactcatttgttttactacggttcttgcccaattgttacatttgcactaacata

SEQ ID NO: 862 - DNA, 711 bp, Unknown
  Description of Unknown: Human coxsackievirus A1, isolate KS-ZPH01F/XJ/CHN/2011, complete1 sequence
ttaaaacagctctggggttgttcccaccccagaggcccacgtggcggctagtacactggtatcacggtacctttgtacgcctgttttatatcccctcccccatgcaactttagaagtaattcaaatagttcaatagagggggtacaaaccagtaccaccacgaacaagcacttctgtttccccggtgaggctatatagactgttcccacggtcgaaggtggctgatccgttatccgcttgagtacttcgagaagcctagtaccacctttggatcttcgatgcgttgcgctcagcactctaccccgagtgtagcttaggctgatgagtctgggcataccccaccggcgacggtggcccaggctgcgttggcggcctacccgtggctaacgccatgggacgctagttgtgaacaaggtgtgaagagcctattgagctacttaagagtcctccggcccctgaatgcggctaatcccaaccacggagcaagtgctcacaaaccagtgggtggcttgtcgtaacgcgcaagtctgtggcggaaccgactactttgggtgtccgtgtttccttttatttttatcatggctgcttatggtgacaatctaagattgttgtcatatagcgtttggattggccatccggtgacttcgaaagcgatatatttgactcattgtcttactgaatttacctatttattacacttgtataacaata

SEQ ID NO: 863 - DNA, 711 bp, Unknown
  Description of Unknown: Human coxsackievirusA1, strain Tompkins, complete genome.1 sequence
ttaaaacagctctggggttgttcccaccccagaggcccacgtggcggccagtactctggtattgcggtacctttgtacgcctgttttatatcccctccccaagtaactttagaagcaattcacaaagttcaatagagggggtacaaaccagtaccaccatgaacaagcacttctgtttccccggtgaagctgtatagactgttcccacggtcgaaaatggcagatccgttatccgctcacgtacttcgagaagcctagtatcatcttggaatcttcgacgcgttgcgctcagcactctaccccgagtgtagcttaggccgatgagtctgggcataccccaccggcgacggtggcccaggctgcgttggcggcctacccatggctaatgtcatgggacgctagttgtgaacaaggtgtgaagagcctattgagctacttgagagtcctccggcccctgaatgcggctaatcctaaccatggagcaagtgcccacaagccagtgggtggcttgtcgtaatgcgcaagtctatggcggaaccgactactttgggtgtccgtgtttccttttattcttattatggctgcttatggtgacaacctaagattgttgtcatatagcttttggattggccatccggtgatctttgagattaatataccttccttattacttcatagtactcatttattcattacactactgtagttaca

SEQ ID NO: 864 - DNA, 711 bp, Enterovirus sp.
  D68, isolate 2012-12225, complete genome.1
ttaaaacagccttggggttgttcccacctcaagggcccacgtggcggctagtactctggtatttcggtacccttgtacgcctgttttatctccctccccaatgtaacttagaagctttcaaatcaaagctcaataggtggagcgcaagccagcgcttccgtgagcaagcactcctgtttccccggtgcggttgtatagactgttcccacggttgaaaacaacctatccgttatccgctatagtacttcgagaaacctagtatcacctttggattgttgatgcgttgcgctcagcacactaacccgtgtgtagcttgggtcgatgagtctggacataccccactggtgacagtggtccaggctgcgttggcggcctactcatggtgaaaaccatgagacgctagacatgaacaaggtgtgaagagtctattgagctactatagagtcctccggcccctgaatgcggctaatcttaaccatggagcaagtgctcacaaaccagtgagttgcttgtcgtaatgcgcaagtccgtggcggaaccgactactttgggtgtccgtgtttcactttttacttttatgactgcttatggtgacaatttaatattgttaccatttagctagtcaaattaatcacataaaaactttaaatcctatctaacaattcacatttggatagcttcattttgaggactttaaacctatttacaaag

SEQ ID NO: 865 - DNA, 711 bp, Coxsackievirus
  A9, isolate 2-MRS2013 polyprotein gene, complete cds.1
agggcccactgggcgctagcacactggtatcacggtacctttgtgcgcctgttttatttccccatccccgccgtaacttagaagtctcacttaagcggtcaatagatagcccagtaaaccaactgggttccgaccaggcacttctgttaccccggaccgagtatcaataggctactcacgtggccgaaggagaaaacgttcgttacccggccaattacttcgagaaacttagtaacaccatggaagttgcgcagtgtttcgctccgcacaaccccagtgtagatcaggtcgatgagtcaccgcgtaccccacgggcgaccgtggcggtggctgcgttggcggcctgcccatggggcaacccatgggacgcttcaataccgacatggtgcgaagagtctattgagctaattggtagtcctccggcccctgaatgcggctaatcctaactgcggagcagacgcctacgaaccagtgggtagtctgtcgtaacgggcaactctgcagcggaaccgactactttgggtgtccgtgtttccttttattcttacactggctgcttatggtgacaattgagagattgttaccatatagctattggattggccatccggtgacaaacagagctattgtttatctatttattggtttcataccactaaacttcaaggtcctaggaaccctcaatttaatattactacttaatagtgcaaa

SEQ ID NO: 866 - DNA, 712 bp, Canine kobuvirus 1
  isolate DD2 polyprotein mRNA, complete cds.1
tcaccctcttttccggtggtccggacccagaccaccgttactccattcagcttcttcggaacctgttcggaggaattaaacgggcacccactcaccctctcccccctctcgtaaccaagtgtgtgcccaatctcttcactcctgctggcttcaccgaccagcagtgtccaaaatgctaggtgaacctcctccctcccccactgggctcttgcccagtttcctccccccagcctgacgtgtcacaggctgtacaaagaccccgcgaaagctgccaaaagtggcaattgtgggtcccccctttgtgaaggcgtcgagtctttctcccttaaggctagacccgccagtgaattctgtcgggcaactagtgacgccactgcatgcctccgacctcggccgcggagtgctgccccccaagtcgagcccctaagccacaagttgtgctgtctggcaaacactgtctgtgagaatgttccgctgcggctgccaagcctggcaacaggctgccccagtgtgcgtagttctcatccagacctcggtctggcaacttgctgttaagacacggcgtaaggggcgtgtgccaacgccctggaacgagtgtccactctaataccccgaggaatgctacgcaggtacccctggcccgccagggatctgagcgtaggctaattgtctaagggtattttcatttcccactctttttctcttgttcata

SEQ ID NO: 867 - DNA, 712 bp, Canine kobuvirus
  US-PC0082, complete genome.1
tcacgcacttttccggtggtccggacccagaccaccgtcactccattcagcttcttcggaacctgttcggaggaattaaatgggcacccactcacccttcccctcttctcgtaactaagtgtgtgcccaatctcttgactcctactggctccaccgaccggtagtgtccaaaatgctaggtggacttcctcccttcccttctgggcatcttgcccagcttcctccccccagcctgacgtgtcacaggctgtgcaaagaccccgcgaaagctgccaaaagtggcaattgtgggtcccccctttgtcaaggcgtcgagtctttctcccttaaggctagtcccatcagtgaattctgatgggcaactagtgacgccactgcatgcctccgacctcggccgcggagtgctgccccccaagtcgtgcccctgaccacaagttgtgctgtctggcaaacattgtctgtgagaatgttccgctgtggctgccaagcctggtaacaggctgccccagtgtgcgtagttctcatccagacttcggtctggcaacttgttgttaagacacggcgtaaggggcgtgtgccaacgcccaggaacgagtgtccactctaataccccgaggaatgctacgcaggtacccctggtccaccagggatctgagcgtaggctaactgtctaagggtattttcatttcccactctctctttctcgttcata

SEQ ID NO: 868 - DNA, 712 bp, Bluegill picornavirus
  isolate 04-032, complete genome.1
tttaaatggtgaccttaaacgggaaatgcgttttccgttctttggatatccatttaacgtgtaccctatacgataattggggtggattctggatgcctagttccagtgattggttaagaactcgtttactacgtatagtatgattagcaaagtgctcgattgatcacgtaatgatctatgtggttaaaaacccagtagtatggtatatactcagtagtgtacactgtgagtacaactcttggcgtagagagaacaattcacccgaatccgtggcgtatccatggaaataagtttacctaattgtatgttacaaggcatatgagacatttatgagatatggtttattttgactaaacgagtgtagaggtggtggagtctatccaacttcaagccatgcaattgttgtgttgattgatatcattgaccatttttgtggattgtgtacacatacaatttgaaaattaaccccctcaagaataagacatgggaccattcgtggtagataccgtgctcggatgcttgagattagatgggttagactagttttggaatgagattgccgagaaagtcccgctagacatgttttacaagtcgtggtattccgctagactttttcgcagacacatggaagggtccatgtgttgtgcaattgcagggtgacagcccaactgcagagttttccttactagaataaaaatctgttgtcaatttt

SEQ ID NO: 869 - DNA, 712 bp, Unknown
  Description of Unknown: Human coxsackievirus A22, strain 438913, complete genome.1 sequence
ttaaaacagctctggggttgatcccaccccagaggcccacgtggcggctagtactctggtattacggtacctttgtacgcctgttttatatcccctcccccaagtaactttagaagcaattcaaacagttcaatagagggggtacaaaccagtaccaccacgaacaagcacttctgtttccccggtgaagctgtatagactgttcccacggttgaaaatggcagatccgttatccgcttgagtacttcgagaagcctagtatcaccttggaatcttcgacgcgttgcgctcagcactctaccccgagtgtagcttaggtcgatgagtctgggcataccccaccggcgacggtggcccaggctgcgttggcggcctacccatggccaacgccatgggacgctagttgtgaacaaggtgagaagagcctattgagctacttaagagtcctccggcccctgaatgcggctaatcccaaccacggagcaagtgctcacaaaccagtgagtagcttgtcgtaacgcgcaagtctgtggcggaaccgactactttgggtgtccgtgtttccttttatttttactatggctgcttatggtgacaatctaagattgttatcatatagctgttggattggccatccggtgatttattgagatttaacgttcgcctgtttttcttactacatctacccaccagtttcactcatataacaaca

SEQ ID NO: 870 - DNA, 712 bp, Human poliovirus 2
  gene for polyprotein, genomic RNA, strain1
cccacgtggcggccagtactccggtatcacggtacccttgtacgcctgttttatactcccttcccccgtaacttagaagcaatgaaaccaagttcaatagaagggggtacaaaccagtaccaccacgaacaagcacttctgtttccccggtgacgttgcatagactgtccccacggttgaaggcggctgatccgttatccgcttgtgtacttcgagaagcctagtaccatcttggaatctccgatgcgttgcgctcagcactcaaccccagagtgtagcttaggctgatgagtctggacattccccaccggcgacggtggtccaggctgcgttggcggcctacctgtggtccaaaaccacaggacgctagttgtgaacaaggtgtgaagagcctattgagctacatgagagtcctccggcccctgaatgcggctaatcccaaccacggagcaggtgtttgcaatccagcaaatagcctgtcgtaacgcgcaagtctgtggcggaaccgactactttgggtgtccgtgtttccttttattttcatactggctgcttatggtgacaatctcggattgttatcatagagcaaattggattggccatccggtgaaaatcagattgattatttaactttttgttggatttacatctttgacatcacatactccgaatctcattaagatagtgctcttgatacgacatcatcgtcatt

SEQ ID NO: 871 - DNA, 713 bp, Canine kobuvirus 1
  isolate 12D049, complete genome.1
tcacgcacttttccggtggtccggtctcagaccaccgttactccattcagcttcttcggaacctgttcggaggaattaaacgggcacccactaaccccaacccccttctcgtaactaagtgtgtgcccaatctcttgactcctgctggaaccaccgaccagtagtgtccaaaatgccaggtggaaaatcctcccttcccctctgggctacatgcccagcatcctccccccagcctgacgtgccacaggctgtgcaaagaccccgcgaaagctgccaaaagtggcaattgtgggtcccccctttgtcaaggcgtcgagtctttctcccttaaggctagccccgtcagtgaactctgtcgggcaactagtgacgccactgcatgcctccgacctcggccgcggagtgctgccccccaagtcatgcccctgaccacaagttgtgctgcctggcaagcactgcccgtgagaatgttccgctgtggctgccaagcctggtaacaggctgccccagtgtgcgtagttctcatccagacctcggtctggcaacttgctgttaagacatggcgtaaggggcgtgtgtcaacgccctggaacgagtgtccactctaataccccgaggaatgctacgcaggtacccctggctcgccagggatctgagcgtaggctaattgtctaagggtattttcatttcccactctctctttcttgttcata

SEQ ID NO: 872 - DNA, 713 bp, Hepatovirus A
  isolate 2ID, complete genome.1
atttaaaccctctcccttttggacttctctagtctggggaagtaaaataccagactcccgtttgcctagggtataggctattatttatgtttgttttgttatgtttgtcttttaatgttttgtaaatattaattccagcaggttctggtttctgaatttgtcctctttaaggcactcataatgctttctttcatcttcatttccctggctctcaccttgccagatggactgacccatgcgcccgtgggggttaaccacaggactagcctgtggctgtaggttctgaaagaggtgacattaagactatggttgtgattccacatgttttaactggtatgatgtagtagcaattgatctttggtatggggtaggctacgggtgaaaccccataggttaatactaatatttagagatacctccagtaggtgaagtgcacaggataagattgagttattttgacaaaagatcttcaactgtggtggacaccatctcactgggccaatgcttttgttatgaaaccatattgggcatgtctcttggatgagcattcatggacactgatgcctagactagggtgaatattgccttaaatcatagagttctttgggattttatggccttgcttctgttgaacagacactggggcttatggtattcaccctggcctctggggtaatcaggggcatttaggttttccacatttatataatgct

SEQ ID NO: 873 - DNA, 713 bp, Senecavirus A
  strain USA/IN_Purdue_4914-26/2015, complete genome.1
gctcctctgtgcctctagcaaacacagccggtttaccccccggaaggggaaaggaaggactgggcatgagggcccggccccccctttccccttccggggggtaaaccggctgtgtttgctagaggcacagaggagcaacatccaacctgcttttgtggggaacggtgcggctccaattcctgcgtcgccaaaggtgttagcgcacccaaacggcgcatctaccaatgctattggtgtggcctgcgagttctagcctactcgtttctcccctattcactcactcacgcacaaaaagtgtgttgtaactacaagatttagccctcgcacgggatgtgcgataaccgcaagattgactcaagcgcggaaagcgctgtaaccacatgctgttagtccctttatggctgcgagatggctatccacctcggatcactgaactggagctcgaccctccttagtaagggaaccgagaggccttcttgcaacaagctccgacacagagtccacgtgattgctaccaccatgagtacatggttctcccctctcgacccaggacttctttttgaatatccacggctcgatccagagggtggggcatgatccccctagcatagcgagctacagcgggaactgtagctaggccttagcgtgccttggatactgcctgatagggcgacggcctagtcgtgtcggttctataggtagcacatacaaat

SEQ ID NO: 874 - DNA, 713 bp, Echovirus
  E9 gene for polyprotein, partial cds,strain: 31170222.1
acagggcccactgggcgtcagcactctggtattgaggtacctttgtgcgcctgttttataaccctctccccatttgaaaattagaagcaatacacaatggtcagtagctggcatggcaaaccagtcatgttttgaccaagcacttctgtttccccggaccgagtatcaatagactgctcacgcggttgaaggagaaagcgttcgttacccgaccaactacttcgagaaacctagtaacgccatgaaagttgcagagcgtttcgctcagcacatccccagtgtagatcaggccgatgagtcaccgcattccccacgggcgaccgtggcggtggctgcgctggcggcctgcttgtggggcgacccacaagacgctccaaaacagacatggtgtgaagagtctattgagctagttggtagtcctccggcccctgaatgcggctaatcctaactgcggagcacgtgcctccaacccaggaggtggcgtgtcgtaacgggtaactctgcagcggaaccgactactttgggtgaccgtgtttccttttattcttatattggctgcttatggtgacaattgaaaggttgttaccatatagctattggattggccatccggtgacaaacagagcaattatatatctctttgttgggtatattccactcgattacaaggaattcagaactctcaattatatactgtctttaaactccgcaag

SEQ ID NO: 875 - DNA, 714 bp, Unknown
  Description of Unknown: Human coxsackievirus A21, strain USA-Ga95-10622 polyprotein gene,1 sequence
ttaaaacagcctgtgggttgttcccaccccagaggcccacgtggcggctagtactctggtatcacggtacctttgtacgcctgttttatatcccttcccccgcaactttagaagcttaacaaaagttcaacagcaggggtacaaaccagtgcctctacgaacaagcacttctgtttccccggtgaaatcacatagactgtacccacggtcaaaagtgattgatccgttatccgcttgagtacttcgagaagcctagtatcaccttggaatcttcgacgcgttgcgctcaacactctaccccgggtgtagcttaggctgatgagtctgggtactccccaccggtgacggtgacccaggctgcgttggcggcctacccatggctaatgccatgggacgctagttgtgaacaaggtgtgaagagcctattgagctactcaagaatcctccggcccctgaatgcggctaatcctaaccacggagcaatcgctcacgacccagtgagtaggttgtcgtaatgcgtaagtccgtggcggaaccgactactttgggtgtccgtgtttcccttttttattcatattggctgcttatggtgacaatttacagattgttaccatatagctattggattggccatccagtattgtgtcatacatattaaaatacttttctacaagcaataacaacattgtatttgaaccacaatagccattacaa

SEQ ID NO: 876 - DNA, 714 bp, Human enterovirus sp.
  94, isolate E210, complete genome.1
ttaaaacagcctgtgggttgttcccaccccagaggcccacgtggcggccagtactctggtatcacggtacctttgtacgcctgttttatatccccttcccccgcaacttagaagaaaacaaatcaagttcactaggagggggtacaaaccagtaccaccacgaacaagcacttctgtttccccggtgatgtcgtatagactgtaaccacggttgaaaacgattgatccgttatccgctcttgtacttcgaaaagcccagtatcaccttggaatcttcgatgcgttgcgctcagcactcaaccccagagtgtagcttaggtcgatgagtctggacactcctcaccggcgacggtggtccaggctgcgttggcggcctacctgtggtccaaagccacaggacgctagttgtgaacaaggtgtgaagagcctattgagctacaagagaatcctccggcccctgaatgcggctaatcctaaccacggagcaagggtacacaaaccagtgtatatcttgtcgtaacgcgcaagtctgtggcggaaccgactactttgggtgtccgtgtttccttttgtttttatcatggctgcttatggtgacaatctaagattgttatcatatagctgttggattggccatccggtaatttattgagatttgagcatttgcttgtttcttcaacaatttcacctattcattgcatttcagcagtcaaa

SEQ ID NO: 877 - DNA, 714 bp, Echovirus
  E25, strain 61243-1564 polyprotein gene, partial cds.1
cacagggcccactgggcgctagcactctggtattgcggtacctttgtgcgcctgttttatggcccccccccagttggaacttagaagtgaagcctctcgaccaatagtgggcgtggcacaccagccacgtcttggtcaagcacatctgtttccccggactgagtatcaataaactgctcgcgcggttgaaggagaaaacgttcgttacccggctaactacttcgggaaacccagtagtatcatggaaattgcgaggcgtttcgctcagcactccccccgtgtagatcaggtcgatgagtcactgcaccccccacgggtgaccgtggcagtggctgcgttggcggcctgcctatggggtgacccataggacgcttcaaaatggacatggtgcgaagagtctactgagctagttagtagtcctccggcccctgaatgcggctaatcctaaccgcggagcaagtgtccacaaaccagtgggttgcttgtcgtaatgggtaactctgcggcggaaccgactactttgggtgtccgtgtttccttttatcttttattatggctgcttatggtgacaattgagagattgttaccatatagctattggattggccatccggtgaacaacagagcgatcatttacctctttgttggtttcgttccattgagtcccaaagtttttacgacactcaaatttattctcctacttaacaaagcaaa

SEQ ID NO: 878 - DNA, 714 bp, Coxsackievirus
  B4, strain 61256-70969 polyprotein gene, partial cds.1
cagggcccactgggcgccagcacactggtatcaaggtacctttgtgcgcctgttttgcttccctttttccccagaggcaacttagaagcaatactccacgaccaatagcaggcgtggcacaccagccatgtctcggtcaagcacttctgtggccccggactgagtatcaataaactgctcacgcggtcgaaggagaaaacgtccgttacccggctagctacttcgagaaacctagtaacgccatgaaaattgcgaggcgtttcgctcagcacatccccagtgtagatcaggtcgatgagtcaccgcattccccacaggtgactgtggcggtggctgcgttggcggcctgcccatggggtaactcatgggacgcttcaatacggacatggtgtgaagagtctattgagctagttagtattcctccggcccctgaatgcggctaatcctaactgtggagcatgcgcccccattccagagggtagcatgtcgtaacgggtaactccgcagcggaaccgactactttgggtgtccgtgtttccttttattttatcattggctgcttatggtgacaattgaaagattgttaccatatagctattggattggccatccggtgacgaacagagctataatttaccaatttgtgggatttgttcctataagtttgaaagtcttaaagacccttaatttaatattactactcaatagtgcaag

SEQ ID NO: 879 - DNA, 714 bp, Coxsackievirus
  A19 clone V4C polyprotein gene, partial cds.1
tattaaaacagctctggggttgttcccaccccagaggcccacgtggcggccagtacactggtattacggtacctttgtacgcctgttttatatccccttacccagtaactttagaagtaattcacacagttcaatagagagggggtacaaaccagtaccaccacgaacaagcacttctgtttccccggtgaagctacatagactgtccccacggttgaaagtggcagatccgttatccgcttaagtacttcgagaagcctagtatcaccttggaatcttcgacgcgttgcgctcagcactctaccccgagtgtagcttaggctgatgagtctgggcataccccaccggcgacggtggcccaggctgcgttggcggcctacccatggctaacgccatgggacgctagttgtgaacaaggtgtgaagagcctattgagctacttaagagtcctccggcccctgaatgcggctaatcctaaccacggagcaagtgcccacaaaccagtgggtggcttgtcgtaacgcgtaagtctgtggcggaaccgactactttgggtgtccgtgtttccttttatttttatcatggctgcttatggtgacaatctaagattgttatcatatagctattggattggccatccggtgattcacagagacttgaaagctaactcaccttcctataacactcatttgtttatcaatcttatagcacaca

SEQ ID NO: 880 - DNA, 714 bp, Coxsackievirus
  B4 VP4 gene, partial sequence; VP2 (VP2) gene,2
ggcttaccaactatgcttacaccaggcagcacgcagtttttgacgtcagatgattttcaatcaccatcagctatgccacagtttgatgtgaccccagagatgaacattccagggcaagtgaggaacctgatggaaattgcggaagttgattctgtggtaccaatcaataacttgaaagctaatctgatgacgatggaggcttaccgggtgcaggttaggtccactgacgagatgggaggacagatatttggcttccccttacagccaggggcatcaagcgtgttacaaagaacactactgggagagatattaaattactacactcattggtcagggagcctcaagttaacatttgtgttctgtgggtcggcaatggcaactggcaaattcttactagcatactcaccacctggagcaggggcaccagacagcaggaagaacgctatgttagggacccacgtcatatgggacgttggactgcaatccagctgtgtgctctgtgtaccgtggatcagccagacgcactacaggtatgttgttgatgacaagtacacggctagtggtttcatttcgtgctggtaccaaactaatgtcatagtcccagctgaagctcagaaatcgtgctacataatgtgctttgtgtcagcatgcaacgatttctctgtacgcatgttgagggacacgcaattcattaagcaaacaaacttttatcag

SEQ ID NO: 881 - DNA, 715 bp, Ovine hungarovirus
  OHUV1/2009/HUN, complete genome.1
tctttcccccctcccctttccctttacctcttgcaacgaaacagtttttgacaaggaccctcacctgtcaatcgggaccaccactttcagtgaccccgtgcgaagtgttgagagaaagtgagctttcttacccttcatttgtgaacccttcagtcgaagccgcttggaataagatggaaggaaatgttcattctaaatggagtgaaacatatacttaatttccagtgtttagtggtctttccactagacaacggcactgtcttgccggaactctacacaccaacattccacgcttgtgggactcaaatgttggatgacacagttgtagctggaactgagtgtttagtgcactctgtgtaacagtgaaaacaatgtgatcacttcggtgggctagtagcctgtggactaacaactggtaacagttgcctcaggggccaaaagccacggtgttaacagcaccctactagtttgattggagcaatccatgatgttacagagttagtaactgccaaacagattgtactggtatcttggcataccgtgcaacttaggatagtgaaggatgccctggcggtacccataggtaacaagtgacactatggatctaaacaggggctcactctacgttgctttacaactagctgtgagttaaaaaacgtctaactatccacaacctaggggactaggttttcctttttatttttatacacaacta

SEQ ID NO: 882 - DNA, 715 bp, Unknown
  Description of Unknown: Human coxsackievirus A19, strain 8663, complete genome.1
ttaaaacagctctggggttgttcccaccccagaggcccacgtggcggctagtactctggtattacggtacctttgtacgcctgttttacactcccttccctacgcaactttagaagtttaacataaagttcaatagagggggtacaaaccagcaccaccacgaacaagcacttctgtttccccggtgaaactgcatagactgtaaccacggttgaaagcggttgatccgttatccgcttgagtacttcgagaagcctagtaccaccttggaatctccgatgcgttgcgctccacactctaccccgagtgtagcttaggccgatgagtctgggcgttccccaccggcgacggtggcccaggctgcgttggcggcctacccatggttaacgccatgggacgctagttgtgaacaaggtgtgaagagcctattgagctactcaagagtcctccggcccctgaatgcggctaatcccaaccacggagcgagtgctcacaatccagtgagtggcttgtcgtaacgcgcaagtctgtggcggaaccgactactttgggtgtccgtgtttccttttatttttactatggctgcttatggtgacaatctaggattgttatcatatagcttttggattggccatccggtgacttctaacgttcaagtagtttactcgcttaattttctaaacacattctcagttgttgaattataaacttcaca

SEQ ID NO: 883 - DNA, 715 bp, Unknown
  Description of Unknown: Human coxsackievirus A22, strain Chulman, complete genome.1 sequence
ttaaaacagcctggggttgttcccaccccagaggcccacgtggcggccagtactctggtattacggtacctttgtacgcctgttttatatcccctcccctgagtaactttagaagcaattcaaaaggttcaatagagggggtacaatccagtaccaccatgaacaagcacttctgtttccccggtgaggctacataaactgtacccacggttgaaagtggctaatccgttatccgctcaagtacttcgagaagcctagtaataccttggaatcttcgacgcgttgcgctcagcactctaacccgggtgtagcttaggtcgatgagtctgggcataccccaccggtgacggtggcccaggctgcgttggcggcctacccatggctaacgccatgggacgctagttgtgaacaaggtgtgaagagcctattgagctacttgagagtcctccggcccctgaatgcggctaatcctaaccacggagcaagtgctctcaaaccagagagtggcttgtcgtaacgcgtaagtctgtggcggaaccgactactttgggtgtccgtgtttccttttatttttatcatggctgcttatggtgacaatctaagattgttatcatatagcttttggattggccatccggttgttgtttagagcgtttcatctgtgctttgtttgtttgaccagatcaatataaacactacatcctatttgttcata

SEQ ID NO: 884 - DNA, 715 bp, Coxsackievirus
  B4, strain EPV3715, complete genome.1
acagggcccactgggcgttagcacactggtatctcggtacccttgtgcgcctgttttatacacccttcccccaaaagaaacttagaagcttgactataacggtcaataggaaacccagtataccagctgggttacgaccaagcacttctgtaaccccggactgagtatcaataggctgctcacgcggctgaaggagaaaacgttcgttacccggccaattacttcgagaaacctagtaccaccatgaaagttgcgcggcgtttcgctccgcacaatcccagtgtagatcaggtcgatgagccaccgcgttccccacgggtgaccgtggcggtggctgcgttggcggcctgcccatggggcaacccatgggacgcttcaatactgacatggtgcgaagagtctattgagctaattggtagtcctccggcccctgaatgcggctaatcctaactgcggagcagatacccacataccagtgggctgtctgtcgtaacgggtaactccgcagcggaaccgactactttgggtgtccgtgtttccttttattcttatactggctgcttatggtgacaattgagagattgttaccatatagctattggattggccatccggtgtctaacagagcgatcatctatctgtttgttggtttcatacccttgaattttaaagtcctcaacactcttaaccttgtgctacaactaaactcggtaaa

SEQ ID NO: 885 - DNA, 715 bp, Human poliovirus 3
  isolate EST02-E252 polyprotein mRNA, partial1
tgttcccaccccagaggcccacgtggcggctagtactctggtatcacggtacctttgtacgcctgttttatacccccttcccccgcaacttagaagcatgaaatcttaagctcaacaggaggggtgcaaaccagcacctctacgagcaagcactactgtctccccggtgaggttacatagactgttcccacggttgaaagtagccgatccgttatccgctcatgtacttcgagaagcctagtattgctctggaatcttcgatgcgttgcgctcaacactcgaccccggagtgtagcttaggccgatgagtctggacattccccactggcgacagtggtccaggctgcgttggcggcctacctgtggtccaaagccacaggacgctagttgtgaacagggtgtgaagagcctattgagctacatgagagtcctccggcccctgaatgcggctaatcccaaccatggagcaggcaactgcaacccagcagtcagcctgtcgtaacgcgcaagtccgtggcggaaccgactactttgggtgtccgtgtttccttttatcttttgaatggctgcttatggtgacaatcatagattgttatcataaagcgaattggattggccatccagagaattactaccgtgtttattgagtctactcttgaaaaacctaactcctcaacgtactagaattatttgaagacaggatatcgacacgaca

SEQ ID NO: 886 - DNA, 716 bp, Hepatitis A virus
  isolate CP-IND, complete genome.1
ttcaagaggggtctccggagatttcctgagtccctcttgggagtccatggtgaggggacttgatacctcaccgccgtttgcctaggctataggctaaacttccctttcccctttccctttattgttgtaaatattaattcctgcaggttcaggtctcttggatttgttccactttatggacactcatttcacgctttctgtctgcttttcttccagggctctccccttgccctaggctctggccgttgcgcccggcggggtcaactccatgattagcatggagctgtaggagtctaaattggggacacagatgttgggaacgtcaccttgcagtgttaacttggctttcatgaagctttttgatcttccacaagaggtaggctacgggtgaaacctcttaagctaatacttctatgaagagatgctttggatagggtaacagcggcggatattggtgagttgtttgacaaaaaccattcaacgccggaggactggctctcatccagtggatgcattaagtggattgtctgtcagggctgtctctaggtttaattcctggcctctctgtgcttagggcaaacaaaacttggccttaaatgaggtcctgtgagaggggacctcgccattgaatgctggacatttctttggggccttatgttttgtttgcctctgaggtactcaggggcatttaggtttttcctcatcaataaataatt

SEQ ID NO: 887 - DNA, 716 bp, Hepatitis A virus
  genomic RNA, complete genome, sub_strain:1
ttcaagaggggtctccgggtttttccggagcccctcttgggagtccatggtgaggggacttgatacctcaccgccgtttgcctaggctataggctaattttcccttttccttttccctgtgttattgtaaatattaattcctgcaggttcagggttcttgaatttgttctgctgtacggacactcttttcacgctctctgtctgcttttcttccagggctctccccttgccctaggctctggccgttgcgcccggcggggtcaactccatgattagcatggagctgtaggagtctaaattggggacacagatgttgggaacgtcaccttgcagtgttaacttggctttcatgaaactccttgatcttccacaagaggtaggctacgggtgaaacctcttaagctaatacttctatgaagagatgctttggatagggtaacagcggcggatattggtgagttgtatgacaaaaaccattcaacgccggaggactggctctcatccagtggatgcattgagtgaattgactgtcagggctgtctttaggcttaattcctgacctctctgtgcttagggcaaacaaaatttggccttaaatgaggctctgtgagagggggcctcgccattgaatgctggacatttctttggggccttatgttttgtttgccgctgaggtactcaggggcatttaggtttttcctcatcaataaataaat

SEQ ID NO: 888 - DNA, 716 bp, Enterovirus J
  strain POo-1, complete genome.1
aaaatagcctcagggttgttcccaccctgagggcccacgtggcgtagtactctggtatcacggtacctttgtacgcctattttacatcccttccccgtaacttagaagctttcaactataagttcactagcagggctaccaaccaggtagttcatcgaacaagcacttctgttaccccggtcctagtacctgagaagctgtacccacggcggaaggggaaaaagatcgttacccggctatctacttcgagaagcctagtaacgtcattgaaactcttgagcgttgcgttcagcacagtaccccctgtgtagctttggctgatgagtctgggcattccccactggcgacagtggcccaggctgcgttggcggccaaccgatccgggcaaccgggtcggacgctcatttgtggacatggtgtgaagagcctattgagctaggtagtagtcctccggcccctgaatgcggctaatcccaactccggagcaagtgcgcacaatccagtgtgtggcttgtcgtaatgcgtaagtctggagcggaaccgactactttgggtgtccgtgtttcctgtttttccttatttggctgcttatggtgacaatctagtgttgttaccatatagcgattggattggccatccggtgaatagctttgtgacaattccctacgttatttttcataactcaacttcacgagagtcattgagtttgactaatt

SEQ ID NO: 889 - DNA, 716 bp, Coxsackievirus
  B6 polyprotein gene for polyprotein, VP4 and VP2 and1
cacagggcccactgggcgctagcacactggtatcccggtacctttgtgcgcctgttttataccccctttcccgctttgtaacttagaagtaacacaacttcggtcaatagtcgacgcaacaacccagttgcgttttgatcaagcacctctgtgaccccggactgagtatcaataggctgctcgcgcggctgaaggagaaaccgttcgttacccggctaactacttcgagaagcctagtagcatcatgaacgttgcggagtgtttcgctcagcacttcccccgtgtagatcaggtcgatgagtcaccgcgttccccacgggtgaccgtggcggtggctgcgttggcggcctgcctgtggggcaacccacaggacgctctaatacagacatggtgcgaagagtctattgagctagttagtagtcctccggcccctgaatgcggctaatcctaactgcggagcacattctcacaagccagtgagcggtgtgtcgtaacgggcaactctgcagcggaaccgactactttgggtgtccgtgtttccttttattctaatactggctgcttatggtgacaattgagagattgttaccatatagctattggattggccatccggtgtctaacagagcaattatttacctgtttgttggtttcacacccctaaatctcaaggttttaaataccctcaatttcgtactgaaactaaactcagtaaa

SEQ ID NO: 890 - DNA, 716 bp, Enterovirus sp.
  D68, isolate USA/CA/2014-RGDS-1039, complete genome.1
cagccttggggttgttcccactccaagggcccacgtggcggctagtactctggtacttcggtacctttgtacgcctgttttatctcccttcccaatgtaacttagaagttcttaaatcaatgctcaataggtggggcgcaaaccagcgctctcatgagcaagcactcctgtctccccggtgaggttgtataaactgttcccacggttgaaaacaacctatccgttatccgctatagtacttcgagaaacctagtaccacctttggattgttgacgcgttgcgctcagcacactaacccgtgtgtagcttgggtcgatgagtctggacatacctcactggcgacagtggtccaggctgcgttggcggcctactcatggtgaaagccatgagacgctagacatgaacaaggtgtgaagagtctattgagctactatagagtcctccggcccctgaatgcggctaatcctaaccatggagcaagtgctcacaggccagtgagttgcttgtcgtaatgcgcaagtccgtggcggaaccgactactttgggtgtccgtgtttcactttttacttttatgactgcttatggtgacaatttgatattgttaccatttagcttgtcaaatcaattgcaaaagatcctaactcttatttatcaacttgcatctcgataactctaatttgaaaatatcatctctaaccaatttgaaaattttaaca

SEQ ID NO: 891 - DNA, 717 bp, Coxsackievirus
  A6, isolate DY003R/Shandong/China/2015, complete1
acagggcccactgggcgctagcactccgattctgcggaatctttgtgcgcctgttttataaccctcccccgaaacttgcaacttagaagttatgtacgttactgatcaacagcaggcgtggcacaccagccatgtcttgatcaagcacttctgtaaccccggactgagtatcaatagactgctcacgtggtcgaaagagaaaacgttcgttatccggctaactacttcgagaaacttagtagcaccactgaaactgcggagtgtttcgctcagcacttcccccgtgtagatcaggtcgatgagtcactgcttaccccacgggtgaccgtggcagtggctgcgttggcggcctgcctatggggcaacccataggacgctctaaagtggacatggtgtgaagagtctattgagctagttagtagtcctccggcccctgaatgcggctaatcctaactgcggagcacatgccctcaatccagggggtggtgtgtcgtaacgggcaactctgcagcggaaccgactactttgggtgtccgtgtttcttttattctcataatggctgcttatggtgacaattgaggaattgttgccatatagctattggattggccatccagtgacaaacagagctttgatatacttgttcgtgggtttcgttccactcaccagtcgtacagttcatactctaaagtacattctgattctgaacaatagaaa

SEQ ID NO: 892 - DNA, 717 bp, Human enterovirus sp.
  C104, strain Pavia259-7712, complete genome.1
ttaaaacagcttgggggttgttcccacccccagggtccaatggacgctagtacaccggtatcacggtacccttgtacgcctgttttataatccccttcccccgtaacattagaagcacaaaagcaaccgctcaatagacaccatacatccagtgtggttacgagcaagcacttctgtctccccggttgcgccctatatgctgtgcgaacggcaaaaaggggcaatatcgttacccgcttgactactacgggaaacccagtatcatcttcgattgatttgagagttgcgttcagcgccttacccccggcgtagctcaggctgatgaggctccgaacaccccacaggcgactgtgtcggagcctgcgttggcggcctgcccataccctgcggtatgggacgctcacttcatgacatggtgcgaagagtctactgtgctagtcaagattcctccggcccctgaatgtggataatcccaaccactgatcctacgttcgcaatccagcgttcagtaggtcgtaacgcgcaagtcggtggcggaaccaactactttgggtgtccgtgtttcctttatttcctactgaatgcttatggtgacaattgttttgatcagttgttgccaatactcgcgttcagtgtgtaattacaaaaacaagattatcagttattacaatccctcacgttcagtgcacaattacgaaaacgagattttctgtcata

SEQ ID NO: 893 - DNA, 719 bp, Coxsackievirus
  A10, strain 61217-2276 polyprotein gene, partial cds.1
acagggcctactgggcgctagcactctgattctacggaacctttgtgcgcctgttttataacccctcccccaaactatgtaacttagaagttatgcactctaccgatcaacagcaggcatggcgctccagccatgtctcgatcaagcacttctgtttccccggactgagtatcaatagactgctcacgtggtcgaaggagaaaacgttcgttatccgactaactacttcgagaagcctagtagcaccatcgagactgcggagcgtttcgttcagcactccccccgtgtagatcaggtcgatgagtcactgcataccccacgggcgaccgtggcagtggctgcgttggcggcctgcctatggggtgacccataggacgctctaaagtggacatggtgtgaagagcctattgagctagttagtagtcctccggcccctgaatgcggctaatcctaactgcggagcgcatgccctcgaaccagagggtagtgcgtcgtaacgggcaactctgcagcggaaccgactactttgggtgtccgtgtttctttttattcacttattggctgcttatggtgacaatcaaggaattgttaccatatagctgttggattggccatccggtgtgtaatagagcaattatctatttgtttgttggttacattccattaacatttaagtccctcaatacattacactacattttaaccctaaacgcaagaag

SEQ ID NO: 894 - DNA, 719 bp, Human poliovirus 1
  strain NIE1116622, complete genome.1
ccagaggcccacgtggcggctagtactccggtattacggtacccttgtacgcctgttttatactcccttccccgtaacttagaagaaccaaaccaagttcaatagaagggggtacaaaccagtaccaccacgaacaagtacttctgtttccccggtgaagttgtatagactgtacccacggttgaaaacgactgatccgttatccgctttcatacttcgagaagcctagtatcatcttggaatcttcgatgcgttgcgctcaacactcaaccccagagtgtagcttaggctgatgagtctggacgtccctcaccggcgacggtggtccaggctgcgttggcggcctacctgtggcccaaagcctcaggacgctagttgtgaacaaggtgtgaagagcctattgagctatgaaagagtcctccggcccctgaatgcggctaatcccaaccacggagcgagagtgtgcaaaccagcgcatttatcgtcgtaacgcgcaagtctgtggcggaaccgactactttgggtgtccgtgtttccttttatttttctacattggctgcttatggtgacaatcatagattgttatcataaagcgaattggattggccatccggtgaaagtgaaacatattattcacctccttgttggatttactccaatcaacctctccacttataagattatcatcacagtcttaccaaatagaagcatattcaaca

SEQ ID NO: 895 - DNA, 720 bp, Chicken picornavirus 1
  isolate 55C, complete genome.1
ctgcttaaggacgttcccggtgctgttgatgctttccgtcaggcagtggccgacttgcagaacttcctaccgaaccaccacctcacccccataactccttccctctacaccttccgctatggtggttaccactgctttattgccttgactgagaatggccaccccctcgacacctgccccctactgccccaccgcgcaaccttttgcttgtccactcggttggagaggcatgggggccccgttcatatccccagtccagttggtgaccttccccctccccgtccggtagatggtccagagggctttgccgacgccctctatgatgcttgcttgtctttcctccgtcagcgcgagcatgcacttgtcgagcccacggaaacacagcctagcttttgcttctctcaccctgcgtaccctgggcgccttccgctcgagattcgctttgttcgacaccctggcgtccccccaccgctacgtgattttactcgtggcatacaccgccctggcgttcagtacattccactgcctaatttgggtggcctccctcaatctcccgcaccccccattgcgcacgtcatcaccgccgccgctaacgcgatccggcgcggttctcactggcactgtcccctcgtccgccgggtttccactcatggttggcttttcacttattctggttactggtgttccatcctacttcatgatggtcgccatgaccatgac

SEQ ID NO: 896 - DNA, 721 bp, Rosavirus C
  strain RASK8F polyprotein gene, complete cds.1
gggatgggtctggtgctgcgccgcgtgtgtcttgacaccgcgctgctcaggatgcttctgccccgtgctttggacgcctaccagggcgttaaactggtcccccccttaccctttccccgtaactaagtttgtacctcccccatataggctgctaagacgcttgttgctacagcatatgtggatcagggagttctccatgagtaatcttttccaccctctctagtgtctatgctattgaggacgggttggagccccgttgacctagtgtcagagtgtgtcggtagcaggctttctgctctcgccccatgccggccacacctcccgtcagtaatgtgaagactgcaagttgcatgtgaaaaggtttctaatatttgagctgaatgtagcgattacccaaggtgagcggacttccccacgtggtaacacgtgcctctcaggccaaaagccaaggtgttaaaagcaccccttgggtagaccactaccccgtggtctcagttctcttagaagattcacttagtaatgtgtatactggcagctcccaagcagagctggcgagcgggctaaggatgccctgaaggtacccgcaggtaacgttaagacactgtggatctgatcaggggctcgagtgctgaagctttacagaggtagctcgagttaaaaaacgtctatgcccctcccccacgggagtgggggttcccccacaccaattttagattgcact

SEQ ID NO: 897 - DNA, 721 bp, Picornaviridae sp.
  isolate nut157pic2 genomic sequence.1
aaactattgggtgtcaattcagaaactgcagccaaagctgaggtggtaactgactcctcaagagcagcagctgttgcagcagcattctgggcaatttgatccaaaccagtcactctatcagttgccatttttcacaccatacataaaattttcaatggaataaaagggaaaatgctcaaacatgtttttcataattttaaacccataacctggtaaagccaaactatgggtcccagatcagattcataaaatgagtaccttttggagcttggaaactccttgggaaagatgctaaaggagtatctgttacaaggttggtaacctgtcctcttttataggcaaacaactcatacataaatgaccaagacaagatctcctttgacagaacttggatgagttacttttgttccctctgtgcccagggccttaggtatggtaacatacaccctgggggccaaaagcctagtgagtcgaaactcacctggaggtgggcctttacggccacttgtccattagtatgcattggatgctgtcctgtctgaactcatttatgtgtgcaagtcttgaacatgttgagtagacccccagaaggtactcattttatgaatctgatctgggacccatagtttggctttaccaggttatgggtttaaaattatgaaaaacatgtttgagcattttcccttttattccattgaaaattttatgtatggtgtgaaaa

SEQ ID NO: 898 - DNA, 721 bp, Coxsackievirus
  A4, isolate C019/CHW/AUS/2016 polyprotein gene,1
ccacccacagggcccactgggcgctagcacactgattctacggaaactttgtgcgcctgttttatacccctccccaaatgagtaacttagaagtttaatatgttcatgaccaatagcaggcgtgacacaccagtcacgtcttggtcaagcactcctgtttccccggactgagtatcaataagctgctcacgcggctgaaagagaaaacgttcgttacccggctaactacttcgagaaacctagtaacaccatgaaagttgcagagtgtttcgttcagcacttcccccgtgtagatcaggtcgatgagtcactgcaaaccccacgggtgaccgtggcagtggctgcgttggcggcctgcccatggggtaacccatgggacgctctaatacagacatggtgcgaagagtctattgagctagttagtagtcctccggcccctgaatgcggctaatcctaactgcggagcacataccctcaatccagagggcagtgtgtcgtaacgggcaactctgcagcggaaccgactactttgggtgtccgtgtttccttttatctcattatggctgcttatggtgacaattgaagaattgttaccatatagctattggattggccatccggtgtctaacagagcaattgtatttctatttgttggatttgttcctttgtcgcacacatctctcaatactttatactacattataaagttaaatacaggaag

SEQ ID NO: 899 - DNA, 721 bp, Echovirus
  E24, strain VEN/2018-23086, complete genome.1
cccacccatagggcccactgggcgctagcacactggtatcacggtacctttgtgcgcctgttttatttaccctcccccaactgaaaattagaagccaaactcaaacggtcaataggaaacccagtgaaccaactgggctgcgaccaagcacttctgttaccccggactgagtatcaataggctgctcgcgcggctgaaggagaaaacgttcgttacccggccaattacttcgagaaacctagtaccaccatgaaagttgcgaaacgtttcactccgcacaaccccagtgtagatcgggtcgatgagtcaccgcattccccacgggtgaccgtggcggtggctgcgttggcggcccgcccatggggcaacccatgggacgcttcaatactgacatggtgtgaagagtctattgagctaattggtagtcctccggcccctgaatgcggctaatcctaactgcggatcagacacccacacgccagtgggcagtctgtcgtaatgggcaactctgcagcggaaccgactactttgggtgtccgtgtttctttttatccttatactggctgcttatggtgacaattgaaagattgttaccatatagctattggattggccatccggtatctaacagagctattatttacttatttgttggtttcgtacctctcagtatcagagttttgagaacacttaacttcatactactgctaaacactgcaag

SEQ ID NO: 900 - DNA, 722 bp, Simian agent 5
  strain B165, complete genome.1
ttaaaatagcctgtgggttgctcccacccacagggcccaagtggcgtagtacttggtattccggtacctttgtacacctatttacaaaccctaccccttgtaaccttagaagcaattatttaaccgctcactagggggtgtgctatccaagcacatcaagagcaagcacttctgtctccccgggaggggctaatggtacgctgtgcccacggcggaaatgagccctaccgttaaccggcagtctacttcgggaagcccagtaactacattgaaactttgaggcgttacactcagcacataaccccaatgtgtagttctggtcgatgagccttggcatcccccacaggcgactgtggccaaggctgcgttggcggccagcctgcggaccaaaagtccgtaggacgcctaattgtggacatggtgtgaagagcctactgagctagactgtagtcctccggcccctgaatgcggctaatcctaaccctggagcatccgcgtgcaacccagtacgtagggtgtcgtaatgcgtaagtctgggatggaaccgactactttgggtgtccgtgtttcttgtttttcatactgggtcgcttatggttacaactaattgttgtaatcattggcagtgcgcgctgaccacgcgattattgatatttccatttgttggatactccaatagtgtcaactcatatacacaacttttaccactgatcaagataaaa

SEQ ID NO: 901 - DNA, 723 bp, Bat hepatovirus
  BUO2BF86Colafr2010 polyprotein gene, complete cds.1
ttcaaaagtccctccgggaatttcccggaggacttttgggccaccattgcaaggggtggttttaaccttgcacgcgtttaccgtgcgttaacggttttccatgtttgtatgtcttgtttgtattatgtgttttgtaaatattaattcctgcaggttcagggttctttaatcatgttgggctgtacccacactcaacttttggccataagtgagtttcttaacgaaccttttaacacaggatgttattagggcccaatattttccctgaggccttctttggcctctattttttccccttttctatctccttgtattccgggctcacgtgatgccaatggactgacccatgcgcccgtgggggttaactactggagtagccagtagctgtaggtgctaaaagtcacgtacgtgtaagactggacgagacctctcagctataactgaaagtagtaagtatgtctgaacttcttgaaggggtaggctacgggtgaaaccccttaggttaatactcatattgagagatacctctgataggtgaaggtttccggtagaggtgagtttaacgacaaagcctctcaacggatgtgggcccacctcatcagcaagatgctttcatacccaataccgtaggggctgggttgttgagttcagtcccaagcgtccctcccgcaaggttgtaggggtactcaggggcatttaggtttccacaattaaacaaataca

SEQ ID NO: 902 - DNA, 723 bp, Coxsackievirus
  A5, isolate C026/CHW/AUS/2016 polyprotein gene,1
ccacccacagggcccactgggcgttagcactctggtaccacggtacctttgtgcgcctgttttatccccccaaacccccgtaacactacactagaagatagacaatgcgaccaatagccagtggggcaacccagcctcaccttggtcaagcacctctgttttcccgggcttagtaccaataagctgctcgcgtggctgaaggggaacgcgctcgttatccggctaactacttcgagaaacctagtatcaccatggaagttgcagagtgtttcgatcagcacaaccccagtgtagatcaggccgatgagtcaccgtgtaccccacgggcgaccgtgacggtggctgcgttggcggcctgcccatggagtacaccatgggacgctctaatacagacatggtgcgaagagtctattgagctagttagtagtcctccggcccctgaatgcggctaatcctaactgcggagcacgcgctctcaacccagagagtagcgtgtcgtaacgggcaactctgcagcggaaccgactactttgggtgtccgtgtttctctttattcttacattggctgcttatggtgacaattgaaagattgttaccatatagctattggattggccatccggtgtgcaacagagctatcatatattcttttgttggctttgtgccactagattatactgcaattattactttaaggtatatcttgcttttgaacacagcaaa

SEQ ID NO: 903 - DNA, 723 bp, Echovirus
  E11, isolate E11-NHP-RD31, complete genome.1
ggttgcccacccacagggcccactgggcgctagcacactggtatcacggtacctttgtgcgcctgttttatccaccctccccaacgtaacttagaagcttatttaaaccgaccaacagacggtccagcataccagctgggttacggtcaagcacttctgttaccccggactgagtatcaataggccgctcgcgcggctgaaggagaaaacgttcgttacccggccaattacttcgagaaacctagtaccaccgtggaggtcgcgaagtgtttcgctccgcacaaccccagtgtagatcaggtcgatgagtcaccgcattccccactggcgacagtggcggtggctgcgtggcggcctgcccatggggtaacccatgggacgcttcaatactgacacggtgtgaagagtctattgagctaattggtagtcctccggcccctgaatgcggctaatcctaactgcggagcagatatccacgagccagtggacagtctgtcgtaatgggtaactctgcagcggaaccgactactttgggtgtccgtgtttccatttattcctatactggctgcttatggtgacaattgagagattgttaccatatagctattggattggccatccggtgacaaacagagcaattatatatctctttgttggttatattccactcaacattaaggttttaagaacgcttaattacatcctattgttaaacacattaag

SEQ ID NO: 904 - DNA, 723 bp, Echovirus
  E3, strain HAI/2016-23050 polyprotein gene, complete cds.1
ttcccactcacagggcccactgggcgctagcacactggtatcccggtacctttgtgcgcctgttttataccccctcctccaaccgtaacctagaagcagcaccatatggccaatagtagacgtggcgcaccagccacgttttggtcaagcacttctgtttccccgggccgagtatcaataggctgctcacgcggctgaaggagaaagcgtccgttacccggccaattacttcgagaaacctagtaccaccatggaagttgcgcggcgtttcgctccacacaaccccagtgtagatcgggtcgatgagtcaccgcatttccccacgggtgaccgtggcggtggctgcgttggcggcctgcccatgaggaaactcatgggacgcttcaatactgacatggtgtgaagagtctattgagctaattggtagtcctccggcccctgaatgcggctaatcctaactgcggagcagatgctcacaaaccagtgggtggtctgtcgtaatgggcaactctgcagcggaaccgactactttgggtgtccgtgtttccttttattttcacactggctgcttatggtgacaattgaaggattgttaccatatagctattggattggccatccggtgacaaacagagcgattgtctatctatttgttggttttgtaccattagatttcaaagtcctgaaaaccctcaatttcgtcttaacactcaattcggcaag

SEQ ID NO: 905 - DNA, 723 bp, Enterovirus B
  isolate HB92, complete genome.1
tgatcccacccatagggcccactgggcgccagcacactggtattacggtacctttgtgcgcctgttttatctaccccccccaacgcaactcagaagctcaactgaaccgaccaatagatgacccggcaagccagcagggccctggtcaagcacttctgttaccccggactgagtatcaataagctgctcgcgcggctaaaggagaaaacgttcgttacccggccaattacttcgagaaacccagtaccaccgtgaaagttgcgcagtgtttcgctccgcacaaccccagtgtagatcaggccgatgagtcaccgcattccccactggtgacagtggcggtggctgcgttggcggcctgcccatggggcaacccatgggacgcttcaatactgacacggtgcgaagagtctattgagctaattggtagacctccggcccctgaatgcggctaatcctaactgcggagcagatacccacgcgccagtgggcagtctgtcgtaatgggcaactctgcagcggaaccgactactttgggtgtccgtgtttccttttattcttatactggctgcttatggtgacaattgaaagattgttgccatatagctattggattggccatccagtgactaacaaagcaattgtctatctatttgttggttttataccattaaactacaaagctataagcacactcaaatttatattggtactcaactcagcaaa

SEQ ID NO: 906 - DNA, 724 bp, Coxsackievirus
  A5, isolate C027/CHW/AUS/2016 polyprotein gene,1
ccacccgcagggcccactgggcgccagcactctgattctgcggaatctttgtgcgcctgttttataaccccttccccaaatttgcaatttagaagcaaagcacactaacgatcaacagcaggcgtggcataccagctacgtcacgatcaagcacttctgtttccccggactgagtatcaataagctgcttgcgcggctgaaggagaaaatgtccgttatccggctaactacttcgagaaacctagtagcaccattgaagctgcagagtgtttcgctcggcacttcccccgtgtagatcaggtcgatgagtcactgcactccccacgggcgaccgtggcagtggctgcgttggcggcctgcctatggggcaacccataggacgctctaatgtggacatggtgtgaagagtctattgagctagttagtagtcctccggcccctgaatgcggctaatcctaactgcggagcgcatgcccccaaaccagggggaggtgcgtcgtaatgggcaactctgcagcggaaccgactactttgggtgtccgtgtttccttttatctttatattggctgcttatggtgacaattgagagattgttaccatatagctattggattggccatccggtgagcaatagagcaattatttattcctttattggatttgtaccgttgaattatactgcttttattacactgaaacacatcctattgttgaacacaataaa

SEQ ID NO: 907 - DNA, 724 bp, Enterovirus sp.
  C96, isolate 3499/BRA-PA/10, complete genome.1
ggggttgttcccaccccagaggcccacgtggcggccagtacaccggtatcacggtacccttgtacgcctgttttatactcccttccccgtaacttagaagtaacaaacctatgttcaatagaagggggtacaaaccagtaccaccacgaacaagcacttctgtttccccggtgagatcacatagactgttcccacggttgaaagtgatcgatccgttatccgctcttgtacttcgagaagcctagtattatcttgggaccaacgatgcgttgcgatcagcactcgaccccagagtgtagcttaggtcgatgagtctggacattcctcaccggtgacggtggtccaggctgcgttggcggcctacctgtggcccaaagccacaggacgctagttgtgaacaaggtgtgaagagcctattgagctacatgagagtcctccggcccctgaatgcggctaatcctaaccacggagcaggcgattgcaaaccagcaattagcttgtcgtaatgcgtaagtctgtggcggaaccgactactttgggtgtccgtgtttccttttattttatcaatggctgcttatggtgacaatcatagattgttgtcataaagcgaattggattggccatccggtgacgttcagagttatttgtttgtgaaattcattctctcaatcctgtccacatttgacatacttccttaaatctttatacagaacaccttaacaca

SEQ ID NO: 908 - DNA, 724 bp, Enterovirus sp.
  C99, strain 10L1 polyprotein gene, complete cds.1
caccccagaggcccacgtggcggctagtactccggtatcacggtacccttgtacgcctgttttatgctcccttccccttgtaacttagaagcaaacaacactagttcaataggagggggtacaaaccagtaccaccacgaacacgcacttctgtttccccggtgaagctgcataagctgttcccacggctgaaagcgactgatccgtcatccgctcaggtacttcgggaagcctagtaccatcttggaatcttcgatgcgttgcgctcagcactcaaccccagagtgtagcttaggctgatgagtctggatgtgcctcactggtgacagtggtccaggctgcgttggcggcctacccatggcccaaagccatgggacgctagttgtgaacaaggtgtgaagagcctactgagctacctgagagtcctccggcccctgaatgcggctaatcccaaccacggagcgagtgcccacaatccagtgagtggctcgtcgtaatgcgcaagtctgtggcggaaccgactactttgggtgtccgtgtttccttttaaccttattatggctgcttatggtgacaatcatagattgttatcataaagcgaattggattggccatccggtgaaagtcagaacgctaatttatctgtttgttggatacaccaaagttaactgcaatacactaaccttgattcgcatagtgttgttaattagatatcattaccaca

SEQ ID NO: 909 - DNA, 725 bp, Tasmanian devil-associated sapelovirus
  isolate1
tggggaggtgcctcctccccattgcagagtgctttgtcctacgggtcaagtacctgccgttgttggtgttcccacgggtgcagtcagcaaagcccccttttcgccccttccccctcacctaacctttttcccctctctttggcaagcgatgaaaggattacgagcaaggtttgcggaagaattgttatggcgattgcggaagaatatggattaaggattttccacgtaccttagatgatcataggtggctttcacctctggaccagtgatcaaacgtggaccatagtttaagtgaagtaagcatgttccaggtgaaaacgcatattgaaatgaacgtgtctgtagcgacctccaagtgcgcatggcctcccatgatggtgacatcatccatgcggaccaaaagtcaagtgtgcagtgacgtgcgaataatagactgtacccacggttgaagattcgcacggcatgagttcaccacttggagcggccgaccccgggccacacgggattggagatgtgcttgagtaatctggaagaggcttatataaacactctatgggggctgtgaagaatgccatgcaggtaccctcacacagaggatctgagcattgggccacggagacgatctataaactcgaagtggttgaaaagtatctaagcagcccgcaaggggcccatggttgggcccctctattttccccttattattttatcagtggtgacaatag

SEQ ID NO: 910 - DNA, 725 bp, Coxsackievirus
  A4 gene for polyprotein, polyprotein region,strain1
ttcccacccacagggcccactgggcgctagcacactgattctacggaaactttgtgcgcctgttttatacctcctccccgaagagtaacttagaagcttaacatacccatggccagcagcaggcgtgacataccagtcatgccccggtcaagcacttctgtctccccggactgagtatcaatagactgctcgcgcggttgaaggagaaaacgttcgttatccggctaactacttcgagaaacctagtaacaccatgaaagttgcagagtgtttcgttcagcacttcccccgtgtagatcaggtcgatgagtcactgcaaaccccacgggcgaccgtggcagtggctgcgttggcggcctgcccatgggaccacccatgggacgctctaatacagacatggtgtgaagagtctattgagctagttagtagtcctccggcccctgaatgcggctaatcctaactgtggagcacacgccctcaacccagggggtagtgtgtcgtaatgggcaactctacagcggaaccgactactttgggtgtccgtgtttccttttatctttatattggctgcttatggtgacaattgaagaattgttaccatatagctattggattggccatccggtgtctaatagagcaattgtatacctatttgttggatttgtccccttgtcatacacatctataaacaccctacaatatattgtaaaattgaatacaggaaa

SEQ ID NO: 911 - DNA, 725 bp, Coxsackievirus
  A4, isolate C040/CHW/AUS/2016 polyprotein gene,1
ccacccacagggcccactgggcgttagcacactgattctaaggaatctttgtgcgcctgttttatatccctcccccccaaaagtgtaacgtagaagtttaatacactcacgaccaatagcaggcgtgacgcaccagtcacgtcttggtcaagtacttctgtctccccgggccaagtatcaatagactgcttacgcggttgaaggagaaaacgctcgttacccggctaactacttcgagaaacccagtagcaccatgaaagttgcagggtgtttcgttcagcacttcccccgtgtagaccaggtcgatgagtcactgcaaaccccacgggcgaccgtggcagtggctgcgttggcggcctgcccatggggtaacccatgggacgctctaatacagacatggtgtgaagagtctattgagctagttagtagtcctccggcccctgaatgcggctaatcctaactgcggagcacacaccctcaacccagggggcggtgtgtcgtaacgggtaactctgcagcggaaccgactactttgggtgtccgtgtttccttttatatttattatggctgcttatggtgacaattgaagaattgttaccatatagctattggattggccatccggtgtctaacagagcaattgtatacctatttgttggatttgtccctctgtcacacacacctctcaataccctatactatattatagagttgaatacaggaag

SEQ ID NO: 912 - DNA, 725 bp, Coxsackievirus
  A10, strain 13-2591-2, complete genome.1
ttgctcccacccacagggcccactgggcgctagcaccctggtgccacggcacctttgtgcgcctgttttatcaccctaccccatatgaaacttagaagtaatacatagccgaccaatagcaggtgtggcgtgccagccacatcttggtcaagcacttctgtttccccgggtcgagtatcaataagctgttcacacggctgaaggagaaaacacccgttatccggccaactacttcgagaaacctagtaccaccatgaacgttgcaaggtgtttcgctcagcacttcccccgtgtagatcaggccgatgagtcaccgcataccccacgggtgaccgtggcggtggctgcgttggcggcctgcctatgggttaacccataggacgccttaatactgacatggtgcgaagagtctattgagctagttggtagtcctccggcccctgaatgcggctaatcctaactgcggagcacacactcacaaaccagtgagcggtgtgtcgtaacgggcaactctgcagcggaaccgactactttgggtgtccgtgtttccttttacctttatattggctgcttatggtgacaatcagagaattgttaccatatagctattggattggccatccggtgtctaatagagctattgtatatctgtttgttggattcactccgctgacctacaaatctctaaacaccttgtgctatattttgaatctaaatacacgaaa

SEQ ID NO: 913 - DNA, 725 bp, Enterovirus sp.
  isolate CPML_8109/08, complete genome.1
ttaaaatagcctgagggttgttcccacccacagggcccacgtggcgcagtactctggtatcacggtacctttgcacgcctattttataccccttccccatcgtaacttagaagcaacaaacaaactgcccaatagcagcacaacacccagttgtgttaggggcaagcacttctgtttccccggaagggtctgacggtatgctgtacccacggcagaagtatgacctaccgttaaccggccatgtacttcgagaagcctagtaccattatgaaggttgattgatgttacgctccccagcaaccccagctggtagttctggtcgatgagtctcggcattccccacgggcgaccgtggccgaggctgcgttggcggccagcctacaccatacggtgtaggacgtcaagatactgacatggtgtgaagagcctattgagctacgtggtagtcctccggcccctgaatgcggctaatcctaactccggagcatccgccagtaagcccactggaagggtgtcgtaatgcgaaagtctggagcggaaccgactactttgggtgtccgtgtttcctgttttacttattgtttggctgcttatggtgacaacttatagttatcatcataagctacttggtcttgccaaccggagaattatttggttatttgttggtttcataaacctacagtcgtattttcctgtcttattaattgttctcaaaattaacaaca

SEQ ID NO: 914 - DNA, 725 bp, Enterovirus sp.
  D, isolate EV-D111_CAF-NGB-06-107 polyprotein gene,1
ttcccaccctagaggcccacgtggcggctagtactctggtattacggtacctttgtacgcctgttttatattccttcccctatcgtaacttagaagtttcaaacacagctcaacagacagtagtacataccagtactgctacgagcaagcacttctgttaccccggtgaagtcacatagactgtgcccacggttgaaagtgactgatccgttacccgctttagtacttcgagaagcctagtaatatcttggaatcttcgatgcgttgcgctcaacactcaaccccagagtgtagcttaggtcgatgagtctggacactccccaccggcgacggtggtccaggctgcgttggcggcctacctgtggcccaaagccacaggacgctagttgtgaacaaggtgtgaagagcctattgagctactaaagagtcctccggcccctgaatgcggctaatcccaaccacggagcaagtgctcacaatccagtgagtggcttgtcgtaacgagcaattctgtggcggaaccgactactttgggtgtccgtgtttccttttatttttatcattggctgcttatggtgacaatctaagattgccatcatatagcttttggattggccatccggtgatattttgaattactcagcttgctgttcacagcactcttcaaatagtaattatttattaccacctgcagtttgttcttaaattgtctccagacagtcaaa

SEQ ID NO: 915 - DNA, 725 bp, Enterovirus sp.
  B, isolate E-19_CAF-BAN-05-150a polyprotein gene,1
atcccacccacagggcccattgggcgctagcacaccggtattacggtacccttgtgcgcctgttttatacaccctacccccaaaacgtaatttagaagcaagtcaacaaagaccaatagcaagcacggcacaccagctgtgttttggtcaagcacttctgttaccccggactgagtatcaataggctactcacgtggctgaaggagaaaacgttcgttatccgtccaattacttcgagaagcctagtaacaccatagaggttgcgcagcgtttcgctccgcactaccccagtgtagatcaggtcgatgagtcaccgcattccccacgggtgaccgtggcggtggctgcgttggcggcctgcccatggggcaacccatgggacgcttcaatactgacatggtgcgaagagcctattgagctaattggaagtcctccggcccctgaatgcggctaatcctaactgcggagctggtacccacaaaccagtgggtggccagtcgtaacgggcaactctgcagcggaaccgactactttgggtgtccgtgtttcattttattcctatactggctgcttatggtgacaattgaaagattgttgccatatagctattggattggccatccggtgacaaataaagcgattgtttatcagttcattggtttcgtaccgctaaactacacaacattaaacaccctcaactttatcctattgctcaacacaacaag

SEQ ID NO: 916 - DNA, 726 bp, Coxsackievirus
  A6 gene for polyprotein, polyprotein region,strain1
gtacccaccctcagggcccactgggcgctagcactctgattctgcggaatccttgtgcgcctgttttataaccctcccccgattcgtaacttagaagcaatgagcctcactgatcaacagtaggcgcggcgcaccagccgtgtcttgatcaagcactcctgtttccccgggctgagtatcaatagactgcttgcgcggttgaaggagaaaacgctcgttacccggctaactacttcgagaaacctagtagcaccatcgaaattgcagagtgtttcgctcagcacttcccccgtgtagatcaggtcgatgagtcactgcaacccccacgggcgaccgtggcagtggctgcgttggcggcctgcctatggggcaacccataggacgctctaaaatggacatggtgtgaagagtctattgagctagttagtagtcctccggcccctgaatgcggctaatcctaactgcggagcgcatgcccccaaaccagagggtggtgcgtcgtaacgggcaactctgcagcggaaccgactactttgggtgtccgtgtttccttttattcttactatggctgcttatggtgacaattgaagaattgttaccatatagctattggattggccatccggtgtctaatagagctattgtatatttatttgttggatttgttccattgacatatacatcacttaatacattaaacttcattgtgagattaaacacaagaaa

SEQ ID NO: 917 - DNA, 726 bp, Enterovirus sp.
  C96, strain XZ94-XZ-CHN-2012, complete genome.1
ttaaaacagctctggggttgttcccaccccagaggcccacgtggcggccagtacaccggtatcacggtacccttgtacgcctgttttatactccctaccccgtaacttagaagcattgactcaagttcaatagtaggggtacaaaccagtaccaccacgaacaagcacttctgtttccccggtgatgtcgtatagactgtacccacggttgaaagtgacagatccgttacccgcttttgtacttcgagaagcccagtaccaccttggaatcttcgatgcgttgcgctcagcactcaatcccagagtgtagcttaggtcgatgagtctggacgttcctcaccggcgacggtggtccaggctgcgttggcggcctacctgtggcccaaagccacaggacgctagttgtgaacaaggtgtgaagagcctattgagctacaaaagagtcctccggcccctgaatgcggctaatcctaaccacggagcaggtgatcacaagccagtgattagcctgtcgtaatgcgcaagtctgtggcggaaccgactactttgggtgtccgtgtttccttttatttcatttatggctgcttatggtgacaatcatagattgttgtcataaagcgaattggattggccatccggtgagagtttagcgctttatttgtctgctcatcgaacttgcacttttgaattcttaccccttgcaccttattagacagtggtatcatc

SEQ ID NO: 918 - DNA, 726 bp, Enterovirus sp.
  C96, isolate SZ/GD/CHN/2015, complete genome.1
gttcccaccccagaggcccacgtggcggccagtacaccggtattacggtacccttgtacgcctgttttatactccctaccccgtaacttagaagcaaaaactcaagttcaatagcaggggggtacaaaccagtaccaccacgaacaagcacttctgtttccccggtgacttcgcataaactgtacccacggttgaaagcgatagatccgttatccgcttttgtacttcgagaagcctagtaccatcttggaatcttcgatgcgttgcgatcagcactcaaacccagagtgtagcttaggtcgatgagtctggacgatcctcaccggcgacggtggtccaggctgcgttggcggcctacctgtggtccaaagccacaggacgctagttgtgaacaaggtgtgaagagcctattgagctacaaaagagtcctccggcccctgaatgcggctaatcccaaccacggagcaggcgatcacaacccagtgactagcctgtcgtaatgcgcaagtctgtggcggaaccgactactttgggtgtccgtgtttctctttattccattaatggctgcttatggtgacaatcatagattgttatcataaagcgattcggattggccatccagtgaaaatcaagtgtactactcacttatttattgagtttacaactctaacccatcactcactacaacccattttattgtgtcactatccagacagtggtatcatc

SEQ ID NO: 919 - DNA, 726 bp, Echovirus
  E7, strain HAI/2016-23084 polyprotein gene, complete cds.1
ttcccacccacaaggcccaccgggcgttggcacactggtatcacggtacctttgtgcgcctgttttaaaacccctacccccaaacgcaacttagaagataagcacacagtccaatagagggcgtggcactccagccatgtcttggacaggcactcctgttaccccggactaagtaccaataaactgctcacgcggttgaaggggaaaacgttcgttatccggctaactacttcgaggaacctagtaacaccgtgaaagttgcagagtgtttcgctcagcacaaccccagtgtagatcaggtcgatgagtcaccacgttccccacgggcgaccgtggtggtggctgcgctggcggcctgcctatgggtcaacccataggacgctctaacacagacacggtgtgaagagtcgattgagctagttagtagtcctccggcccctgaatgcggctaatcctaactgcggagcgtgcgtccccaaaccaggagatagcgcgtcgtaacgggcaactctgcagcggaaccgactactttgggtgtccgtgtttccttttttttacctctatttggctgcttatggtgacaattgaagaattgttaccatatagctattggattggccatccggtgactaatagagctattgtttacctctttgttggttttgtaccactgaacctcatagttctaaatacccttaatttgattttagtgcttaacacatcaaa

SEQ ID NO: 920 - DNA, 727 bp, Human enterovirus 70
  strain J670/71, complete genome.1
ttaaaacagctctggggttgttcccaccccagaggcccacgtggcggctagtactccggtaccccggtacccttgtacgcctgttttatactccctttcccaagtaactttagaagaaataaactaatgttcaacaggagggggtacaaaccagtaccaccacgaacacacacttctgtttccccggtgaagttgcatagactgtacccacggttgaaagcgatgaatccgttacccgcttaggtacttcgagaagcctagtatcatcttggaatcttcgatgcgttgcgatcagcactctaccccgagtgtagcttgggtcgatgagtctggacaccccacaccggcgacggtggtccaggctgcgttggcggcctacccatggctagcaccatgggacgctagttgtgaacaaggtgcgaagagcctattgagctacctgagagtcctccggcccctgaatgcggctaatcccaaccacggagcaaatgctcacaatccagtgagtggtttgtcgtaatgcgcaagtctgtggcggaaccgactactttgggcgtccgtgtttccttttatttttattatggctgcttatggtgacaatctgagattgttatcatatagctattggattagccatccggtgatatcttgaaattttgccataactttttcacaaatcctacaacattacactacactttctcttgaataattgagacaactcata

SEQ ID NO: 921 - DNA, 728 bp, Enterovirus sp.
  D, isolate EV-D111_CAF-BAN-06-150 polyprotein gene,1
ttcccaccctagaggcccacgtggcggctagtactctggtattacggtacctttgtacgcctgttttatatccctttccccattgtaacttagaagtttcaaagtacagttcaatagacagtagtacaaaccagtactgctacgaacaagcacttctgttgccccggtgtagttgcatagactgtacccacggttgaaagcaactgatccgttatccgctttagtacttcgagaagcctagtagcaccttgggatcttcgatgcgttgcgctcagcactcaaccccagagtgtagcttgggtcgatgagtctggacattcctcaccggcgacggtggtccaggctgcgttggcggcctacctgtggcccaaagccacaggacgctagttgtgaacaaggtgtgaagagcctattgagctactaaagagtcctccggcccctgaatgcggctaatcctaaccacggagcaagtgctcacagtccagtgagtagcttgtcgtaatgagcaattctgtggcggaaccgactactttgggtgtccgtgtttccttttatttttatcattggctgcttatggtgacaatctaaggttgccatcatatagcttttggattggccatcccggtgatatttcgaattattcaatttgctgtttgcagctccttttaaacagtattcactcaccagcattcatattttactcttgagttattaacaaatagtcaaaa

SEQ ID NO: 922 - DNA, 729 bp, Bovine kobuvirus
  strain SC1 polyprotein gene, complete cds.1
attcccaaggcccactcggttcaacttcggtttccggacaaatataaagaacctcagtcctcttggtactttctcgcctgagtcaacaaagcgagaaacctgcccctccagcgccagacgagcggcataaaacttgaacttctggcatgctccaccacccttttccccattccaacccccattgcgctctcaaggtcgcgctttttcgagactagctcggattcaaaagttcctggcaccctttgccccttcaggcccttaaggtaggaactgaccttgtgctgtgccctcggtgcggaagtgctactgcgtagcgattgtaagatccctttgtggttctgccctggcaaggttatagagtactgtgatccgctgcggatgccatcctggtaacaggacccccagtgtgcgcaacagtatgttcacggtcttccgtgtccaccacattcggaacactgctctcgtgaaacagtgtgtgtccaatccctgcaatcagtatcaactacaccacctaggaatgctaggaaggtaccccggtccgccgggatctgatcctaggctaattgtctacggtggtgctcctttttattttccacttcaattcattggttacaactgctcgatccctgtgtttgctgcccttctctgctctcatcgccattctcaagtgttcacactgtccaagttcctttggttgttcgcttccacttgccactgtcaactcttgtc

SEQ ID NO: 923 - DNA, 729 bp, Coxsackievirus
  A10, strain 17-118-2, complete genome.1
gttgcacccacccacagggcccaccgggcgctagcactctgattttacgaaatctttgtgcgcctgttttatatccccttccctattcgtaacttagaagtaatgagcaacaacgatcaatagcaggcgtggcgcaccagccatgtcttgatcaagcacttctgttaccccggactgagtatcaatagactgctcacgcggttgaaggagaaaacgttcgttacccggctaaccacttcggaaaacctagtagcaccattgaagctgcagagtgtttcgctcagcacttcccccgtgtagatcaggtcgatgagtcactgcaacccccacgggcgaccgtggcagtggctgcgttggcggcctgcctatggggtaacccataggacgctctaatgtggacatggtgtgaagagtctactgagctggttagtagtcctccggcccctgaatgcggctaatcctaactgtggagcgcacactctcaaaccagggagcagtgcgtcgtaacgggcaactccgcagcggaaccgactactttgggtgtccgtgtttccttttatccttatattggctgcttatggtgacaatcacggaattgttgccatatagctattggattggccatccggtgtctaatagagctattgtgtacctatttgttggatttactccactgtcatataaatctctgaacactttgtgctttatattgaacttaaacacacgaaa

SEQ ID NO: 924 - DNA, 729 bp, Human poliovirus 3
  isolate Env08_E2886 polyprotein gene, complete1
ttaaaaacagctctggggttgttcccaccccagaggcccacgtggcggctagtactctggtattacggtacctttgtacgcctgttttatatcccctttcccctgtaactcagaagcatgaagtttaagctcaacaggaggggtgcaaaccagcacctctacgagcaagcactactgtttccccggtgaagttacatagactgttcccacggttgaaagtgattgatccgttatccgctcatgtacttcgagaagcctagtatcgctctggaatcttcgatgcgttgcgctcaacactcgaccccggagtgtagcttaggccgatgagtctggacattccccactggcgacagtggtccaggctgcgttggcggcctacctgtggtccaaagccacaggacgctagttgtgaacagggtgtgaagagcctattgagctgcatgagagtcctccggcccctgaatgcggataatcctaaccatggagcaggcaactgcaacccagcagtcagcctgtcgtaacgcgtaagtccgtggcggaaccgactactttgggtgtccgtgtttccttttatttttgaatggctgcttatggtgacaatcacagattgttatcataaagcaaattggattggccatccagtgaatcactaccgagtttgttaaatctatttcagagacacacaactcctcaacgcactatacctaaacagaggattatactacagcg

SEQ ID NO: 925 - DNA, 729 bp, Coxsackievirus
  A9, strain USA/2015/CA-RGDS-1050, complete genome.1
catgctcccacccatagggcccactgggcgtcagcacactggtattgcggtacctttgtgcgcctgttttatccaccccaccccctcaacgtaacttagaagcacatcccacacggtcaatagttggctcgataagccaatcgagtctggatcaagcacttctgttaccccggactgagtatcagtaagctgcttgcgcggctgatggagaaaacgttcgttacccggccatttacttcgggaaacctagtaccaccatgaatgttgcgcagcgtttcgctccacactaccccagtgtagatcaggtcgatgagtcactgcataccccacgggcgaccgtggcagtggctgcgctggcggcctgcccatggggcaacccatgggacgcttcaatactgacatggtgcgaagagtctactgagctaagtggtagtcctccggcccctgaatgcggctaatcctaactgcggagcagatacccacgaaccagtgggcagtctgtcgtaatgggcaactctgcagcggaaccgactactttgggtgtccgtgtttccttttattctaatactggctgcttatggtgacaattgaacgattgttaccatatagctattggattggccatccggtgacaaacagagcgattatatactcatttgttgggttcgtaccacttaattacaaagttctaaacacccttaactatatactagcactcaacacatcaaa

SEQ ID NO: 926 - DNA, 730 bp, Hedgehog hepatovirus
  isolate Igel68Erieur2014 polyprotein gene,1
ttcaaaggcggtgtcccggattgtttccgggccgcctttgggcaaccatgatgaggggttgtaaatcacctcatccccgtttgcctagggtgataggctttttatgttttatgtttgttggtctagttcgtcaattgtaaatattgatttctgcaggttcagagttcttaattatgttcctctataaggacactctctttaagtctaggccataagtgatcctagagataggtgaacctttcatatctggtctatgttagggcctttatatccctaggggcaatctttgtgccccttatttctcctatctttcttcttttcttccgggctctcacggtgccaatggaacgaccggtgcgcccgccggggttaactccaagattagcttggagctgtagttgctaaaagccgtgatgaaggaagcagactatcaagttagttaggtgttaactgaaacatgaattctattatgatctttgtgagtgggtaggctacgggtgaaacccactaggttaatactcatattgagagatacctccattaggctaaggttggcggtaaaggtgagtttaacgacgtatcctttcaacgcctgtgggccggtctcaatggcacaatgcgtagtagatgaagtgtgtagggcctactaaggagatgctctgtggaattcaccctcccgaaaggtcgtaggggtactcaggggcatttaggtttccacattttaaatttc

SEQ ID NO: 927 - DNA, 730 bp, Simian enterovirus 46
  strain RNM5, complete genome.1
tttaaaacagcctgtgggttgtacccactcacagggcccacgtggcgttagtactctggtatcacggtacctttgtatgcctgttttatctcccttcccccgtaacgttagaagaataaacaaatgacaactagcaaatccaccaacccaggtgggttttcgtcaagcacttctgtttccccggacttagtaccaataggctgtacccacggctgaaggggaaaatgttcgttacccggctacctacttcgaaaagcctagtaccaccaatgattgtctcaagtgttacgttcagcacaaccccagtgtagttcaggccgatgagtcaccgaattccccacgggcgaccgtgtcggtggctgcgttggcggcctgcctgcgggtttcacccgcaggacgcttgattcatgacatggtgcgaagagcctattgagctaggtagtagtcctccggcccctgaatgcggctaatcctaaccacggagcattcactggcaaaccagccagcagaatgtcgtaatgggtaactctgtggcggaaccgactactttgggtgtccgtgtttcctgttttacttattttggctgcttatggtgacaatttacggattgttaccatatagctattggattggccatccggattattgcaatactactatttgtgggatttctccctttgtgttataataactaccccattctaacattagctctcaagtttaatacact

SEQ ID NO: 928 - DNA, 730 bp, Coxsackievirus
  A2, strain 63041-775 polyprotein gene, complete cds.1
tgcacccacccacggggcccactgggcgccagcactctgattctacggaatccttgtgcgcctgttttataaccccccccctcaattaggtaacatagaagttagaaacatatatggccaatagcaggcgtggcgcaccagtcgcgtctcggtcaagcacttctgtttccccggactgagtatcaataagctgctcgcgcggctgaaggagaaaacgttcgttatccggctaactacttcgagaaacctagtagcaccatgaaagttgcggagtgtttcgctcagcacttcccccgtgtagatcaggtcgatgagtcactgcattccccacgggcgaccgtggcagtggctgcgttggcggcctgcctatggggtaacccataggacgctctaatacggacatggtgcgaagagtcaattgagctagttagtagtcctccggcccctgaatgcggctaatcctaactgcggagcacataccctcaatccagggggcggtgtgtcgtaatgggcaactctgcagcggaaccgactactttgggtgtccgtgtttccttttattcttatattggctgcttatggtgacaattgagagattgttaccatatagctattggattggccatccggtgtccaacagagctctggtttacttgttcgttggctttatacctctgtcacccacagtttattcaactctagtgttcttaatacgccttaacagtaagag

SEQ ID NO: 929 - DNA, 730 bp, Coxsackievirus
  A10, strain 61216-2814 polyprotein gene, complete1
gttgcacccacctacagggcctactgggtgctagcactctgattctacggaatctttgtgcgcctgttttataaccccctccccaatttgtaacttagaagcaatgaaccccatcgatcaatagcaggcataacgcaccagttatgtctcgatcaagcacttctgttttcccggactgagtatcaatagactgcttgcgcggtcgaaggagaaaacgttcgttacccggctaactacctcgagaagcctagtagcaccactgaaactgcagagtgtttcgttcaacacttcccccgtgtagatcaggtcgatgagtcactgctctccccacgggtgaccgtggcagtggctgcgttggcggcctgcctatggggtaacccataggacgctctgaagtggacatggtgtgaagagcctattgagctagttagtagtcctccggcccctgaatgcggctaatcctaactgtggagcgcatgccctcaaaccagggggtggtgcgtcgtaacgggtaactccgcagcggaaccgactactttgggtgtccgtgtttccttttattatcctattggctgcttatggtgacaattaaagaattgttaccatatagctattggattggccatccggtgtgtaatagagcgattatctacctatttgttggatacattccgttaacattcaaatctctcaacacattatactacattctgaccttgaacacaagaaa

SEQ ID NO: 930 - DNA, 730 bp, Enterovirus C
  strain EQG1419332, complete genome.1
ggggttgttcccaccccagaggcccacgtggcggctagtacactggtatcacggtacctttgtacgcctgttttatactccttcccccgcaatttagaagcatacaattcaagctcaataggagggggtgcaagccagcgcctccgtgggcaagcactactgtttccccggtgaggccacatagactgttcccacggttgaaagtgtccgatccgttatccgctcatgtacttcgagaagcctagtatcgctctggaatcttcgacgcgttgcgctccacactcagtcccagagtgtagcttaggctgatgagtctggacattcctcaccggcgacggtggtccaggctgcgttggcggcctacctgtggcccaaagccacaggacgctagatgtgaacaaggtgtgaagagcctattgagctataagagagtcctccggcccctgaatgcggctaatcccaaccatggagcaggcagccgcaatccagcagccagcctgtcgtaacgcgcaagtctgtggcggaaccgactactttgggtgaccgtgtttccttttattatttcaatggctgcttatggtgacaatcatagattgttatcataaagcgagttggattggccatccagtgtgaatcggattatttactcccttgtttgttggattcactcccgaaacgttttaccccttaacttattgaaattgtttgaagacaggatttcagtgtcaca

SEQ ID NO: 931 - DNA, 731 bp, Salivirus A
  strain YZ01, complete genome.1
gtgtttctcccccctttcgaccgccctatggcaggcgggcttgtggacggcttcggcccacccacagcaagaatgccatcatctgtcctcacccccatcttcccctttcttcccctgcaaccgtcacgcttactcacatgtgcattgagtggtgcacgtgttgaacaaacagctacactcacatggggcgggttttcccgccttgcggcctctcgcgaggcccacccctccctctcctcccataactacagtgctttggtaggtaagcatcctgatcccccgcggaagctgctcacgtggcaactgtggggacccagacaggttatcaaaggcacccggtctttccgccttcaggagtatccctgctagtgaattctagtagggctctgcttggtgccaacctcccccaaatgcgcgctgcaggagtgctcttccccaactcaccctagtatcctctcatgtgtgtgcttggtcagcatatctgagacgatgttccgctgtcccagaccagtccagtaatggacgggccagtgtgcgtagtcgtcttccggcttgcccggcgcatgtttggtgaaccggtggggtaaggttggtgtgcccaacgcccgtactttggtgatacctcaagaccacccaggaatgccagggaggtaccccgcttcacagcgggatctgaccctgggctaattgtctacggtggttcttcttgcttccacttctttctactgttt

SEQ ID NO: 932 - DNA, 731 bp, Enterovirus sp.
  isolate CPML_3961/08, complete genome.1
ttaaaatagcctgagggttgctcccacccacggggtccacgtgacgtagtactctggtatctcggtacctttgtacgcctattttatatccccttccccctttgtaacttagaagaaataagcaaactgcccaatagcggcacaatacccaattgtgttacgggcaagcactcctgtttccccggaagggtctatcggtatgctgtacccacggcagaagtatgacctaccgttaaccggccatgtacttcgagaagcctagtaccaccatgaaggttgattgatgttacgttccccagcaaccccagctggtagttctggtcgatgagtctcggcatcccccacgggcgaccgtggccgaggctgcgctggcggccagcctacacctctttggtgtaggacgtcaagatattgacatggtgtgaagagcctattgagctacgtggtagtcctccggcccctgaatgcggctaatcctaactccggatcgtccgctggcaatcccgccagaagggcgtcgtaatgcgcaagtctggagcggaaccgactactttgggtgtccgtgtttcctgttttatttactgtttggctgcttatggtgacaacttatagttatcatcataagctacttggtcttgccaaccggagaataatttggttatttgttggttttacaaacctacaagagtcagtactcatcctattaattgttctaagaataaacacacaag

SEQ ID NO: 933 - DNA, 732 bp, Bovine hungarovirus 1
  strain BHUV1/2008/HUN, complete genome.1
tcgcccctcctttccccccttattttcccttttccctctctccctccctttgtaacttaacgtttggcaagaaccctcacctgtcaattgggaccaccactttcagtgaccccatgcgaagtagtgagagagaataagctttcttacccttcatttgtgaacccttcagtcgaagccgcttggaataagataggaggaaaagttcattctaaatggagtgaaacatgtacttcagaatttctagcacgcgctgggctttcttgcgtgtgacggcactgtcttgccggagctctccacactgacaccccacgcttgtggaccttggtggcagatgacaacactgcagctggaattgagtgtctggtacactctgtgtaacagtgaaaacaatgtgatcacttcggtgagctagtagcctgtggaccaacaactggtaacagttgcctcaggggccaaaagccacggtgtttacagcaccctactggtttgattggagcaatccaagatgtcacagagttagtaattgccaagcagtccgtactggtatcttgacataccgtgcagttttggatagtgaaggatgccctgacggtacccataggtaacaagtgacactatggatctaagcaggggctcactctacgctgctttacagctggctgtgagttaaaaaacgtctagctatccacaacctaggggactaggttttccttttatttagattacaattat

SEQ ID NO: 934 - DNA, 732 bp, Human poliovirus 2
  strain NIE0811454, complete genome.1
ttaaaacagctctggggttgttcccaccccagaggcccacgtggcggctagtacaccggtattgcggtacccttgtacgcctgttttatactcccttttccctgtaacttagaagaaacaaaccaagttcaatagaagggggtacaaaccagtaccaccacgaacaagcacttctgtttccccggtgatgttgcatagactgtacccacggttgaaagcgattgatccgttacccgctcttgtacttcgagaagcctagtatcatcttggaatcttcgatgcgttgcgctcagcactcaaccccagagtgtagcttaggtcgatgagtctggacattcctcaccggcgacggtggtccaggctgcgttggcggcctacctgtggcccaaagccacaggacgctagttttgaacaaggtgtgaagagcctattgagctacatgagagtcctccggcccctgaatgcggctaatcccaaccacggagcaagggtgcacatgccagtgtataccttgtcgtaacgcgcaagtctgtggcggaaccgactactttgggtgtccgtgtttccttttatttttacattggctgcttatggtgacaatcgaagattgttatcataaagcgagttggattggccatccggtgaaagtaaagcatattatttacttggttgttgggattataccactcaatccttttactaacaatacgaggataaaacaacaatactaca

SEQ ID NO: 935 - DNA, 732 bp, Human echovirus
  32, strain PR-10 complete genome.1
tgtgggttgttcccacccacagggcccactgggcgctagtacactggtaccaaggtacctttgtacgcctgttttataccccctccccgatccgaaacttagaagtaaagcaaacccgatcaatagtaggtgcgacactccagtcgtatctcgatcaagcacttctgtttccccggactgagtatcaatagactgcccacgcggttgaaggagaaaacgtccgtcatccggctaactacttcgagaaacccagtagcaccatggaagttgcagagtgtttcgctcagcactaaccccgtgtagatcaggctgatgagtcaccgcattccccacgggtgaccgtggcggtggctgcgttggcggcctgcctatggggcaacccataggacgctctaatacggacatggtgtgaagagtctattgagctagttagtaatcctccggcccctgaatgcggctaatcctaactgcggagcacatactcctactccaaggagcagtgtgtcgtaacgggcaactctgcagcggaaccgactactttgggtgtccgtgtttcctattaacatatcactggctgcttatggtgacaattgaaagattgttaccatatagctattggattggccatccggtgtcaaacagagcaatagtgtacctattcgctgggtttatcccattgactgttaaagatatacaaactctctacttgataatacaactaaacactgtaaa

SEQ ID NO: 936 - DNA, 732 bp, Enterovirus sp.
  B, isolate BG/521_2017/CSF/2017 polyprotein gene,1
ctgtgggttgttcccactcacagggcccactgggcgttagcacactggtattgcggtacctttgtgcgcctgttttatccaccctttccccatagtaacttagaagtacgttcaaatggtcaataggcggctcagtataccaactgagtctcgaccaagcacttctgttaccccggaccgagtatcaataagctactcacgtggctgaaggagaaaacgttcgttacccggccaactacttcgagaaacctagtaccaccatggatgttgcgcggcgtttcgctccgcactaccccagtgtagatcaggtcgatgagtcaccgcattcctcacgggcgaccgtggtggtggctgcgctggcggcctgcccatggggcaacccatgggacgcttcaatacagacatggtgtgaagagtctattgagctagttggtagtcctccggcccctgaatgcggctaatcctaactgcggagcagatccccacacaccagtgggcagtctgtcgtaatgggtaactctgcagcggaaccgactactttgggtgtccgtgtttccttttattcttatactggctgcttatggtgacaattgaaagattgttaccatatagctattggattggccatccagtgtctaacagagcaataatctatctttttgttggattcgtcccacttgactacagagcacttgcaacgctcaattacattatagatctcaacacaacgaa

SEQ ID NO: 937 - DNA, 733 bp, Enterovirus sp.
  A, isolate E0-67 polyprotein gene, partial cds.1
cttgtacccactcacagggcccactgggcgctagcactctgattccacggaatctttgtgcgcctgttttataaccccttccccaacttgaaacgtagaagcaatacacataaccgatcaatagcaggcgtgacgcaccagtctcgtctcgatcaagcacttctgtttccccggaccgagtaacaatagactgctaacgcggttgaaggtgaaaacgttcgttatccggctaactacttcgagaagcccagtaacactatgaaagctgcggagcgttacgttcagcactcccccccgtgtagttcaggccgatgagtcactgcgatccctacgggcgaccgtagcagtggctgcgctggcggcctgcctatggggcaacccataggacgctctaaagtggacatggtgcgaagagctaattgagctagttagtagtcctccggcccctgaatgcggctaatcctaactgcggagcgcacgcctccaacccagggggtggtgcgtcgtaacgggcaactctgcagcggaaccgactactttgggtgtccgtgtttccttttattcttatattggctgcttatggtgacaatcacagagttgttaccatatagctattggattggccatccggtgtgcaacagagctatcatttatctatttataggttttgtaccattaactttgagatctacgaccaccctagagtacatattggttttaaattcaattagac

SEQ ID NO: 938 - DNA, 733 bp, Human enterovirus sp.
  79, strain 17-2255-1_E79, complete genome.1
ctgtgggttgttcccacccacagggcccactgggcgccagcactctgattccacggaatctttgtgcgcctgttttacaaccctccccaatttgtaacgtagaagcaatacacactactgatcaatagtaggcatggcgcgccagtcatgtcatgatcaagcacttctgttccccggactgagtatcaatagactgctcacgcggttgaaggagaaaacgttcgttacccggctaactacttcaagaaacctagtagcaccatggaagctgcggagtgtttcgctcagcacttcccccgtgtagatcaggtcgatgagtcactgcaatccccacgggcgaccgtggcagtggctgcgttggcggcctgcctatggggtaacccataggacgctctaatgtggacatggtgcgaagagtctattgagctagttagtagtcctccggcccctgaatgcggctaatcctaactgcggagcacatgccttcaacccaggaggtggtgtgtcgtaacgggtaactctgcagcggaaccgactactttgggtgtccgtgtttccttttatccttatattggctgcttatggtgacaatcacggaattgttgccatatagctattggattggccatccggtgtctaacagagctattgtatacctatttgttggatttgtaccactaaattacaaggttttaaacactctcaaccttataatactactcaactcagcaaa

SEQ ID NO: 939 - DNA, 733 bp, Enterovirus sp.
  D68, strain USA/CA/2002-23233, complete genome.1
ttaaaacagccttggggttgttcccacctcaagggcccacgtggcggccagtactctggtatctcggtacctttgtacgcctgttttaattccctccccaacgtaacttagaagcttttaaaccaaagctcaataggcggagcgcaaaccagcgctcttatgagcaagcacttctgtctccccggtgtggttgtatagactgtccccacggttgaaaacaacttatccgttaaccgctatagtacttcgagaaacctagtattgccttcggagtgtcgatgcgttgcgctcagcacactaacccgtgtgtagcttgggtcgatgagtctggacgtaccccactggcgacagtggtccaggctgcgttggcggcctactcgtggtgaaaaccatgagacgctagacatgaacaaggtgtgaagagtctattgagctactatagagtcctccggcccctgaatgcggctaatcctaaccatggagcaagtgctcacaaaccagtgggttacttgtcgtaatgcgcaagtccgtggcggaaccgactactttgggtgtccgtgtttcactttttacttttatgactgctaatggtgacaatttaatattgttaccatttggcttgtcgaattgatcacataagatctatagttttgttcactgatttgctttcaaataatctcacctcaaaacctccagtacataacatttaaagagtttaaacttatttataaca

SEQ ID NO: 940 - DNA, 734 bp, Picornaviridae sp.
  isolate rfb199pic1 genomic sequence.1
ctccagcacatgtctattggtgcacttgagctgatccaagcaacggatgtacacacccggttcactaacactttcgcgacagctacccctcactgggaccggttcacaacaacgggccacggggttgcccccggtggtacggcacgtctggaataccggcaatgtgtaccacacactcaggtgagactgccactacttgagttagctactaggagtagccgcacccgccgaatgtcacaacccgcgcagttctgcattcccccgcacctggcggggagctggatggtgttgtaatgctcaccaccgctaatccgggaatcctaggactgacctgttgtgttttagacctcaagaagttaatcactacgagatcgcctagtgcccagttcgcgcgctggagcaggacccaccacggcctttgtgatgggggaatgcagaactgcgcgggttgtgacattcggcgggtgcggctactcctagtagctaactcaagtagtggcagtctcacctgagtgtgtggtacacattgccggtattccagacgtgccgtaccaccgggggcaaccccgtggcccgttgttgtgaaccggtcccagtgaggggtagctgtcgcgaaagtgttagtgaaccgggtgtgtacatccgttgcttggatcagctcaagtgcaccaatagacatgtgctggaggtacccgtaaggatctgaccagtagctaattagtccctgttggtgt

SEQ ID NO: 941 - DNA, 734 bp, Orivirus A
  strain chicken/Pf-CHK1/2013/HUN, complete genome.1
ttctctcccccctctgggccgccatccttggccagaaaccctcacgagtgcttgtggtaggtcccaggccaatattcttcgtaaggcttggttccaattttccaccactcgtgtttgggttctggcctatggtacccagaggggcggtttgggggaattaactccccctcccctgtggtcctataccaccccacacctctgtgggctttctttactatcttcttgttttccgacttttaaacactaggcaggcgcgcctagtcatacaccgcccggctggtctttccagctcttgtgggcggtgcgcgctggtccatcgtgcccagcgacatagcaccttgtggacacctccgaacgccctcccctgtatggggtggtgcccaggggtttcagtgtggtgacacactccctggggcccgaaaggctagtgtgcaacaggtgaggtacagccagctgcccccgtggctggagggaccaagcttgtgaagcacacctcaccttcttgggggtgggctagtaagtggtgaaagcatagtgtccgtgtcgctggccaacactttgggtcaagtccagccactcagtgagtagatgcccaggaggtacccctagtggatctgacttggggcctgttacttaatgcaggttaaaaactatgaaagctgagtagtgtagcccggctggtggcttctcttccttattcattctattttatggtgacaaacgcaactgaagcc

SEQ ID NO: 942 - DNA, 734 bp, Coxsackievirus
  A10, strain 09-1895-1, complete genome.1
gcctgtgggttgtacccacccacagggcccactgggcgctagcactctggcaccacggtacctttgtgcgcctgttttatcaccctaccccattcggaacttagaagcaatacacaaccgaccaatagtgggtgtggcacaccagccgcatcttggtcaagtacttctgtttccccgggttgagtatcaataagctgctcacacggctgaaggagaaaacacccgtcacccggccaactacttcgagaaacctagtaccactatgaatgttgcaaggcgtttcgctcagcacttcccccgtgtagatcaggtcgatgagtcaccgcattccccacgggcgaccgtggcggtggctgcgttggcggcctgcctatgggttaacccatgggacgccttaatactgacatggtgcgaagagtctattgagctagttggtagtcctccggcccctgaatgcggctaatcctaactgcggagcacatactcacaagccagtgagcggtgtgtcgtaacgggtaactctgcagcggaaccgactactttgggagtccgtgtttccttttatccttatattggctgcttatggtgacaattggagaattgttaccatatagctattggattggccatccggtgtctaatagagctattatatacctatttgttggatttactccactaacacacaaatccctaaacactttgtgctttatcttaaacttaaatacacgaaa

SEQ ID NO: 943 - DNA, 734 bp, Enterovirus sp.
  C99, isolate 3291/BRA-PA/10, complete genome.1
gggggttgttcccaccccagaggcccacgtggcggctagtactccggtatcacggtacccttgtacgcctgttttatacccccttcccccgtaacttagaagcaataatccaagttcaatagaagggggtacaaaccagtaccaccacgaacaagcacttctgttaccccggtgaagttgtatagactgtgcccacggttgaaagcgaccgatccgttatccgctcttgtacttcgagaagcccagtatcatcttggaatcttcgatgcgttgcgctcagcactcaaccccagagtgtagcttaggtcgatgagtctggacggtcctcaccggtgacggtggtccaggctgcgttggcggcctacctgtggtccaaagccacaggacgctagttgtgaacaaggtgtgaagagcctattgagctacatgagagtcctccggcccctgaatgcggctaatcctaaccacggagcaagtgctcacaacccagtgagtggcttgtcgtaacgagcaattctgtggcggaaccgactactttgggtgtccgtgtttcctttattttattatatggctgcttatggtgacaatcattgattgttatcataaagcgagttggattggccatccggtgaaagtaaagcacattatttatctttttgttggatttactccattgagtgtttttactccagacgtgattcgagcagtcttattgattagaagcatctgccaca

SEQ ID NO: 944 - DNA, 734 bp, Unknown
  Description of Unknown: Human coxsackievirus A15strain G9, complete genome.1 sequence
ttaaaacagctctggggttgttcccaccccagaggcccacgtggcggctagtacaccggtattacggtacccttgtacgcctgttttatactccctcccccccgtaacttagaagtacaaaactcaagttcaataggagggggtacaaaccagtaccaccacgaacgagcacttctgtctccccggtgaggttacatagactgtccccgcggttgaaagtaaccgatccgttatccgctcttgtccttcgagaagcccagtaccatcttggaatcttcgatgcgttgcgctcaacactcaaccccagagtgtagcttaggtcgatgagtctggacactccccaccggcgacggtggtccaggctgcgttggcggcctacctgtggcccaaagccacaggacgctagttgtgaacaaggtgtgaagagcctattgagctacaagagagtcctccggcccctgaatgcggctaatcccaaccacggagcaggtgacttcaagccagaagttggcctgtcgtaacgcgtaagtctgtggcggaaccgactactttgggtgtccgtgtttccctttattcttacaatggctgcttatggtgacaatcatagattgttatcataagccgaattggattggccatcgggtgagaatcagatcagttacttacctgtttgttggattcactccgttgacactttacatactaacccttgtcaatacacctgtattatcata

SEQ ID NO: 945 - DNA, 734 bp, Echovirus
  E7 clone V10B polyprotein gene, complete cds.1
gcctgtgggttgttcccacccacagggcccactgggcgttagcacactggtattccggtacctttgtgcgcctgttttatccaccctccccaatgtaacgtagaagctacgctcaaacggtcaacagatagtccagtaatccagctgggccacgaccaagcacttctgtttccccggacagagtaccaataagctgctcgcgcggctgaaggggaaaacgttcgttacccggccaattacttcgagaaacctagtaccgccatggacgttgcgcagcgtttcgctccacacaaccccagtgtagatcaggtcgatgagccaccgcattccccacgggcgaccgtggcggtggctgcgttggcggcctgcccatggggtaacccatgggacgcttcaatacagacatggtgcgaagagtctattgagctaattggtagtcctccggcccctgaatgcggctaatcctaactgcggagcaggtacccacaacccagtgggtcacctgtcgtaatgggcaactctgcagcggaaccgactactttgggtgtccgtgtttccttttaacctttacactggctgcttatggtgacaattgaaagattgttaccatatagctattggattggccatcctgtgagtaatagagcgattgtatacttatttgttggctttataccactcaatttgaaagctttacagacactgaattatattgtggcattaaacacagcaaa

SEQ ID NO: 946 - DNA, 734 bp, Echovirus
  E6, strain HAI/2016-23034 polyprotein gene, complete cds.1
cctgtgggttgtccccactcacagggcccactgggcgccagcacactggtatcaaggtacctttgtgcgcctgttttatagccccttccccgaatgtaacgtagaagctgaacccaagcggtcaacaggcggctcagaacaccatctgggtcttgaccaagcacttctgttaccccggactgagtatcaataagctgctcacgcggctgaaggagaaaatgttcgttatccggccaattacttcgagaaacctagtaccaccatgaaggttgcgcagtgtttcgctccgcacaatcccagtgtagatcaggtcgatgagtcaccgcgttcctcacgggcgaccgtggcggtggctgcgctggcggcctgcccatggggcaacccatgggacgcttcaatactgacatggtgcgaagagtcaattgagctaattggtagtcctccggcccctgaatgcggctaatcctaactgcggagcagatgcccaagctccagtgggtagtctgtcgtaacgggtaactctgcagcggaaccgactactttgggtgtccgtgtttccttttattcttacattggctgcttatggtgacaattgagaaattgttgccatatagctattggattggccatccggtgacgaatagagcaattgtgtatctttttgttggattcataccactagataatacaaacttcaaaaccttgtgttacatcattaggttaaacacagcaag

SEQ ID NO: 947 - DNA, 735 bp, Feline kobuvirus
  isolate FKV/18CC0503, complete genome.1
ggggggcctcggccccctcaccctcttttccggtggtctggtcccggaccaccgttactccattcagcttcttcggaacctgttcggaggaattaaacgggcacccactcacccccatctccccctgtaacttgaagtgtgtgctcgtgaccttgactcctgcgggcttcaccgacccgtccagtgaacaaactgctaggtgatttcttcccctcccctagcctggatgttccacatccaggtcttcttcccccagcccgacatgtcatgggctgtttggaatccccgcgaaagctgctaacgtggcaattgtgggtcccccttccaacaagacaccgagtctttctcccttaaggctagccccgtgtggtgaattccaccgggcaactagtggtgtcaatgcatgcctccgacctcggccgcggagtgctgccccccaagttgcgaaactgaccaaggattgtgctgcctggcaagcatagtctgaggagatgttccgctgtggttgccaaacctggtaacaggtgccccagtgcgcgtagtctccttccggttcgtccggctgtcctttggtaaagacacaatgtaaggggcgtgtgccaacgccctggaaagagtgaacttctactgccctaggaatgccacgcaggtacccctggtttcttaccagggatctgagcgtgggctaattgtctaacgggtagtttcatttccctcccttcttttgttgacatc

SEQ ID NO: 948 - DNA, 735 bp, Aichivirus A
  strain rat08/rAiA/HUN, complete genome.1
gggtgggggggtgtcggccccctcaccctcttttccggtggtctggacccggaccaccgttactccattcagcttcttcggaacctgttcggaggaattaaacgggcacccactttcctgtcctctccccttttctgtaactccaagtgtgtgctcgtaatcttgactcccgcggattgaccgctccgctggtgaacaaactgctaggtcatctcctccccacccttgggcgtccttccgggcgtccacaccctccccccagcctgacgtgtcacaggctgtacaaagaccccgcgaaagctgctaacgtggcaattgtgggtcccccctttgtaaaggaaccgagtctttctcccttaaggctagacccctgtgtgaattcacaggtggcaactagtggttccactgcatgctcccgacctcggccgcggagtgctgttccccaagtcgtaacactgaccttcacttatgtgcctggcaagcatatctgagaagatgttccgctgtggctgccaaacctggtaacaggtgccccagtgtgcgtagtcttcttccgtcttcggacggtaggtgttaggtaaagatgcggcgtaaggttcaagtgccaacgccctggaagggatgacccttctactgccctaggaatgccgcgcaggtaccccaggttcgcctgggatctgagcgcgggctaattgtctacgggtagtttcatttccctcttcttccactggcatc

SEQ ID NO: 949 - DNA, 735 bp, Echovirus
  E13, strain GHA:VOL:KRN/2017 polyprotein gene, complete1
cttgtgggttgttcccacccacaaggcccactgggcgctagcacactggtattacggtacccttgtgcgcctgttttattcaccccctccccctacgtaacttagaagcgatacctacatggtcaacaggtgccccagcataccagctgggtcatgaccaagcaattctgttaccccggactgagtatcaataagctgctcgcgcggctgaaggagaaaacgttcgttacccggccagttacttcgagaaacccagtaccaccatgaaggttgcgcagtgtttcgctccgcacaaccccagtgtagatcaggtcgatgagtcaccgcgttccccacgggtgaccgtggcggtggctgcgttggcggcctgcccatggggcaacccgtgggacgcttcaatactgacatggtgtgaagagtctattgagctaactggtagtcctccggcccctgaatgcggctaatcctaactgcggagcagatgcccacatgccagtgggtggtctgtcgtaacgggcaactctgcagcggaaccgactactttgggtgtccgtgtttccttttattcctaaactggctgcttatggtgacaattgagagattgttaccatatagctattggattggccatccggtgacgaacagagctatcatttatttatttgttggttttgtgccgttgaaccgcaaagttctacacaccatcaatttcatcctactgcttaactcgacaaa

SEQ ID NO: 950 - DNA, 735 bp, Coxsackievirus
  B2, strain 13-2380-2_B2, complete genome.1
agcctgtgggttgcacccacccacagggcccactgggcgccagcactctggtactgcggtacctttgtgcgcctgttttatcaccccaccccatccggaacgtagaagctagacttaaatggtcaatagacggcccagtatgccaattgggtctcgaccaagcactcctgtttccccgggtttagtatcaataagctgctcacgtggctgaaggagaaaacacccgttatccggccaactacttcgagaaacttagtaccgctatgaacgttgcaaggcgtttcgctcagcacttcccccgtgtagatcaggccgatgagtcaccgcattcctcacgggcgaccgtggcggtggctgcgctggcggcctgcctatgggcttgcccataggacgccttaatactgacatggtgcgaagagtctattgagctagttggtagtcctccggcccctgaatgcggctaatcctaactgcggagcacatactcacaaaccagtgagcagtgtgtcgtaacgggcaactctgcagcggaaccgactactttgggtgtccgtgtttccttttattcctacactggctgcttatggtgacaattaaagaattgttaccatatagctattggattggccatccggtgtctaacagagctattatatacttgtttgttggattcataccacttgattccaatagctataacaccctactttacatcgttcatttgaacacgagaaa

SEQ ID NO: 951 - DNA, 736 bp, Aichivirus A
  strain Wencheng-Rt386-2 polyprotein gene, complete1
gggtgggggggcctcggccccctcaccctcttttccggtggtctggacccggaccaccgttactccattcagcttcttcggaacctgttcggaggaattaaacgggcacccactttcctgtcctctccccctttctgcaactcaagtgtgtgctcgtaatcctgactcccacgggttgaccgccccgttggtgaacaaacagctaggtcattccctccctacccctgggcgccatttcagtggcgttcatatcctccccccagcctgacgtgtcacaggctgtgcaaagtccccgcgaaagctgctcacgtggcaattgtgggtcccccctttgtgaaggaaccgagtctttctcccttaaggctagacccctgtgtgaactcacaggtggcaactagtggttccactgcatgctcccgacctcggccgcggagtgctgttccccaagtcgtgacactgacctccacttatgtgcctggcaagcatatctgagaagatgttccgctgtggctgccaaacctggtaacaggtgccccagtgcgtgtagtcttcttccgtctccggacggtaagtgtgtggtaaagatgcggcgtaaggttcaagtgccaacgccctggaagggatgacccttctactgccctaggaatgccgcgcaggtaccccaggttcgcctgggatctgagcgcgggctaattgtctacgggtagtttcatttccctctcttttcactggcatc

SEQ ID NO: 952 - DNA, 736 bp, Coxsackievirus
  A24 clone V5B polyprotein gene, complete cds.1
cccactggaggatattcactatatcctccagtgtttcccactggaggatatggtactgcggtatcacggtacccttgtacgcctgttttatactccccttccctgcaacttagaagattgtgaaaacctgtgttcaataggaagggggtacaaaccagtaccaccacgaacaagcacttctgtttccccggtgaagttgtataaactgtatccacggttgaaaacgactgatccgttacccgctctagtacttcgagaagcctagtatcatcttggaatcatcgatgcgttgcgttcatcactcaaccccagagtgtagcttaggctgatgagtctggacaatcctcaccggtgacggtggtccaggctgcgttggcggcctacctgtggcccaaagccacaggacgctagatgtgaacaaggtgtgaagagcctattgagctactagagagtcctccggcccctgaatgcggctaatcccaaccacgaagcaagtgctcacaacccagtgagtagcttgtcgtaatgcgcaagtttgtggcggaaccgactactttgggtgtccgtgtttcctttttacttttgtatggctgcttatggtgacaatcattgattgttatcataaagcgaattggattggccatccggtgagagcgagcacaatcacttatttgttcgttggattcactcctttaacaaaattttattgttctcttaattagaaaacatcatcaca

SEQ ID NO: 953 - DNA, 736 bp, Coxsackievirus
  A21, strain NIV17-608-2, complete genome.1
ccggggttgttcccaccccggaggcccacgtggcggctagtactctggtaccacggtacccttgtacgcctgttttatatcccctccccacgcaactttagaagaaattcaccaagttcaatagggggggtacgaaccagtaccaccacgaacaagcacttctgtttccccggtgattttacataggctgtacccacggctgaaagtgaatgatccgttacccgcttgagtacttcgagaagcctagtaccaccttggaatctccgatgcgttgcgttcagcactctaacccgagtgtagcttaggctgatgagtctgggcgatccccaccggcgacggtggcccaggctgcgttggcggcctacccgtggctaacgctacgggacgctagttttgaacaaggtgtgaagagcctattgagctacccaagaatcctccggcccctgaatgcggctaatcccaaccatggagcaagtgccctcaagccagggggtggcttgtcgtaacgcgtaagtctgtggcggaaccgactactttgggtgtccgtgtttccttttatttcatatttggctgcttatggtgacaatcacagattgttatcataaagcgaattggattggccatccagtgaaatataagctcattgtttatctccttgttggatttgttctgttaggaaattcctcaataaagttgactcgggtaatcttagtgattagaagtcatcatttcaaca

SEQ ID NO: 954 - DNA, 736 bp, Echovirus
  E20, strain HAI/2016-23041B polyprotein gene, complete1
agcctgtgggttgttcccacccacagggcccaccgggcgctagcacactggtatcccggtacctttgtgcgcctgttttacacaccctcccccgatggcaacttagaagatttccacacacggtcaataggcggctcagtataccaactgggtcatgaccaagcacttctgttcccccggactgagtatcaataagctgctcacgtggctgaaggagaaaacgttcgttatccggccaattacttcgagaagcttagtaccaccatagaggttgcgcagtgtttcgctccgcacaaccccagtgtagatcaggtcgatgagtcaccgcactcctcacgggcgaccgtggcggtggctgcgctggcggcctgcccatggggcaacccatgggacgcttcaatactgacatggtgcgaagagcctattgagctaattggtattcctccggcccctgaatgcggctaatcctaactgcggagcagatacccacgagccagtgggcagtctgtcgtaatgggtaactctgcagcggaaccgactactttgggtgtccgtgtttccttttattcctatattggctgctaatggtgacaattgagagattgttgccatatagctattggattggccatccggtgacaaacagagcgattatctatctatttgttggcttcataccattaaaccttagagtcctaaagaccctcaacttaattatacaatttaactctgcgaa

SEQ ID NO: 955 - DNA, 737 bp, Marmot kobuvirus
  strain HT9, complete genome.1
ggggcttcggccctcacaccctcttttccgatggtctggtcccggaccaccgtcactccattcagcttcttcggaacctgttcggaggaattaaacgggcaccccacttcccccccccaccctcgcaacttcaagtgtgtgtgcccataaccttgacccctgccggtatgccgcccggttcagtggacaaactgctaggcaaattcccccctccccctgtggctggtccttcaaccagccactctcttccccccagccggacgtgctacaggctgtgcaaagcccccgcgaaagctgctcacgtggcaattgtgggtcccccctttgtcaaggcttcgagtctttctcccttaaggctagtcccgtactgtgaaatcagtgtgggcaactagtgaagccactgcacgctcccgaccacggacgcggagtgctgtcccccaagtcatgacactaacaccaagctgtgctgcctggcaagcatagcctgggaaggtgttccgctgtggctgccaaacctggtaacaggtgccccagtgtgtgtaaccttcctccagtcttcggactggcagctttgtgtgaagacgtgacgtaaggttcaagtgccaactccctggaagggatgacccctctactgccctaggaatgctacgcaggtacccctggttcgccagggatctgagcgtaggctaattgtctacgggtagtttcatttcccacctttttatttctttagcatc

SEQ ID NO: 956 - DNA, 737 bp, Coxsackievirus
  A10 CV-A10/HVN11_028_Bac_GiangVNM/2011 genomic1
ccgatctgttgtacccacccacagggcccactgggcgctagcactccgattctgcggaatctttgtgcgcctgttttatgaccctcccccgaaacttgtaacttagaagttatgtacatcaccgatcaatagcaggcgtggcgcaccagccatgtcttgatcaagcacttctgtacccccggactgagtatcaatagactgctcacgcggttgaaggagaaaatgttcgttacccggctaactacttcgagaaacctagtaacaccattgaaactgcggagtgtttcgctcagcattccccccatgtagatcaggtcgatgagtcactgcttaccccacgggcgaccgtggcagtggctgcgttggcggcctgcctatggggcaacccataggacgctctaaagtggacatggtgcgaagagtctattgagctagttagtagtcctccggcccctgaatgcggctaatcctaactgcggagcgcatgtcctcaaaccagagggtggtgcgtcgtaatgggtaactctgcagcggaaccgactactttgggtgtccgtgtttcttttgttcttaaaatggctgcttatggtgacaatcgaggaattgttaccatatagctattggattggccatccggtgtgcaacagagctattatctacttgtttgtcggatacatccccttaacacctaaatcctttaatacattgcattatattttaacattgaacgcgagaaa

SEQ ID NO: 957 - DNA, 737 bp, Enterovirus sp.
  C99, isolate 3944/BRA-PA/11, complete genome.1
ctgggggttgttcccaccccagaggcccacgtggcggctagtactccggtattacggtacccttgtacgcctgttttatactccctttccccgtaacttagaagcaacaatccaagttcaatagaagggggtacaaaccagtaccaccacgaacaagcacttctgtttccccggtgaagttgcatagactgtacccacggttgaaagcgactgatccgttatccgctcttgtacttcgagaagcctagtatcactttggaatcttcgatgcgttgcgctcagcacccaaccccggggtgtagcttaggtcgatgagtctggacgttcctcaccggcgacggtggtccaggctgcgttggcggcctacctgtggcccaaagccacaggacgctagttgtgaacaaggtgtgaagagcctattgagctacatgagattcctccggcccctgaatgcggctaatcccaaccacggagcaaatgcccacaacccagtgggtggtttgtcgtaacgagcaattctgtggcggaaccgactactttgggtgtccgtgtttccctttttattattatgtggctgcttatggtgacaatcattggttgttatcataaagcgaattggattggccatccggtaagagtaaaacatatcatttacctttttgttggatttactccattgagtgttttcaccccagacgtaattcgtgtggttctgctgattagaagtttctatcaca

SEQ ID NO: 958 - DNA, 737 bp, Enterovirus sp.
  J, strain N125, complete genome.1
ttaaaatagcctcagggttgttcccaccctgagggcccacgtggcgtagtactctggtattacggtacctttgtacgcctattttacccccttccccttgtaacttagaagcaaagcaaaccagttcaatagtaagcaacacaacccagtgttgtgacgaacaagtacttctgtttccccgggagggtctgacggtaagctgtacccacggctgaagtatgacctaccgttaaccggctacctacttcgagaagtctagtaataccattgaagttttgttggcgttacgctcaacacactaccccgtgtgtagttttggctgatgagtcacggcattccccacgggcgaccgtggccgtggctgcgttgcggccaaccaaggggcgcaagctccttggacgtcacttaacagacatggtgtgaagaacctattgagctaggtagtagtcctccggcccctgaatgcggctaatcctaactccggagcacatcagtgcaacccagcatttggtgtgttgtaatacgcaagtctggagcggaaccgactactttgggtgtccgtgtttcctgttttaccttatttggctgcttatggtgacaatttgatattgttaccatatagctgttggattggccatccggatttttgaaagagacccaaaactttcttctctacttcagattcaagtgcgaagttttccttttcatatattacttactaatttgaagtaccaaag

SEQ ID NO: 959 - DNA, 737 bp, Enterovirus sp.
  J, strain N203, complete genome.1
ttaaaatagcctcagggttgttcccaccctgagggcccacgtggtgtagtactctggtattacggtacctttgtacgcctattttatacccccttccccaagtaatttagaagcaagcacaaaccagttcagtagtaagcagtacaatccagtactgtaatgaacaagtacttctgttaccccggaagggtctatcggtaagctgtacccacggctgaagaatgacctaccgttaaccggctacctacttcgagaagcctagtaatgccgttgaagttttattgacgttacgctcagcacactaccccgtgtgtagttttggctgatgagtcacggcactccccacgggcgaccgtggccgtggctgcgttggcggccaaccaaggagtgcaagctccttggacgtcatattacagacatggtgtgaagagcctattgagctaggtggtagtcctccggcccctgaatgcggctaatcctaactccggagcatatcggtgcgaaccagcacttggtgtgttgtaatacgtaagtctggagcggaaccgactactttgggtgtccgtgtttcctgttttaacttttatggctgcttatggtgacaatttaacattgttaccatatagctgttgggttggccatccggattttgttataaaaccatttcctcgtgccttgacctttaacacatttgtgaacttctttaaatcccttttattagtccttaaatactaaga

SEQ ID NO: 960 - DNA, 738 bp, Human poliovirus 1
  isolate P1W/Bar65 (19276), complete genome.1
ttaaaacagctctggggttgttcccaccccggaggcccacgtggcggctagtactctggtatcacggtacccttgtacgcctgttttatactcccctccccgtaatttagaagttcaaaacttaagttcaatagaagggggtacaaaccagtaccaccacgaacaagcacttctgtttccccggtgaggttgcatagactgtacccacggttgaaggcgactgatccgttatccgctcttgtacttcgggaagcccagtatcatcttcggatcttcgatgcgttgcgctcagcactcaaccccagagtgtagcttaggctgatgagtctggacaatcctcactggtgacagtggtccaggctgcgttggcggcctacctgtggcccaaagccacaggacgctagatgtgaacaaggtgtgaagagcccactgagctacaagagagtcctccggcccctgaatgcggctaatcccaaccacggagcaggtagttgcaaaccagcagccggcctgtcgtaacgcgcaagtctgtggcggaaccgactactttgggtgaccgtgtttccttttatcttttcaatggctgcttatggtgacaatcattgattgttatcataaagcgacttggattggccatccggtgaaatttaagtgcgtcagctatccatttattggatttaccccactaaaaccacatacgcctggccttagtgttgttggtgagacgctaccatcaaa

SEQ ID NO: 961 - DNA, 738 bp, Echovirus
  E18, isolate Jena/ST9524/10 polyprotein gene, complete1
cagcctgtgggttgtacccacccacagggcccacgtggcgctagcacactggtattccggtacctttgtgcgcctgttttatccaccccgtcccccactgtaacttagaagatatgcaaccctgatcaacagcaggtgtgacactccagtcacatcacgatcaagcacttctgttgccccggaccgagtatcaataagccactcgcgtggctgaaggagaaaacgttcgttatccgaccaactacttcgagaaacctagtaccaccctggaagttgcgtagcgtttcgctccacacaaccccagtgtagatcgggtcgatgagtcaccgcgttcctcacgggcgaccgtggcggtggctgcgttggcggcctgcccatggggcaacccatgggacgcttcaatactgacatggtgcgaagagtctattgagctagttggtggtcctccggcccctgaatgcggctaatcctaactgcggagcagatacccacatgccagtgggcgatctgtcgtaatgggtaactctgcagcggaaccgactactttgggtgtccgtgtttccttttattcttatattggctgcttatggtgacaattgagaagttgttaccatatagctattggattggccatccggtgacaaatagagcgattgtttatttgtttgttggatttataccactgaacttcaaggttttaaacaccctcaattttgtactagttcttaatacatcaaa

SEQ ID NO: 962 - DNA, 739 bp, Enterovirus sp.
  C, strain Saukett serotype 3, partial genome.1
acagctctggggttgtacccaccccagaggcccacgtggcggctagtactctggtgtcacggtacctttgtacgcctgttttataccccctcccccgtaacttagaagctataaaccaagttcaatagaagggggtacaagccagtaccaccacgaacaagtacttctgttaccccggtgacgttgtatagactgctcgcgcggtcgaaagcgacagatccgttacccgcttgtgtacttcgagaagtctagtaccaccttggaatcttcgatgcgttgcgctcagcactttaccccagagtgtagcttaggctgatgagtctgggcgctccccatcggcgacgatggcccaggctgcgttggcggcctacctatggctaacgccataggacgctagtagtgaacaaggtgtgaagaacctattgagctacacaagagtcctccggcccctgaatgcggctaatcctaaccatggagcaagtgatcacaatccagtgatattcttgtcgtaacgcgcaagtccgtggcggaaccgactactttgggtgtccgtgtttccctttatttttattatggctgcttatggtgacaatcattgattgttatcatagagcgaattggattggccatccggtgaaagtgaaactcattatctacttatttgttggattcactccatcaaacacattcacttatagtatcatcttgacagtgattagaattagacagtcgtatcaca

SEQ ID NO: 963 - DNA, 739 bp, Echovirus
  9 (strain Hill), complete genome.1
ttaaaacagcctgtgggttgtacccacccacagggcccactgggcgccagcactctggtatcgcggtacctttgtgcgcctgttttgtttccctttaccccgaatggaacttagaagtaatgcacactgatcaatagcaggcgtggcaccagccacgtgatgatcaagcactactgtttccccggaccgagtatcaatagactgcttgcgcggttgaaggagaaaacgttcgttatccggctaactacttcgagaaacccagtaacaccatgaaggttgcaggcgatttcgctcagcacatccccagtgtagatcaggtcgatgagtcaccgcgttcccacgggcgaccgtggcggtggctgcgttggcggcctgcctatggggtaacccataggacgctctaatacggacatggtgcgaagagtctattgagctagttagtgttctccggcccctgaatgcggctaatcctaactgtggagcacatgcccctaatccaaggggtagtgtgtcgtaacgggcaactccgcagcggaaccgactactttgggtgtccgtgtttccttttattcttacattggctgcttatggtgacaattgagagattgttgccatatagctattggattggccatccggtgtctaatagagcgataatctaccagtttgttggatttgtaccactcaacttttcaacactcaagacactcaactacatactagcactcaacacagtaaa

SEQ ID NO: 964 - DNA, 739 bp, Human enterovirus sp.
  81, strain USA/CA68-10389, complete genome.1
ttaaaacagcctgtgggttgtacccacccacagggcccattgggcgcttgcacactggtattccggtacctttgtgcgcctgttttatacatcctacccccgtaacttagaagcaagatcacccgatcaccaggaaatgtggcaaaccagtcacattctgatcaagcacttctgtttccccggactgagtatcaataggctgttcacacggctgaaggagaaaacgttcgttacccggccaactacttcgaaaaacctagtatcaccgtgaacgttgcagagtgtttcgctcagcactttccccgtgtagatcaggtcgatgagtcaccgcattccccacgggcgaccgtggcggtggctgcgttggcggcctgcctgcggggcaacccgtaggacgctctaatacagacacggtgtgaagagtctattgagctagttggtagtcctccggcccctgaatgcggctaatcctaactgcggagcgagcgcttgtaatccaacaggtagctcgtcgtaacgggtaactctgcagcggaaccgactactttgggtgaccgtgtttccttttatttcattactggctgcttatggtgacaatcacagagttgttaccatatagctattggattggccatccggtgtcaaatagagcaattgtgtttctttttgttgggtttgtaccacttgacttgaccagctacaacactctgtgctacattgttagattgaacacagcaaa

SEQ ID NO: 965 - DNA, 740 bp, Coxsackievirus
  A12, isolate D89 polyprotein gene, complete cds.1
ttaaaacagcctgtgggttgcacccactcacagggcccactgggcgtcagcactctggtacctcggtacctttgtgcgcctgttttatatcccccccccattgaaacttagaagcaatgcacttcgatcaatagcgggcgcggcgcaccagccacgtcatgatcaagcacttctgtttccccggaccgagtatcaatagactgctaacgcggttgagggagaaaacgtccgttacccggccaactgcttcgagaaatccagtaacatcatgaaaattgcagagtgtttcgctcagcacttccccagtgtagatcaggtcgatgagtcaccgcgttcctcacgggcgaccgtggcggtggctgcgttggcggcctgcctgtggggcaacccgcaggacgctctaatatggacatggtgtgaagaatctattgagccagttggtagtcctccggcccctgaatgcggctaatcctaactgcggagcacgcgccctcaatccagtgggtagcgtgtcgtaatgggtaactctgcagcggaaccgactactttgggtgtccgtgtttccttttattcttacattggctgcttatggtgacaattgagagattgttaccatatagctattggattggccatccggtatcgaatagagcggttatctatcaatttattggatttactccgttgagtgtgcagcagtatcgcactttgcttttaatagtgagactgaatagtgcaaa

SEQ ID NO: 966 - DNA, 740 bp, Enterovirus sp.
  A76, strain 17-1936-1_A76, complete genome.1
tgtgggttgttcccacccacagggcccactgggcgccagcactctgattccatggaatctttgtgcgcctgttttataacccttccccaatttgcaacttagaagtaatacacactacagatcaatagtaggcatggcgcgccagtcatgtctcgatcaagcacttctgtttccccggactgagtatcaatagactgcccacgcggttgaaggagaaaacgtccgttacccggctaactacttcgagaaacctagtagcaccaaataagctgcagagcgtttcgctcagcacctcccccgtgtagatcaggctgatgagtcactgcaatccccacgggcgaccgtggcagtggctgcgctggcggcctgcctatggggcaacccataggacgctctaatgtggacatggtgcgaagagtctattgagctagttagtagtcctccggcccctgaatgcggctaatcctaactgcggagcacataccttcaatccaggaggtggtgtgtcgtaacgggtaactctgcagcggaaccgactactttgggtgtccgtgtttccttttatccttatattggctgcttatggtgacaatcacggaattgttgccatatagctattggattggccatccggtgtctaatagagctattgtatacctatttgttggatttaccaagttaaatatcaccaactacaccacccttctttatattatattactgaatattagaaagagaaa

SEQ ID NO: 967 - DNA, 740 bp, Human echovirus
  18, strain Metcalf polyprotein gene, complete cds.1
ttaaaacagcctgtgggttgtacccacccacagggcccactgggcgctagcactctggtattacggtacctttgtgcgcctgttttacatcccttcccaatcgtaatttagaagccaaacactacgatcaatagtgggcgtggcacgccagccatgtctcgatcaagcactcctgtttccccgggccgagtatcaatagactgctcacgtggttgaaggagaaaacgctcgttatccggctaactacttcgagaaacctagtaacaccatggaagttgcagagtgtttcgttcagcacttccccagtgtagatcaggccgatgagtcaccgcgttccccacgggtgaccgtggcggtggctgcgttggcggcctgcccatggggtaacccatgggacgctctaatatggacatggtgtgaagagtctattgagctagttggtagtcctccggcccctgaatgcggctaatcctaactgcggagcatgtacctccaatccaggaggtggcgtgtcgtaatgggcaactctgcagcggaaccgactactttgggagtccgtgtttccttttattcttacactggctgcttatggtgacaattgagagattgttaccatatagctattggattggccatccggtgactaacagagcagttatctaccagttcgttggtttcattccattgtgtactcgcgaatacaacactcttcttttaatactagatttaaacaaagcaaa

SEQ ID NO: 968 - DNA, 741 bp, Simian sapelovirus 1
  strain 2383, complete genome.1
ctcacactcatttcccccctcgcctgtcacaggcaacccccaccccttctcttacgggagttagggccaaggatctgttgcataggcgttgtatcccctaaccttttacctacccatcccaataggactggtatttcggttttgattgagtaatggatactgattctatacctgttacccattcaggggaaaaatggagtttctttcatggatctgacttgatatgaccaagagtcaacactttgcgtgttggccgtatggaatgctttaaggtttattctttggattatgacttcagggttggccgcccaggataaaaggcaattgtggtaagtgatgttagtcattggtggttgaaacctgcctaagacgtcctaggtctacgctgtgcgggccgaagtaagcttaggaataacagggagtatgccattttctgctttcacccaacacgaccgtacacgaaagagctagaggcactttggggcaaagggaaaagctttgcttagcccgaatgttcatttgagtccttgacgaatgcgtcccgtctgtcccgacggtgaggcgtatggcgcatgctcatggcattacccaatggtgtatctgtgaggggggggctcctcacacttagtctagtgctacctgacagggccgcggctggtcgtttgtgtatggtataaccagtagtaatcccccatggattgctttaacttcccctcctcccttaccaagacattctctaag

SEQ ID NO: 969 - DNA, 741 bp, Coxsackievirus
  A10, strain 12-2067-2, complete genome.1
ccgatgtgtgggttgtacccacccacagggcccactgggcgctagcactctaatcctacgggattcttgtgcgcctgttttataaccccttccccgatttgtaacttagaagcaatttacattagcgatcaatagacgacatggcacgccagccatgtcttgatcaagcacttctgtttccccgggctgagtatcaatagactgcttacgcggttgaaggagaaaacgctcgttacccggctaactacttcgagaaacctagtagcatcatgaaaactgcagagcgtttcgttcagcactccccccgtgtagatcaggtcgatgagtcactgcaatccccacgggtgaccgtggcagtggctgcgttggcggcctgcctatggggcaacccataggacgctctaatgtggacatggtgcgaagagtctattgagctagttagtagtcctccggcccctgaatgcggctaatcctaactgcggagcgcatactcccaacccagggggtggtgcgtcgtaatgggcaactctgcagcggaaccgactactttgggtgtccgtgtttccttttatccttttattggctgcttatggtgacaattagagaattgttaccatatagctattggattggccatccggtgagcaacagagcaattgtgtatctttttgttggatacgtccccttgacacttagaacctacaacacgctacactatattctaatcttgaactcgagacg

SEQ ID NO: 970 - DNA, 741 bp, Unknown
  Description of Unknown: Human coxsackievirusA5, strain Swartz, complete genome.1 sequence
ttaaaacagcctgtgggttgcacccacccacagggcccactgggcgccagcactctggtatcgcggtacctttgtgcgcctgttttatgacccctccccaaccgaaacttagaagttacacataccgatcaatagtgggcatagcacgccagctgtgtcttgatcaagcacttctgtttccccggaccgagtatcaatagactgctcacgcggttgaaggagaaagcgttcgttatccggctaactacttcgagaaacctagtaacaccatgaaagttgcggagtgtttcgctcagcacttccccagtgtagatcaggtcgatgagtcaccgcgttccccacgggcgaccgtggcggtggctgcgctggcggcctgcctatgggatgacccataggacgcttcaacacagacatggtgtgaagagtctattgagctagttagtagtcctccggcccctgaatgcggctaatcctaactgcggagcacgtgccctcaagccagagggtggcgtgtcgtaacgggcaactctgcagcggaaccgactactttgggagtccgtgtttccttttattcttacactggctgcttatggtgacaattgagagattgttaccatatagctattggattggccatccggtgagcaacagagcgattgtatactcttttgtgggttttgtgccattaaatcttactgtgattaccacactgaaactcatcttgcagtttaatacagcaaa

SEQ ID NO: 971 - DNA, 741 bp, Coxsackievirus
  A10, isolate 2015-XMCDC-85-CA10, complete genome.1
gcattggaggctagcccccattggggcgtagcacttccactgggggctagcactccgattctgcggaatctttgtgcgcctgttttataaccctcccccaacttgcaacttagaagttatgtacgttgatcaatagcaggcgtggcacaccagccatgtcttgatcaagcacttctgtaaccccggactgagtatcaatagactgctcacgtggtcgaaagagaaaatgttcgttatccggctaactacttcgagaaacctagtagcaccactgaaactgcggagtgtttcgctcagcacttcccccgtgtagatcaggtcgatgagtcactgcttaccccacgggtgaccgtggcagtggctgcgttggcggcctgcctatggggcaacccataggacgctctaaagtggacatggtgtgaagagtctattgagctagttagtagtcctccggcccctgaatgcggctaatcctaactgcggagcgcatgcccccaaaccagagggtggtgcgtcgtaacgggtaactctgcagcggaaccgactactttgggtgtccgtgtttcttttattctcataatggctgcttatggtgacaattgaggaattgttaccatatagctattggattggccatccggtgtgcaacagagctattatctacttgtttgttggatacattccattgacacctaaatccttcaatacattgcactatattctaacgttgaacgcaagaaa

SEQ ID NO: 972 - DNA, 741 bp, Echovirus
  E9, strain UW1, complete genome.1
taaaacagcctgtgggttgttcccacccacagggcccactgggcgctagcacactggtatcacggtacccttgtgcgcctgttttatccacccgccccctatgtaacttagaagcacatcacaaacggtcaacaggcagctcagtaaaccaactgagccacgaccaggtacttctgttaccccggaccgagtatcaatagactgctgacgcggtcgaaggagaaaacgttcgttacccggccaactacttcgagaaacccagtaccaccatggaggttgcgtggcgtttcgctccacacaaccccagtgtagatcaggtcgatgagtcaccgcattccccacgggcgaccgtggcggtggctgcgttggcggcctgcccatgaggtaactcatgggacgctacaataccgacatggtgcgaagagtctattgagctagttggtagtcctccggcccctgaatgcggctaatcctaactgcagagcggacacctacaaaccagtgggcagtccgtcgtaacgggcaactctgcagcggaaccgactactttgggtgtccgtgtttccttttattctcatattggctgcttatggtgacaattgagagattgttgccatatagctattggattggccatccggtgactaacagagctattgtctacttatttgttggttacgcaccgctcaatttcaaagtcttaaacacgattaatttcatattatcactcaacacaacaaa

SEQ ID NO: 973 - DNA, 741 bp, Human echovirus
  31, strain Caldwell complete genome.1
ttaaaacagcctgtgggttgttcccacccacagggcccatgggcgctagcacactggtatcgtggtacctttgtgcgcctgttttatacaccctccccatttgtaacttagaagtaaagcaatattgatcaatagcaagcatggcacaccagccgtgttcagatcaagcacttctgtaaccccggactgagtatcaataggctgccaaagcggctgaaggagaaaacgttcgttaaccggccaactacttcgagaagcccagtatcaccatgaaagttgcagagcgtttcgctcagcactccccccgtgtagattaggtcgatgagtcaccgcatcccccacaggcgactgtggcggtggctgcgttggcggcctacctacggggcaacccgtaggacgctctaatacagacatggtgagaagagcctattgagctagttggtagtcctccggcccctgaatgcggataatcctaactgcggagcatgtgctcgcaatccagcgagaggcatgtcgtaacgggcaactctgcagcggaaccgactactttgggtgtccgtgtttccttttattccttgtttggctgcttatggtgacaattgaaagattgttgccatatagctattgggtcggccacctggtatctaacagagcaattatttacttgtttgttggttttgtacccttaaatctcaaggttcttgaaacccttaactacacattgaaactcaattcattgaa

SEQ ID NO: 974 - DNA, 741 bp, Echovirus
  E11, strain 520k/YN/CHN/2010 polyprotein gene, complete1
ttaaaacagcctgtgggttgttcccactcacagggcctactgggcgctagcactctggtatcacggtacctttgtgcgcctgttttacacacccccctccctaggaatttagaagcaatacacaatgatcaatagtaggcgtggtacgccaaccatgtcttgatcaagcacttctgttcccccggactgagtatcaatagactgctcacgcggttgaaggagaaaacgttcgttacccggccagctacttcgagaaacccagtaacaccatggaaatagcggggcgtttcgctcggcacatccccagtgtagatcaggtcgatgagtcaccgcattccccacgggtgaccgtggcggtggctgcgttggcggcctgcctacagggcgacctgtaggacgcttcaatatggacatggtgcgaagagtctattgagctagctggtagtcctccggcccctgaatgcggctaatcctaactgcggagcgcgcgcctccaatccagggggtggtgcgtcgtaatgggtaactctgcagcggaaccgactactttgggtgtccgtgtttccatttatccttatattggctgcttatggtgacaattgaaaggttgttaccatatagctattggattggccatccagtgtctaacagagcgattgtattcctcttcgttggatttgttccacttaacaaaacaaattaccaaactttgtgttatattgtcaaactaaacacagcaaa

SEQ ID NO: 975 - DNA, 741 bp, Human echovirus
  21, strain Farina complete genome.1
ttaaaacagcctgtgggttgttcccacccacagggcccaccgggcgctagcacactggtatcgcggtacctttgtgcgcctgttttatttaccctgccctgatgtaacttagaagcatgacaccaacgatcaatagcaggctcaatgcaccaattgggtcaagatcaagcacttctgttaccccggactgagtatcaataagctgctagcgcggctgaaggagaaaaagttcgttacccggccagctacttcgagaaacctagtatcaccatgaaagttgcgtggcgtttcgctccgcacaaccccagtgtagatcaggtcgatgagtcaccgcattccccacgggcgaccgtggcggtggctgcgttggcggcctgcccgtggagcaatccatgggacgctataatacagacatggtgtgaagagtctattgagctagctggtagtcctccggcccctgaatgcggctaatcctaactgcggagcaggtacccacgaaccagtgggcagtctgtcgtaatgggcaactccgcagcggaaccgactactttgggtgtccgtgtttccttttatttcaacttggctgcttatggtgacaattgagagattgttaccatatagctattggattggccatccggtgactaacagagctatcatatacctttttattggctttgtgccacttactctgaaagaggtcaagactctgcattatatcatactattgaatgctataaa

SEQ ID NO: 976 - DNA, 741 bp, Human echovirus
  26, strain Coronel complete genome.1
ttaaaacagcctgtgggttgttcccacccacagggcccactgggcgctagcacaccggtatcacggtacccttgtgcgcctgttttatccacctcccccgttgtaacttagaagctcaatacaaatggtcgatagccagcccgatacgccaattgggttttgaccaagcacttctgttaccccggactgagtaccaataggctgccaaagcggctgaaggggaaaacgttcgttaccccaccaactacttcgagaaacctagtaccaccatgaagattgcgcagcgtttcgctcagcacaaccccagtgtagatcaggtcgatgagtcaccgcattccccacaggcgactgtggcggtggctgcgttggcggcctgcccatggggctacccatgggacacttcaatatcgacatggtgcgaagagtctattgagctagttggtagtcctccggcccctgaatgcggataatcctaactgcggagcaggcacccacaagccagtgggcagcctgtcgtaacgggcaactctgcagcggaaccgactactttgggtgtccgtgtttctttttattcttacactggctgcttatggtgacaattgaagaattgttaccatatagctattggattggccatccagcgactaacagagctattatcttcttgtttgtggggtacgtaccactcaatttcacagtagtaaggactctcaatttcattttgtgcttgaataaggcgaa

SEQ ID NO: 977 - DNA, 741 bp, Echovirus
  E3, isolate 123-R2, complete genome.1
ttaaaacagcctgtgggttgtacccactcacagggcccactgggcgctagcacactggtatcacggtacctttgtgcgcctgttttataatcccttccccaccgtaacatagaagctacacacactgatcaacagcaggcacagcacaccagttgtgtctcgatcaagcacttctgtctccccggaccgagtatcaatagactgcttacgcggttgaaggagaaaacgttcgtcacccggctgactacttcgaaaagcctagtagtaccatgaatgttgcggagtgtttcgctcagcacttcccccgtgtagatcaggctgatgagtcactgcattccccacgggtgaccgtggcagtggctgcgttggcggcctgcccatggggcaacccatgggacgcttcaatacagacatggtgcgaagagtctattgagctagtcagtagtcctccggcccctgaatgcggctaatcctaactgcggagcatgcgcctccgacccagggggtagcatgtcgtaatgggcaactctgcagcggaaccgactactttgggtgtccgtgtttccttttattcttatattggctgcttatggtgacaattgagagattgttgccatatagctattggattggccatccggtgagtaatagagctattatatactcctttgtgggttttgtgccactggatcacaaggtcttgaaaactctcacttttgtcataatactaaacactgcaaa

SEQ ID NO: 978 - DNA, 741 bp, Coxsackievirus
  B1 gene for polyprotein, complete genome, strain1
taaaacagcctgtgggttgttcccacccacagggcccattgggcgctagcacactgatatcacggtacctttgtgcgcctgttttatctacccctccccgatgcaacttagaagcatgttacaaacggtcaataggtggttcagttaaccaactgagcctcgaccaagcacttctgttaccccggactgagtatcaataggctgctcgcgtggctgatggagaaaacgtccgttacccggccaattacttcgagaaacctagtaccaccatggaagttgcgcagcgtttcgctccgcacaaccccagtgtagatcaggtcgatgagtcactgcgttccccacgggtgaccgtggcagtggctgcgttggcggcctgcccatggggtatcccatgggacgcttcaatactgacatggtgtgaagagtctattgagctaattggtagtcctccggcccctgaatgcggctaatcctaactgcggagcagatacccacgcaccagtgggcagtctgtcgtaacgggcaactctgcagcggaaccgactactttgggtgaccgtgtttccttttattttaatattggctgcttatggtgacaattgaaagattgttgccatatagctattggattggccatccggtaacaaacagagcaattatttacctgtttattggttttatacctctcaaccacaaggttataagtactctcaaccttgttttagcatttaacacagcaaa

SEQ ID NO: 979 - DNA, 741 bp, Human enterovirus
  74, strain Rikaze-136/XZ/CHN/2010, complete1
ttaaaacagctctggggttgttcccacccacagggcccactgggcgctagcatactggtatcacggtacctttatgcgcctgttttatccacccctccccaacgtaacctagaagacactcatggatgatcaataggaggctcggcatgccagctgagtctggatcaagcacttctgttgccccggaccgagtatcaataggctgctcacgcggctgaaggagaaaaagttcgttatccggccaattacttcgagaaacccagtaccaccatgaaggttgcgtggcgtttcgctccgcacagccccagtgtagatcaggtcgatgagtcaccgcgttccccacgggcgaccgtggcggtggctgcgttggcggcctgcccatggggtaacccatgggacgcttcaatactgacatggtgcgaagagtctattgagctaattggtagtcctccggcccctgaatgcggctaatcctaactgcggagcagacgtccacaaaccagtgggtggtctgtcgtaacgggcaactctgcagcggaaccgactactttgggtgtccgtgtttcctttattcttatattggctgcttatggtgacaattgagagattgttgccatatagctattggattggccatccggtttgcaatagagcgattatactcctctttgttgggtttgtacctctcaacctcaatagttacaggacattattatacattatccagctgaacacgaaaag

SEQ ID NO: 980 - DNA, 741 bp, Enterovirus sp.
  B, strain LEV14, complete genome.1
taaaacagcctgtgggttgttcccacccacagggcccactgggcgctagcacactggtatcacggtacctttgtgcgcctgttttatttaccctcccccaacgtaacttagaagcatgactcaaatggtcaacagacaactcagcatgccagctgagcctcgaccaagcacttctgttaccccggactgagtaccagtaagctgctcacgcggctgagagggaaaccgttcgttacccggccaattacttcgagaaacctagtaccaccatgaaagttgcgcagtgtttcgctccgcacaaccccagtgtagatcaggtcgatgagtcaccgcaaaccccacgggtgaccgtggcggtggctgcgctggcggcctgcccatggggcagcccatgggacgcttcaatactgacatggtgcgaagagtctattgagctaattggtgatcctccggcccctgaatgcggctaatcctaactgcggagcagatacccacgcaccagtgggcagtctgtcgtaatgggcaactctgcagcggaaccgactactttgggtgtccgtgtttccttttattcttatactggctgcttatggtgacaattgagagattgttgccatatagctattggattggccatccggttacaaacagagcaattacttacctatttgttggttttgtaccactgaactacaaagtcttgaacaccctcaatttcattacaacacctaacacgttaaa

SEQ ID NO: 981 - DNA, 741 bp, Unknown
  Description of Unknown: Human coxsackievirus B4, strain BM24G/NM/CHN/2010, complete genome.1 sequence
ttaaaacagcctgtgggttgttcccacccacagggcccactgggcgctagcacactggtatcatggtacctttgtgtgcctgttttatttcccttccccagatgcaacttagaagcaacactccacgaccactagcaggcgtggcacaccagccatgtcttggtcaagcacttctgtaaccccggactgagtatcaataaactgctcacgcggtcgaaggagaaaacgtccgttacccggccaactacttcgagaaacctagtaacgccatgaaaattgcgaggtgtttcgctcagcacatccccagtgtagatcaggtcgatgagtcaccgcattccccacaggtaactgtggcggtggctgcgttggcggcctgcccatggggtgacccatgggacgcttcaatacggacatggtgtgaagagtctattgagctagttggtagtcctccggcccctgaatgcggctaatcctaactgtggagcatgcgcccccactccagagggtagcgtgtcgtaacgggtaactccgcagcggaaccgactactttgggtgtccgtgtttctttttattcttatattggctgcttatggtgacaattgaaagattgttaccatatagctattggattggccacccagtgacaaacagagcaataatttaccaatttgtgggatttattccaataagtttgaaagtcttgaagacacttaatctagtattacaactcaatagcgcaaa

SEQ ID NO: 982 - DNA, 741 bp, Enterovirus
  B, isolate NL/17-470/FAE/2017 polyprotein gene, complete1
ccagggggccctgtgggtgggtgcaacccacagggcccactgggcgctagcacactggtattacggtacctttgtgcgcctgttttatacacccttaccctatgcaatatagaagcaaaacgacaaggtcaatagagagcccagtgagccaactgggtcgagaccaagcacttctgtttccccggaccgagtatcaataggctgcttacgcggctgaaggagaaaacgttcgttacccggctaactacttcgaaaaacctagtaacgccatggaagttgcgaaccgtttcgctcggcacttccccagtgtagatcaggtcgatgagtcaccgcattccccacgggcgaccgtggcggtggctgcgttggcggcctgcctatggggcaacccataggacgcttcaatatggacatggcgtgaagagtctattgagctagttagtagtcctccggcccctgaatgcggctaatcctaactgcggagcacatgcccccaacccaggaggtggtgtgtcgtaatgggtaactctgcagcggaaccgactactttgggtgtccgtgtttccttttatcccaatgttggctgcttatggtgacaattgaaagattgttaccatatagctattggattggccatccggtgactaacagagcaatcgtttacctattcattggttacgttccattaaatctcaaggaactaacgactctcaattacattttgctcttgaactctgcaaa

SEQ ID NO: 983 - DNA, 741 bp, Unknown
  Description of Unknown: Human coxsackievirus B1, isolate CVB1Nm polyprotein gene, complete1 sequence
ttaaaacagcctgtgggttgttcccacccacagggcccattgggcgctagcactctggtatcacggtacctttgtgcgcctgttttacatcccctccccaaattgtaatttagaagtctcacacaccgatcaatagcaagcgtggcacaccagccatgttttgatcaagcacttctgttacccggactgagtatcaatagaccgctaacgcggttgaaggagaaaacgttcgttacccggccaactacttcgaaaaacctagtaacaccatggaagttgcggagtgtttcgctcagcactaccccagtgtagatcaggtcgatgagtcaccgcgttccccacgggcgaccgtggcggtggctgcgttggcggcctgcctacggggaaacccgtaggacgctctaatacagacatggtgcgaagagtctattgagctagttggtaatcctccggcccctgaatgcggctaatcctaactgcggagcacataccctcaaaccagggggcagtgtgtcgtaacgggcaactctgcagcggaaccgactactttgggtgtccgtgtttcattttattcctatactggctgcttatggtgacaattgacgggttgttaccatatagttattggattggccatccggtgactaacagagcaattatatatctctttgttgggtttataccacttagcttgaaagaggttaaaacactacatctcatcattaaactaaatacaacaaa

SEQ ID NO: 984 - DNA, 741 bp, Unknown
  Description of Unknown: Human coxsackievirus B1, strain MSH/KM9/2009, complete genome.1 sequence
ttaaaacagcctgtgggttgttcccacccacaggcccattgggcgctagcactctggtatcacggtacctttgtgcgcctgttttatacacccttcccaagtgtaacttagaagcttaccacacacggtcaataggcgactcagtaagccaactgggtcttgatcaagcacttctgtttccccggactgagtatcaataagctgctcacgcggctgaaggagaaaacgttcgttaaccggccaattacttcgagaaacctagtaacaccatggaggttgcgcagcgtttcgctccgcacaaccccagtgtagatcaggccgatgagtcaccgcactcctcacgggcgaccgtggcggtggctgcgctggcggcctgcccatggggtaacccatgggacgcttcaatactgacatggtgcgaagagtctattgagctaattggtagtcctccggcccctgaatgcggctaatcctaactgcggagcagatacccacatgccagtgggcagtctgtcgtaatgggcaactctgcagcggaaccgactactttgggtgtccgtgtttccttttattcttatactggctgcttatggtgacaattgagagattgttaccatatagctattggattggccatccagtgacaaacagagcgattatttatttgtttgttggttatatcccattaagccaaaaagtcttagccactctcaatttcatactattgcttaatacaacgaa

SEQ ID NO: 985 - DNA, 742 bp, Coxsackievirus
  A16, isolate CV-A16-A13-BLR-IN, complete genome.1
ttaaaacagcctgtgggttgttcccacccacagggcctactgggcgctagcacactggtatcccggtacctttgtgcgcctgttttatctacccctccccaagtgaaacttagaagatcatcacatatggtcaataggcggctcagtacaccaactgcgtctcgaccaagcacttctgtatccccggactgagtatcaatagactgctcacgcggttgaaggagaaaacgttcgttatccggctaactacttcgggaagcctagtagcaccttgaaagttgcggagtgtttcgctcagcacttcccccgtgtagatcaggccgatgagccactgtaaaccccacgggcgaccgtgacagtggctgcgctggcggcctgcccatgggggaacccatgggacgctctaatactgacatggtgtgaagagtctactgagctagttagtagtcctccggcccctgaatgcggctaatcctaactgcggagcacacaccctcaacccagggggcagtgtgtcgtaatgggtaactctgcagcggaaccgactactttgggtgaccgtgtttccttttattccttattggctgcttatggtgacaattgaaaagttgttaccatatagctattggattggccatccggtatctaatagagctattgtttacttatttattggatacgtccctcttaatttcaaggctatccaaactcttgattatatattgctccttaattataagaa

SEQ ID NO: 986 - DNA, 742 bp, Coxsackievirus
  A16, isolate Wh16, complete genome.1
ttaaaacagcctgtgggttgttcccactcacagggcccactgggcgctagtacactggtatctcggtacctttgtacgcctgttttataccccctccctgatttgcaacttagaagcaacgcaaaccagatcaatagtaggtgtgacataccagtcgcatcttgatcaagcacttctgtatccccggaccgagtatcaatagactgtgcacacggttgaaggagaaaacgtccgttacccggctaactacttcgagaaacctagtaacgccattgaagttgcagagtgtttcgctcagcactccccccgtgtagatcaggtcgatgagtcaccgcattccccacgggcgaccgtggcggtggctgcgttggcggcctgcccatggggtaacccatgggacgctctaatatagacatggtgcgaagagtctattgagctagttagcagacctccggcccctgaatgcggctaatcctaactgcggagcgcgcaccctcaacccagggggcggcgtgtcgtaatgggtaactctgcagcggaaccgactactttgggtgtccgtgtttccttttattctttattggctgcttatggtgacaattgaaaagttgttaccatatagctattggattggccatccggtgtctaacagagctattgtctacctatttattggatacgtccctcttaatctcaaggccattcaaactcttgattatatattgctcctcaactgtaggaa

SEQ ID NO: 987 - DNA, 742 bp, Unknown
  Description of Unknown: Human coxsackievirus A7, strain Parker, complete genome.1 sequence
tttaaaacagcctgtgggttgtccccacccacagggcccactgggcgttagcactctggtattacggtacctttgtgcgcctgttttataacccctccccaactgtaaattagaagcaacacacgtcgatcaatagtaggcgtgacgcaccagtcacgtcttgatcaagcacttctgtttccccggaccgagtatcaatagactgctcacgcggttgaaggagaaaacgttcgttacccgaccaactacttcgaaaaacctagtagcaccatgaaggttgcggagtgtttcgctcggcacttccccagtgtagatcaggtcgatgagtcaccgcattccccacgggcgaccgtggcggtggctgcgctggcggcctgcctatggggtaacccataggacgctctaatacggacatggtgcgaagagtctattgagctagttggtagtcctccggcccctgaatgcggctaatcctaactgcggagcgcgcgcccccattccaggaggtagcgcgtcgtaacgggcaactctgcagcggaaccgactactttgggtgtccgtgtttccttttatctttattctggctgcttatggtgacaattgacagattgttaccatatagctattggattggccatccggtcacaagcagagcgattatctaccaatttattggatttatcccactgcacactcgtgaatataacacattactgctgatactgagtttggacaaagcaaa

SEQ ID NO: 988 - DNA, 742 bp, Unknown
  Description of Unknown: Human coxsackievirus A2, strain Fleetwood, complete genome.1 sequence
ttaaaacagcctgtgggttgcacccacccacagggcccactgggcgctagcactctggtatcacgatacctttgtgcgcctgttttatatccccaccccgagtaaacgttagaagttacgcaaccccgatcaatagtaggtgtagcactccagctgcatcgagatcaagcacttctgtctccccggaccgagtatcaatagactgctaacgcggttgaaggagaaaacgttcgttacccggccaattacttcgagaagcccagtagtgccgtgaaagttgcggagtgtttcgctcagcacttcccccgtgtagatcaggctgatgagtcaccgcgatccccacaggtgactgtggcggtggctgcgttggcggcctgcctatggggcaacccataggacgctctaatacagacatggtgcgaagagcctattgagctaattggtagtcctccggcccctgaatgcggctaatcctaactgcggagcacatgccctcaaaccagggggtggtgtgtcgtaacgggtaactctgcagcggaaccgactactttgggtgtccgtgtttctttttattcttataatggctgcttatggtgacaattaaagaattgttaccatatagctattggattggccatccggtgactaacaaatcgctcatataccagtttgttggttttgttcccttatcacatacagctcataacaccctcttatatttactacaattgaatagcaagaa

SEQ ID NO: 989 - DNA, 742 bp, Unknown
  Description of Unknown: Human coxsackievirusA3, strain Olson, complete genome.1 sequence
ttaaaacagcctgtgggttgtacccacccacagggcccactgggcgctagcacactggtattacggtacctttgtgcgcctgttttataccccccccaacctcgaaacttagaagtaaagcaaacccgatcaatagcaggtgcggcgcaccagtcgcatcttgatcaagcacttctgtaaccccggaccgagtatcaatagactgctcacgcggttgaaggagaaaacgttcgttacccggctaactacttcgagaaacccagtagcatcatgaaagttgcagagtgtttcgctcagcactacccccgtgtagatcaggccgatgagtcaccgcacttccccacgggcgaccgtggcggtggctgcgttggcggcctgcctatggggcaacccataggacgctctaatacggacatggtgcgaagagtctattgagctagttagtagtcctccggcccctgaatgcggctaatcctaactgcggagcacatacccttaatccaaagggcagtgtgtcgtaacgggtaactctgcagcggaaccgactactttgggtgtccgtgtttccttttaatttttactggctgcttatggtgacaattgaggaattgttgccatatagctattggattggccatccggtgactaacagagctattgtgttccaatttgttggatttaccccgctcacactcacagtcgtaagaacccttcattacgtgttatttctcaactcaagaaa

SEQ ID NO: 990 - DNA, 742 bp, Human enterovirus sp.
  80, isolate HZ01/SD/CHN/2004, complete genome.1
ttaaaacagcctgtgggttgatcccacccacagggcccactgggcgctagcacactggtatcccggtacctttgtgcgcctgttttatttacccttccccaatgtaatttagaagtttatcccaaatggtcaatagacaacccagcacgccagctgggcttcgaccaagcacttctgttaccccggaccgagtatcaataggctgctcacgcggctgaaagagaaaatgttcgttacccggccaaccacttcgagaaacttagtatcaccatgaaagttgcgcagtgtttcgctccgcacagccccagtgtagatcaggtcgatgagtcaccgcgttccccacgggcgaccgtggcggtggctgcgttggcggcctgcccatggggcaacccatgggacgcttcaatactgacatggtgcgaagagtctattgagctggttggtagtcctccggcccctgaatgcggctaatcctaactgcggagcagatacctacacaccagtgggcagtctgtcgtaacgggcaactctgcggcggaaccgactactttgggtgtccgtgtttccttttattcttatattggctgcttatggtgacaattgaaagattgttaccatatagctattggattggccatccagtgacaaacagagctatcgtgtacctatttgttggttttgtaccactgaaccgtaaggtgttagacactctaaacctcataattctgttcaattcagcaaa

SEQ ID NO: 991 - DNA, 742 bp, Enterovirus sp.
  B80, isolate HT-LYKH203F/XJ/CHN/2011, complete genome.1
ttaaaacagctctggggttgttcccacccacagggcccaccgggcgccagcactctggtatcacggtacctttgtgcgcctgttttatacccccgtccccggttgtaacttagaagtaacactccacgaccgatagtaggtgtggcacgccagccatgtcttggtcaagcacttctgtttccccggattgagtatcaataggctgttcacacggccgaaggagaaaacatccgttatccggccaactacttcgagaaacctagtaccaccatgaaggttgcgcagtgtttcgctccgcacaaccccagtgtagatcaggccgatgagtcaccgctttccccacgggcgaccgtggcggtggctgcgttggcggcctgcccatggggaaatccatgggacgcttcaatactgacatggtgcgaagagtctattgagctagttggtattcctccggcccctgaatgcggctaatcctaactgcggagcagacacccacatgccagtgggcagtctgtcgtaacgggcaactctgcagcggaaccgactactttgggtgtccgtgtttccttttattcttatactggctgcttatggtgacaattgaaagattgttaccatatagctattggattggccatcctgtgactaacagagctattgtatacctatttgttggttttgtgccactgaattacaaggctttaaacaccctcaactttataatactactcaactcattaaa

SEQ ID NO: 992 - DNA, 742 bp, Enterovirus sp.
  B80, isolate KOUAN67/XZ/CHN/2010, complete genome.1
ttaaaacagctctggggttgttcccacccacagggcccactgggcgccagcactctggtattccggtaccctagtgcgcctgttttatcctcccctccccgttgaaacttagaagcaagtcacatgcggtcaatagggggcctagtatgccaactaggtcacgaccaagcactcctgttaccccggactgagtatcaataagctgctcgcgcggctgaaggagaaaacgttcgttacccggctaattacttcgagaaacccagtaccaccgtgaaggttgcgcagcgtttcgctccgcacaaccccagtgtagatcaggtcgatgagtcaccgcaatccccacaggcgactgtggcggtggctgcgttggcggcctgcccatgggacaacccatgggacgcttcaatactgacatggtgcgaagagtctattgagctaattagtaatcctccggcccctgaatgcggctaatcctaactgcggagcagatacccacacaccagtgggcagtctgtcgtaacgggcaactctgcagcggaaccgactactttgggtgtccgtgtttccttttattcttatactggctgcttatggtgacaattgacagattgttaccatatagctattggattggccatccggtgacgaacagagcgattatttacctgtttgttggttttataccacttaattacaaggttctaaacactctcaacttcattctaacactcaactcaacaaa

SEQ ID NO: 993 - DNA, 742 bp, Unknown
  Description of Unknown: Human coxsackievirus A24, strain BRA87-10629 polyprotein gene,1 sequence
ttaaaacagctctggggttgttcccaccccagaggcccacgtggcggctagtactccggtatcacggtacccttgtacgcctgttttatactccctgccccgtaacttagaagcaaaccaaacaagttcaataggagggggtgcaagcccgcaccaccacgaacaagtactcctgtctccccggtgaggttgtatagactgtacccacggttgaaaacgactgatccgttatccgctctagtacttcgggaagcctagtagcattttggaatcttcgatgcgttgcgctcagcactcaaccccggagtgtagcttaggtcgatgagtctggacatcccccaccggtgacggtggtccaggctgcgttggcggcctacctgtggtccaaagccacaggacgctagttgtgaacaaggtgtgaagagcctactgagctactagagagtcctccggcccctgaatgcggctaatcctaaccacggagcaggtagttgcaacccagcaaccagtctgtcgtaatgcgcaagtctgtggcggaaccgactactttgggtgaccgtgtttccttttattttcatatatggctgcttatggtgacaatcattgattgttatcatatagcgacttggattggccatccggtgagaattagaactactgtttacccgtttgctgatttttgataacactccacacacttaccatttgagaattgtactgttggcaagacagcaccattata

SEQ ID NO: 994 - DNA, 742 bp, Human echovirus
  9, strain Barty, complete genome.1
ttaaaacagcctgtgggttgttcccacccacagggcccattgggcgctagcacactggtatcacggtacccttgtgcgcctgttttatccacccctccccatcgtaacctagaagcatgactccaacggtcaatagacagctcagtaaaccaattgagccttgaccaagcacttctgttaccccggactgagtatcaataggctgctcacgcggccgaaggagaaaatgttcgttacccggccaattacttcgagaaacctagtaccaccatgaaggttgcgcggtgtttcgctcagcacaaccccagtgtagatcaggccgatgagtcaccgcattccccacgggtgaccgtggcggtggctgcgctggcggcctgcccatggggcaacccatgggacgcttcaatactgacatggtgtgaagagtctattgagctaattggtagtcctccggcccctgaatgcggctaatcctaactgcggagcagatacccacgcaccagtgggcagtctgtcgtaacgggcaactctgcagcggaaccgactactttgggtgtccgtgtttccttttattcttgtactggctgcttatggtgacaattgagagattgttaccatatagctattggattggccatccagtgtcaaacagagcgattgtctacttgttcattggttttataccattgagttacaaggttctagccactcttaacttcattttaacactcaatacatcaaa

SEQ ID NO: 995 - DNA, 742 bp, Human echovirus
  9, isolate DM, complete genome.1
ttaaaacagcctgtgggttgttcccacccacagggcccatggggcgcaagcacactggtattgcggtacctttgtgcgcctgttttatccacccttccccaatgaaacttagaagcttgactcaaacggtcaatagacagcccagtgcaccaactgggtctcgaccaggcactcctgtttccccggactgagtatcaataggctgcttgcgcggctgaaggagaaaacgttcgttacccggccaattacttcgagaaacctagtaccaccatggacgttgcgcagtgtttcgctccacacaaccccggtgtagatcaggtcgatgagtcaccgcaatccccacgggcgaccgtggcggtggctgcgctggcggcctgcccatggggcaacccatgggacgcttcaatactgacatggtgcgaagagtctattgagctaattggtagtcctccggcccctgaatgcggctaatcctaactgcggagcagatacccacataccagtgggcagtctgtcgtaacgggcaactctgcagcggaaccgactactttgggtgtccgtgtttccttttattcttatattggctgcttatggtgacaattgaaaggttgttaccatatagcttttggattggccatccagtgagcaacagagcgatcatactcctttttgttgggtttgtaccacttgattatagtagttacaacaccttgctatacgtcattcatttaaacacgagaaa

SEQ ID NO: 996 - DNA, 742 bp, Human enterovirus sp.
  101, strain CIV03-10361, complete genome.1
ttaaaacagcctgtgggttgttcccacccacagggcccactgggcgccagcactctggtattacggtacctttgtgcgcctgttttatatccccctccccacttgaaacttagaagtgaaacacactgatcaatagttgacatggcaagccagccatgtcttgatcaagcacctctgtttccccggacctagtatcaatagactgctcgcgcggttgaaagagaaagcgttcgttacccggctaactacttcgagaaacttagtaacaccatggaagttgcggagtgtttcgctcagcacatccccagtgtagatcaggccgatgagtcaccgcattccccacgggcgaccgtggcggtggctgcgttggcggcctgcctgtggggcaacccacaggacgctctaatacaaacatggtgcgaagagtctattgagctagttagtagtcctccggcccctgaatgcggctaatcctaactgcggagcacgtgcttccaatccaggaggtggcgtgtcgtaacgggtaactctgcagcggaaccgactactttgggtgtccgtgtttccttttattcttgcattggctgcttatggtgacaattgagagattgttaccatatagctattggattggccatccggtgacaaacagagcaattatatatctctttgttggatacattccattgaactacaaggagttaaaaaccctcaattatattctgttcttgaattccgcaag

SEQ ID NO: 997 - DNA, 742 bp, Human echovirus
  16, strain Harrington complete genome.1
ttaaaacagcctgtgggttgttcccacccacagggcccactgggcgcaagcacactggtattacggtacctttgtgcgcctgttttacatcccctctcccattataacttagaagcacatacaaaacgaccaataggtggtccagcactccagctgggctctggtcaagtacttctgttaccccggactaagtatcaataagcggctaacgcggctgaaggagaaagcgtccgttacccggccaactacttcgggaaatctagtaacaccatgaaggttgcgcagtgtttcgctccgcacaaacccagtgtagatcaggtcgatgagtcaccgcattccccacaggcgactgtggcggtggctgcgttggcggcctgcccatggggcaacccatgggacgcttcaatactgacatggtgcgaagaatctactgagctagttggtagtcctccggcccctgaatgcggctaatcctaactgcggagcacatacccctaacccaaggggcagtgtgtcgtaacgggcaactctgcagcggaaccgactactttgggtgtccgtgtttccttttattcttatactggctgcttatggtgacaattgagaaattgttaccatatagcttttggattggccatccagtgactaacagagctattatttacttgtttgttggctttgtaccactcaaccttagagttttaaggactctcaatttggttctgctatcgaatacaacaaa

SEQ ID NO: 998 - DNA, 742 bp, Enterovirus sp.
ttaaaacagcctgtgggttgttcccacccacagggcccactgggcgctagcacactggtatcacggtacctttgtgcgcctgttttatatccccctccccactgtaacttagagaaatcacataaacgatcaatagaaggcgcagcacaccagctgagtcttgaccaagcacttctgtttccccggactgagtatcaatagactgctcacgcggttgaaggagaaaacgttcgttacccggccaactacttcgagaaacctagtaccaccatgaaagttgcgcagtgtttcgctcagcacaaccccagtgtagatcaggtcgatgagtcaccgcattccccacgggcgaccgtggcggtggctgcgttggcggcctgcctatggggcaacccatgggacgcttcaatactgacatggtgcgaagagtctattgagctagttggtagtcctccggcccctgaatgcggctaatcctaactgcggagcaagtgcccacaaaccagtgggtagcttgtcgtaacgggcaactctgcagcggaaccgactactttgggtgtccgtgtttccttttattcttattctggctgcttatggtgacaattgagagattgttaccatatagctattggattggccatccggtgactaacagagcaatcatattcctctttgttggatttataccacttgattccactagttacaacactctgctacacattatttacttaaaaccaagaag

SEQ ID NO: 999 - DNA, 742 bp, Echovirus 5
  complete genome.1
ttaaaacagcctgtgggttgcacccacccacagggcccactgggcgctggtacactggtattaaggtacccttgtacgcctgttttatatccctcccccgatttgtaacttagaattaaagcaaacccgatcaatagtaggtgtggcaaaccagccacatcttgatcaagcacttctgtttccccggaccgagtatcaatagactgctgacgcggttgaaggagaaaacgttcgttacccggccaactacttcgggaaacctagtaccaccatgaaggttgcgcagtgtttcgctccgcacaaccccagtgtagatcaggtcgatgagccaccgcattccccacaggcgactgtggcggtggctgcgttggcggcctgcccatggggtaacccatgggacgcttcaatactgacatggtgcgaagagtccactgagctagttggtattcctccggcccctgaatgcggctaatcctaactgcggagcaggcacccacgagccagtgggcagcctgtcgtaatgggtaactctgcagcggaaccgactactttgggtgtccgtgtttccattttctttttattggctgcttatggtgacaatcacggaattgttaccatatagctattggattggccatccagtgactaacagagcagtaatattcctttttgttggttttgtaccactcaccgtcacgagcctcagaacactcgtattcatcttaacccttaacaagataaa

SEQ ID NO: 1000 - DNA, 742 bp, Human echovirus
  19, strain Burke complete genome.1
ttaaaacagcctgtgggttgtacccacccacagggcccaatgggcgctagcactccggtattacggtacccttgtgcgcctgttttatttccccttccccaactgaaacttagaagaaatacacaatgatcgacagtaagcgtggcgcaccagccatgttttgatcaagcacttctgtttccccggaccaagtatcaatagactgctcacgcggttgaaggagaaagcgttcgttaaccggctaactacttcgagaaacccagtaacaccatgaaagttgcagagtgtttcgctcagcactcccccagtgtggatcaggtcgatgagtcactgcgttccccacgggtgaccgtggcagtggctgcgttggcggcctgcctgtggggcaacccacaggacgctctaatacggacatggtgtgaagagtctattgagctagttagtagtcctccggcccctgaatgcggctaatcctaactgtggagcacatgcccctaacccaaggggtggtgtgtcgtaatgggtaactccgcagcggaaccgactactttgggtgaccgtgtttccttttatttttacattggctgcatatggtgacgattgagagattgttgccatatagctattggattggccatccagtgtctaacagagctattgtatatctttttgttggatttgtaccacttgacttgaaagaggtcaggacactacaatacattatactgctgaatactgcaaa

SEQ ID NO: 1001 - DNA, 742 bp, Human echovirus
  24, strain DeCamp complete genome.1
ttaaaacagcctgtgggttgcacccacccacagggcccacagggcgctagcactctggtatcacggtacctttgtgcgcctgttttattaccccttccccaattgaaaattagaagcaatgcacaccgatcaacagcaggcgtggcgcaccagtcacgtctcgatcaagcacttctgtttccccggaccgagtatcaatagactgctcacgcggttgaaggagaaagtgttcgttatccggctaaccacttcgagaaacccagtaacaccatgaaagttgcagggtgtttcgctcagcacttccccagtgtagatcaggtcgatgagtcaccgcgttccccacgggcgaccgtggcggtggctgcgttggcggcctgcctatgggttaacccataggacgctctaatacagacatggtgcgaagagtttattgagctggttagtatccctccggcccctgaatgcggctaatcctaactgcggagcacgtgcctccaatccagggggttgcatgtcgtaacgggtaactctgcagcggaaccgactactttgggtgtccgtgtttccttttattcttatactggctgcttatggtgacaatcgaggaattgttaccatatagctattggattggccatccggtgtctaacagagcgattatatacctctttgttggatttatgcagctcaataccaccaactttaacacattgaaatatatcttaaagttaaacacagcaaa

SEQ ID NO: 1002 - DNA, 742 bp, Coxsackievirus
  B3 clone CV-B3/28 2A C107S, complete genome.1
ttaaaacagcctgtgggttgatcccacccacagggcccattgggcgctagcactctggtatcacggtacctttgtgcgcctgttttataccccctcccccaactgtaacttagaagtaacacacaccgatcaacagtcagcgtggcacaccagccacgttttgatcaagcacttctgttaccccggactgagtatcaatagactgctcacgcggttgaaggagaaagcgttcgttatccggccaactacttcgaaaaacctagtaacaccgtggaagttgcagagtgtttcgctcagcactaccccagtgtagatcaggtcgatgagtcaccgcattccccacgggcgaccgtggcggtggctgcgttggcggcctgcccatggggaaacccatgggacgctctaatacagacatggtgcgaagagtctattgagctagttggtagtcctccggcccctgaatgcggctaatcctaactgcggagcacacaccctcaagccagagggcagtgtgtcgtaacgggcaactctgcagcggaaccgactactttgggtgtccgtgtttcattttattcctatactggctgcttatggtgacaattgagagattgttaccatatagctattggattggccatccggtgaccaatagagctattatatatctctttgttgggtttataccacttagcttgaaagaggttaaaacattacaattcattgttaagttgaatacagcaaa

SEQ ID NO: 1003 - DNA, 742 bp, Enterovirus sp.
  B111, strain Q0011/XZ/CHN/2000, complete genome.1
ttaaaacagcctgtgggttgttcccacccacagggcccactgggcgccagcacactggtatcacggtacccttgtgcgcctgttttataaacccttccccaatgcaacttagaagctcaactttaccggtcaatagacagtccagtacgccaactgggcttcgatcaagcacttctgttaccccggactaagtatcaataggctgctcacgcggctgaaggagaaaacgttcgttacccggccaattacttcgagaaacccagtaacactatggaggttgcgcagtgtttcgttccacacaaccccagtgtagatcaggtcgatgagtcaccgctttccccacgggcgaccgtggcggtggctgcgttggcggcctgcccatggggcaacccatgggacgcttcaatactgacatggtgtgaagagtctattgagctaattggtattcctccggcccctgaatgcggctaatcctaactgcggagcagatactcacgagccagtgggcagtctgtcgtaacgggtaactctgcagcggaaccgactactttgggtgtccgtgtttccttttattcatatattggctgcttatggtgacaattgagagattgttaccatatagctattggattggccatccggtgactaatagagcaattgtttacctatttgttggctttgtgccgttgaactacaaggttttaaaaactattaactacatcctagtacttaacacgttgaa

SEQ ID NO: 1004 - DNA, 742 bp, Human echovirus
  7, strain Wallace polyprotein gene, complete cds.1
ttaaaacagcctgtgggttgttcccacccacagggcccattgggcgtcagcaccctggtatcacggtacctttgtgcgcctgttttatatcccttcccccaattgtaacttagaagaaacacacaccgatcaacagcaagcgtggcacaccagccatgttttggtcaagcacttctgttaccccggactgagtatcaatagactgctcacgcggttgaaggagaaagcgtccgttatccggccagctacttcgagaaacctagtaacaccatggaagttgcggagtgtttcgctcagcactaccccagtgtagatcaggtcgatgagtcaccgctttccccacgggcgaccgtggcggtggctgcgttggcggcctgcctatgggggaacccataggacgctctaatacagacatggtgcgaagagtctattgagctagctggtattcctccggcccctgaatgcggctaatcctaactgtggagcacatgcccctaatccaaggggtagtgtgtcgtaatgagcaattccgcagcggaaccgactactttgggtgtccgtgtttcctcttattcttgtactggctgcttatggtgacaattgagagattgttaccatatagctattggattggccatccggtgactaatagagctattgtgtatctctttgttggatttgtaccacttaatttgaaagaaatcaggacactacgctacattttactattgaacaccgcaaa

SEQ ID NO: 1005 - DNA, 742 bp, Human echovirus
  3 gene for polyprotein, genomic RNA,strain1
ttaaaacagcctgtgggttgtacccacacacagggcccactgggcgctagcacactggtatcacggtacctttgtgcgcctgttttataaccccttccccaaacgtaacgtagaagccacacacactgatcaacagtgggcacagcgcaccagccgtgtctcgatcaagcacttctgttttcccggactgagtatcaatagactgctcacgcggttgaaggagaaaacgttcgttacccggctgactacttcgagaagcttagtaacgctatgaaagttgcgaagtgtttcgttcagcactccccccgtgtagatcaggtcgatgagtcaccgcattccccacgggtgaccgtggcggtggctgcgctggcggcctgcccatggggtgacccatgggacgcttcaatacagacatggtgcgaagagcctattgagctagtcagtagtcctccggcccctgaatgcggctaatcctaactgcggagcatgtgccctcaatccagagggtagcgtgtcgtaacgggcaactctgcagcggaaccgactactttgggtgtccgtgtttctttttattcttatattggctgcttatggtgacaattgagagattgttgccatatagctattggattggccatccggtgagtaacagagctattatttactccatcgtaggcttcgtgccattgaactacaaggtcttgaaaactctcaactttgttataatacttaataccacaaa

SEQ ID NO: 1006 - DNA, 742 bp, Enterovirus sp.
ttaaaacagcctgtgggttgttcccacccacagggcccactgggcgctagcacactggtatcacggtacccttgtgcgcctgttttatcttcccctccccactgtaacttagaagaatgacataaacggtcaacagatagctcagtacaccaactgagccccgaccaagcacttctgttaccccggaccgagtaacaataggctgctcgcgcggctgaaggtgaaaacgttcgttacccggccaattacttcgagaaacctagtaccaccatgaaggttgcgcagcgtttcgctccgcacaaccccagtgtagatcaggtcgatgagtcaccgcactccccacgggcgaccgtggcggtggctgcgctggcggcctgcctatggggcaacccatgggacgcttcaatactgacatggtgcgaagagtctattgagctaattggtagtcctccggcccctgaatgcggctaatcctaactgcggggcaagtgcccacaaaccagtgggtggcttgtcgtaacgggtaaccctgcagcggaaccgactactttgggtgtccgtgtttccttttattcttattctggctgcttatggtgacaattgagagattgttgccatatagctattggattggccatctggtgagtaacagagcaatcatattcctctttgttggatttataccacttgattccactagttacaacactctgctacatattatttgcttaaatacaagaag

SEQ ID NO: 1007 - DNA, 742 bp, Echovirus
  E19, strain NGR_2014, complete genome.1
ttttaaagcctgtgggttgttcccacccacagggcccattgggcgctagcactctggtattgcggtacctttgtgcgcctgttttatatccccctcccccatttgaaacttagaagcaagacacaccgatcaatagctgatatggcaagccagccatatcttgatcaagtacttctgtttccccggaccgagtatcaatagactgcttgcgcggtcgaaggagaaagcgttcgttacccggctaattacttcgagaaacctagtaacaccatgaaagttgcagagtgtttcgctcagcacaaccccagtgtagatcaggctgatgagtcaccgcattccccacgggtgaccgtggcggtggctgcgttggcggcctgcctgtggggcaacccacaggacgctctaatacagacatggtgtgaagagtctattgagctaattagtagtcctccggcccctgaatgcggctaatcctaactgcggagcacgtacccccattccaggaggtggcgtgtcgtaacgggtaactctgcagcggaaccgactactttgggtgtccgtgtttccttttatctttacactggctgcttatggtgacaattgaaagattgttaccatatagctattggattggccatccggtgacaaatagagcgattgtatatttgttcattggatttgtaccactaagctataaagcattaaacactcttaaccttatcctagtgcttaactcaacaaa

SEQ ID NO: 1008 - DNA, 742 bp, Echovirus
  E9, strain MSH/KM812/2010, complete genome.1
ttataaacagcgggctgggttgctcccactacagggcccacggcgcgcaagcacactggtatcacggtacttttgtgcgcctgttttatccaccctcccccaatgaaacttagaagcttgattcaaacggtcaatagacaacccagtacaccaactgggtctcgaccaagcacctctgtttccccggactgagtatcaataggctgcttacgtggctgaaggagaaaacgttcgttacccggccaattacttcgagaaacctagtaccaccatgaacgttgcgcagtgtttcgctccacacaaccccagtgtagatcaggtcgatgagtcaccgcattccccacgggtgaccgtggcggtggctgcgctggcggcctgcccatggggtaacccatgggacgctacaatactgacatggtgtgaagagtctattgagctaattggtagtcctccggcccctgaatgcggctaatcctaactgcggagcagatactcacatgccagtgggcagtctgtcgtaacgggcaactctgcagcggaaccgactactttgggtgtccgtgtttccttttattctcatctggctgcttatggtgacaatcgaaagactgttaccatatagctattggattggccatccagtgagtaacagagcgatcattttcctttttgttgggtttataccacttgattacaatagttacaataccttgctatacatcgttcatttgaacacaacaag

SEQ ID NO: 1009 - DNA, 742 bp, Enterovirus sp.
  B84, isolate AFP452/GD/CHN/2004, complete genome.1
ttaaaacagcctgtgggttgttcccacccacagggcccactgggcgctagcacactggtatcacggtacccttgtgcgcctgttttatcaaccccttcccgatgtaacttagaagccaaatcttaccggtcaacaggtggtccagtatgccaactgggctctgaccaagcacttctgttaccccggactgagtatcaataggctgctcacgcggctgaaggagaaaatgtccgttacccggccaattacttcgagaaacctagtaccaccatgaaggttgcgcggcgtttcgctccacacaaccccagtgcagatcaggtcgatgagccaccgcttcccccacgggcgaccgtggcggtggctgcgttggcggcctgcccatgggacaacccatgggacgcttcaatactgacatggtgcgaagagtctattgagctaattggtagtcctccggcccctgaatgcggctaatcctaactgtggagcagatgcccgcaagccagcgggtggtctgtcgtaacgggcaactccgcagcggaaccgactactttgggtgaccgtgtttccttttatttttatactggctgcttatggtgacaattgaaagattgttaccatatagctattggattggccatccggtgactaacagagctatcatatatctatttgttggttacgtcccacttgactatagagttctacgcaccttatatttcattttagatctgaacaaagcgag

SEQ ID NO: 1010 - DNA, 742 bp, Human enterovirus sp.
  106, isolate 148/YN/CHN/12, complete genome.1
ttaaaacagcctgtgggttgttcccacccacagggcccatggggcgccagcacactggtattgcggtacctttgtgcgcctgttttattcaccctttcccaatgaaacttagaagcttaactcaaccggtcgatagacagcccagtacaccaactgggttttgaccaagtactcctgtttccccggactgagtatcaataagctgctcgcgcggctgaaggagaaaacgttcgttacccggccaattacttcgagaaacctagtaccaccatgaacgttgcgcagtgtttcgctccgcacaaccccagtgtagatcaggtcgatgagtcaccgcaatccccacgggcgaccgtggcggtggctgcgctggcggcctgcccatggggcatcccatgggacgcttcaatactgacatggtgcgaagagtctattgagctaattggtaatcctccggcccctgaatgcggctaatcctaactgcggggcagacacccacacgccagtgggcagtctgtcgtaacgggtaactccgcagcggaaccgactactttgggtgtccgtgtttccttttatctttatattggctgcttatggtgacaattgaaagattgttgccatatagctattggattggccatccggtgtctaatagagcaattatatatctctttgttggcttcatcccgttaaataaagtgagctaccagaccctgtgctatattatcaaattgaacacaataaa

SEQ ID NO: 1011 - DNA, 742 bp, Human echovirus
  6, strain Charles, complete genome.1
ttaaaacagcctgtgggttgcccccacccgcagggcccattgggcgctagcacactggtatcacggtacctttgtgcgcctgttttatcctccctccccaagtgcaacgtagaagcaagacacaaaaggtcaacagatagcccagcacaccagttgggtttcgaccaagcacttctgtctccccggaccgagtatcaataagctgctcacgcggctgaaggagaaagcgttcgttacccggctagttacttcgagaaacccagtaccaccatgaaggttgcgcagcgtttcgctccgcacaaccccagtgtagatcaggtcgatgagtcaccgcgttccccacgggcgaccgtggcggtggctgcgttggcggcctgcccatggggcaacccatgggacgcttcaatactgacatggtgcgaagagtctattgagctaactagtagtcctccggcccctgaatgcggataatcttaactgcggagcaggtgctcacaatccagtgggtggcctgtcgtaacgggcaactctgcagcggaaccgactactttgggtgtccgtgtttccttttatctctttgttggctgcttatggtgacaattgaatgattgttgccatatagctattggattggccatccggtgagcagcagatccattatttaccagtttgttggatttgtaccacttgatcacatagtctttagaacacttgtctttattctaaatcttaacaaggcaag

SEQ ID NO: 1012 - DNA, 742 bp, Human enterovirus sp.
  85, strain BAN00-10353, complete genome.1
ttaaaacagcctgtgggttgttcccacccacagggcccaccgggcgctagcacactggtattgcggtacctttgtgcgcctgttttatacacccctccttaatgtaactcagaagtacaacattaccggtcaacagatgactcagtaaaccaactgagcctcgaccaagcacttctgtttccccggaccgagtatcaataggctgctcacgcggctgaaggagaaagtgttcgttacccggccaattacttcgagaagcccagtaccaccatggaggttgcgcggcgtttcgctccgcacatccccagtgtagatcaggctgatgagtcaccgcgttccccacgggtgaccgtggcggtggctgcgctggcggcctgcccatggggtaacccatgggacgcttcaatactgacatggtgtgaagagcctattgagctaattggtagtcctccggcccctgaatgcggctaatcctaactgcggagcagatacccacacaccagcgggcagtctgtcgtaacgggcaactctgcagcggaaccgactactttgggtgtccgtgtttccttttatttttatgctggctgcttatggtgacaattgaggaattgttaccatatagctattggattggccatccagtgtccaacagagcgatcatttacctgttcgttgggttcgtaccactaaaccacaagtcactcagcacacttaattacattataactctcaacacaacaag

SEQ ID NO: 1013 - DNA, 742 bp, Human enterovirus sp.
  97 genomic RNA, complete genome,strain:1
ttaaaacagcctgtgggttgttcccatccacagggcccactgggcgctagcacactggtatcacggtacctttgtgcgcctgttttatttcccccctcccgaagtaacctagaagcaggtaatatacggtcaataggtgacacagtataccaactgggtcttgaccaagcacttctgttaccccgggctgagtatcaataagctacttacgtggctgaaggagaaaacgctcgttacccggccaattacttcgagaaacctagtaacaccatgaaggttgcgcagtgtttcgctccgcacaaccccagtgtagaccaggtcgatgagtcaccgcattccccacgggcgaccgtggcggtggctgcgttggcggcctgcccatggggcaacccatgggacgcttcaaaactgacatggtgcgaagagtctattgagctaattggtagtcctccggcccctgaatgcggctaatcccaactgcggagcaaatacccacatgccagtgggcagtctgtcgtaatgggtaactctgcagcggaaccgactactttgggtgtccgtgtttctttttattcttatactggctgcttatggtgacaattgaggaattgttgccatatagctattggattggccatccggtgacaaacagagcaattatttacttgtttgttggattcgtaccgctaaaccacagagtactaagcacccttaattttattatattacttaactcgacaaa

SEQ ID NO: 1014 - DNA, 742 bp, Coxsackievirus
  B2, strain Ohio-1 polyprotein gene, complete cds.1
ttaaaacagcctgtgggttgttcccacccacagggcccactgggcgctagcacactggtattacggtacctttgtgcgcctgttttatctacccttgcccaatgcaacatagaagcttagtccaaaaggtcaataggcagcccagtgcaccaactgggtccagaccaagcacttctgttaccccggaccaagtatcagtaggctgctcacgcggctgaaggagaaaacgttcgttacccggccaactacttcgagaaacctagtagcaccatgaaggttgcgcagtgtttcgctccgcacagccccagtgtagatcaggtcgatgagccaccgcattccccacgggtgaccgtggcggtggctgcgttggcggcctgcccatggggtaacccatgggacgcttcaatactgacatggtgtgaagagtctattgagctagttggtagtcctccggcccctgaatgcggctaatcctaactgcggagcgtgcgcttgcaacccagtgagtagcacgtcgtaatgggtaactctgcagcggaaccgactactttgggtgtccgtgtttccttttattccttgtctggctgcttatggtgacaattgagagattgttgccatatagctattggattggccatccggtatctaacagggcgatcatttacctgtttgttggtttcatacccttgaatcttgaggtttataataccctcactcttataataaaactcaatacatcaag

SEQ ID NO: 1015 - DNA, 742 bp, Human echovirus
  13, strain Del Carmen complete genome.1
ttaaaacagcctgtgggttgtacccacccacagggcccactgggcgccagcacactggtatcacggtacccttgtgcgcctgttttatccacccctccccgaagtaacttagaagctctaaataagcggtcagcagccagcccagcacaccagctgggttttgaccaagtacttctgttaccccggaccgagtatcaataggctgcacacgcggctgaaggagaaaacgttcgttacccggccatctacttcgagaaacctagtaccactatgaaagttgcgaagcgtttcgctccacacaaccccagtgtagatcaggctgatgagtcaccgcattccccacaggtgactgtggcggtggctgcgttggcggcctgcccatggggcaacccatgggacgcttcaataccgacatggtgcgaagagtctattgagctagatggtagtcctccggcccctgaatgcggctaatcctaactgcggagcaggtgcacacaaaccagtgagtagcctgtcgtaatgggcaactctgcagcggaaccgactactttgggtgtccgtgtttctttttattcttatattggctgcttatggtgacaattgaaagattgttaccatatagctattggattggccatccggtgactagcagagcactgatatacctatttgtgggctttgtaccactcaactttgtcagctacaccacattgctatatattgtccaactgaacgcaagaag

SEQ ID NO: 1016 - DNA, 742 bp, Coxsackievirus
  B2 gene for polyprotein, complete cds,strain:1
ataaaacagcctgtgggttgttcccacccacagggcctactgggcgctagcacactggtattgcggtacctttgtgcgcctgttttatctgcccttccccaatgtaacttagaagttaaactcagacggccaatagacagcccagtacaccaactgggtctcggccaggcacttctgtttccccggactgagtatcaataagctgctcgcgcggctgaaggagaaaacgttcgttatccggccaattacttcgagaaacctagtaccaccatggacgttgcgcagtgtttcgctccgcacaaccccagtgtagatcaggtcgatgagtcaccgcaatccccatgggcgaccgtggcggtggctgcgctggcggcctgcccatgggtcaacccatgggacgcttcaatactgacatggtgtgaagagtctattgagctaattggtagtcctccggcccctgaatgcggctaatcccaactgcggagcagatacccacacgccagtgggcagtctgtcgtaacgggcaactctgcagcggaaccgactactttgggtgtccgtgtttccttttatccttacattggctgcttatggtgacaattgagagattgttaccatatagctattggattggccatccagtgagcaacagagcaattatatttctctttgttgggtttgtaccacttgattttgatagttacaacaccctactttatattgttcgcctgaacacgagaaa

SEQ ID NO: 1017 - DNA, 742 bp, Enterovirus sp.
  D111, strain ANG/2010-23294, complete genome.1
ttaaaacagctctggggttgttcccaccccagaggcccacgtggcggccagtactccggtattgcggtacccttgtacgcctgttttatactcccttcccccgtaacttagaagaaataaaccaagttcactaggagggggtacaaaccagtaccaccacgaacaagcacttctgtttccccggtgacattgcatagactgtacccacggttgaaagcgactgatccgttacccgctactgtacttcgagaagcctagtaccatcttggaatcttcgacgcgttgcgctcagcactcaaccccagagtgtagcttaggtcgatgagtctggacaatccccaccggtgacggtggtccaggctgcgttggcggcctacctgtggcccaaagccacaggacgctagttgtgaacaaggtgtgaagagcctattgagcttcagtagagtcctccggcccctgaatgcggctaatcccaaccacggagcaggtggtcataatccaatgactggcctgtcgtaacgcgcaagtctgtggcggaaccgactactttgggtgtccgtgtttccttttattttgtcaatggctgcttatggtgacaatctaagattgccatcatatagcttttggattggccatccggtattattttgagttatttgatttgttgtccacagctctttacagtatcacttaactattattgtttgtattttgctccttggatcacaaccaggtaatcaga

SEQ ID NO: 1018 - DNA, 742 bp, Human echovirus
  20, strain JV-1 complete genome.1
ttaaaacagcctgtgggttgttcccacccacagggcccattgggcgctagcactctggtattacggtacctttgtgcgcctgttttatgtcccctcccccaatcgcaacttagaagcaacacacactgatcaacagtaagcgtggcataccagccacgttttgatcaagcacttctgttaccccggactgagtatcaatagactgctcacgcggttgaaggagaaagcgttcgttatccggccaactacttcgagaaacctagtaacaccgtgaaagttgcagagtgtttcgctcagcactaccccagtgtagatcaggtcgatgagtcaccgcattccccacgggcgaccgtggcggtggctgcgctggcggcctgcctacggggaaacccgtaggacgctctaatacagacatggtgcgaagagtctattgagctagttggtagtcctccggcccctgaatgcggctaatcctaactgcggagcacacacccccaagccagggggcagtgtgtcgtaacgggtaactctgcagcggaaccgactactttgggtgtccgtgtttcattttattcctatgctggctgcttatggtgacaattgacagattgttaccatatagctattggattggccatccggtgactaatagagccattatataccactttgttgggtttataccactcaacttgaaagaggtcaaaacactacagctcatcattaaattgaacacaacaaa

SEQ ID NO: 1019 - DNA, 742 bp, Human enterovirus sp.
  83, strain USA/CA76-10392, complete genome.1
tttaaaacagcctgtgggttgttcccacccacagggcccactgggcgctagcactctggtatcacggtacccttgtgcgcctgttttatatccccaccccagtggaacattagaagcagcacacctatgatcaatagtgggcgtggcatccagtcacgttatgatcaagcacttctgtgaccccggactgagtatcaatagactgctcacgcggttgaaggagaaaacgttcgttacccggccagttacttcgagaaacccagtaacaccatgaatgttgcagagtgtttcgctcagcacttcccccgtgtagatcaggtcgatgagccactgcattccccacgggcgaccgtggcagtggctgcgttggcggcctgcctatggggtcacccataggacgctctaatactgacatggtgcgaagagtctattgagctaactggtagtcctccggcccctgaatgcggctaatcctaactgtggagcacattcccccaatccagggggcagtgtgtcgtaacgggcaactctgcagcggaaccgactactttgggtgtccgtgtttctttttattctcatattggctgcttatggtgacaattacagaattgttaccatatagctattggattggccatccggtgactaacagagcaattatttatcaattcgttggatttgtcccactcgatttcaaagcagtcaatacactctcatatatcgttacactcaacacaacaaa

SEQ ID NO: 1020 - DNA, 742 bp, Human enterovirus sp.
  97, strain 99188/SD/CHN/1999/EV97, complete1
ttaaaacagcctgtgggttgttcccacccacagggcccactgggcgctagcacactggtatcacggtacctttgtgcgcctgttttatccacccttccccaagtgacttagaagcataccacacacggtcaacaggcggctcaatgcaccaattgagtcatgaccaagtacttctgttaccccggacttagtatcaataagctgctcacgcggctgaaggagaaaacgttcgttacccggccaattacttcgagaaacctagtagcaccatggaggttgcgcggcgtttcgctccacacaaccccagtgtagatcaggctgatgagtcaccacaatcctcacgggcgaccgtggtggtggctgcgctggcggcctgcccatggggtaacccatgggacgctacaatactgacatggtgtgaagagtctattgagctaattggtagtcctccggcccctgaatgcggctaatcctaactgcggagcagatacccacacaccagtgggcagtctgtcgtaacgggcaactctgcagcggaaccgactactttgggtgtccgtgtttccttttttctcttatactggctgcttatggtgacaattgaaagattgttaccatatagctattggattggccatccagtgacaaacagagcgattgtttacctgttcattggtttcgtaccgctgaattacacagttttaaacacccttaatcttattttggcacttaatacatcaaa

SEQ ID NO: 1021 - DNA, 742 bp, Enterovirus sp.
  B, isolate EIS6B polyprotein gene, complete cds.1
ttaaaacagctctggggttgtacccactcacagggcccactgggcgctagcacactggtatcacggtacctttgtgcgcctgttttataaccccttccccaaacgtaacgtagaagctacacacactgatcaatagtaggcacagcgcaccagttgtgtcccgatcaagcacttctgtctccccggaccgagtatcaatagactgctcacgcggttgaaggagaaaacgttcgttaaccggctgactacttcgagaaacctagtagtactatgaaagttgcgaagcgtttcactcagcacttcccccgtgtagatcaggctgatgagtcactgcgttccccacgggtgaccgtggcagtgactgcgttggcggcctgcccatggggtaacccatgggacgcttcaatacggacatggtgcgaagagtctattgagctagccagtagtcctccggcccctgaatgcggctaatcctaactgcggagcatgtgccctcgatccagggggtagcgtgtcgtaacgggcaactctgcagcggaaccgactactttgggtgtccgtgtttctttttattcttatattggctgcttatggtgacaattgagagattgttaccatatagctattggattggccacccggtgactaatagagctattatctactcctttataggttttgtgccgttgaactacaaggtcttaaggactctcaactttatcataatacttaatactgcaaa

SEQ ID NO: 1022 - DNA, 742 bp, Echovirus
  25 mRNA for partial polyprotein,isolate M1262.1
ttaaaacagcctgtgggttgttcccatccacagggcccactgggcgcttgcactctggtatcacggtaccattgtgcgcctgttttatatcccctatccccagttgtaacttagaagcgatgccttccgaccaatagtgggcatggcacaccagtcatgtcttggtcaagtacacctgtttccccggactgagtatcaatagactgctcacgcggttgaaggagaaaacgttcgttacccggctaactacttcgagaaacctagtaacaccatgaatattgcgaagtgtttcgttcagcaccccccagtgtagatcaggccgatgagtcaccgcgttccccacaggcggccgtggcggtggctacgctggcggcctgcctatggggcaacccataggacgcttcaatgtggacatggtgtgaagagtctattgagctagttagtagtcctccggcccctgaatgcggctaatcctaatctcggagcaggcacccacaaaccagtgggcaacctgtcgtaatgggtaactctgcggcggaaccgactactttgggtgtccgtgtttccctttattcttgtattggctgcttatggtgacaattaggagattgttaccatatagctattggattggccatccggtgtctaacagagcaattatttacctctttgttggttacgtaccattaaactttaaggttatagcaacgctcaagtttatcctacttctcaataaagtaaa

SEQ ID NO: 1023 - DNA, 742 bp, Echovirus
  E6,isolate E6/RUS/Novosibirsk/NS09-D220/2009 polyprotein1
ttaaaacagcctgtgggttgttcccacccacagggcccactgggcgttagcacactggtatcaaggtacctttgtgcgcctgttttattcacccttccccttcgtaacttagaagcatagctcagacggtcaatagacagcccagcataccagctgggtcatgaccaagcacttctgttgccccggactgagtatcaataggctgcttgcgcggctgaaggagaaaagttcgttacccggccagttacttcgagaaacctagtaacaccatggaagttgcgtagtgtttcgctccgcacaaccccagtgtagatcaggtcgatgagtcaccgcataccccacgggtgaccgtggcggtggctgcgttggcggcctgcccatggggcatacccatgggacgctacaatactgacatggtgcgaagagtctattgagctaattggtagtcctccggcccctgaatgcggctaatcctaactgcggagcagatacccacacaccagtgggcggtctgtcgtaacgggtaactctgcagcggaaccgactactttgggtgtccgtgtttccttttattcctaatctggctgcttatggtgacaattgagagattgttaccatatagctattggattggccatccggtgactaacagagcgatcatctacctgtttgttggtttcattccactaaactacaaagtactaaacactctgaattacattttactgcttaactcatcaaa

SEQ ID NO: 1024 - DNA, 743 bp, Human enterovirus sp.
  71 polyprotein gene, complete cds.1
ttaaaacagctgtgggttgtcacccacccacagggtccactgggcgctagtacactggtatctcggtacctttgtacgcctgttttataccccctccctgatttgcaacttagaagcaacgcaaaccagatcaatagtaggtgtgacataccagtcgcatcttgatcaagcacttctgtatccccggaccgagtatcaatagactgtgcacacggttgaaggagaaaacgtccgttacccggctaactacttcgagaagcctagtaacgccattgaagttgcagagtgtttcgctcagcactccccccgtgtagatcaggtcgatgagtcaccgcattccccacgggcgaccgtggcggtggctgcgttggcggcctgcctatggggtaacccataggacgctctaatacggacatggcgtgaagagtctattgagctagttagtagtcctccggcccctgaatgcggctaatcctaactgcggagcacatacccttaatccaaagggcagtgtgtcgtaacgggcaactctgcagcggaaccgactactttgggtgtccgtgtttctttttattcttgtattggctgcttatggtgacaattaaagaattgttaccatatagctattggattggccatccagtgtcaaacagagctattgtatatctctttgttggattcacacctctcactcttgaaacgttacacaccctcaattacattatactgctgaacacgaagcg

SEQ ID NO: 1025 - DNA, 743 bp, Enterovirus sp.
  A71, isolate VR1432, complete genome.1
ttaaaacagcctgtgggttgcacccactcacagggcccactgggcgcaagcactctggcacttcggtacctttgtgcgcctgttttatatcccctcccccaatgaaatttagaagcagcaaaccccgatcaatagcaggcataacgctccagttatgtcttgatcaagcacttctgtttccccggactgagtatcaatagactgctcacgcggttgaaggagaaaacgttcgttatccggctaactacttcggaaagcctagtaacaccatggaagttgcggagagtttcgttcagcacttccccagtgtagatcaggtcgatgagtcaccgcattccccacgggcgaccgtggcggtggctgcgttggcggcctgcccatggggtaacccatgggacgctctaatacggacatggtgtgaagagtctactgagctagttagtagtcctccggcccctgaatgcggctaatcccaactgcggagcacacgcccacaagccagtgggtagtgtgtcgtaacgggcaactctgcagcggaaccgactactttgggtgtccgtgtttccttttattcttatgttggctgcttatggtgacaattaaagagttgttaccatatagctattggattggccatccggtgtgcaacagagcgatcgtttacctatttattggttttgtaccattgacactgaagtctgtgatcacccttaattttatcttaaccctcaacacagccaaac

SEQ ID NO: 1026 - DNA, 743 bp, Coxsackievirus
  A16 gene for polyprotein,isolate1
ttaaaacagcctgtgggttgtacccaccctcagggcccactgggcgccagcactctggtaccacggtacctttgtgcgcctgttttatcatcccacccctacctgaaacgtagaagcaataatcagtcgaccaatagtgggtgtggcacaccagccacatcttggtcaagcacttctgtttccccgggttgagtatcaatatgctgttcacacggctgaaggagaaaacgcccgttatccggccaactacttcgagaagcctagtatcgccatgaacattgcaaggcgtttcgctcagcacttcccccgtgtagatcaggccgatgagtcaccgcattccccacgggcgaccgtggcggtggctgcgttggcggcctgcctgtgggttgacccacaggacgccttaatatagacatggtgtgaagagcctattgagctggttggtattcctccggcccctgaatgcggctaatcctaactgtggagcacatactcacaagccagtgggtggtgtgtcgtaatgggcaactctgcagcggaaccgactactttgggtgtccgtgtttccttttatacttatactggctgcttatggtgacaatcagagaattgttaccatatagctattggattggccatccggtgtgcaacagagctattgtgtatttatttgttggatttgtcccactatcacatacatcccttaacactttgtattttattttgaaattaaacgcaagaaa

SEQ ID NO: 1027 - DNA, 743 bp, Coxsackievirus
  A10 gene for polyprotein, polyprotein region,strain1
tttaaaacagcctgtgggttgcacccacccacagggcccactgggcgctagcactctggtactgcggtacctttgtgcgcctgttttatcaccccaccccatctggaacgtagaagcaatgcacaactgaccaatagtgggtgtggcgcaccagccacatcttggtcgagcacttctgtttccccgggtttagtatcaataagctgctcacgcggctgaaggagaaaacacccgttatccggccgactacttcgagaaacctagtaccgctatgaacgttgcaaggcgtttcgttcagcacttcccccgtgtagatcaggccgatgagtcaccgcattcctcacgggcgaccgtggcggtggctgcgttggcggcctgcctatgggcttgcccataggacgccttaatactgacatggtgcgaagagtctattgagctagttggtagtcctccggcccctgaatgcggctaatcctaactgcggagcacatactcacaaaccagtgagcggtgtgtcgtaacgggcaactctgcagcggaaccgactactttgggtgtccgtgtttccttttattcttatactggctgcttatggtgacaattaaagaattgttaccatatagctattggattggccatccggtgtctaacagagctattatatacttgtttgttggattcatctcgttatcacacaaatcccttaacactttgtgttttatcttgaatttgaactcaaaaag

SEQ ID NO: 1028 - DNA, 743 bp, Unknown
  Description of Unknown: Human coxsackievirus A7,isolate 275/58, complete genome.1 sequence
tttaaaacagcctgtgggttgtacccacccacagggcctactgggcgccagcactctggtactatggtacctttgtgcgcctgttttatattcctcccccaaattgcaacttagaagacatgcactccgatcaatagcaggcgtggcgcaccagctgcgtcttgatcaagcatttctgtttccccggactgagtatcaatagactgctcacgcggttgagggagaaaacgtccgttacccggccaactacttcgagaagcctagtaacactatgaaagttgcggggcgtttcgctcagcactcccccagtgtagatcaggtcgatgagtcaccgcattccccacgggcgaccgtggcggtggctgcgttggcggcctgcctatggggcaacccatgggacgctctaatatggacatggtgtgaagagcttattgagctagttggtagtcctccggcccctgaatgcggctaatcctaactgcggagcacgtgcctccaaaccagaaggtggcgtgtcgtaatgggcaactctgcagcggaaccgactactttgggtgtccgtgtttccttttattcttactctggctgcttatggtgacaattgacagattgttaccatatagctattggattggccatccggtgacgaacagagcgattgtgtaccagtttattggtttcgtccacttgaatacacgtgaattcaataccttgctgttggtattgaatttcaatacaacaaa

SEQ ID NO: 1029 - DNA, 743 bp, Unknown
  Description of Unknown: Human coxsackievirus A8,strain Donovan, complete genome.1 sequence
ttaaaacagcctgtgggttgcacccacccacagggcccaatgggcgtcagcactctggtaccgaggtacctttgtgcgcctgttttatttccccttcccctgatgcaacttagaagctccgaactaatgatcaatagtaggtgtggcacgccagccacatcttgatcaagcacttctgtttacccggaccgagtatcaataagctgcgcaagcggctgaaggagaaagcgttcgttatccggccaactacttcgagaagcttagtaccaccatgaacgttgcagagtgtttcgttcagcacaaccccggtgtagatcaggccgatgagtcaccgcgttccccatgggcgaccatggcggtggctgcgttggcggcctgcccatggagcaatccatgggacgctctaatactgacatggtgcgaagagcctattgagctagttggtgatcctccggcccctgaatgcggctaatcctaactgcggagcatgcgcccacaagccagtgggtggtgtgtcgtaacgggtaactctgcagcggaaccgactactttgggtgtccgtgtttccttttatctttacattggctgcttatggtgacaattgaagaattgttaccatatagctattggattggccatccggtgtgcaatagagcgattatatacctatttgttggatttgttccattgacatatagatctcttaacactctacaacacatcttgatcttgaacacgagaaa

SEQ ID NO: 1030 - DNA, 743 bp, Coxsackievirus
  A8,isolate CVA8/SZ124/CHN/2012, complete genome.1
ttaaaacagcctgtgggttgtacccacccacagggcccactgggcgctagcactctgattctacggaatctttgtgcgcctgttttacaaccccctccccctatgtaacttagaagcaatgcaccaatgatcaacagcaggcgtggcgcaccagccatgtcttgatcaagcacttctgtttccccggacagagtatcaatagactgctcgcgtggtcgaaggagaaaacgtccgttacccggctaactacttcgagaaacctagtagcaccaatgaagctgcagagcgtttcgctcagcacttaccccgtgtagatcaggccgatgagtcactgcgttccccacgggcgaccgtggcagtggctgcgttggcggcctgcctatggggtcacccataggacgctctaatgtggacatggtgcgaagagtctattgagctagttagtagtcctccggcccctgaatgcggctaatcctaactgcggagcgcataccctcaaaccagggggtggtgcgtcgtaacgggtaactctgcagcggaaccgactactttgggtgtccgtgtttccttttattttcttaatggctgcttatggtgacaattgaggaattgttaccatatagctattggattggccatcaggtgtgtaacagagcaattatctacttgtttgtaggatataccccattaacgttcaaatctcttaacacactacagtacatactaactttgaacacaagaaa

SEQ ID NO: 1031 - DNA, 743 bp, Coxsackievirus
  A8,isolate CVA8/SZ266/CHN/2014, complete genome.1
ttaaaacagcctgtgggttgtacccacccacagggcccactgggcgccagcactctggtaatacgttacctttgtgcgcctgttttacctccccctaccctggaacactttagaagtaaagcatatctggtcaatagaaggtgtggcgaaccagctgcatctcgaccaagcacttctgtttccccggactgagtatcaatagactgctaacgcggtcgaaggagaaaacgttcgttatccggctagctacttcgagaagcctagtaacaccatgaaagttgcagagtgtttcactcagcacttcccccgtgtagatcaggtcgatgagtcaccgcgacccccacgggcgaccgtggcggtggctgcgttggcggcctgcctgtggggcaacccataggacgctctaatacagacatggtgtgaagagcctattgagctagctagtagtcctccggcccctgaatgcggctaatcctaactgcggagcacatgctcgtgaaccagcgagtagtgtgtcgtaatgggtaactctgcagcggaaccgactactttgggtgtccgtgtttctttttattcttacattggctgcttatggtgacaattaaagaattggcaccatatagctattggattggccatcctgtgactaacagagctattatatatctctttgttggatttgttcccttgaggctcactacttataacacactttgttttatattgactctcaattcagcaaa

SEQ ID NO: 1032 - DNA, 743 bp, Unknown
  Description of Unknown: Human coxsackievirus A2,strain CVA2/SD/CHN/09, complete genome.1 sequence
ttaaaacagcctgtgggttgtacccacccacagggcccactgggcgcgagcactctggtatcacgatacctttgtgcgcctgttttatatcccttccccattaatgtaacatagaagttatgcaccccgatcaatagcaggcatggcgctccagctatgtcttgatcaagcacttctgtttccccggactgagtatcaatagactgcttgcgcggttgaaggagaaaacgttcgttatccggctaactacttcgggaagcttagtaatgccatggaagttgcggagagtttcgctcagcacttccccagtgtagatcaggctgatgagtcaccgcattccccacgggtgaccgtggcggtggctgcgttggcggcctgcccatagggagacctatgggacgctctaatacggacatggtgtgaagagcctactgagctagttagcagtcctccggcccctgaatgcggctaatcctaactgcggagcacgcgtctccaatccaggggatagcgtgtcgtaatgggcaactctgcagcggaaccgactactttgggtgtccgtgtttccttttattcttacactggctgcttatggtgacaattgaggaattgttaccatatagctattggattggccatccggtgactaacagagctattatttaccaatttgttggatttgtacctctttcactcaccgtttaccacacccttctatacctattacaactgaatagtagaag

SEQ ID NO: 1033 - DNA, 743 bp, Unknown
  Description of Unknown: Human coxsackievirusA17,strain BAN01-10577, complete genome.1 sequence
ttaaaacagcctgtgggttgttcccaccccagaggcccacgtggcggctagtactctggtattacggtacctttgtacgcctgttttatactccctccccatgtaactttagaagcaattcaataagttcaatagagggggtacaaaccagtaccaccacgaacaagcacttctgtctccccggtgatcttgcatagactgttcccacggttgaaagcgagtgatccgttatccgcttgagtacttcgagaagcctagtaccaccttggaatcttcgatgcgttgcgctcagcactctgccccgagtgtagcttaggctgatgagtctgggctttccccaccggcgacggtggcccaggctgcgttggcggcctacccgtggtcaacaccacgggacgctagttgtgaacaaggtgtgaagagcctattgagctactcaagagtcctccggcccctgaatgcggctaatcctaaccatggagcaggtactctcaacccagagggcagcctgtcgtaacgcgtgagtccgtggcggaaccgactactttgggtgaccgtgtttccttttatttttgactggctgcttatggtgacaatcatagattgttatcatagagcgaattggattggccatccagtgaaatataaacacgttatctacttgtttgttggatttactccactcactcagtttacccctagcataataatagcagtactactgataaggaattattgccacc

SEQ ID NO: 1034 - DNA, 743 bp, Unknown
  Description of Unknown: Human coxsackievirus A9 genomic RNA, complete genome,strain:1 sequence
tttaaaacagcctgtgggttgttcccacccacaggcgccaccgggcgttagcacactggtatcacggtacccttgtgcgcctgttttataaccccaccccgagtaaaccttagaagcaatgcacctctggtcaatagtaggtgtgacacaccagtcacatcgtgaccaagcacttctgtctccccggactgagtatcaataggctgctcgcgcggctgaaggagaaagcgttcgttacccggccagctacttcgagaagcctagtaacaccatgaaggttgcagagtgtttcgctcagcacttcccctgtgtagatcaggccgatgagtcaccgcgttcctcacgggcgaccgtggcggtcgctgcgctggtggcctgcctatggggcaacccataggacgctctaatgctgacatggtgcgaagagtctattgagctagctggtagtcctccggcccctgaatgcggctaatcccaactgcggagcacgcaccctcaaaccagggggcagcgtgtcgtaacgggcaactctgcagcggaaccgactactttgggtgtccgtgtttctttttattcctatattggctgcttatggtgacaattgagagattgttaccatatagctattggattggccatccggtgagcaacagagctattgtgtatctgtttactggtttcataccccttaattacaaagaagtcaaaacccttcacttgatcttgttattcaatacaacaaa

SEQ ID NO: 1035 - DNA, 743 bp, Human poliovirus 1
  complete genome.isolated from faeces of1
ttaaaacagctctggggttgttcccaccccagaggcccacgtggcggccagtactctggtatcacggtacctttgtacgcctgttttatactcccttcccgcaacttagacgcataaaaaccaagttcaatagaagggggtacaagccagtaccaccacgaacaagcacttctgtttccccggtgatgttgtatagactgctcgcgtggttgaaagcgacagatccgttatccgcttgtgtacttcgagaagcccagtaccaccttggaatcttcgatgcgttgcgctcagcactcaaccccagagtgtagcttaggctgatgagtctggacatcccccaccggtgacggtggtccaggctgcgttggcggcctacccatggctaacgccatgggacgctagttgtgaacagggtgtgaagagcctattgagctacataagagtcctccggcccctgaatgcggctaatcccaacctcggagcaggtggtcacataccagtgactggcctgtcgtaacgcgcaagtccgtggcggaaccgactactttgggtgtccgtgtttccttttattttataatggctgcttatggtgacaatcacagattgtcgtcataaagcgaattggattggccatccggtgatagtgaaattcattacttaactgtttactggattcgctccaccgcaagtgtttgctctgagtacaatttcaatagttactttaagtagacaattgtattaca

SEQ ID NO: 1036 - DNA, 743 bp, Human echovirus
  15,strain CH 96-51 complete genome.1
ttaaaacagcctgtgggttgtacccacccacagggcccactgggcgctagcactctggtattacggtacccttgtgcgcctgttttatataccccgccccaagcaaacgctagatgtaacgcacttatgatcaatagcaggcgtggcactccagccacgttatgatcaagcacttctgtctccccggaccgagtatcaatagactgctcacgcggtcgaaggagaaaacgttcgttacccgaccagctacttcgagaaacctagtaactccatggaggttgcagagtgtttcgttcagcacttcccccgtgtagatcaggctgatgagtcaccgcgttcctcacgggcgaccgtggcggtggctgcgttggcggcctgcctatgggtatacccataggacgctctaatactgacatggtgcgaagagtctattgagctagttggtagtcctccggcccctgaatgcggctaatcctaactgcggagcacatacccccaacccagggggcagtgtgtcgtaacgggtaactctgcagcggaaccgactactttgggtgtccgtgtttccttttattcttacattggctgcttatggtgacaattgagagattgttaccatatagctattggattggccatccagtgactaacagagctattatttacctttttgttggcttcgtatcacttggtttaaaagaggttagtactttatattgcattatattactaaacacgagaaa

SEQ ID NO: 1037 - DNA, 743 bp, Echovirus
  E11,strain SD2003-478/SD/CHN/2003, complete genome.1
ttaaaacagcctgtgggttgttcccacccacagggcccactgggcgttagcactctggtatcgcggtacccttgtgcgcctgttttatccgccctttcccaaacgtaacttagaagctcaacttgaatggtcagcaggaaacccagtacgccaactgggtcacgaccaagcacttctgtaaccccgggccgagtatcaataagctgctcacgcggttgaaggagaaaacgcccgttacccggccaattacttcgagaaacctagtaccaccatggaggttgcgtagtgtttcgctccgcacaaccccagtgtagatcaggccgatgagtcaccgcgttccccacgggcgaccgtggcggtggctgcgttggcggcctgcccatgggataacccatgggacgcttcaatactgacatggtgcgaagagtctattgagctaattggtagtcctccggcccctgaatgcggctaatcccaactgcggagcagatacccacatgccagtgggcagtctgtcgtaacgggcaactctgcagcggaaccgactactttgggtgtccgtgtttccttttattcatacattggctgcttatggtgacaattgaaagattgttaccatatagctattggattggccatccggtgtctaatagagcgattgtctacttgttcattgggtttgtacctttaaaccttaaagttcttaacactctcaaccttgtgctacaactcaacacggcaaa

SEQ ID NO: 1038 - DNA, 743 bp, Human enterovirus sp.
  80,strain USA/CA67-10387, complete genome.1
ttaaaacagcctgtgggttgatcccacccacagggcccactgggcgtcagcactctggtatcacggtacctttgtgcgcctgttttatactccctccccccaaccgtaacttagaagcagcactaactgatcaatagccagcgcggcatgccagccacgcttcgatcaagcacttctgttaccccggactgagtatcaatagactgctcacgcggttgaaggagaaaacgttcgtcatccggccaactacttcgagaaacctagtaacaccatggaagttgcggagtgtttcgctcagcactaccccagtgtagatcaggtcgatgagtcaccgcattccccacaggcgactgtggcggtggctgcgttggcggcctgcccatggggaaacccatgggacgctcttatatagacatggtgcgaagagtctattgagctagttggtagtcctccggcccctgaatgcggctaatcctaactgcggagcatacaccctcaaaccagagggcagtgtgtcgtaatgggcaactctgcagcggaaccgactactttgggtgtccgtgtttcactttatttctaaattggctgcttatggtgacaattgagagattgttaccatatagctattggattggccatccggtgaccaatagagctattatatatctctttgttgggttcataccacttagcttgaaagaggttaaaactctgcattacattatactattgaattccgcaaa

SEQ ID NO: 1039 - DNA, 743 bp, Unknown
  Description of Unknown: Human coxsackievirus B5, strain ChZJ-1, complete genome.1 sequence
ttaaaacagcctgtgggttgttcccacccacagggcccattgggcgtcagcactctggtatcacggtacccttgtgcgcctgttttataatccctttccccacaagtaacttagacacagcacaaaccgatcaacagtaggcgtgacactccagtcatgtcgtgatcaagcacttctgttaccccggaccgagtatcaatagactgcttacgcggttgaaggagaaaacgcccgttacccggccaactacttcgagaaacccagtaacaccatggaaattgcggagtgtttcgctcagcacaaccccagtgtagatcaggtcgatgagccaccacattccccacgggtgaccgtggtggtggctgcgttggcggcctgcctatgggggaacccataggacgcttcaatacggacatggtgcgaagagtctattgagctagttggtaatcctccggcccctgaatgcggctaatcctaactgcggagcgcgtgcccccaaaccaggaggtggcgcgtcgtaatgggcaactccgcagcggaaccgactactttgggtgtccgtgtttccttttatatttttattggctgcttatggtgacaattgagaaattgttaccatatagctattggattggccatccggtgtctaacagagcgattatttatctttttgttggatttgtaccactcaacataacaaactatcagactttgtgttgcattattggattgaacacagcaaa

SEQ ID NO: 1040 - DNA, 743 bp, Enterovirus sp.
  B88, strain 11-4644-1, complete genome.1
tgtgctcttccgatctggttgttcccacccacagggcccactgggcgccagcacactggtattacggtacccttgtgcgcctgttttatccacccccccccactgtaacttagaagataaccacacgcggtcaataggtgactcagtacgccaactgggtcgcgaccaagcacttctgttaccccggaccgagtatcaataagctgctcgcgcggctgaaggagaaaacgttcgttacccggccaattacttcgagaaacctagtaccaccatggaggttgcgcagcgtttcgctccgcacaaccccagtgtagatcaggtcgatgagtcaccgcaatccccacaggcgactgtggcggtggctgcgttggcggcctgcccatggggaaacccatgggacgcttcaatatcgacatggtgcgaagagtctattgagctaattggtagtcctccggcccctgaatgcggctaatcctaactgtggagcagatacccacactccagtgggcagtctgtcgtaatgggcaactctgcagcggaaccgactactttgggtgtccgtgtttccttttattcctatgctggctgcttatggtgacaattgacagattgttaccatatagctactggattggccatccggtgacaagcagagcgattgtttacttatttgttggtttcattccactcaattataaagtactaaacacccttaatttcattataactcttaacacgttaaa

SEQ ID NO: 1041 - DNA, 743 bp, Echovirus
  E30, strain KM/A363/09 polyprotein gene, complete cds.1
ttaaaacagcctgtgggttgaacccatccacagggcccactgggcgcaagcacactggtatcacggtacctttgtgcgcctgttttatccacccttccccgaacgaaacttagaagtttgacttaaacggtcaatagaaagcccagtacaccaactgggtcgtgaccaagcacttctgtgaccccggactgagtatcaataagctactcacgtggctgaaggagaaaacgttcgttatccggccaattacttcgagaaacttagtaccaccatgaaggttgcgtagcgtttcgctccgcacaaccccagtgtagatcaggtcgatgagtcaccgcgttcctcacgggcgaccgtggcggtggctgcgttggcggcctgcccttggggcaacccaagggacgcttcaatactgacatggtgcgaagagtctattgagctaattggtagtcctccggcccctgaatgcggctaatcctaactgcggagcagatacccacatgccagtgggcagtctgtcgtaatgggcaactctgcagcggaaccgactactttgggtgtccgtgtttccttttattcttatactggctgcttatggtgacaattgagaaattgttaccatatagctattggattggccatccagtgtccaatagagcaatcatttaccttttcgttggatttattccacttgactacaaagcactcaaaacactcgaatacattgtagacctcaatacaacaaa

SEQ ID NO: 1042 - DNA, 743 bp, Echovirus
  E12, strain K624/YN/CHN/2013, complete genome.1
ttaaaacaaggctgtgggttgtacccacccacagggcccaccgggcgctagcacactggtatctaggtacccttgtgcgcctgttttattcgccccaccccatcgtaacttagaagttgatcaataatggtcgttaggtagcccagcacgccagctgggtcttgaccaagcacttctgttaccccggaccgagtatcaatacgctgctcacgcggctgaaggagaaaacgttcgttacccggccaattacttcgagaagcctagtaccaccatgaaggttgcgcagcgtttcgctccgcacaaccccagtgtagatcaggccgatgagtcaccgcactcctcacgggcgaccgtggcggtgactgcgttggcggcctgcccatggggtgacccatgggacgcttcaatactgacatggtgcgaagagcctattgagctaattggtagtcctccggcccctgaatgcggctaatcctaactgcggagcagatacccacacaccagtgggcagtctgtcgtaacgggcaactctgcagcggaaccgactactttgggtgtccgtgtttccttttattctaatattggctgcttatggtgacaattgaaaaattgttaccatatagctattggattggccatccggtgacaaatagagcgattgtttacctgtttgttggtttcataccattaaatcttaaagtcttaaaaacccttgattttatactagcactcaattcagcaaa

SEQ ID NO: 1043 - DNA, 743 bp, Human enterovirus sp.
  87, strain BAN01-10396, complete genome.1
ttaaaacagcctgtgggttgttcccacccacagggcccactgggcgctagcacactggtatcacggtacccttgtgcgcctgttttatacacccttcccctactgtgacttagaagcaaaacaatgatgaccaatagcaagcgcagcactccagctgtgtttcggtcaagcacttctgtttccccggactgagtatcaataggccactcacgtggccgaaggagaaaacgtccgttacccggccaattacttcgagaaacccagtaacaccatagaggttgcgcagcgtttcgctccgcactcccccagtgtagatcaggtcgatgagtcaccgcgttccccacgggcgaccgtggcggtggctgcgttggcggcctgcccatggggtaacccatgggacgcttcaatactgacatggtgcgaagagtctattgagctaattggtagtcctccggcccctgaatgcggctaatcctaactgcggagcagatacccacgctccagtgggcagtctgtcgtaacgggtaactctgcagcggaaccgactactttgggtgtccgtgtttccttttattcttatattggctgcttatggtgacaattgaaagattgttaccatatagctattggattggccatccggtgtctaatagagcaattatattcctgtttgttggttttataccactgaatatcacagtttacaagaccctcaattacatcctacgtttaaacaagacaaa

SEQ ID NO: 1044 - DNA, 743 bp, Echovirus
  E6, strain FIN09-NPA, complete genome.1
ttaaaacaggcctgtgggttggttccacccacagggcccactgggcgccagcacactggtattacggtacctttgtgcgcctgttttatccacccttccctgatgtaacttagaagtaaaacataggcggtcaataggtagcccaacacaccagttgggtttcgaccaaacacttctgttaccccggaccgagtatcaataggctgctcacgcggctgaaggagaaaacgttcgttacccgaccaattacttcgagaaacccagtaacaccatgaaagttgcgcagtgtttcgctccgcacaaccccagtgtagatcaggtcgatgagtcaccgcattccccacgggcgaccgtggcggtggctgcgttggcggcctgcccatgggctaacccatgggacgctacaataccgacatggtgcgaagagtctattgagctaattggtagtcctccggcccctgaatgcggctaatcctaactgcggagcagatacccacacaccagtgggcggtctgtcgtaacgggcaactctgcagcggaaccgactactttgggtgtccgtgtttccttttattcctatattggctgcttatggtgacaattgagagattgttaccatatagctattggattggccatccggtgacaaacagggcggtcatttacctatttgttggttttgtaccattgaattttaaggtattgaaaaccctcaaccttgttttagcactcaatacagcaaa

SEQ ID NO: 1045 - DNA, 743 bp, Human echovirus
  17, strain CHHE-29 complete genome.1
ttaaaacagcctgtgggttgttcccacccacagggcccattgggcgctagcactctggtattgcggtacctttgtgcgcctgttttatattccctccccctgaccgtaacttagaagtaacacacaccgatcaacagtaagcatggcacaccagccatgttttgatcaagcacttctgttatcccggactgagtatcaatagactgctcacgcggttgaaggagaaaacgttcgttacccggccaactacttcgaaaaacctagtaacaccatggaagttgcagagtgtttcgctcagcactaccccagtgtagatcaggtcgatgagtcaccgcattccccacgggcgaccgtggcggtggctgcgttggcggcctgcctatggggaaacccataggacgctctaatacagacatggtgcgaagagtctattgagctagttggtagtcctccggcccctgaatgcggctaatcctaactgcggagcacacaccctcaagccagggggcagtgtgtcgtaacgggcaactctgcagcggaaccgactactttgggtgtccgtgtttccccttactcttgtattggctgcttatggtgacaattttggaattgttgccatatagctattggattggccatccggtgacaaacagagcgattgtatacctattcgttggacttgtaccgctcaacgttacgagtctaacgactttatactacatcatctggttgaacacagcaaa

SEQ ID NO: 1046 - DNA, 743 bp, Echovirus
  E18, isolate E18-HeB15-54462/HeB/CHN/2015, complete1
ttataacagcctgtgggttgtacccacccacagggcccacagggggccagcacactggtatctcggtacctttgtgggcctgttttatccacccttcccccattttatttagaagcatgcaccaaaacggtcaacagggagcccagtaagccacttgttcattgaccaagtacttctgttaccccggaccgagtatcaataggctgctcgcgcggctgaaggagaaaacgttcgttacccggccaattacttcgagaaacccagtagcgccatggaggttgcgcagcgtttcgctccgcacaaccccagtgtagatcaggtcgatgagccaccgcgttccccacgggcgaccgtggcggtggctgcgttggcggcctgcccatgggactacccatgggacgcttcaatactgacatggtgtgaaaagtctattgagctaattggtagtcctccggcccctgaatgcggctaatcctaactgcggagcagacgcccacacaccagtgggcgatctgtcgtaatgggcaactctgcagcggaaccgactactttgggtgtccgtgtttccttttattcttaccctggctgcttatggtgacaattgagaagttgttgccatatagctattggattggccatccggtgacgagcagggcgataatttatttgtttatcgggtttgtaccactgaactacaaggttttaaacactttggattttattctgatcctcaactcactaaa

SEQ ID NO: 1047 - DNA, 743 bp, Echovirus
  E7, strain Ibadan_NGR_2010, complete genome.1
ccagtgggccctgtgggttgtacccacccacagggcccactgggcgctagcactctggtatcacggtaccttagtgcgcctgttttatatcccccacccccacttgaaacttagaagcaaaacatactgaccaatagttgacatggcaagccagccgtgccttggtcaagcacctctgtttccccggaccgagtatcaatagactgctagcgcggttgaaggagaaagcgttcgttacccgactaactacttcgaaaaacctagtagcatcatgaaagttgcagagtgtttcgctcagcacaaccccagtgtagatcaggccgatgagtcaccgcattcctcacgggtgaccgtggcggtggctgcgctggcggcctgcctgtggggcaacccacaggacgctctaatacagacatggtgcgaagagtctattgagctagttagtagtcctccggcccctgaatgcggctaatcctaactgcggagcacgtgcctctaatccaagaggtagcgtgtcgtaacgggcaactctgcagcggaaccgactactttgggtgtccgtgtttccttttatttttatactggctgcttatggtgacaattgagagattgttaccatatagctattggattggccatccggtgactaatagagctattgtatacctctttattggttacgttccattaaaccgcaaggaattaaggaccctcaattacatcttgcttttgaattcagcaaa

SEQ ID NO: 1048 - DNA, 743 bp, Swine vesicular disease virus
  strain SVDV Itl. 5-99 polyprotein1
ttaaaacagcttgtgggttgttcccacccacagggcccactgggcgccagtacactggtatcacggtacctttgtgcgcctgtttgactcaccttccccaaacgcaacttagaagcataacttaaatggtcattaggcggctcagtatgccaactgagtctcgatcaagcacttctgttaccccggactgagtaccaataggctgctcacgcggctgaaagggaaaccgttcgttacccgaccaactacttcgagaaacctagtaccaccatgaaagttgcgcggcgtttcgctccgcacaaccccagtgtagatcaggccgatgagtcaccgcaaaccccacgggcgaccgtggcggtggctgcgctggcggcctgcccatgggacaacccatgggacgccacaatactgacatgatgcgaagagtctattgagctagttggtagtcctccggcccctgaatgcggctaatcccaactgtggagcagatacccacgcaccagtgggcagtctgtcgtaatgggcaactctacagcggaaccgactactttgggtgtccgtgtttctttttattcctacgctggctacttatggtgacaattgagagactgtaaccatattgctatcgggttggccacctggtgaagaataaaacagttgctcactcgtttgtcagtcttgcaccgtcgtgccacaaagtcttaactgcccctcaacatcgtcataatactaaatacgctgaa

SEQ ID NO: 1049 - DNA, 743 bp, Coxsackievirus
  B5 complete genome.1
ttaaaacagcctgtgggttgtacccacccacagggcccactgggcgctagcactctggtaccgcggtacctttgtgcgcctgttttatatcccccctccccttaaccggaacttagaagttacacacactgatcaacagtgggcatagcatgccagctatgtcttgatcaagcacttctgtctccccggaccaagtatcaatagactgctcacgcggttgaaggagaaagcgttcgttacccgactaactacttcgagaaacccagtagcactatgaaagttgcgaggcgtttcgctcaacacttccccagtgtagatcaggtcgatgagtcaccgcattccccacggcgaccgtggcggtggctgcgttggcggcctgctacggggcaactcgtaggacgcttcaatacagacatggtgcgaagagtctattgagctagttagtagtcctccggcccctgaatgcggctaatcctaactgcggagcacataccctcaacccagggggcagtgtgtcgtaacgggtaactctgcagcggaaccgactactttgggtgtccgtgtttccttttatccttacattggctgcttatggtgacaattgaaagattgttaccatatagctattggattggccatccagtgtctaatagagctattatatacctctttgttggatttataccacttagcctaaaagaagttaagacactacagcttattgtacaattaaacacagcaaa

SEQ ID NO: 1050 - DNA, 743 bp, Coxsackievirus
  B5, isolate 3936/09, complete genome.1
ttaaaacagcctgtgggttgtacccacccacagggcccactgggcgctagcactctggtatcacggtacctttgtgcgcctgttttatgcccccttcccccaattgaaacttagaagttacacacaccgatcaacagcgggcgtggcataccagccgcgtcttgatcaagcactcctgtttccccggaccgagtatcaatagactgctcacgcggttgaaggagaaaacgttcgttacccggctaactacttcgagaaacctagtagcatcatgaaagttgcgaagcgtttcgctcagcacatccccagtgtagatcaggtcgatgagtcaccgcattccccacgggcgaccgtggcggtggctgcgttggcggcctgcctacggggcaacccgtaggacgcttcaatacagacatggtgcgaagagtcgattgagctagttagtagtcctccggcccctgaatccggctaatcctaactgcggagcacataccctcaacccagggggcattgtgtcgtaacgggtaactctgcagcggaaccgactactttgggtgtccgtgtttccttttattcttataatggctgcttatggtgacaattgaaagattgttaccatatagctattggattggccatccggtgtctaacagagctattatatacctctttgttggatttgtaccacttgatctaaaggaagtcaagacactacaattcatcatacaattgaacacagcaaa

SEQ ID NO: 1051 - DNA, 743 bp, Swine vesicular disease virus
  gene for polyprotein, complete cds.1
ttaaaacagcctgtgggttgttcccacccacagggcccactgggcgctagcacactggtatcacggtacctttgtgcgcctgtttgacttaccctccccaaacgcaacttagaagcacaacttaaatggtcaatagacggctcagtatgccaactgagtctcgatcaagcacttctgttaccccggactgagtaccaataggctgctcacgcggctgaaggggaaaccgttcgttacccgactaactacttcgagaaacctagtaccaccatgaaagttgcgcagcgtttcgctccgcacaaccccagtgtagatcaggccgatgagtcaccgcaaaccccacgggcgaccgtggcggtggctgcgctggcggcctgcccatggggcaactcatgggatgcttcaatactgacatggtgcgaagagtctattgagctagttggtagtcctccggcccctgaatgcggctaatcctaactgcggagcagatacccacgcaccagtgggcagtctgtcgtaatgggcaactctgcagcggaaccgactactttgggtgtccgtgtttccttttatccttatactggctacttatggtgacaattgagagattgtaaccatattgctattggattggccacccggcgacgaatagaacagttgcttacctgtttgttagtctcgtgtcactgaactgcaaggccttaaacaccctttaatttcatcataacgctcaatacgttaaa

SEQ ID NO: 1052 - DNA, 743 bp, Unknown
  Description of Unknown: Human coxsackievirus B3, strain GA, complete genome.1 sequence
ttaaaacagcctgtgggttgatcccacccgcagggcccactgggcgtaagcacactggtattacggtacctttgtgcgcctgttttatacacccctcccccgatgtaacttagaagttcaatgcaagcggtcgatagccagcccaacacaccagttgggttcagatcaagcacttctgttaccccggactgagtatcaataagctgctcacgtggctgaaagagaaaacgttcgttacccggccagttacttcgggaagcctagtaccaccatgaaagttgcgcagtgtttcgttccgcacaaccccagtgtagatcaggtcgatgagtcaccgcattccccacaggcgactgtggcggtggctgcgttggcggcctgcccatggggttacccatgggacgctacaatactgacatggtgcgaagagcctactgagctaactggtattcctccggcccctgaatgcggctaatcctaactgcggagcaagtacctgcagaccagcaggcagcttgtcgtaacgggcaactctgcagcggaaccgactactttgggtgtccgtgtttccttttattcttgttatggctgcttatggtgacaatcacagaattgttaccatatagctattggattggccatccagtgactaacagagcaattatatacttgtttgtcggatttgtcaaattagattttaacaacctacgcacgctttgttatattattgaattaaatacagcaag

SEQ ID NO: 1053 - DNA, 743 bp, Coxsackievirus
  B5, isolate CV-B5/P727/2013/China, complete genome.1
tttaaaacagcctgtgggttgttcccacccacagggcccaatgggcgctagcacactggtatcatggtacctttgtgcgcctgttttattcaccccatcacaataaaatggagaagcataacgtaataggtcaataggtggctcagtgcgccacttgggtttagaacaaacaattctgttttcccgcaccgagtatcaataaggtgctagcgtggatgaaggagaaaacgttagttacccgagtaattagttcgagaaagacagtaccaccatgaaggatgcgcagtgtttcgttcagcactaccccagtgtagatcaggtcgatgagtcaccgcgatccccacgggtgtccgtggcggtcctgtgttggcggcaaaaccatggggtaacccatagaacgataaaattaagacatggtgagaagagtttattgagctagttggtaatcatccggcccgggaatgcggctaatcttacatgcgcagcgggcacccacaaaccagtggaaacgtttgtcgtaacgggcaactctgcagcggaaccgactactgtggggggccgggttgccttgtattcatatattggctgcttatggggacgattgaaagattgttgccatatagctattggattggccatccggaaacaaacagagctattatttacctttttgttggctttgtgccgttgaatttcaaagttgtaaaaactataaacttcattttgacactcaatacagcaaa

SEQ ID NO: 1054 - DNA, 743 bp, Coxsackievirus
  B6, strain Schmitt, complete genome.1
ttaaaacagcctgtgggttgtacccacccacagggcccactgggcgctagcactctggtattgcggtacctttgtgcgcctgttttacccaccctcccccaacgtaacttagaagcctgacatatacggtcacaagccagcccagtacgccaactgggtaccgaccaagcacttctgttaccccggactgagtatcaataagctgccaaagcggctgaaggagaaaacgttcgttacccggccaattacttcgagaaacccagtaacaccatgaaagttgcgtagcgtttcattcagcacaatcccagtgtagatcaggtcgatgagtcaccgcattccccacaggcgactgtggcggtggctgcgttggcggcctgcccatggggcaaacccatgggacgcttcaatactgacatggtgcgaagagtctattgagctaattggtagtcctccggcccctgaatgcggctaatcctaactgcggagcaggcactcgcagaccagcgagcagcttgtcgtaatgggcaactccgcagcggaaccgactactttgggtgtccgtgtttcctatttcctttacactggctgcttatggtgacaattgagaaattgttaccatatagctattggagtggccatccggtgactaacagagcaataatatatttgtttgttggctttgtgccacttaatttgaaggttgttaagacgctcaatctgatactacttctaaataaagcaaa

SEQ ID NO: 1055 - DNA, 743 bp, Echovirus
  1 (strain Farouk / ATCC VR-1038) polyprotein precursor,1
ttaaaacagcctgtgggttgttcccacccacagggcccactgggcgttagcacactggtatcacggtacctttgtgcgcctgttttatactcccccccctaaggaaactttagaagcaaagcaattgtgatcaatagtgggtatggcacaccagtcatatcttgatcaagcacttctgttcccccggacttagtaccaatagactgctcaagcggttgaaggggaaaacgttcgttatccggccaactacttcgagaaacctagtagcaccatgaaagttgcggagtgtttcgctcagcacttcccccgtgtagatcaggctgatgagtcaccgtattccccacgggcgaccgtgacggtggctgcgttggcggcctgcccatggggtaacccatgggacgctctaaaacagacacggtgcgaagagtctattgagctagttggtagtcctccggcccctgaatgcggccaatcctaactgcggagcacatactcccaatccagggagcagtgtgtcgtaatgggtaactctgcagcggaaccgactactttgggtgtccgtgtttccttttattctcacattgactgcttatggtgacaattgaaagattgttaccatatagctattggattggtcatccggtgagcaatagagctattgtttatcaatttgttggatttgtaccactcaacttttctgttttgagaacactcaactacatcttactgctaaacacatcaaa

SEQ ID NO: 1056 - DNA, 743 bp, Echovirus
  E33, strain YNK35/CHN/2013, complete genome.1
ttaaaacagcctgtgggttgttcccacccacagggcccacgtggcgttagcacactggtatcccggtacctttgtgcgcctgttttatacaccccaaaccccaatgtaaattagaagaaaataacaccgatcaatagtgggtgtggcacaacagccacatcatgatcaagcactactgttcccccggactgagtatcaataagctgctcgcgcggctgaaggagaaaacgttcgttatccggccaattacttcgagaaacctagtaccaccatgaaggttgcgcagtgtttcgctccacacaaccccagtgtagatcaggtcgatgagtcaccgcattccccacaggcgactgtggcggtggctgcgctggcggcctgcccatggggtgacccatgggacgcttcaatactgacatggtgtgaagagtctattgagctaattggtagtcctccggcccctgaatgcggctaatcctaactgcggagcagatacccacgcaccagtgggtagtctgtcgtaacgggtaactctgcagtggaaccgactactttgggtgtccgtgtttccttttattctcacattggctgcttatggtgacaattgaaagattgttaccatatagctactggattggccatccggtgacaaacagagcaattgtgttcctcttcgatgggttcatacctctcaacaagatcagctttcgaactttgtgctacatcatcaagctaaacacaacaaa

SEQ ID NO: 1057 - DNA, 743 bp, Human echovirus
  25 mRNA for partial polyprotein (isolate TH222).1
ttaaaacagcctgtgggttgttcccacccacagggcccattgggcgctagcacactggtatcacggtacccttgtgcgcctgttttatccaccccccccttaacgtaacttagaagcataaatcaaatggtcaatagataacccagtatgccaactgggtcccgaccaagtacttctgttaccccggactgagtatcaataagctgcttacgtggctgaaggagaaaacgttcgttacccgaccaattacttcgagaaacctagtaacaccatgaaggttgcgcagtgtttcgctcaacacaaccccagtgtagatcaggtcgatgagtcaccgcgttccccacaggcgaccgtggcggtggctgcgttggcggcctgctcatggggcaacccatgagacgcttcaatactgacatggtgcgaagagtctattgagctaactggtagtcctccggcccctgaatgcggctaatcctaactgcggagcaggcgctcgcaaaccagtgagtagcctgtcgtaacgggtaactctgcagcggaaccgactactttgggtgtccgtgtttccttttattcttatattggctgcttatggtgacaattgagagattgttaccatatagctattggattggccatccggtgtctaacagagcaatcatttacctctttgttggttacgtaccattaaatcttaaggtcgtagcaacgcttaagtttatcctacttctcaacaaagcaaa

SEQ ID NO: 1058 - DNA, 743 bp, Unknown
  Description of Unknown: Human coxsackievirus B5 polyprotein gene, partial cds.1 sequence
ttaaaacagcctgtgggttgatcccacccacagggcccattgggcgctagcactctggtatcacggtacctttgtgcgcctgttttatatccctttcccttaattggaacttagaagttacacacaccgatcaacagcaggcgtggcatgccagctacgtcttgatcaagcacttctgtttccccggaccgagtatcaatagactgctcacgcggttgaaggagaaagtgttcgttacccggctaactacttcgagaaacccagtagcatcatgaaagttgcgaggtgtttcgctcagcacttccccagtgtagatcaggtcgatgagtcaccgcattccccacgggcgaccgtggcggtggctgcgttggcggcctgcctacggggcaacccgtaggacgcttcaatacagacatggtgcgaagagtcaattgagctagttagtattcctccggcccctgaatgcggctaatcctaactgcggagcacataccctcaatccagggggcattgtgtcgtaacgggtaactctgcagcggaaccgactactttgggtgtccgtgtttccttttgttcttatactggctgcttatggtgacaattgaaagattgttgccatatagctattggattggccatccattgtctaatagagctgttatatacctctttgttggttttgtaccgctcaatctaaaagaagttaagacactacaacttattatacagctgaacacagcaaa

SEQ ID NO: 1059 - DNA, 744 bp, Aichi virus
  genomic RNA, complete genome.1
tttgaaaagggggtgggggggcctcggccccctcaccctcttttccggtggtctggtcccggaccaccgttactccattcagcttcttcggaacctgttcggaggaattaaacgggcacccatactccccccaccccccttttgtaactaagtatgtgtgctcgtgatcttgactcccacggaacggaccgatccgttggtgaacaaacagctaggtccacatcctcccttcccctgggagggcccccgccctcccacatcctccccccagcctgacgtatcacaggctgtgtgaagcccccgcgaaagctgctcacgtggcaattgtgggtccccccttcatcaagacaccaggtctttcctccttaaggctagccccggcgtgtgaattcacgttgggcaactagtggtgtcactgtgcgctcccaatctcggccgcggagtgctgttccccaagccaaacccctggcccttcactatgtgcctggcaagcatatctgagaaggtgttccgctgtggctgccaacctggtgacaggtgccccagtgtgcgtaaccttcttccgtctccggacggtagtgattggttaagatttggtgtaaggttcatgtgccaacgccctgtgcgggatgaaacctctactgccctaggaatgccaggcaggtaccccacctccgggtgggatctgagcctgggctaattgtctacgggtagtttcatttccaatccttttatgtcggagtc

SEQ ID NO: 1060 - DNA, 744 bp, Human enterovirus sp.
  71, strain E2005125-TW polyprotein gene, complete1
ttaaaacagcctgtgggttgtacccactcacagggcccactgggcgtcagcactctggtactgaggtacctttgtgcgcctgttttaactcccttcccctgaagtaacttagaagcaataaactaacgatcaacagtgggcatgacataccagtcatgtctcgatcaagcacttctgtttccccggactgagtatcaataggctgctcgcgcggctgaaagagaaaacgttcgttacccggccagctacttcgagaagcttagtaccatcatgaacgaagcagagcgtttcgctcagcacaatcccagtgtagatcaggctgatgagtcactgcgacccccatgggcgaccatggcagtggctgcgttggcggcctgcccatggagaaatccatgggacgctctaattctgacatggtgcgaagagcctattgagctagctggtagtcctccggcccctgaatgcggctaatcctaactgcggagcacgcacccacaaaccagtgggcagtgtgtcgtaacgggtaactctgcagcggaaccgactactttgggtgtccgtgtttccttttattcttatattggctgcttatggtgacaatcaaagagttgttaccatatagctattggattggccatccggtgtgcaacagagcaattgtttacctatttattgggtttgtaccactaacgttgaagtctgtgaccacactcaactttatcctgaacctcaatacagtaaaac

SEQ ID NO: 1061 - DNA, 744 bp, Enterovirus sp.
  A71 Y90-3896 RNA, complete genome.1
ttaaaacagcctgtgggttgcacccacccacagggcccactgggcgccagcactctggtacttaggtacctttgtgcgcctgttttatctcccttcccccgaagtaacttagaagctgtgagctaacgatcaacagtaggtgtgacataccagtcatatcttgatcaagcacttctgtttccccggactgagtatcaataggctgctcgcgcggctgaaagagaaaacgttcgtcacccggccaactacttcgagaagcttagtaccaccatgaacgaggcagagtgtttcgctcggcacaaccccagtgtagatcaggctgatgagtcactgcaatccccatgggcgaccatggcagtggctgcgttggcggcctgcccatggagaaatccatgggacgctctaattctgacatggtgcgaagagcctattgagctagctggtagtcctccggcccctgaatgcggctaatcctaactgcggagcacacacccacaagccagtgggcagtgtgtcgtaacgggcaactctgcagcggaaccgactactttgggtgtccgtgtttccttttattcttgtattggctgcttatggtgacaatcaaagagttgttaccatatagctattggattggccatccggtgtgcaacagagcaattatttacctatttattggttttgtaccattgacactgaagtctgtgattacccttaattttattttgaccctcaacacagtcaaac

SEQ ID NO: 1062 - DNA, 744 bp, Unknown
  Description of Unknown: Human coxsackievirus A10, strain Kowalik, complete genome.1 sequence
ttaaaacagcctgtgggttgcacccactcacagggcccactgggcgctagcactctggtaccgtggtacctttgtgcgcctgttttatacccccttccccgtttgaacattagaagtaacgcacctcgatcagtagcaggcgcggcgcaccagccgtgtcttgatcaagcacttctgtttccccggaccgagtatcaatagactgctcacgcggttgaaggagaaaacgttcgttatccggctaactacttcgagaaacttagtagcaccatggaagttgcagagtgtttcgctcagcactccccccccagtgtagatcaggctgatggatcaccgcgttcctcacgggtgaccgtggcggtggtcgcgttggcggcctgcccatggggcaacccatgggacgctctaatatggacatggtgtgaagagtctattgagctagttagtagtcctccggcccctgaatgcggctaatcctaactgcggagcacgtgtccccaacccaggggatagcgtgtcgtaacgggtaactctgcagcggaaccgactactttgggtgtccgtgtttcctttattcttatcctggctgcttatggtgacaattgagagattgttaccatatagctattggattggccatccggtgtctaacagagctataatatatctttttgttgggttcgtacccctcaattttgaggttgttctcacattaaagtacatcttggtgttaaatatcagaag

SEQ ID NO: 1063 - DNA, 744 bp, Coxsackievirus
  A16, strain 12C10, complete genome.1
ttaaaacagcctgtgggttgtccccacccacagggcccactgggcgctagcacactgattttgcgggatctttgtgcgcctgttttataacccctccctaaacggcaatttagaagttctgcacatccacgaccagtagtaagcgtgacgcgccagtcacgtcttggtcaagtacttctgtatccccggactgagtatcaatagactgctcacgcggttgaaggagaaaacgttcgttatccggctaactacttcgagaaacctagtaacaccgtgaaagttgcggagtgtttcgctcagcacttcccccgtgtagatcaggccgatgagtcactgtaaaccccacgggcgaccgtgacagtggctgcgttggcggcctgcccatgaggcaactcatgggacgctctaatacagacatggtgtgaagagtctattgagctagttagtagtcctccggcccctgaatgcggctaatcctaactgcggagcacgcaccctcaacccagggggcggcgtgtcgtaatgggtaactctgcagcggaaccgactactttgggtgtccgtgtttccttttattccttattggctgcttatggtgacaattgaaaagttgttaccatatagctattggattggccatccggtatctaatagagctattgtttacctgttcattggatacgtccctcttagtcttaaggtcattcaaactcttgattacatattactccttaaccacaagaa

SEQ ID NO: 1064 - DNA, 744 bp, Enterovirus A71
  strain 119798, complete genome.1
ttaaaacaggctgtgggttgtacccactcacagggcctactgggcgctagcactctggcactaaggtacctttgtgcgcctgtttttacttccctttcccaaagaaacttagaagttgtgtaccaatgatcaatagcaggtgtgacgtacaaataacatcttgatcaatcacttctgtttccccggaccgagtatcaataggctgctcgcgcggctgaaggagaaaacgttcgttacccgaccagctatttcgagaagcttagtaccaccatgaacgaggcagagtgtttcgttcagcacaaccccagtgtagatcaggctgatgagtcactgcaacccccatgggcgaccatggcagtggctgcgttggcggcctgcccatggagaaatccatgggacgctctaattctgacatggtgtgaagagcctattgagctagctggtagtcctccggcccctgaatgcggctaatcctaactgcggagcacatgctcacgagccagtgggtggtgtgtcgtaatgggcaactctgcagcggaaccgactactttgggtgtccgtgtttccttttattcttatgttggctgcttatggtgacaatcaaagaattgttaccatatagctattggattggccatccggtgtgcaacagagcaattgtttatctatttattggtttcgtaccactatcactgaagtctgtgaccactctcgaattcattttgaccctcaactcaatcaaac

SEQ ID NO: 1065 - DNA, 744 bp, Enterovirus C96
  strain T49-XZ-CHN-2005, complete genome.1
ttaaaacagctctggggttgttcccaccccagaggcccacgtggcggccagtacaccggtatcacggtacccttgtacgcctgttttatactccctaccccgtaacttagaagcatcaactcaagttcaatagtaggggtacaatccagtaccaccacgaacaagcacttctgtttccccggtgatattgtatagactgtgcccacggttgaagacaatagatccgttatccgcttttatacttcgagaagcccagtaccaccttggaatcttcgatgcgttgcgatcagcactcgaacccggagtgtagcttaggtcgatgagtctggacgctcctcaccggcgacggtggtccagactgcgttggcggcctacctgtggcccaaagtcacaggacgctagttgtgaacaaggtgtgaagagcctattgagctataaaagagtcctccggcccctgaatgcggctaatcccaaccacggagcaggtgatcacaaaccagtgactagcctgtcgtaacgcgcaagtctgtggcggaaccgactactttgggtgtccgtgtttccttttatttcatttatggctgcttatggtgacaatcatagattgttatcataaagcgaattggattggccatccggtgaaaatcaagcacatcatttatctgtttgttggatttacacctttagtttcttactccccgcgccttattcatattgtgttgttgattagacagtggtattacc

SEQ ID NO: 1066 - DNA, 744 bp, Human enterovirus 96
  strain 05517, complete genome.1
ttaaaacagctctggggttgttcccaccccagaggcccacgtggcggccagtacaccggtatcacggtacccttgtacgcctgttttatactccccgcccgtaacttagaagcaataactcaagttcaacagcagggggtacaaaccagtacctccacgaacaagcacttctgtttccccggtgacattgtatagactgtacccacggttgaaaacaatagatccgttatccgcttttgtacttcgagaagcccagtaccgtcttggaatcttcgatgcgttgcgctcagcactcgaacccggagtgtagcttaggtcgatgagtctggacagtcctcaccggcgacggtggtccaggctgcgttggcggcctacctgtggcccaaagccacaggacgctagttgtgaacaaggtgcgaagagcctattgagctacagaagagtcctccggcccctgaatgcggctaatcccaaccatggagcaggtgatcacgaaccagtgattagcctgtcgtaatgcgcaagtctgtggcggaaccgactactttgggtgtccgtgtttccttttatttcatttatggctgcttatggtgacaatcatagattgttgtcataaagcgaattggattggccatccggtgaaagtcaaacacattgtttatttgtttgttggcttcacgcctttaacttatcacaccttaaacctcattcacattaccttgttgatcagacagtggtatcacc

SEQ ID NO: 1067 - DNA, 744 bp, Unknown
  Description of Unknown: Human coxsackievirus A18, strain G13, complete genome.1 sequence
ttaaaacagctctggggttgttcccaccccagaggcccacgtggcggccagtactccggtattgcggtacccttgtacgcctgttttacactcccttccccgtaacttagacgcaataaaccaagttcactaggaggggtgcaaaccagcaccaccacgaacaagcacttctgtttccccggtgacattgtatagactgtatccacggttgaaaacgattgatccgttatccgctcttgtacttcgagaagcctagtatcatcttggaatcttcgacgcgttgcgctcagcattcaaccccagaatgtagcttaggtcgatgagtctggacattcctcaccggtgacggtggtccaggctgcgttggcggcctacctgtgacccaaagtcacaggacgctagttgtgaacaaggtgtgaagagcctattgagctacaagagagtcctccggcccctgaatgcggctaatcctaaccacggagcaagtgctcacgaaccagtgagtggcttgtcgtaacgagcaattctgtggcggaaccgactactttgggtgtccgtgtttcctttttaactttaaatggctgcttatggtgacaatcattgattgttatcataagccgaattggattggccatccggtgaaaatcaagttgatcatttatttgtttgttggattcactccattaactcatttttcaattgacctaatacgtattgtattattagttagaaacatacatcaca

SEQ ID NO: 1068 - DNA, 744 bp, Unknown
  Description of Unknown: Human coxsackievirus A24, strain E34-dn19 polyprotein gene, complete1 sequence
ttaaaacagctctggggttgttcccaccccagaggcccacgcggcggccagtacaccggtatcacggtacccttgtacgcctgttttatactcccttccccgtaacttagaagccacaaaccaagttcgataggagggggtacaaaccagtaccaccgtgaacaagcacttctgtttccccggtgatgtcacatagactgtccccacggttgaaagtgattgatccgttacccgccttggtacttcgagaaacctagtatcatcttggaatcaatgacgcgttgcgctcagcactcaaacccggagtgtagcttaggctgatgagtctggacgtccctcactggcgacagtggtccaggctgcgctggcggcctacctgtggtggaagccacaggacgctaattgtgaacaaggtgtgaagagtctattgagctaccatggagtcctccggcccctgaatgcggctaatcccaaccacggagcaagtattcacaaaccagtgaaatgcttgtcgtaacgcgaaagtctgtggcggaaccgactactttgggtgtccgtgtttccttttattctttatatggctgcttatggtgacaatcatagattgttatcataaagcgcattggattggccatccggtgaaaatcaagcaaatcatttacttatttgttggatttactccaatcacaccatttacattgcatttaattactcttgtgttgacaatcagaagatactaccaca

SEQ ID NO: 1069 - DNA, 744 bp, Unknown
  Description of Unknown: Human coxsackievirus A11, strain BAN00-10444, complete genome.1 sequence
ttaaaacagcctgtgggttgttcccaccccagaggcccacgtggcggctagtactctggtatcacggtacctttgtacgcctgttttataccccttccccaagtaaccttagaagcaactcaacaagttcaatagagggggtacaaaccagtaccaccacgaacaagcacttctgtttccccggtgattttgcataggctgtacccacggccaaaagtgaatgatccgttatccgcttgagtacttcgagaagcttagtaccaccttggaatcttcgatgcgttgcgctcagcactctaccccgagtgtagcttaggctgatgagtctgggcattccccaccggcgacggtggcccaggctgcgttggcggcctacccatggctaacgccatgggacgctagttgtgaacaaggtgtgaagagcctattgagctactcaagagtcctccggcccctgaatgcggctaatcctaaccatggagcaagtgccctcaacccagagggtggcttgtcgtaacgcgcaagtccgtggcggaaccgactactttgggtgtccgtgtttccttttatcttatatatggctgcttatggtgacaatcatagattgttatcataaagcgaattggattggccatccggtgaagtataaacatattatttacctgtttgtcggattcaccccgctcactttatacacacccaatatagtatctattgtactgctactgaggcactaccaccgca

SEQ ID NO: 1070 - DNA, 744 bp, Human enterovirus sp.
  88, strain BAN01-10398, complete genome.1
ttaaaacagcctgtgggttgatcccacccacagggcccactgggcgctagcacactggtattccggtacttttgtgcgcctgttttatacacccttccccttcatgtaacttagaagtaaaacacaaacggtcaataggtagctcagcaaaccagctgagcctcggccaagcacttctgttaccccggactgagtatcaataagctgttaacacggctgaaggagaaaacgttcgttatccggccaattacttcgagaaacctagtaacaccatgaaggttgcgtagcgtttcgctccacacaaccccagtgtagatcaggtcgatgagtcaccgctctccccacgggtgaccgtggcggtggctgcgttggcggcctgcccatggagcactccatgggacgcttcaatactgacatggtgtgaagagtctattgagctaattggtagtcctccggcccctgaatgcggctaatcctaactgcggagcagacacccacacgccagtgggcagtctgtcgtaatgggcaactctgcagcggaaccgactactttgggtgtccgtgtttccttttattcttacattggctgcttatggtgacaatcaaggaattgttaccatatagctattggattggccatccggtatctaacagagcaattgtttacctcttcaccggttttgtaccattgaattgcaatagtctcaacaccctttgctatatcattaaattgaactcagcaaa

SEQ ID NO: 1071 - DNA, 744 bp, Human echovirus
  30, strain Kor08-ECV30, complete genome.1
ttaaaacagcctgtgggttgctcccacccacagggcccactgggcgctagcacactggtatcccggtacctttgtgcgcctgttttatccaccccacccccagctgtaatttagaagttcgacacacatggtcaatagatggctcagtgcaccaactgggtttagaccaagcacttctgttaccccgggccgagtatcaataagctgctcgcgcggctgaaggagaaaacgctcgttatccggccaattacttcgagaaacctagtaccaccatggaggttgcgcagcgtttcgctccgcacagccccagtgtagatcaggccgatgagtcaccgcgttcctcacgggcgaccgtggcggtggctgcgttggcggcctgcccatggggcaacccatgggacgcttcaatactaacatggtgtgaagagtctattgagctaattggtagtcctccggcccctgaatgcggctaatcctaactgcggagcagatactcacatgccagtgggcagtctgtcgtaacgggcaactctgcagcggaaccgactactttgggtgtccgtgtttccttttattcttatactggctgcttatggtgacaattgagaaattgttaccatatagctattggattggccatccagtgacaaacagagcgattgtttacctatttgtcggtttcataccgttgaactttagagttttgaagaccctcaacttgattatattattcaactctgtaaa

SEQ ID NO: 1072 - DNA, 744 bp, Echovirus
  E11, strain 1315/ISR/1999, complete genome.1
taaaacagcctgtgggttgttcccacccacagggcccactgggcgccagcactctggtattatggtaccttagtgcgcctgttttatacaccccttccccaaatgtaatttagatgcatgtaaacaaaggccaatagcaggcgcagcataccagctgtgtctcggtcaagcacttctgttaccccggactgagtatcaataggctactcacgtggctgaaggagaaaacgttcgttatccggccaattacttcgagaaacctagtaataccatgaaggttgcgaagtgtttcgctcagcacaaccccagtgtagatcaggtcgatgagtcaccgcattccccacgggtgaccgtggcggtggctgcgctggcggcctgcccatgggattacccatgggacgcttcaatattgacatggtgtgaagagtctattgagctaattggtattcctccggcccctgaatgcggctaatcccaactgcggagcaggtacccacatgccagtgggcagcctgtcgtaatgggcaactctgcagcggaaccgactactttgggtgtccgtgtttctctttattcttatactggctgcttatggtgacaattgagaaattgttgccatatagctattggattggccatccggtgacaaatagagcaattgtgcatccatttgttggttttatactaactcaatctcaaagttttaactaccctcaatctcattatatcattcaatacagcaaa

SEQ ID NO: 1073 - DNA, 744 bp, Echovirus
  E3 genomic RNA, complete genome,strain: OC10-532.1
ttaaaacagcctgtgggttgttcccacccacagggcccactgggcgttagcactctggtatcacggtacctttgtgcgcctgttttatctaccctccctaaaaatgtaatttagaagcatgatccgaacggtcattaggtagctcagtgcaccaactgagcccagaccaagcacttctgttaccccggactgagtatcaataggctgctcgcgcggctgaaggagaaaacgttcgttatccggccaattacttcgagaaacccagtaccactatgaaagttgcgcagcgtttcgttccgcacaaccccagtgtagatcaggtcgatgagtcaccgcgttccccacgggcgaccgtggcggtggctgcgttggcggcctgctcatggggcaacccatgagacgcttcaatactgacatggtgcgaagagtctattgagctaattggtagccctccggcccctgaatgcggctaatcccaactgcggagcagatacccacaaaccagtgggcagtctgtcgtaatgggtaactctgcagcggaaccgactactttgggtgtccgtgtttccttttgttcttacactggctgcttatggtgacaattgagagattgttgccatatagctattggattggccatccggtgactaacagagcaattgtttacttatttgttggttttataccgttagattacaaagtcctaaacaccctgaatctcattataacacttaattcagcaaa

SEQ ID NO: 1074 - DNA, 744 bp, Enterovirus
  B75,isolate 102/SD/CHN/97, complete genome.1
tttaaaacagcctgtgggttgtttccacccacagggcccacagggcgctagcactttggtatcacggtacctttgtgcgcctgttttataacccttcccccccacagaaacttagaagcaccacacaccgatcaatagaaagcgtggcgcaccagccatgtcttgatcaagcacttctgtttccccggaccgagtatcaatagactgctcgcgcggtcgaaggagaaaacgtccgttatccggctgactacttcgagaaacccagtaacaccatggaaattgcggagtgtttcgatcagcacatccccagtgtagatcaggtcgatgagtcaccgcattccccacgggtgaccgtggcggtggctgcgttggcggcctgcctacggggcatcccgtaggacgcttcaaaatggacatggtgcgaagagtctattgagctagtcagtagtcctccggcccctgaatgcggctaatcctaactgcggagcgcgcgcctccaacccagggggtagcgcgtcgtaacgggtaactctgcagcggaaccgactactttgggtgtccgtgtttctttttatcattacattggctgcttatggtgacaattgaaaggttgttaccatatagctattggattggccacccggtgtctaatagagcgattgtgtacctttttgttgggtttgtgccactttgtaaaacagcctatcagactttgtgctttatagtcaaactaaatacagcaaa

SEQ ID NO: 1075 - DNA, 744 bp, Echovirus
  E30, strain 13-759, complete genome.1
ttttaaaacaagctgtgggttgatcccacccacagggcccactgggcgctagtacactggtatcacggtacctttgtgcgcctgttttacctacccctccccgaaagaaacttagaagctcaacttatgtggtcaatagtaagctcagtacgccaactgagccacgaccaagcacttctgtcgccccggactgagtatcaataagctgctcacgtggctgaaggagaaaacgttcgttatccggccaattacttcgagaaacccagtaccaccatgaaagttgcgcggcgtttcgctccgcacaaccccagtgtagatcgggccgatgagtcaccgcgttccccacgggcgaccgtggcggtgactgcgttggcggcctgcccatggagcaatccatgggacgcttcaatactgacatggtgcgaagagtctattgagctaattggtagtcctccggcccctgaatgcggctaatcctaactgcggagcagatacccacacaccagtgggcagtctgtcgtaacgggcaacttcgcagcggaaccgactactttgggtgtccgtgtttccttttattttatactggctgcttatggtgacaattgagagattgttaccatatagctattggattggccatccggtgtccaacagagcgatcatttacttgtttgttggattcgtgcccttgaactacaaagcactcctaacacttaaatacattgtagacctcaacacagcaaa

SEQ ID NO: 1076 - DNA, 744 bp, Human enterovirus sp.
  85,strain HTPS-MKLH04F/XJ/CHN/2011, complete1
ttaaaacagcctgtgggttgttcccacccacagggcccactgggcgctagcacactggtattacggtacctttgtgcgcctgttttatataccccccccaagtgcaacttagaagcaagacatgaccggtcagcaggtgattcagtaaaccaactgagtcttgaccaagcacttctgtttccccggaccgagtatcaataggctgcttacgcggctgaaggagaaagtgttcgttacccggccaattacttcgagaagcctagtaccaccatggaggttgcgcggcgtttcgctccgcacacccccagtgtagatcaggccgatgagccaccgcattccccacgggtgaccgtggcggtggctgcgttggcggcctgcccatggggtaacctatgggacgcttcaatactgacatggtgcgaagagcctattgagctaattggtagtcctccggcccctgaatgcggctaatcctaactgcggagcaggtacccacataccagtgggcagcctgtcgtaacgggtaactctgcagcggaaccgactactttgggtgaccgtgtttccttttattttttcctattggctgcttatggtgacaatcgaggaattgttgccatatagctattggattggccatccggtgtcaaatagagcgattatttacctgtttgttggatttgtaccactgaactttaaggcgctcatcactctcaactatattttatcccttaacgcaacaaa

SEQ ID NO: 1077 - DNA, 744 bp, Human enterovirus sp.
  84, isolate CIV2003-10603, complete genome.1
ttaaaacagcctgtgggttgttcccacccacagggcccaccgggcgccagcacactggtatcacggtacccttgtgcgcctgttttatccaccccttcccacagtaacttagaagcacaccatgtatacggtcaataggcggctcagtacaccaactgggccacgaccaagcacttctgttaccccggactgagtatcaataagctgctcacgcggctgaaggagaaaacgttcgttacccggccaattacttcgagaaacccagtaccaccatgaaggttgcgcagcgtttcgttccgcacaaccccagtgtagatcaggtcgatgagtcaccgcgttcctcacgggtgaccgtggcggtggctgcgttggcggcctgcccatggggcaacccatgggacgcttcaatactgacatggtgcgaagagtctattgagctaattggtagtcctccggcccctgaatgcggctaatcctaactgcggagcagatacccacaaaccagtgggcagtctgtcgtaacgggcaactctgcagcggaaccgactactttgggtgtccgtgtttccttttatccttacactggctgcttatggtgacaattgagaaattgttaccatatagctattggattggccatccggtgacaaacagagcagttgtttacctatttgttggtttcgtaccgctgaaccttaaagttctaaagaccctcaattttatcttagcacttaacacagcaaa

SEQ ID NO: 1078 - DNA, 744 bp, Enterovirus sp.
  C96 clone V13C polyprotein gene, complete cds.1
ttaaaacagctctggggttgttcccaccccagaggcccacgtggcggccagtacaccggtattacggtacccttgtacgcctgttttatactcccttccccgcaacttagaagttaaacaaaccaagttcaatagaagggggtgcaaaccagtaccaccacgaacaagcacttctgtttccccggtgacgtcatataggttgtaaccacggccaaaagtgactgatccgttatccgctcttgtacttcgagaagcccagtaccatcttgggatcttcgatgcgttgcgctcagcactcgaacccggagtgtagcttaggccgatgagtctggacattccccaccggtgacggtggtccaggctgcgttggcggcctacctgtggtccaagccacaggacgctagatgtgaacaaggtgtgaagagcctattgagctacaagggaatcctccggcccctgaatgcggctaatcctaactacggagcagacggtcacaaaccagtgaatggtctgtcgtaatgcgcaagtctgtagcggaaccgactactttgggtgtccgtgtttccttttatctttttaatggctgcttatggtgacaatcctagattgttatcataaagcgatttggattggccatccagtgatatttgaaaccattactgtattgcctgctaaggctattttaaagacttaataaacacaacttcattcaactcaattacaccaactaacaactgtctcata

SEQ ID NO: 1079 - DNA, 744 bp, Human enterovirus sp.
  B,strain Cuba450of90 polyprotein gene, complete1
tttaaaacagcctgtgggttgttcccacccacagggcccactgggcgctagcactctggtattacggtacctttgtgcgcctgttttacatccctcccccagatgcaacttagaagcagtacaccaagaccaatagtaggcatggcataccagccatgtgtcggtcaagcacttctgttcccccgggctgagtatcaataaactgctcacgtggttgaaggagaaagcgcccgttacccggctaactacttcgagaagcctattaacaccatgaaagttgcggagtgtttcgctcagcacgatcccggtgtagatcaggccgatgagtcaccgcgttccccacaggtgactgtggcggtggctgcgttggcggcctgcccatggggcaacccatgggacgcttcaatatggacatggtgtgaagagcccattgagctagttagtagtcctccggcccctgaatgcggctaatcccaactgcggagcacagcgcccccgctccagggggtagtgtgtcgtaacgggcaactctgcagcggaaccgactactttgggtgtccgtgtttccttttttccttttcattggctgcttatggtgacaattgaaagattgttaccatatagctattggattggccatccagtgtcaagcagagctataatttaccaatttatagggtttgtcccgttggatctgaaagctttaaaaacccttaacttggtactactattaaacagtgtaaa

SEQ ID NO: 1080 - DNA, 744 bp, Echovirus
  E20,strain 812/YN/CHN/2010, complete genome.1
ttaaaacagcctgtgggttgttcccacccgcagggcccactgggcgctaccacactggtattaaggtacccttgtgcgcctgtttaatacacccctccccctaatgtaacttagaagcatgacttaagtggtcaatagatagctcagtaatccaactgagttccgaccaagtacttctgttaccccggaccgagtatcaataagctgttcacgcggcagaaggagaaagcgttcgttatccggccaattacttcgagaaacccagtatcaccatgaaagttgcgcagtgtttcgctccgcacaaccccagtgaagatcaggtcgatgagtcaccacagtcctcacgggcgaccgtggtggtggctgcgttggcggcctgcccatggggcaacccctgggacgcttcaatcctgacatggtgtgaagagtctattgagctggatggtatccctccggcccctgaatgcggctaatcctagctgcggagcagacgctcgcatgccaacgggtagtctgtcgtaccgggtaactctgcagcggaaccgactactttgggtgtccgtgtttccttttatccttatatcgcctgcttatggtgtcaattgaaagattgttaccatatagctaatggattggccatccgataacaaatagagtgattatctagttttttgttggatttgttccattgaactacaaggtattgaacacccttaatttcattttaacactcaacacaacaaa

SEQ ID NO: 1081 - DNA, 744 bp, Enterovirus sp.
  B83, isolate AFP341-GD-CHN-2001, complete genome.1
tttaaaacagcctgtgggttgttcccacccacagggcccactgggcgctagcactctggtatcacggtacctttgtgcgcctgttttatagcccctcccttagataggaatttagaagcactgcacaccgatcaatagcaggcgcggcacgccagccacgtcttgatcaagcacttctgtttccccggaccgagtatcaatagactgttaacgcggtcgaaggagaaaacgttcgttatccggccaactacttcgagaaacctagtaacgccatggaagttgcggagtgtttcgctcagcacatccccagtgtagatcaggtcgatgagtcaccgcatccctcacgggtgaccgtggcggtggctgcgttggcggcctgcctacggggcaacccgtaggacgcttcaatatggacatggtgcgaagagtatattgagctagttggtagtcctccggcccctgaatgcggctaatcctaactgcggagcgctcgcccccaatccagggggtcgtgcgtcgtaacgggtaactctgcagcggaaccgactactttgggtgtccgtgtttccttttatctttatcacggctgcttatggtgacaattgaaagattgttaccatatagctattggattggccatcctgtgtctaacagagcaatcatatatctttttgttggatttgtgccacttgataaaataagttaccagactttgtgttttatcatcagactaaacacaacaaa

SEQ ID NO: 1082 - DNA, 744 bp, Echovirus
  E7, strain DH22G/JS/2012, complete genome.1
ttaaaacagcctgtgggttgtacccacccacagggcccaccgggcgctagcacactggtatcacggtacccttgtgcgcctgttttatcaacccctccccacattgaaacttagaagtaacacacaccgatcaatagtgggcgtggcaaaccagctacgtcgtgatcaagtatttctgtttccccggactgagtatcaatagactgctcgcgcggttgaaggagaaaacgttcgttacccggctaactacttcgagaaacctagtaatgccatgaaaattgcgtagcgtttcgttcagcacaaccccagtgtagatcaggtcgatgagtcactgcattcctcacgggcgaccgtggcagtggctgcgttggcggcctgcctatagggtaacctataggacgctacaatatggacatggtgtgaagagtctattgagctagttagtagtcctccggcccctgaatgcggctaatcctaactgcggagcgcgtgtttccaatccaggaagtggcgcgtcgtaatgggcaactctgcagcggaaccgactactttgggtgtccgtgtttctcttttatccttacactggctgcttatggtgacaattgaagaattgttaccatatagctattggattggccatccggtgtctaatagagcaattgtatacctctttgttggatttataccattaaacagaacaagttaccagaccctgtgctttattgttaaactaaacacgacgaa

SEQ ID NO: 1083 - DNA, 744 bp, Coxsackievirus
  B3, isolate DH16G/JS/2012, complete genome.1
tttaaaacaaagctgtgggttgttcccacccacagggcccactgggcgctggcacactggtattgcggtacctttgtgcgcctgttttatccgccctccccagtagtaacctagaagcatgaataatgtggtcaataggaagctcagtaaaccaactgggtcttgaccaagcacttctgttaccccggactgagtatcaagaagctgctcgcgtggctgaaggagaaaacgttcgttacccggccaattacttcgagaaacccagtaccaccatggaagttgcgcagcgtttcgctccgcacaaccccagtgtagatcaggtcgatgagtcaccgcaatcctcacgggtgaccgtggcggtggctgcgctggcggcctgcccatggggtaacccatgggacgcttcaatactgacatggtgcgaagagtccattgagctaattggtagtcctccggcccctgaatgcggctaatcctaactgcggagcagatatccacacaccagtggacagtctgtcgtaatgggtaactctgcagcggaaccgactactttgggtgtccgtgtttccttttatctttatattggctgcttatggtgacaattgagagattgttaccatatagctattggattggccatccggtgagcaacagagcaattgtattcctctttgtaggatttgtgccgttgaattacaacaactacaacaccttactctacattatccacttaaacacgcggaa

SEQ ID NO: 1084 - DNA, 744 bp, Echovirus E3
  isolate ECHO3_INMI1 polyprotein gene, complete cds.1
ttaaaacaaggctgtgggttgtacccgcccacagggcccactgggcgccagcactctggtattacggtacccttgtgcgcctgttttatatcccttccccaaggtaaacgttagaagcaatgcactcccgatcaatagaaggtgcgacgcgccagtcgtatctcgatcaagcacttctgtttccccggaccgagtatcaatagactgctagcgcggttgaaggagaaaacgttcgttacccgactaactacttcgagaagcccagtagcgccatgaaagttgcagagtgtttcgctcagcacttcccccgtgtagatcaggccgatgagtcaccgcaatccccacgggcgaccgtggcggtggctgcgttggcggcctgcctatggggaaacccataggacgctcaaatacagacatggtgcgaagagtctattgagctagttagtactcctccggcccctgaatgcggctaatcctaactgcggagcaagtactcacaatccagtgggcagcttgtcgtaacgggtaactctgcagcggaaccgactactttgggtgtccgtgtttccttttattcctacattggctgcttatggtgacaatcaaagagttgttaccatatagctattggattggccatccggtgactaataaagcaattatatttctttttgttgggtttgtaccccttaatacaaccagcttcaccacattgtgttacatcattagactgaacaaggcaaa

SEQ ID NO: 1085 - DNA, 744 bp, Echovirus
  type 30 partial ORF1 gene for polyprotein,isolate 91TLC.1
ttaaaacagcctgtgggttgttcccacccacagggcccactgggcgccagcacactggtatcacggtacttttgtgcgcctgttttatctacccccacccccagcgtaacttagaagcacatttcacacggtcaataggtgactcagcatgccagctgagttttggccaagcacttctgttaccccggaccgagtatcaataagctactcacgtggctgaaggagaaagcgttcgttaaccggccaattacttcgagaaacctagtatcaccatgaaggttgcgtggcgtttcgctccgcacaaccccagtgtagatcaggtcgatgagttaccgcgtccctcacgggcgaccgtggcggtagctgcgctggcggcctgcccatggggcaacccatgggacgcttcaatactgacatggtgtgaagagtctattgagctaattggtagtcctccggcccctgaatgcggctaatcctaactgcggagcagatacccacacgccagtgggcagtctgtcgtaatgggcaactctgcagcggaaccgactactttgggtgtccgtgtttccttttactcttatattggctgcttatggtgacaattaaaagattgttaccatatagctattggattggccatccagtgtctaatagagcgatcatttacctttttcttgggtttgttccactcaactataaagcacttgtaacgctcaaatatattataaacctcaacacaacaaa

SEQ ID NO: 1086 - DNA, 745 bp, Human enterovirus sp.
  91 polyprotein gene, complete cds.1
ttaaacagctctagggttgttcccaccctagaggcccacgtggcggctagcactctggtatcacggtacctttgtgcgcctgttttatatccctttccccatgtaacttagaagttattaaacaaagttcaatagaagggggtacaaaccagtgccaccacgaacaagcacttctgtttccccggtgaagctgtatagactgtctccacggttgaaaatggcagatccgttacccgctttggtacttcgagaaacctagtatcaccttggaatcttcgatgcgttgcgctcagcactcaaccccagagtgtagcttaggtcgatgagtctggacgatcctcactggtgacagtggtccaggctgcgttggcggcctacctgtggtgaaaaccacaggacgctagttgtgaacaaggtgtgaagagtctattgagctaccaaagagtcctccggcccctgaatgcggctaatcctaaccacggagcaagtgccttcaaaccagtaggtagcttgtcgtaacgcgcaagtctgtggcggaaccgactactttgggtgtccgtgtttccttttattttatcatggctgcttatggtgacaatctaagattgttatcatatagctattggattggccatccggtgactaacagagatctcatatacctttttgttggttttactaaattaaatattaccacgttcaagacacttctccttatcatacaactaaatagtgagaagagaaa

SEQ ID NO: 1087 - DNA, 745 bp, Coxsackievirus
  A16,strain 20692_88_CV-A16 polyprotein gene,1
ttaaaacagcctgtgggttgtacccacccacagggcccactgggcgttagcacactgatttcacggaatctttgtgcgcctgttttatatccctcccccaatacagtaacttagaagttagaaacctacacgaccaatagcaggcgtgacgcaccagtcatgtcttggtcaaacacttctgtttccccggactgagtatcaataagccgctcacgcggctgaaggagaaaacgttcgttatccggctaactacttcgagaaacctagtagcaccgtgaaagttgcagagtgtttcgctcagcactttccccgtgtagatcaggtcgatgagtcactgcatcccccacgggcgaccgtggcagtggctgcgttggcggcctgcctatggggcaacccatgggacgctctaatacagacatggtgtgaagagtctattgagctagttagtagtcctccggcccctgaatgcggctaatcctaactgcggagcacgcaccctcaatccagggggcggcgtgtcgtaacgggtaactctgcagcggaaccgactactttgggtgtccgtgtttccttttatcacttactggctgcttatggtgacaatcaaagaattgttaccatatagcttttggattggccatccggtgtctaacagagctattgtttacctgtttgttggatacattcctctcaactacaaagttcttcaaactctcaactttatattgctccttaatcataagaa

SEQ ID NO: 1088 - DNA, 745 bp, Human enterovirus sp.
  71, strain 804/NO/03, complete genome.1
ttaaaacagcctgtgggttgcacccacccacagggcccactgggcgtcagcactctggtactgaggtacctttgtgcgcctgtttttacttccctttcccgaaagtaacttagaagctttgaaccagcgatcaacagtaggtgtgacataccagtcacatctcgatcaagcacttctgtatccccggactgagtatcaataggctgcttacgcggctgaaagagaaaacgttcgttacccggccaactacttcgagaagcttagtaccaccatgaacgaggcagagcgtttcgctcggcactaccccagtgtagatcaggctgatgagtcactgcaatccccatgggcgaccatggcagtggctgcgctggcggcctgcccatggagagatccatgggacgctctaattttgacacggtgcgaagagcctattgagctagttggtagtcctccggcccctgaatgcggctaatcctaactgcggagcgcacacccacataccagtgggtagtgtgtcgtaacgggcaactctgcagcggaaccgactactttgggtgtccgtgtttccttttattctcatgtcggctgcttatggtgacaatcgaagagttgttaccatatagctattggattggccatccggtgtgcaacagagcaattgtctaccagtttattggttttgtaccactgacattaaagtctgtaattaccctcaattttatcttgacccttaacacggtcaagc

SEQ ID NO: 1089 - DNA, 745 bp, Coxsackievirus
  A16,strain R35/YN/CHN/2012, complete genome.1
ttaaaacagcctgtgggttgttcccacccacagggcccactgggcgctagcacactgattctgcgggatctttgtgcgcctgttttataacccttcccctaggtagcaactttgaaggtttggacaaaaacgaacaatagggggcgaaaagcgccagtcacgtcttggtcaaacacttctgtatccccggactgagtaccaataggctgctcacgcggttgaaggggaaaacgttcgttacccggctaactacttcgagaaacctagtaacaccatgaaagttgcggagtgtttcgctcagcacttcccccgtgtagatcaggtcgatgagtcactgtaaaccccacgggcgaccgtgacagtggctgcgttggcggcctgcccatggggtaacccatgggacgctctaatacagacatggtgcgaagagtctattgagctagttagcagtcctccggcccctgaatgcggctaatcctaactgcggagcgcgcaccctcaatccagggggcggcgtgtcgtaatggttaactctgcagcggaaccgactactttgggtgtccgtgtttccttttattctttattggctgcttatggtgacaattgaaaagttgttaccatatagctattggattggccatccggtgtctaacagagctattgtttacctatttattggatacgtccctctcaatctcaagtccattcaaactcttgattatatattgctccttaactgtaggaa

SEQ ID NO: 1090 - DNA, 745 bp, Coxsackievirus
  A16,isolate CV-A16-M02-BLR-IN, complete genome.1
ttaaaacagcctgtgggttgttcccacccacagggcccattgggcgatagcacactgattttgcggaatctttgtgcgcctgttttataacccttcccccaagcagcaacttagaagtattgcacaatcgcggccagtagtgggcgtgacgcgccagtcacgtcttggtcaagcacttctgtatccccggactgagtatcaatagactgctcacgcggttgaaggagaaaacgttcgttatccggctaactacttcgggaaacctagtagcaccttgaaagttgcagagtgtttcgctcagcacttcccccgtgtagatcaggccgatgagccactgtaaaccccacgggcgaccgtgacagtggctgcgctggcggcctgcccatgggggaacccatgggacgctctaatacaaacatggggtgaaaagtctactgagctacttagtagtcctccggcccctgaatgcggctaatcctaactgcagagcacacaccctcaaccctcggggcagtgtgtcgtaatgggtaactctgcagaggaacccactactttgggtgaccgtgtttccttttattcgttattggctgcttagggcgacaattgaaaagttgttaccatatccctattgtattggccatccggtatctaacagagctattgtttacttatttgttggatacgtccctcttaatttcaaggctatccaaactcttgattatatatcgctccttaattataagaa

SEQ ID NO: 1091 - DNA, 745 bp, Coxsackievirus
  A16 gene for polyprotein,isolate1
ttaaaacagcctgtgggttgttcccacccacagggcccactgggcgctagcactctgattttgcgggatctttgtgcgcctgttttataatcccttccctaagcagtaacttagaagttctacacaatcaggaccaacagtcagcgtggcacgccagccacgttttggtcaagcacctctgtttccccggactgagtatcaatagactgctcacgcggttgaaggagaaaacgttcgttacccggctaactacttcgagaaacctaatagcaccatgaaagttgcggagtgtttcgctcagcacttcccccgtgtagatcaggtcgatgagtcactgtaaaccccacgggcgaccgtgacagtggctgcgttggcggcctgcccatggggtaacccatgggacgctctaatacggacatggtgtgaagagtctattgagctagttagtagtcctccggcccctgaatgcggctaatcctaactgcggagcatgcgccctcaacccagggggtggcatgtcgtaatgggcaactctgcagcggaaccgactactttgggtgtccgtgtttccttttattcctcattggctgcttatggtgacaattgaaaggttgttaccatatagctattggattggccatccggtgtctaacagagctattgtttacctattcattgggtttgtccctcttaatcttaagaccatccaaactcttgattacatattgctcctcaattgtagaag

SEQ ID NO: 1092 - DNA, 745 bp, Unknown
  Description of Unknown: Human coxsackievirus A12,strain Texas-12, complete genome.1 sequence
ttaaaacagcctgtgggttgtacccacccacagggcccactgggcgctagcactctggtactacggtacctttgtgtgcctgttttaagcccctaccccccactcgtaacttagaaggcttctcacactcgatcaatagtaggtgtggcacgccagtcacaccgtgatcaagcacttctgttaccccggtctgagtaccaataagctgctaacgcggctgaaggggaaaacgatcgttatccggctaactacttcgagaaacccagtaccaccatgaacgttgcagggtgtttcgctcggcacaaccccagtgtagatcaggtcgatgagtcaccgtattccccacgggcgaccgtggcggtggctgcgttggcggcctgcccatggggtgacccatgggacgctctaatactgacatggtgcgaagagtctattgagctagttagtagtcctccggcccctgaatgcggctaatcctaactgcggagcacatacccttaatccaaagggcagtgtgtcgtaacgggcaactctgcagcggaaccgactactttgggtgtccgtgtttccttttattcttacattggctgcttatggtgacaattgaaaagttgttaccatatagctattggattggccatccggtgacaaatagagctattgtatatctttttgttggttacgtaccccttaattacaaagtggtttcaactttgaaatacatcctaacactaaattgtagaaa

SEQ ID NO: 1093 - DNA, 745 bp, Enterovirus sp.
  C96,isolate JN13048, complete genome.1
ttaaaacagcctgtgggttgttcccaccccagaggcccacgtggcggctagtacaccggtatcgcggtacccttgtacgcctgttttatactccctaccccgtaacttagaagcaataacttgagttcaacagcagggggtacaaaccagtaccaccacgaacaagcacttctgtttccccggtgacgttgtatagactgtacccacggtcgaaaacaatagatccgttatccgcttttgtacttcgaaaagcccagtaccatcttggaatcttcgatgcgttgcgttcagcactcgaacccggagtgtagcttaggtcgatgagtctggacagtccacaccggcgacggtggtccaggctgcgttggcggcctacctgtggcccaaagccacaggacgctagttgtgaacaaggtgtgaagagcctattgagctacaaaagactcctccggcccctgaatgcggctaatcccaaccacggagcaggcgatcacaaaccagtggttagcctgtcgtaatgcgcaagtctgtggcggaaccgactactttgggtgtccgtgtttccttttatttcatttatggctgcttatggtgacaatcgtagattgttatcataaagcgaattggattggccatccggtgaaattcaaatatactgtttatttatttgttggcttcgcgcctttaaattaccgcaccttagaactcattcacattatcttgctggttagacagtggtaccatc

SEQ ID NO: 1094 - DNA, 745 bp, Unknown
  Description of Unknown: Human coxsackievirus A24,strain USA-Tx79-10625 polyprotein gene,1 sequence
ttaaaacagctctggggttgttcccaccccagaggcccacgtggcggctagtacaccggtatcacggtacccttgtacgcctgttttatacccccttcccccgtaacttagaagctacacaccaagttcaatagaagggggtacaaaccagtaccaccgcgaacaagcacttctgtttccccggtgaagttgcatagactgtgcccacggttgaaagcgaccgatccgttacccgccttggtacttcgagaaacccagtaccactttggaatcaatgatgcgttgcgctcagcgctcgaacccggagcgtagcttaggctgatgagtctggacattccccactggtgacagtggtccaggctgcgttggcggcctacctgtggtgaaagccacaggacgctagttgtgaacaaggtgcgaagagtctattgagctaccatggagtcctccggcccctgaatgcggctaatcccaaccacggagcaggcactcacaagccagtgagacgcttgtcgtaatgcgaaagtctgtggcggaaccgactactttgggtgtccgtgtttccttttattctttgtatggctgcttatggtgacaatcgaagattgttatcataaagcaagttggattggccatccggtgagaattaaaagcattatttacttgcttattggattcactccaatcacatcatttactccacatctaatcaatcttgtgttgatactcagaaggtgttatcaaa

SEQ ID NO: 1095 - DNA, 745 bp, Unknown
  Description of Unknown: Human coxsackievirus A24,strain DOR93-10630 polyprotein gene,1 sequence
ttaaaacagctctggggttgttcccaccccagaggcccacgtggcggccagtacactggtattacggtacccttgtacgcctgttttacaccccttcccccgtaacttagaagctttaaacccaagttcaatagtaggtggtacaacccagtaccaccacgaacaagcacttctgttatcccggtgagattgcataagctgtccccacggctaaaagcgattgatccgttacccgctcttgtacttcgagaagcctagtaaaaccttggaatcttcgacgcgttgcgttcgacactcaaccccagagtgtagcttaggctgatgagtctggacattcctcaccggcgacggtggtccaggctgcgttggcggcctacctgtggcctaaagccacaggacgctagttgtgaacaaggtgtgaagagcctattgagctacaagggagtcctccggcccctgaatgcggctaatcccaaccacggagcaggtggttgcaatccagcaactggcctgtcgtaacgcgcaagtctgtggcggaaccgactactttgggtgtccgtgtttccttttattttttaatggctgcttatggtgacaatcacagattgttgtcataaagcgaattggattggccatccagtgagagttaagataattatctacttgtttattggatttgttcctataaccgcccatacaccttgcttgattgaagtgatcctgtcaataagacatcactattaca

SEQ ID NO: 1096 - DNA, 745 bp, Unknown
  Description of Unknown: Human coxsackievirus A24,strain Joseph, complete genome.1 sequence
ttaaaacagctctggggttgttcccaccccagaggcccacgtggcggccagtactccggtattgcggtacccttgtacgcctgttttacactcccttccccggtaacttagaagtaaacaaaccaagttcaatagaagggggtacaaaccagtaccaccacgaacaagcacttctgtttccccggtgacgttgtatagactgtacccacggttgaaaacaactgatccgttatccgctcttgtacttcgagaagcccagtatcaccttggaatcttcgatgcgttgcgctcagcactcaaccccagagtgtagcttaggtcgatgagtctggacaatcctcaccggcgacggtggtccaggctgcgttggcggcctacctgtggcccaaagccacaggacgctagttgtgaacaaggtgtgaagagcctattgagctacgagagagtcctccggcccctgaatgcggctaatcccaaccacggagcaggtgatcacaagccagtgattagcctgtcgtaacgcgcaagtctgtggcggaaccgactactttgggtgtccgtgtttcctttattttattatggctgcttatggtgacaatcacagattgttatcataaagcgacttggattggccatccagtgaaaataaaacacatcatttacctgattgttggatttactccgctgactatctactcaccaggtcttattaaggttattctgttgattaggtcacaatttcaca

SEQ ID NO: 1097 - DNA, 745 bp, Unknown
  Description of Unknown: Human coxsackievirus A13,strain Flores, complete genome.1 sequence
ttaaaacagctctcgggttgttccccccccagaggcccacgtggcggccagtactccggtattacggtacccttgtacgcctgttttgtatccccttcccccgcaacttagaagttataaaccaagttcaatagaagggggtacaagccagtaccaccacgaacaagcacttctgtttccccggtgatgttgtatagactgctaacgcggttgaaaacagctgatccgttatccgcttgtgtacttcgagaagcctagtatcatcttggaatcttcgatgcgttgcgttcagcgctctaccccagagcgtagcttaggctgatgagtctgggcattccccaccggcgacggtggcccaggctgcgttggcggcctacctatggctaacgccataggacgctagttgtgaacaaggtgtgaagagcctattgagctacacaagagtcctccggcccctgaatgcggctaatcctaaccatggagcaagtgatcacaatccagtgatattcttgtcgtaacgcgcaagtccgtggcggaaccgactactttgggtgtccgtgtttccttttacttttatcatggctgcttatggtgacaatcattgattgttatcataaagcgaattggattggccatccggtgaaagtgagacttatcatctacttgtttgttggattcactccattgaacacattcactcccagtatcatttcaatagtaatcagaattagacagttgtatcaca

SEQ ID NO: 1098 - DNA, 745 bp, Human enterovirus sp.
  99,strain USA-Ok85-10627 polyprotein gene,1
ttaaaacagctctggggttgttcccaccccagaggcccacgtggcggctagtactccggtattacggtacccttgtacgcctgttttaaatccccttccccgtaacttagaagcttaaaccaataagttcaatagaagggggtacaaaccagtaccaccacgaacaagcacttctgtttccccggtgcggtggtatagactgtacccacggttaaaaaccaccaatccgttatccgctctggtacttcgagaagcctagtaccaccttggaatctttgacgcgttgcgctcaacactcaaccccagagtgtagcttaggctgatgagtctgggcagtccccaccggtgacggtggcccaggctgcgttggcggcctacccatggctaatgccatgggacgctagaagtgaacaaggtgtgaagagcctattgagctactagagagtcctccggcccctgaatgcggctaatcccaaccacggatcaagtgcgcgcaacccagtgcgtagcttgtcgtaatgcgcaagtctgtggcggaaccgactactttgggtgtccgtgtttccttttattcttattatggctgcttatggtgacaatcttagattgttatcatatagcaattggattggccatccagtgagagtgagagatatcatatacctatttgtagcttttactccacttagcacgaacacagttactttgattagaattgtgctattgatcagattgacacatcact

SEQ ID NO: 1099 - DNA, 745 bp, Human enterovirus sp.
  99, complete genome.1
ttaaaacagctctggggttgttcccaccccagaggcccacgtggcggctagtactctggtatcacggtacctttgtacgcctgttttatatcccttcccccgtaacttagaagctttgtaccaacaagttcaatagaaggggtacaaaccagtaccaccacgaacaagcacttctgtttccccggtgcgatgacatagactgtacccacggtcaaaagtcaccaatccgttacccgctttggtacttcgagacgcctagtattgccttggaattctcgatgcgttgcgctcaacactcgaccctggagtgtagcttaggctgatgagtctgggcattccccaccggtgacggtggcccaggctgcgttggcggcctacccatagctattgctatgggatgctagagttgaacaaggtgtgaagagccaattgagctactaaagagtcctccggcccctgaatgcggctaatcccaaccacggatcaagtgcgtgcaacccagcacgtagcttgtcgtaatgcgcaagtctgtggcggaaccgactactttgggtgtccgtgtttccttttatttttatcatggctgcttatggtgacaatcttggattgttatcatatagcgattggattggccatccggtgagaataaaagatattgtttatctgtttgtggcttttactccattaaacaaaaacacactttccttaattaaagtggtactattgatcagatcagcataccaca

SEQ ID NO: 1100 - DNA, 745 bp, Human poliovirus 1
  isolate PV1-RC2010-45, complete genome.1
ttaaaacagctctggggttgttcccaccccagaggcccacgtggcggctagcactctggtattgcggtacctttgtgcgcctgttttatatccccgcccctacgtaactttagaagcaatacacagtgttcattaggaggggcacaaaccagtgtccttaagaacaagcacttctgtttccccggtgacctcgtataggctgtacccacggctaaaaacgagcgattcgttacccgcttaggtacttcgagaagcctagtaccgccttggaatcttcgacgcgttgcgctcagcactctaccccgagtgtagcttaggctgatgagtctgggcattccccaccggtgacggtggcccaggctgcgttggcggcctacccatggcctgcgccatgggacgctagttgtgaacaaggtgtgaagagcctattgagctacctaagaatcctccggcccctgaatgcggctaatcctaaccacggagcaagcaccctcaatccagggggtggcttgtcgtaacgcgcaagtctgtggcggaaccgactactttgggtgtccgtgtttccctttatttttattgtggctgcttatggtgacaatctttgattgccatcataaagcgaattggattggccatccggtgaaagttgaacacaccattcatctatttgttggattcacctcgttgactcagtttacacccaatttggtacatatagtgatagtgattagagaaaaataccaca

SEQ ID NO: 1101 - DNA, 745 bp, Coxsackievirus
  A20 genomic RNA, complete genome,strain: CAM1976.1
ttaaaacagctctggggttgttcccaccccagaggcccacgtggcggctagtactctggtattacggtacctttgtacgcctgttttatatcccctccccccagtaacttagaaacaaaaaacccaagttcaataggagggggtacaaaccagtaccaccacgaacaagcacttctgttttccccggtgaggttgtatagactgtccccacggtcgaaaatgactgatccgttacccgctcctgtacttcgagaagcccagtaacatcttggaatcttcgatgcgttgcgctcagcactcaaccccagagtgtagcttaggtcgatgagtctggacgctccccaccggcgacggtggtccaggctgcgttggcggcctacctgtggtccaaagccacaggacgttagttgtgaacaaggtgtgaagagcctattgagctacaagagagtcctccggcccctgaatgcggctaatcccaaccatggagcagatgattgcaaaccagcaattggtctgtcgtaatgcgtaagtctgtggcggaaccgactactttgggtgtccgtgtttcctttttactctttaatggctgcttatggtgacaatcacggattgttatcataaagcgaattggattggccatccggtgagaatcagaacgattatttcttcctcgtggatttgtaccaataacaccttacacaccgcacttaatcagagttatattgtgtgagatttcattaccata

SEQ ID NO: 1102 - DNA, 745 bp, Human poliovirus 1
  isolate RUS39223, complete genome.1
ttaaaacagctctggggttgttcccaccccagaggcccacgtggcggctagcactctggtatcacggtacctttgtgcgcctgttttatgtccccgcccccatgtaactttagaagcaatacacggtgttcattaggaggggcacaagccagtgttcctatgaacaagcacttctgtttccccggtgacctcgtataggctgtgcccacggctaaaaacgtgcgatccgttacccgcttgggtacttcgagaagcccagtaccaccttggaatcttcgacgcgttgcgctcagcactctaccccgagtgtagcttaggctgatgagtctgggcattccccactggtgacagtggcccaggctgcgttggcggcctacccattgctcgcgcaatgggacgctagatgtgaacaaggtgtgaagagcctattgagctgcctaagagtcctccggcccctgaatgcggctaatcctaaccacggagcaagcgccttcaacccagggggtggcttgtcgtaacgcgcaagtctgtggcggaaccgactactttgggtgtccgtgtttccctttgtttttattatggctgcttatggtgacaatcattgattgccatcataaagcgaattggattggccatccggtggaagttacatacatcatccatctatttgttggatttgcttcactaacacagttcacaatcaacttggtatatataataatagtgattagagaaaaataccata

SEQ ID NO: 1103 - DNA, 745 bp, Unknown
  Description of Unknown: Human coxsackievirus A20, strain BAN00-10462 polyprotein gene,1 sequence
ttaaaacagctctggggttgttcccaccccagaggcccacgtggcggctagtactctggtatctcggtacctttgtacgcctgttttatacccccttccccatgtaactttagaagcaattcaacaagttcaatagagggggtacaaaccagtaccaccacgaacaagcacttctgtttccccggtgattttacataagctgtgcccacggctgaaagtgaatgatccgttacccgcttgagtacttcgagaagcctagtatcgccttggaatcttcgatgcgttgcgctcagcactctaccccgagtgtagcttaggctgatgagtctgggcattccccaccggtgacggtggcccaggctgcgttggcggcctacccatggctaacgccatgggacgctagttgtgaacaaggtgtgaagagcctattgagctacttaagagtcctccggcccctgaatgcggctaatcccaaccacggagcaggcgccaccaatccaggaggtagcctgtcgtaacgcgtaagtctgtggcggaaccgactactttgggtgtccgtgtttccttttatctctttaatggctgcttatggtgacaatcatagattgttatcataaagcgaattggattggccatccggtgaagtgtaaacacattatttatttgttcattggatttactccattcacccgatttactccaaatataatacatattgtattgttgataagacgttgctactaca

SEQ ID NO: 1104 - DNA, 745 bp, Human poliovirus
  2, isolate Env2008_E3218 polyprotein gene, complete1
ttaaaacagctctggggttgttcccaccccagaggcccacgtggcggctagcactccggtattacggtacccttgtgcgcctgttttatactcccttcccccgcaatttagaagcatgaaacccggttcaatagtaaggggtacaaaccagtaccactatgaacaagcacttctgtctccccggtgatattgtatagactgctcacgcggttgaaagcgattgatccgttatccgcttgtgtacttcgagaagcctagtaccaccttcggaacttcgacgcgttgcgctcagcacccgaccccggggtgtagcttgggctgatgagtctggacgatcctcaccggcgacggtggtccaggctgcgttggcggcctacccgtggttcacaccacgggacgctacaagtgaacaaggtgtgaagagcctattgagctacacaagagtcctccggcccctgaatgcggctaatcccaaccacggagcaggcggtcacgaaccagtggctagcttgtcgtaacgcgcaagtctgtggcggaaccgactactttgggtgtccgtgtttcctgttatttttatcatggctgcttatggtgacaatcattgattgttatcataaagcgaattggattggccgtccggaaagtgttttatcacatatactgtttggtgaagctactacattaattctgcctctcactcggttagtcaaacagaactcagacagagtaaaacatcaccaacgca

SEQ ID NO: 1105 - DNA, 745 bp, Unknown
  Description of Unknown: Human coxsackievirus A21, strain GUT88-10619 polyprotein gene,1 sequence
ttaaaacagcctgtgggttgttcccaccccagaggcccacgcggcggctagtactctggtgctgcggtacctttgtacgcctgttttatacccccgtccccgcaatttagaagcaagaaaacaaagttcaatagtaggtggtgcaatccagcatcgctatgaacaagcacttttgttgccccggtgaggttgcatagactgttcccacggtcaaaagtgaccaatccgttacccgcttttgtacttcgagaagcctagtatcaccttggaatcttcgacgcgttgcgttccgcactcaaccccagggtgtagcttaggtcgatgagtctgggcggaccccaccggcgacggtggcccaggctgcgttggcggcctacctgtggtccaaagccacaggacgctagttgtgaacaaggtgtgaagagcctattgagctacaaaagagtcctccggcccctgaatgcggctaatcctaaccacggagcaggtggtcgcaaaccagtgattaacctgtcgtaatgcgcaagtctgtggcggaaccgactactttgggtgtccgtgtttctctttattttactatggctgcttatggtgacaatcgaggattgttatcataaagcgaattggattggccatccggtgaaagtgaaatacattatctattcaattgttgaattcatccagaacacacccgcaacactacatctgattaaactcgttttgataaccagagaacattaccaca

SEQ ID NO: 1106 - DNA, 745 bp, Unknown
  Description of Unknown: Human coxsackievirus A20, strain CVA20a-Tulane polyprotein gene,1 sequence
ttaaaacagcctgtgggttgttcccaccccagaggcccacgtggcggctagcactccggtattacggtacccttgtgcgcctgtttttatactcccttccccgtaacttagaagcacaaaaccaagttcaatagaagggggtacaaaccagtaccaccacgaacaagcacttctgtttccccggtgacgttgtatagactgctcacgcggttgaaagcgacgaatccgttatccgcttgtgtacttcgagaagcctagtaccaccttggaatcttcgacgcgttgcgctcggcactctaccccagagtgtagcttaggctgatgagtctgggcattcctcatcggcgacgatggcccaggctgcgttggcggcctacctatggctaacgccataggacgctagttgtgaacaaggtgtgaagagcctattgagctacacaagagtcctccggcccctgaatgcggctaatcctaaccatggagcaggagatcacaaaccagtggtattcctgtcgtaatgcgcaagtccgtggcggaaccgactactttgggtgtccgtgtttccttttatttttatcatggctgcttatggtgacaatcattgattgttatcataaagcgaattggattggccatccggtgaaaataagatttattatttacttgtttgttggattcactccgctaaacacattcactccaggtatcatctctatagtgattgaaattaggcaattacatcaca

SEQ ID NO: 1107 - DNA, 745 bp, Human enterovirus sp.
  102, complete genome.1
ttaaaacagctctggggttgttcccaccccagaggcccacgtggcggctagtactctggtatcacggtacctttgtacgcctgttttacatcccctcccccacgtaactttagaagcaattcaacaagttcaatagagggggtacaaaccagtatcaccacgaacaagcacttctgtttccccggtgattttacataagctgtgcccacggctgaaagtgaatgatccgttacccgctcgagtacttcgaaaagcctagtatcgctttgggatcttcgacgcgttgcgctcagcactctaccccgagtgtagcttaggctgatgagtctgggcattccccatcggcgacgatggcccaggctgcgttggcggcctacccatggctaacgccatgggacgctagttgtgaacaaggtgtgaagagcctattgagctactcgagagtcctccggcccctgaatgcggctaatcccaaccacggatcaggtgcctccaacccaggaggtggcctgtcgtaacgcgcaagtctgtggcggaaccgactactttgggtgtccgtgtttccttttatcttttaaatggctgcttatggtgacaatcatagattgttatcataaagcgaattggattggccatccggtgaaatacaaacacattatttacttgtttgttggatttactccgctcacacagcttactcctaagataatatttattgtattgctggtaaggagacactattata

SEQ ID NO: 1108 - DNA, 745 bp, Human echovirus
  11,strain D207, complete genome.1
tttaaaacagcctgtgggttgttcccacccacagggcccactgggcgccagcactctggtattgcggtaccttagtgcgcctgttttatatacccatcccccaaacgtgatttagatgcatgttaacgaagaccaatagtaagcgcagcacaccagctgtgttccggtcaagcacttctgttaccccggactgagtatcaataagctactcacgtggctgaaggagaaaacgttcgttacccggccaattacttcgagaaacccagtaacaccatgaaggttgcgcagtgtttcgctccgcacaaccccagtgtagatcaggtcgatgagtcaccgcattccccacgggtgaccgtggcggtggctgcactggcggcctgcccatggggtaacccatgggacgcttcaatactgacatggtgcgaagagtctattgagctaattggtagtcctccggcccctgaatgcggctaatcctaactgcggagcagatacccacacgccagtgggcagtctgtcgtaacgggcaactctgcagcggaaccgactactttgggtgtccgtgtttctctttatccttatactggctgcttatggtgacaattgggagattgttaccatatagctattggattggccatccagtgacaaatagagcaatcgtgtatttgtttgttggtttcgtaccattaaattacaaggtcataaacaccctcaatcttattatagcattcaatacaacaaa

SEQ ID NO: 1109 - DNA, 745 bp, Human enterovirus sp.
  79,strain USA/CA79-10384, complete genome.1
ttaaaacagcctgtgggttgtacccacccacagggcccactgggcgctagcacactggtatcccggtacctttgtgcgcctgttttataccccctcccccatatcgtaacatagaagcaatgcactcccggtcaatagctgacgtgacaaaccagttgcgttttgaccaagcacttctgtaaccccggaccgagtatcaataagctgcttgcgcggctaaaggagaaaccgtccgttacccggctaactacttcgagaaacctagtaccaccatgaacgttgcggagtgtttcgctcagcacttcccccgtgtagatcaggtcgatgagccaccgcattccccacgggcgaccgtggcggtggctgcgttggcggcctgcctgtggggcaacccacaggacgctctaatatagacatggtgtgaagagtctattgagctagttagtagtcctccggcccctgaatgcggctaatcctaactgcggagcacatacccctaatccaaggggcagtgtgtcgtaacgggcgactctgcagcggaaccgactactttgggtgtccgtgtttccttttatcttttatattggctgcttatggtgacaattgcagagttgttaccatatagcttttggattggccatccggtgagcaatagagctgttatttatcaatttgttggattcgtcgcactcaaccacacagtctttagaacactcggatttatcttgacccttaatacgagaaa

SEQ ID NO: 1110 - DNA, 745 bp, Echovirus
  E30,strain 13-311, complete genome.1
ttaaaacaagcctgtgggttgaacccactcacagggcccaatgggcgctagcacactggtatcacggtacctttgtgcgcctgttttatccaccctttccccgaacgaaacttagaagtttgaattaaacggtcaataggaaacccagtacaccaactgggctgtgaccaagcacttctgtgaccccggaccgagtatcaataagctactcacgtggctgaaggagaaaacgttcgttacccggccaattacttcgagaaacttagtaccaccatgaaagttgcgcagcgtttcgctccgcacgaccccagtgtagatcaggctgatgagtcaccgcgtaccccacgggtgaccgtggcggtggctgcgttggcggcctgcccttggggcaacccaagggacgcttcaatactgacatggtgcgaagagtctattgagctaattggtagtcctccggcccctgaatgcggctaatcccaactgcggagcagatacccacataccagtgggcagtctgtcgtaatgggcaactctgcagcggaaccgactactttgggtgtccgtgtttcctttatttcttacactggctgcttatggtgacaattgagagattgttgccatatagctattggattggccatccggtgtctaatagagcaattatctacctttttgttggatttattccacttaactataaagcactcaaaacacttatatacattgtagatctcaacacagcaaa

SEQ ID NO: 1111 - DNA, 745 bp, Enterovirus sp.
  B73,isolate 088/SD/CHN/04, complete genome.1
tttaaaacagcctgtgggttgttcccacccacagggcccactgggcgctagcacactggtatcacggtacctttgtgcgcctgttttatacacccccccctacatcgtaatttagaagtccaagccaaacggtcaatagacaacccagtatgccaactgggtcccgaccaagcacttctgttgccccggaccgagtatcaataagctgcttgcgcggctgaaggagaaagcgttcgttacccggccaattacttcgagaaacccagtaacaccatggaagttgcgtggcgtttcgctccgcacaaccccagtgtagatcaggtcgatgagtcaccgcaaccctcacgggcgaccgtggcggtggctgcgttggcggcctgcccatgggacaacccatgggacgcttcaataccgacatggtgcgaagagtctattgagctaattggtattcctccggcccctgaatgcggctaatcctaactgcggagcagacacccacatgccagtgggcagtctgtcgtaacgggaaactctgcagcggaaccgactactttgggtgaccgtgtttcctattatccttattctggctgcttatggtgacaattgaaagattgttaccatatagctattggattggccatccggtgtctaatagagctattatatacctctttgttggatttataccacttaacaaagtaaactaccagactctgtgctatatcattggattgaacacggtgaa

SEQ ID NO: 1112 - DNA, 745 bp, Unknown
  Description of Unknown: Human coxsackievirus B5, isolate 20CSF, complete genome.1 sequence
ttttaaaacaggctgtgggttgttcccacccacagggcccattgggcgccagcacactggtattacggtacctttgtgcgcctgttttatccaccccctccccaatgtaacgtagaagcacaaaccaagtggtcaatagatggctcagtacaccaactgggcttagaccaagcacttctgttaccccggactgagtatcaataggctgctcacgcggctgaaggagaaaacgttcgttacccgaccaactacttcgagaagcctagtaccatcatgaaggatgcgcagtgtttcgttcagcacaaccccagtgtagatcaggccgatgagtcaccgcaatccccacgggtgaccgtggcggtggctgcgctggcggcctgcccatggggcaacctatgggacgcttcaatttcgacatggtgcgaagagcctattgagctagttggtagtcctccggcccctgaatgcggctaatcccaactgcggagcagacacccacaaaccagtgggcagtttgtcgtaacgggcaactctgcagcggaaccgactactttgggtgtccgtgtttccttttatctatatattggctgcttatggtgacaattgagggattgttgccatatagctattggattggccatccggtaacaaacagagctattatttacctttttgttggcttcgtgccgttgaactttaaagttattaaaaccatatacttcatcttgacactcaacacagcaaa

SEQ ID NO: 1113 - DNA, 745 bp, Unknown
  Description of Unknown: Human coxsackievirus B3, strain A103/KM/09, complete genome.1 sequence
aaaacaagcctgtgggttgctcccggccccacaggggcccactgggcgctagcacactggtattgcggtacccttgtgcgcctgttttatccaccctccccaaccgtaatttagaagcacgaacaacgtggtcaacaggcaacccagtataccaactgggtctcgaccaagcacttctgtcaccccggactgagtatcaataagctgctcgcgtggctgaaggagaaaacgttcgttacccggccaattacttcgagaaacctagtatcaccatggaagttgcgcagtgtttcgctccgcacaaccccagtgtagatcaggtcgatgagtcaccgcaaccctcacgggtgaccgtggcggtggctgcgctggcggcctgcccatggggcaacccatgggacgcttcaatactgacatggtgcgaagagtctattgagctaattggtaatcctccggcccctgaatgcggctaatcctaactgcggagcagatatccacacaccagtggacagtctgtcgtaatgggcaactctgcagcggaaccgactactttgggtgtccgtgtttccttttattctttttattggctgcttatggtgacaattgagagattgttaccatatagctattggattggccatccggtgagcaacaggtcaattgtattcctctttgttggatttgtgccattaaactataataactacaacaccctgctttacattatccatttaaacacacagaa

SEQ ID NO: 1114 - DNA, 745 bp, Coxsackievirus
  A24 clone V19C polyprotein gene, partial cds.1
gctctggggttgttcccaccccagaggcccacgtggcggctagtactcccggtatcacggtacccttgtacgcctgttttatactccctttcccccgcaacttagaagattatgagaatccacgttcaacaggaagggggtacaaaccagtaccaccacgaacaagcacttctgtttccccggtgaggttgtatagactgtacccacggttgaagacgactgatccgttacccgctctagtacttcgagaagcttagtaacaccttggaatcatcgatgcgttgcgttcaacactcaaccccagagtgtagcttaggctgatgagtctggacaatcctcaccggtgacggtggtccaggctgcgctggcggcctacctgtggtccaaaaccacaggacgctagatgtgaacaaggtgcgaagagcctattgagctactagagagtcctccggcccctgaatgcggctaatcccaaccacgaagcaagtgctcacgatccagtgagtggcttgtcgtaacgcgtaagttcgtggcggaaccgactactttgggtgtccgtgtttcctttttaactttatatggctgcttatggtgacaatcattgattgttatcataaagcgatttggattggccatccagtgagagcgagaacaactacttatttgctcgttggatttgctccttcgacaagctacattttagatatcattctcattgtattcttgatcagaaagcaatatcata

SEQ ID NO: 1115 - DNA, 745 bp, Human enterovirus sp.
  B, isolate LR11F7 polyprotein gene, partial cds.1
ttaaaacagcttgggggtgtttcccacccacagggcccactgggcggtagcactctggtattacggtacctttgtgcgccttttttatatccccacccccgattgtaacttagaagaaataattcacgaccaatagtaggcgtggcgcgccagccatgttttggtcaagtacttctgtttccccggatcgagtatcaataggctgtccacacggctgaaggagaaagcgtccgttatccggccaattacttcgagaaacctagtaccaccatgaaagttgcgcagtgtttcgctccgcacaaccccagtgtagatcaggtcgatgagtcaccgcttccctcacgggcgaccgtggcggtggctgcgctggcggcctgcccatggggaaacctatgggacgctccaatactgacatggtgcgaagagtctattgagctaattggtagtcctccggcccctgaatgcggctaatcccaactgcggagcagatacccacatgccagtgggcagtctgtcgtaacgggcaactctgcagcggaaccgactactttgggtgaccgtgtttccttttattcctatactggctgctaatggtgacaattgaaagattgttaccatatagctattggattggccatccggtaactaacagagcgattgtttaccaatttgttggttttgtaccactagactacaaggtcttaaacaccttaaactatatcttgacactcaacacattgaaaag

SEQ ID NO: 1116 - DNA, 746 bp, Coxsackievirus
  A10, strain 09-1996-1, complete genome.1
gtgctcttccgatctgtgggttgcacccacccacagggcccactgggcgttagcactctggtaccatggtacccttgtgcgcctgttttatcaccctaacccaacttgaaacttagaagcaatacacaatcgaccaatagtaggtgtggcgcaccagccgcatcttggtcaagcacttctgtttccccgggttgagtatcaataagctgtccacacggctgaaggagaaaacgcccgttatccggccaactacttcgagaaacctagtaccactatgaacgttgcaaggcgtttcgctcagcacttcccccgtgtagatcaggtcgatgagtcaccgcattccccacgggcgaccgtggcggtggctgcgttggcggcctgcctatgggttaacccataggacgccttaatactgacatggtgcgaagagtctattgagctagttggtagtcctccggcccctgaatgcggctaatcctaactgcggagcacatactcacaacccagtgagcggtgtgtcgtaatgggtaaccctgcagcggaaccgactactttgggtgtccgtgtttccttttattcttacattggctgcttatggtgacaatcatagaattgttaccatatagctattggattggccatccgatttctaacagagctattatttacctgtttgttggatttactccgttgacatacaaatccctaaacactttgtgctttatcttgaacttgaacgcacgaaa

SEQ ID NO: 1117 - DNA, 746 bp, Coxsackievirus
  A10, strain 16-2871-1, complete genome.1
tgctcttccgatctgtgggttgtacccacccacagggcccattgggcgctagcactctggtaccatggtacccttgtgcgcctgttttatcaccccgcccctacctgaaacgtagaagctataatcaatcggccaatagtgggtgtggcataccagccacatcttggtcaagcacttctgtttccccgggttgagtatcaatatgctgttcacacggctgaaggagaaaacacccgttacccggccaactacttcgagaagcttagtaccgccatgaacattgcaaggcgtttcgctcagcactttccccgtgtagatcaggccgatgagtcaccgcattccccacgggcgaccgtggcggtggctgcgttggcggcctgcctgtgggttaacccacaggacgccttaatatagacatggtgcgaagagcctattgagctagttggtattcctccggcccctgaatgcggctaatcctaactgtggagcacatactcacaagccagtgggtggtgtgtcgtaacgggcaactctgcagcggaaccgactactttgggtgtccgtgtttcctttttatccttatattggctgcttatggtgacaatcagagaattgttaccatatagctattggattggccatccggtgtgcaacagagctattgtgtatttgtttgttggatttgtcccactatcgtatacacccctcaacaccttgtattttattttgagattgaacgcaagaaa

SEQ ID NO: 1118 - DNA, 746 bp, Coxsackievirus
  A4, isolate CV-A4/P1033/2013/China, complete genome.1
tttaaaacagcctgtgggttgtacccacttgcagggcccactgggcgctagcactctgattctgcgggatctttgtgcgcctgttttataaccccacccctactcgtaacttagaagtaacacacaccattgatcaacagcaagcgtggcgcaccagccacgtttagatcaagcacttctgtttccccggactgagtatcaatagactgctcacgcggttgaaggagaaatcgttcgttacccggctaactacttcgagaaacctagtagcaccattgaaactgcagagtgtttcgttcagcactttccccgtgtagatcaggccgatgagtcactgcaatccccacgggcgaccgtggcagtggctgcgttggcggcctgcctatgggctttcccataggacgctctaatgtggacatggtgtgaagagtctattgagctagttagtagtcctccggcccctgaatgcggctaatcctaactgcggagcgcataccctcaatccagggggtggtgcgtcgtaacgggcaactttgcagcggaaccgactactttgggtgtccgtgtttccttttattcttatattggctgcttatggtgacaattgagaaattgttaccatatagctattggattggccatccagtgtctaacagagcagttgtatacttatttgctggattcgttccactatcatacacatctattaataccttatattatattataagattgaacgcaaggaa

SEQ ID NO: 1119 - DNA, 746 bp, Coxsackievirus
  A4, isolate CV-A4/2016/HFMD/305, complete genome.1
tttaaaacagcctgtgggttgtacccacctacagggcccactgggcgctagcactctgattccacggaatccttgtgcgcctgttttatatcccctccccaagttgcaacttagaagcattgcactacaatgatcagtagcaggcgtggcgctccagccatgtctcgatcaagcacttctgtttccccggaccgagtatcaatagactgctaacgcggttgaaggagaaaacgttcgttatccggctaactacttcgagaaacctagtagcaccatcgaagctgcggggcgtttcgctcagcacttcccccgtgtagatcaggtcgatgagtcactgcaatcctcacgggcgaccgtggcagtggctgcgttggcggcctgcctatggggcaacccataggacgcttcaaagtggacatggtgtgaagagtctattgagctagttagtagtcctccggcccctgaatgcggctaatcctaactgcggagcacataccttcaatccaggaggtagtgtgtcgtaacgggcaactctgcagcggaaccgactactttgggtgtccgtgtttccttttattctcttattggctgcttatggtgacaattgaagaattgttaccatatagctattggattggccatccagtgtctaacagagcaattgtgtacttatttgttggttttgttcctttgtctcacacgtcccttagtactttgtattacattataaaactgaattcggagag

SEQ ID NO: 1120 - DNA, 746 bp, Enterovirus 7sp.
  1 polyprotein gene, complete cds.1
tttaaaacagcctgtgggttgcacccacccacagggcccactgggcgctagcactctggtactgaggtacctttgtgcgcctgtttttactccccttcccccgaagtaacttagaagctgtaaatcaacgatcaatagcaggtgtggcacaccagtcataccttgatcaagcacttctgtttccccggactgagtatcaataggctgctcgcgcggctgaaggagaaaacgttcgttacccgaccaactacttcgagaagcttagtaccaccatgaacgaggcagggtgtttcgctcagcacaaccccagtgtagatcaggctgatgagtcactgcaacccccatgggcgaccatggcagtggctgcgttggcggcctgcccatggagaaatccatgggacgctctaattctgacatggtgtgaagagcctattgagctagctggtagtcctccggcccctgaatgcggctaatcctaactgcggagcacatgctcacaaaccagtgggtggtgtgtcgtaacgggcaactctgcagcggaaccgactactttgggtgtccgtgtttccttttattcctatattggctgcttatggtgacaatcaaagagttgttaccatatagctattggattggccatccggtgtgcaacagggcaattgtttacctatttattggttttgtaccattatcactgaagtctgtgatcactctcaaattcattttgaccctcaacgcaatcaaac

SEQ ID NO: 1121 - DNA, 746 bp, Human enterovirus sp.
  71, isolate HN1360/HN/CHN/2011, complete genome.1
ttttaaaaaccagcctgtgggttgcacccactcacagggcctactgggcgcaagcactctggtacctcggtacctttgtgcgcctgttttacaccccccccctagtgaaacttagaagcagcaaaccacgatcaatagcaggcataacgctccagttatgtcttgatcaagcacttctgtttccccggactgagtatcaatagactgctcgcgcggttgaaggagaaaacgttcgttatccggctaactacttcggaaaacctagtaacaccatgaaagttgcggagagcttcgttcagcactcccccagtgtagatcaggtcgatgagtcaccgcattccccacgggcgaccgtggcggtggctgcgttggcggcctgcccatggggtaacccatggggcgctctaatacggacatggtgtgaagagtctactgagctagttagtagtcctccggcccctgaatgcggctaatcccaactgcggagcacacgcccacaagccagcgggtagtgtgtcgtaacgggtaactctgcagcggaaccgactactttgggtgtccgtgtttccttttatctttatattggctgcttatggtgacaattaaagaattgttaccatatagctattggattggccatccggtgtgtaatagagcaattatttacctatttattggttttgtaccattaaccttgaattctgtgaccacccttaattatattttgacccttaacacagctaaac

SEQ ID NO: 1122 - DNA, 746 bp, Human enterovirus sp.
  71, strain 3149 polyprotein gene, complete cds.1
ttaaaacagcctgtgggttgttcccacccacagggcccactgggcgctagcacactgattctacggaaactttgtgcgcctgttttatgtccctccccctaatatgtaacttagaaatttagtacacccatgaccaatagtaggcgtgacgcaccagtcacgtcttggtcaagcacttttgtttccccgggctgagtatcaatagactgcttacgcggttgaaggagaaaacgttcgttacccggctaactacttcgagaaacctagtaacaccatgaaagttgcagggtgtttcgctcagcacttcccccgtgtagatcaggtcgatgagtcactgcaaaccccacgggcgaccgtggcagtggctgcgttggcggcctgcccatggggtaacccatgggacgctctgatactgacatggtgcgaagagtctattgagctagttagtagtcctccggcccctgaatgcggctaatcctaactgcggagcacacaccctcaacccagggggcggtgtgtcgtaacgggcaactctgcagcggaaccgactactttgggtgtccgtgtttccttttatctctattatggctgcttatggtgacaattgaagaattgttaccatatagctattggattggccatccggtgtttaacagagcaattgtatacctatttgttggatttgtccctttgtcacacacatctctcaataccttatactacattataaagttgaatacaggaac

SEQ ID NO: 1123 - DNA, 746 bp, Enterovirus sp.
  A71, isolate NER-13-194, complete genome.1
ttaaaacagcccgtgggttgtacccactcacggggtccactggacgctagcactctggttccacggaacctttgtgcgcctgttttatacccctccccaacttgtaacgtagaagcagtacctaatatcgatcaatagtaggtgtggcgcaccagccatatcttgatcaagcacttctgtctccccggaccgagtatcaatagactgctcacgcggttgaaggagaaagcgttcgttacccggctaactacttcgagaaacctagtagcaccatggaagctgcggagtgtttcgctcagcacttcccccgtgtagatcaggtcgatgagtcactgcaatcctcacgggtgaccgtggcagtggctgcgttggcggcctgcctgtggggcaacccacaggacgctctaatgtggacatggtgcgaagagtctattgagctagttagtagtcctccggcccctgaatgcggctaatcctaactgcggagcgcatgccctcaatccagagggtagtgcgtcgtaacgggcaactctgcagcggaaccgactactttgggtgtccgtgtttccttttactcttatattggctgcttatggtgacaattacggaattgttaccatatagctattggattggccatccggtgtgcaatagagctatcatttacctatttgttggatttgtaccactgtcattaaagtccataaccacactcaattatatactcactctcaatataactaaac

SEQ ID NO: 1124 - DNA, 746 bp, Human enterovirus sp.
  71 polyprotein gene, complete cds.1
ttaaaacagctgtgggttgttcccactcacagggcccactgggcgctagcactctgattttacgaaatccttgtgcgcctgttttatatcccttccctaattcgaaacgtagaagcaatgcgcaccactgatcaatagtaggcgtaacgcgccagttacgtcatgatcaagcatatctgttcccccggactgagtatcaatagactgcttacgcggttgaaggagaaaacgttcgttatccggctaactacttcgagaagcccagtaacaccatggaagctgcagggtgtttcgctcagcacttcccccgtgtagatcaggtcgatgagccactgcaatccccacaggtgattgtggcagtggctgcgttggcggcctgcctatggggagacccataggacgctctaatgtggacatggtgcgaagagcctattgagctagttagtagtcctccggcccctgaatgcggctaatcctaactgcggagcacatgccttcaacccagagggtagtgtgtcgtaatgggcaactctgcagcggaaccgactactttgggtgtccgtgtttctttttattcttatattggctgcttatggtgacaattacagaattgttaccatatagctattggattggccatccggtgtgtaatagagctgttatatacctatttgttggctttgtaccactaactttaaaatctataactaccctcaactttatattaaccctcaatacagttgaac

SEQ ID NO: 1125 - DNA, 746 bp, Coxsackievirus
  A16 gene for polyprotein,isolate1
ttaaaacagcctgtgggttgttcccacccacagggcccattgggcgctagcacactgactttgcggagtctttgtgcgcctgttttataacccttcccccaagtagcaacttagaagtattgcacaaccgcggccagtagtgggcgtgacgcgccagtcacgtcttggtcaagcacttctgtatccccggactgagtatcaatagactgctcgcgcggttgaaggagaaaacgttcgttatccggctaactacttcgggaaacctagtagcaccttggaagttgcagagtgtttcgctcagcactttccccgtgtagatcaggtcgatgagccactgtaaaccccacgggcgaccgtgacagtggctgcgttggcggcctgcccatggggtaacccatgggacgctctaatacagacatggtgtgaagagtctactgagctagttagtagtcctccggcccctgaatgcggctaatcctaactgcggagcacacaccctcaatccagggggcggtgtgtcgtaatgggtaactctgcagcggaaccgactactttgggtgtccgtgtttccttttattcctttactggctgcttatggtgacaattgaaaagttgttaccatatagctattggattggccatccggtgtctaacagagctattgtctacttgtttattggatacgtccctcttaatctcaaggtcattcgaactcttgattatatattgctccttaattataggaa

SEQ ID NO: 1126 - DNA, 746 bp, Coxsackievirus
  A7 gene for polyprotein, polyprotein region,strain1
tttaaaacagcctgtgggttgcacccacccacagggcccactgggcgccagcactctgattccgcggaatctttgtgtgcctgttttatcacccttcccccaaacttgcaacttagaagcagcacttcactgaccaatagcaggcgtggcgcaccagccatgtctaggtcaagcacttctgtttccccggactgagtatcaataggctgctcacgcggctgaaggagaaaacgttcgtcatccggctaactacttcgagaaacctagtagcaccggtgaagctgcagagtgtttcgctcagcacttcccccgtgtagatcaggtcgatgagtcactgcactccccacgggcgaccgtggcagtggctgcgctggcggcctgcctatgggtcaacccataggacgctctaatgtggacacggtgcgaagagtctattgagctagttagtagtcctccggcccctgaatgcggctaatcctaactgcggagcacatgcccccgaaccagggggtggtgtgtcgtaacgggcaactctgcagcggaaccgactactttgggtgaccgtgtttccttttgttcttattatggctgcttatggtgacaattgaagaattgttaccatatagctattggattggccatccagtgtctaacagagctatcatatacctatttgttggattcgttctattgtcatacacatcactcaatacattacattttattgtgagattaaatacaagaaa

SEQ ID NO: 1127 - DNA, 746 bp, Coxsackievirus
  A7 gene for polyprotein, polyprotein region,strain1
tttaaaacagcctgtgggttgtacccacccatagggcccactgggcgccagcactctgattctgcggaatctttgtgcgcctgttttatcaccctctccctaaattcgtaacttagaagcaacactctactgaccaatagcgggcgtggcgcaccagccatgtctaggtcaagcacttctgtctccccggactgagtatcaataggctgctcacgcggctgaaggagaaaacgttcgtcatccggctaactacttcgagaagcctagtagcaccgttgaaactgcagagtgtttcgctcagcactttccccgtgtagatcaggtcgatgagtcactgcactccccacgggcgaccgtggcagtggctgcgttggcggcctgcctatgggtcaacccataggacgctctaatgtagacacggtgcgaagagtctatcgagctagttagtagtcctccggcccctgaatgcggctaatcctaactgcggagcacatgcccccgagccagagggtggtgtgtcgtaacgggtaactctgcagcggaaccgactactttgggtgtccgtgtttccttttattcttgatatggctgcttatggtgacaattgaagaattgttaccatatagctattggattggccatccggtgtctaacagagctattgtatacctgtttgttggatttgttccattatcacaaacatcactcaacacactacacttcattgtgagattgaacgcaagaaa

SEQ ID NO: 1128 - DNA, 746 bp, Coxsackievirus
  A2,isolate HeN13-6/HeN/CHN/2013, complete genome.1
ttaaaacagctctggggttgtacccacccgcagggcccactgggcgctagcacactgattctacggaacctttgtgcgcctgttttatatccctcccccgaaacagcaacttagaagttgaacatttacacgaccaatagtgggcatggcgcgccagccatgtcttggtcaagcactcctgtttccccggactgagtatcaataggctgctcacgtggctgaaggagaaagagttcgttacccggctaactacttcgagaaacttagtaacaccatgaatgttgcagagtgtttcgctcagcacttcccccgtgtagatcaggctgatgagccactgcaaaccccacgggcgaccgtggcagtggctgcgttggcggcctgcctatggggcaacccataggacgctctaatacagacatggtgcgaagagtctattgagctagttagtattcctccggcccctgaatgcggctaatcccaactgcggagcacatgccctcaatccagagggtggtgtgtcgtaacgggcaactctgcagcggaaccgactactttgggtgtccgtgtttccttttattcttatattggctgcttatggtgacaattgaaagattgttaccatatagctattggattggccacccggtgactaacagagctttaatttaccaattcactgggtttgtacctttatcacctacagtttatcagactttggtgtatctgttatatctcaacagtaagaa

SEQ ID NO: 1129 - DNA, 746 bp, Enterovirus C
  isolate Brunenders, complete genome.1
ttaaaacagctctggggttgttcccaccccagaggcccacgtggcggccagtacaccggtaccacggtacccttgtacgcctgttttatactcccctccccgtaaactagaagcacgaaacacaagttcaatagaagggggtacagaccagtaccaccacgaacaagcacttctgttcccccggtgaggtcacatagactgtccccacggtcaaaagtgactgatccgttatccgctcacgtacttcggaaagcctagtaccaccttggaatctacgatgcgttgcgctcagcactcgaccccggagtgtagcttaggctgatgagtctggacgttccccactggtgacagtggtccaggctgcgttggcggcctacctgtggtccaaaaccacaggacgctagtagtgaacaaggtgtgaagagcccactgagctacctgagaatcctccggcccctgaatgcggctaatcccaaccacggagcaggtaatcgcaaaccagcggtcagcctgtcgtaacgcgtaagtctgtggcggaaccgactactttgggtgtccgtgtttccttttatttttatggtggctgcttatggtgacaatcatagattgttatcataaagcaaattggattggccatccggagtgagctaaactatctatttctctgagtgttggattcgtttcacccacattctgaacaatcagcctcattagtgttaccctgttaataagacgatatcatcacg

SEQ ID NO: 1130 - DNA, 746 bp, Human enterovirus sp.
  96,strain BAN00-10488, complete genome.1
ttaaaacagctctggggttgttcccaccccagaggcccacgtggcggccagtactccggtatcacggtacccttgtacgcctgttttatacccccttccccgcaacttagaagctttaaattcaagttcaatagaaggtggtacaaaccagtatcgccacgaacaagcacttctgttgccccggtgaaattgcataagctgtccccacggctgaaggcgattgatccgttacccgctcttgtacttcgagaagcctagtaccaccttggaattttcgatgcgttgcgctcagcactcaaccccagagtgtagcttaggctgatgagtctggacataccccaccggcgacggtggtccaggctgcgttggcggcctacctgtggcccaaagccacaggacgctagttatgaacaaggtgtgaagagcctattgagctacaagagagtcctccggcccctgaatgcggctaatcctaaccacggatcaggcgattgcaacccagcaattagcctgtcgtaatgcgcaagtctgtggcggaaccgactactttgggtgtccgtgtttctttttattcttacattggctgcttatggtgacaatcttagattgttatcataaagcaagttggattggccatccggtgaaagtcaaagttactatctatttatctgttggattttaccctaagaccactcatttacctgacttaattagaataattatactacttggaaattactatcaca

SEQ ID NO: 1131 - DNA, 746 bp, Unknown
  Description of Unknown: Human coxsackievirus A11,isolate CV-A11_66990, complete genome.1 sequence
ttaaaacagctctggggttgttcccaccccagaggcccacgtggcggctagtacaccggtatcacggtacccttgtacgcctgttttatattcccttccccgtaacttagaagcaataaactcaagttcaatagaagggggtgcaaaccagcaccaccacgaacaagcacttctgtttccccggtgagattgcatagactgtccccacggttgaaagcgattgatccgttaaccgctcttgtacttcgagaagcctagtaccatcctggaatctacgatgcgttgcgctcagcactcaatcccagagtgtagcttaggtcgatgagtctggatactccccaccggcgacggtgatccaggctgcgttggcggcctacctgtggtccaaagccacaggacgctagtagtgaacagggtgtgaagagcctattgagctacatgagagtcctccggcccctgaatgcggctaatcccaaccacggagcaggtggctacaacccagtaactggcctgtcgtaacgcgcaagtctgtggcggaaccgactactttgggtgtccgtgtttccttttatttttataatggctgcttatggtgacaatcattgattgttatcataaagcgacttggattggccatccagcgagaatcagatcgattatttatttgtttgttggattcaccaccttatctacatacacaccaaacttaattagaatcactttattgattaggtatcattatcacg

SEQ ID NO: 1132 - DNA, 746 bp, Unknown
  Description of Unknown: Human coxsackievirus A11 strain Belgium-1, complete genome.1 sequence
ttaaaacagctgtggggttgttcccaccccagaggcccacgtggcggctagtactccggtatcacggtacccttgtacgcctgttttatactccctcccccgtaacttagaagcaatcaaatcaagttcaataggagggggtacaaaccagtaccaccacgaacgagcacttctgtttccccggtgaagttgcatagactgttaccacggttgaaagcgaccgatccgttatccgctcatgtacttcgagaagcctagtacctccttggaatcttcgatgcgttgcgctcagcactcaaccccggagtgtagcttaggctgatgagtctggacagccctcaccggcgacggtggtccaggctgcgttggcggcctacctgtggcccaaagccacaggacgctagttgtgaacaaggtgtgaagagcctattgagctacatgagagtcctccggcccctgaatgcggctaatcctaaccacggagcaggcgatcgcaaaccagcaattagcctgtcgtaacgcgaaagtctgtggcggaaccgactactttgggtgaccgtgtttctcttatttttattcatggctgcttatggtgacaatcatagattgttatcataaagcgagttggattggccatccggtaaaagtcaagtatatcatttacttgtttgtaggatttattcctttgaacgtccatttactcaatcttatcagagtcacattactagtaagatctcactatcaca

SEQ ID NO: 1133 - DNA, 746 bp, Human enterovirus sp.
  99,strain BAN01-10582 polyprotein gene, complete1
ttaaaacagcctgtgggttgttcccaccccagaggcccacgtggcggctagtactctggtatcacggtacctttgtacgcctgttttatatcccttcccccgtaacttagaagctttgtaccaacaagttcaatagaaggggtacaaaccagtaccaccacgaacaagcacttctgtttccccggtgcgatgacatagactgtacccacggtcaaaagtcaccaatccgttacccgctttggtacttcgagacgcctagtattgccttggaattctcgatgcgttgcgctcaacactcgaccctggagtgtagcttaggctgatgagtctgggcattccccaccggtgacggtggcccaggctgcgttggcggcctacccatagctattgctatgggatgctagagttgaacaaggtgtgaagagccaattgagctactaaagagtcctccggcccctgaatgcggctaatcccaaccacggatcaagtgcgtgcaacccagcacgtagcttgtcgtaatgcgcaagtctgtggcggaaccgactactttgggtgtccgtgtttccttttatttttatcgtggctgcttatggtgacaatcatagattgttatcataaagcgaattggattggccatccagtgagaatcaagtcgctgatatatttatttgttggatttaccaaaatcaaccacagaacaccagttttaattcgtattgtgttactaattagatttcactactaca

SEQ ID NO: 1134 - DNA, 746 bp, Human enterovirus sp.
  99,strain BAN04-10697 polyprotein gene, complete1
ttaaaacagcctgtgggttgttcccaccccagaggcccacgtggcggctagtactccggtattacggtacccttgtacgcctgttttatacccccttcccccgcaacttagattcaaacaaacacaagttcaataggagggggtacaaaccagtaccaccacgaacaagcacttctgtttccccggtgaggttgtatagactgttaccacggttgaaagcgactgatccgttatccgccttagtacttcgagaagcctagtatcaccttggaatctccgatgcgttgcgctcagcaatgtacccccattgtagcttaggccgatgagtctgggcattccccaccggcgacggtggcccaggctgcgttggcggcctacctatggtgaaaaccataggacgctagttgtgaacaaggtgcgaagagcctattgagctactaaggagtcctccggcccctgaatgcggctaatcccaaccacggagcaggtagttgcaaaccagcaaccagcctgtcgtaatgcgcaagtctgtggcggaaccgactactttgggtgtccgtgtttccttttattcttataatggctgcttatggtgacaatcatagattgttatcataaagcgaattggattggccatccggtgagaatcagatcgatcatttacctgtttgtcggatttaccccattggcatcgcacacgagtgacctaatcagaatagtgttgttgataaggtactactatcaca

SEQ ID NO: 1135 - DNA, 746 bp, Human poliovirus 1
  isolate CHN-Hebei/91-2, complete genome.1
ttaaaacagctctggggttgttcccaccccagaggcccacgtggcggccagtactctggtactacggtacctttgtacgcctgttttatactccctcccccatgcaacattagaagcaattcacaaagttcaatagagggggtacaaaccagtaccaccacgaacaagcacttctgtttccccggtgatctcgtataggccgtacccacggctgaaaacaagtgatccgttatccgcttaggtacttcgagaaacctagtatcaccttgggatcttcgacgcgttgcactcagcactctaccccgagtgtagcttaggctgatgagtctgggcattccccaccggtgacggtggcccaggctgcgttggcggcctacccatggctaacgccatgggacgctagttgtgaacaaggtgtgaagagcctattgagctacctaagagtcctccggcccctgaatgcggctaatcccaaccacggagcaagtgccttcaatccagagggtggcttgtcgtaacgcgcaagtctgtggcggaaccgactactttgggtgtccgtgtttccttttatttttattacggctgcttatggtgacaatcattgattgccatcataaagcgagttggattggccatccggtgaaagttaagtatctcgtccacttatctgttggacttactccattaactcaactcacgcctgatttgatatctatagtgttattgatttggaaaaagctatcata

SEQ ID NO: 1136 - DNA, 746 bp, Human poliovirus 3
  strain SWI10947, complete genome.1
ttaaaacagctctggggttgttcccaccccagaggcccacgtggcggctagtactccggtatcacggtacccttgtacgcctgttttatactcccttccccgtaacttagaagtatacaaaccaagttcaatagaagggggtacaaaccagtaccaccacgaacaagcacttctgtttccccggtgaagttgcatagattgtccccacggtcgaaagcgactgatccgttatccgctcttgtacttcgggaagcctagtatcaccttcggatcttcgatgcgttgcgctcagcactcaaccccagagtgtagcttaggtcgatgagtctggacgaacctcactggtgacagtggtccaggctgcgttggcggcctacctgtggcccaaagccacaggacgctagttgtgaacaaggtgtgaagagcctactgagctacatgagagtcctccggcccctgaatgcggctaatcccaaccacggagcaggtggtcacaaaccagtggtttgcctgtcgtaacgcgaaagtctgtggcggaaccgactactttgggtgtccgtgtttccttttattcttattatggctgcttatggtgacaatcttagattgttatcataaagcgaattggattggccatccggggaaaattaagcatatcatacacttgtttgttggattcacccctctgattacacatactcttggcttgattaggattgttgcattgataagacactattgttgca

SEQ ID NO: 1137 - DNA, 746 bp, Unknown
  Description of Unknown: Human coxsackievirus A20, strain CVA20b-Cecil polyprotein gene,1 sequence
ttaaaacagcctgtgggttgttcccaccccagaggcccacgtggcggccagtactccggtatcacggtacccttgtacgcctgttttatactcccttccccagtaatttagaagcaattaaaccaagttcaatagaagggggtacaaaccagtaccaccacgaacaagcactcctgtttccccggtgacgttgtatatactgtacccacggtagaaagcgaccgatccgttatccgctcttgtacttcgagaagcccagtaccatcttggaatcttcgatgcgttgcgctcagcactcaaccccagagtgtagcttaggtcgatgagtctggacaatcctcaccggcgacggtggtccaggctgcgttggcggcctacctgtggcccaaagccacaggacgctagttgtgaacaaggtgcgaagagcctattgagctacaagagagtcctccggcccctgaatgcggctaatcccaaccacggagctggtgaccacaaaccagtggttaacctgtcgtaatgcgcaagtctgtggcggaaccgactactttgggtgtccgtgtttcctttatttttattatggctgcttatggtgacaatcatagattgttatcataaagcgacttggattggccatccagtgaaagcaaaacaatttatctacttgtttgttgaattcactctattgaccacccacttactaagtcttattaaaattctcttgttgattagattaacacaccaca

SEQ ID NO: 1138 - DNA, 746 bp, Human poliovirus 2
  isolate T10-259, complete genome.1
ttaaaacagctctggggttgttcccaccccagaggcccacgtggcggctagtactccggtatcacggtacccttgtacgcctgttttatactcccttcccccgtaacttagaagaaataaaccaagttcaatagaagggggtacaaaccagtaccaccacgaacaagcacttctgtttccccggtgaagttgtataaactgtatccacggttgaaggcgactgatccgttatccgcttttgtacttcgagaagcctagtatcatcttggaatcttcgatgcgttgcgctcagcactcaaccccagagtgtagcttgggctgatgagtctggacacccctcaccggtgacggtggtccaggctgcgttggcggcctacctgtggcccaaagccacaggacgctagttgtgaacaaggtgtgaagagcctattgagctacgaaagagtcctccggcccctgaatgcggctaatcctaaccacggagcaagggtgcgcaaaccagtgcatgccttgtcgtaacgcgcaagtctgtggcggaaccgactactttgggtgtccgtgtttccttttattcttataatggctgcttatggtgacaatcatagattgttatcataaagcgaattggattggccatccggcgaaagtgaaatacattgtttatctttttgttggattcactccaaacacttccccttcttttaaactcatcactacggtcttgttgatcagagactcatatcaca

SEQ ID NO: 1139 - DNA, 746 bp, Human poliovirus 2
  isolate T09-216, complete genome.1
ttaaaacagctctggggttgttcccaacccagaggcccacgtggcggctagtactctggtatcatggtacccttgtacgcctgttttatactcccttaccccgtaacttagaagcaataaaccaagttcaatagaagggggtacaaaccagtaccaccgcgaacaagcacttctgttgccccggtgaagttgcatagactgtgcccacggttaaaagcgactgatccgttatccgctcttgtacttcgagaaacctagtatcatcttggaatcttcgatgcgttgcgctcaacactcgaccccagagtgtagcttaggtcgatgagtctggacactcctcactggtgacagtggtccaggctgcgttggcggcctacctgtggcccaaagccacaggacgctagtagtgaacaaggtgtgaagagtctattgagctacaagtgagtcctccggcccctgaatgcggctaatcccaaccacggagcaagtgctcacactccagtgagtagcttgtcgtaacgggtaactctgtggcggaaccgactactttgggtgtccgtgtttccttttattcttataatggctgcttatggtgacaatcatagattgttatcataaagcgaattggattggccatccggtgaaagtgaaatactttgcttaactttttgttggattcactccagtcactttcctttcttttaaactcatcaccacagtcttgttgttcagagactcatatcaca

SEQ ID NO: 1140 - DNA, 746 bp, Human poliovirus 2
  strain NIE0611197, complete genome.1
ttaaaacagctctggggttgttcccaccccagaggcccacgtggcggccagtactctggtattacggtacctttgtacgcctgttttatactccctccctcgtaacttagaagaaacaaatcaagttcaacaggagggggtacaaaccagtaccaccacgaacaagcacttctgtctccccggtgacgttgcatagactgtacccacggtcgaaagcgattgatccgttatccgctcttgtacttcgagaagcctagtatcatcttggaatcttcgatgcgttgcgctcagcactcaaccccagagtgtagcttaggtcgatgagtctggacgttccccaccggcgacggtggtccaggctgcgttggcggcctacctgtggcccaaagccacaggacgctagttgtgaacaaggtgtgaagagcctattgagctacaggagagtcctccggcccctgaatgcggctaatcccaaccacggagcaggggtgcataaaccaatgcataccttgtcgtaacgcgcaagtctgtggcggaaccgactactttgggtgtccgtgtttccttttattttttcattggctgcttatggtgacaatcatagattgttatcataaagcgacttggattggccatccggtgagagtgaaatacattgtttacttgttcattggatttactccactcaactctttcgcttacaaactcattacaacaactctgttgattgaaacaacaatactaca

SEQ ID NO: 1141 - DNA, 746 bp, Poliovirus type 3
  strain 23127 complete genome.1
ttaaaacagctctggggttgttcccaccccagaggcccacgtggcggctagtacactggtatcacggtacccttgtacgcctgttttatactcccttccccgtaacttagaagtatacaagccaagttcaatagaagggggtacaaaccagtaccaccacgaacaagcacttctgtttccccggtgaagttgcatagattgttcccacggtcgaaagcgactgatccgttacccgctcatgtacttcgggaagcctagtatcacttcggactcttcgatgcgttgcgctcagcactcaaccccagagtgtagcttaggtcgatgagtctggacaaacctcactggcgacagtggtccaggctgcgttggcggcctacctgtggcccaaagccacaggacgctagttgtgaacaaggtgtgaagagcctactgagctacatgagagtcctccggcccctgaatgcggctaatctcaaccacggagcaggtagtcacaaaccagtgatttgcctgtcgtaacgcgaaagtctgtggcggaaccgactactttgggtgtccgtgtttccttttattctcattatggctgcttatggtgacaatcctagattgttatcataaagtgagctggattggccatccggtgaaaatcaagcacattatatatttgtttgttgggtttaaccctctgattgcacgcactcttggcttggttaggattattgtgtggaaaaggcaccatagttaca

SEQ ID NO: 1142 - DNA, 746 bp, Human echovirus
  4, strain AUS250G, complete genome.1
ttaaaacagcctgtgggttgctcccacccacagggcccactgggcgtcagcacactggtatcaaggtacctttgtgcgcctgttttacaaaccctccccccccttgtaacaaacttagaagcaatgcacaccgatcaatagcgggcgcggcacgccagctgcgtcttgatcaagcacttctgtctccccggaccgagtatcaatagactgcttgcgtggttgaaggagaaagcgtccgttacccgaccaactacttcgagaagcccagtagcgccatggaagctgcgaagcgtttcgctcagcacacccccagtgtagatcaggtcgatgagtcaccgcattccccacgggcgaccgtggcggtggctgcgttggcggcctgcctacggggtaacccgtaggacgcttcaatgtagacatggtgcgaagagtcgattgagctagttggtaatcctccggcccctgaatgcggctaatcctaactgcggagcacgtgccttcaacccagagggtggcgtgtcgtaacgggcaactctgcagcggaaccgactactttgggtgtccgtgtttctttttattttgtactggctgcttatggtgacaattgaaggattgttaccatatagctattggattggccatccggtgcctaacagagcaattatttacctctttgttgggttcgtaccattcaataaggctaattaccaaatcttgtgttacatcctcagattgaacacatcgaa

SEQ ID NO: 1143 - DNA, 747 bp, Human cosavirus
  D1 polyprotein gene, complete cds.1
tggcagtccttgaaacgtgtggtgcgacgtctaaccattatggcagtgggtggagtactgcaaagatgtcaccgtgctttacacggtttttgaaccccacaccggctgtttggcgcttgcaggacagtaggtatattttctttcatttctcttttctagccgcgtaggttctatctacgcgggcggagtgatactcccgctccttcttggacaggcggcctccacgctctttgtggatcttaaggctgccaagtcactggtgtttgaagtgaagaatggagagacactagggcgtttcatgtggctttgccagggattgtagcgatgctgtgtgtgtgtgcggatttcccctcgtggcgacacgagcctcacaggccaaaagccctgtccgaaaggacccacacagtggggttgccccgacccctcccttcaaagctttgtgtaaacaaacttttgtttagactttcttaagcttctctcacatcaggccccaaagatgtcctgaaggtaccctgtgtatctgaggatgagcaccaccaactacccggacttgtgggacgtgtcccacagacgcatgtggtattccagccccctccttttgaggagggggcttttgctcgctcagcacaggatctgatcaggagattcatctctggtgctttacaccagagcatggatttaaaaattgcccaaggcctggcaaacaacctaggggactaggttttctctattttaaaagatgtcaat

SEQ ID NO: 1144 - DNA, 747 bp, Human enterovirus sp.
  71,strain EV71/Xiamen/2009, complete genome.1
ttaaaacagcctgtgggttgcacccactcacaggacccacgtggtgctagcactctggttccacggaacctttgtgcgcctgttttacgtcccctccccaatttgtaacttagaagcaatttacaacactgatcaatagcaggcatggcgcaccagctatgtcttgatcaagcacttccgtttccccggaccgagtatcaatagactgttcacacggttgaaggagaaagcgtccgttatccggctaactacttcgagaaacccagtagcgccattgaaactgcagagtgtttcgctccacacttcccccgtgtagatcaggtcgatgagtcactgtaatccccacgggcgaccgtgacagtggctgcgttggcggcctgcctatggggcaacccataggacgctctaatgtggacatggtgcgaagagtctattgagctagttagtagtcctccggcccctgaatgcggctaatcctaactgcggagcacatgccttcaatccagagggtagtgtgtcgtaatgggcaactctgcagcggaaccgactactttgggtgtccgtgtttccttttattctcacattggctgcttatggtgacaattacagaattgttaccatatagctattggattggccatccggtgtgcaatagagctattatatacctatttgttggctttgtaccactaaccttaaaatctgcaaccactctcgagtatatattgacccttaatacaatcaaac

SEQ ID NO: 1145 - DNA, 747 bp, Unknown
  Description of Unknown: Human coxsackievirus A10, strain CVA10/SD/CHN/09, complete genome.1 sequence
tttaaaacagcctgtgggttgtacccacccacagggcccactgggcgctagcactccgattctgcggaatctttgtgcgcctgttttataaccctcccccgaaacttgcaacttagaagttatgtacgttactgatcaacagcaggcgtggcacaccagccatgtcttgatcaagcacttctgtacccccggactgagtatcaatagactgctcacgtggtcgaaggagaaaacgttcgttatccggctaactacctcgagaaacctagtaacgccattgaaactgcggagtgtttcgctcagcacttcccccgtgtagatcaggtcgatgagtcactgcttaccccacgggcgaccgtggcagtggctgcgttggcggcctgcctatggggcaacccataggacgctctaaagtggacatggtgcgaagagtctattgagctagttagtagtcctccggcccctgaatgcggctaatcctaactgcggagcgcatgccttcaaaccagaaggtggtgcgtcgtaacgggtaactctgcagcggaaccgactactttgggtgtccgtgtttctcttattctcataatggctgcttatggtgacaatcgaggaattgttaccatatagctattggattggccatccggtgtgcaacagagctattatctacttgtttattggatacattccattaacacttaaatccttcaatacattgcactatattctaacactgaacgcaagaaa

SEQ ID NO: 1146 - DNA, 747 bp, Coxsackievirus
  A10 gene for polyprotein, polyprotein region,strain1
tttaaaacagcctgtgggttgtacccacccacagggcccactgggcgccagcactctgattctacggaatctttgtgcgcctgttttacaacccttcccaaaatctgcaacttagaagttatgcacattattgatcaatagcaggcgtggcacaccagtcatgtcttgatcgagcacttctgtatccccggactgagtatcaatagactgctcacgtggtcgaaggagaaaacgttcgttatccggctaactacttcgagaagcctagtaacaccgttgaaactgcggagcgtttcgttcagcacttcccccgtgtagatcaggtcgatgagtcactgcttaccccacgggcgaccgtggcagtggctgcgttggcggcctgcctatggggcaacccataggacgctctaaagtggacatggtgcgaagagcctattgagctagttagtagtcctccggcccctgaatgcggctaatcctaactgcggagcgcatgccctcacgccagagggtggtgcgtcgtaacgggcaactctgcagcggaaccgactactttgggtgtccgtgtttctttttattctcattatggctgcttatggtgacaattaaggaattgttaccatatagctattggattggccatccggtgtgcaacagagctattatctacttatttgttggatacattccattaacacttaaatcccttaacacattgcaatacattctaacactgaacgcaagaaa

SEQ ID NO: 1147 - DNA, 747 bp, Enterovirus sp.
  A71,strain USA/2018-23296, complete genome.1
ttaaaacagcctgtgggttgtacccacccacagggcccaccgggcgctagcactctgattccacggaatctttgtgcgcctgttttataacccccctccccacctcgcaacttagaagcaacgcgcatcactgatcaacagcaggcatggcgcgccagccatgtcttgatcaagcacttctgtttccccggactgagtatcaatagactgcttacgcggttgaaggagaaaacgttcgttacccggctaactacttcgagaaacttagtaacaccatcgaagctgcagggtgtttcgctcagcacttcccccgtgtagatcaggccgatgagtcaccgcaatccccacgggcgaccgtggcggtggctgcgttggcggcctgcctatggggcaacccataggacgccctaaagtggacatggtgcgaagagtctattgagctagttagtagtcctccggcccctgaatgcggctaatcctaactgcggagcacataccctcaagccagagggtggtgtgtcgtaacgggtaactctgcagcggaaccgactactttgggtgtccgtgtttccttttattcttactgtggctgcttatggtgacaattcaagagttgttaccatatagctattggattggccatccggtgtctaacagagctattgtgtacttatttgttgggtacgttccattatcttacacatcccttgacacattacattttattgtgaagctaaatacaagaag

SEQ ID NO: 1148 - DNA, 747 bp, Unknown
  Description of Unknown: Human coxsackievirus A5, strain CVA5/SD/CHN/09, complete genome.1
tttaaaacagcctgtgggttgtacccacccacagggcccactgggcgctagcactctggtactgcggtacctttgtgcgcctgttttatctccccagacccccgcaacgtcacattagaagatagacaatacgaccaatagtcagtggggcaacccagcctcactttggtcaagtacctctgtttccccgggcttagtaccaataggctgcttgcgcggctgaaggggaacgcgcccgttatccggctaactacttcgagaaacctagtaccaccatggaagttgccgagtgtttcgctcagcacaaccccagtgtagatcaggtcgatgagtcaccgtacaccccacgggcgaccgtgacggtggctgcgttggcggcctgcccatggtgcacaccatgggacgctctaatacagacatggtgcgaagagtctattgagctagttagtagtcctccggcccctgaatgcggctaatcctaactgtggagcatgcgctctcaacccagagagtagcgtgtcgtaacgggcaactctgcagcggaaccgactactttgggtgtccgtgtttccttttattcttatattggctgcttatggtgacaattgagagattgttaccatatagctattggattggccatccggtgtgcaatagagctattgtatattcttttgttggctttgtgccattagattatactgcaattgctactttaagatacatcttgtttctgaacacagcaaa

SEQ ID NO: 1149 - DNA, 747 bp, Coxsackievirus
  A5 gene for polyprotein, polyprotein region,strain1
tttaaaacagcctgtgggttgtacccacccacagggcccactgggcgctagcacactggtattacggtacccttgtgcgcctgttttatcctccctggcccccgtaataatgtattagaagtcttgcaacgtgaccaatagctagtaaagcaacccagctttacttgggtcaagtacttctgttaccccggacctagtaccaataggctgctcgcgcggctgaaggggaaaacgttcgttatccggctaactacttcgggaaacccagtaccatcatgaatgttgcggagtgtttcgctcagcactaccccagtgtagatcaggccgatgagtcaccgtacaccccacgggcgaccgtgacggtggctgcgttggcggcctgcccatggcacctgccatgggacgctctaatacggacatggtgtgaagagtctactgagctagttagtagtcctccggcccctgaatgcggctaatcctaactgcggagcacgcgcccccaatccagagggtagcgtgtcgtaatgggcaactctgcagcggaaccgactactttgggtgtccgtgtttccttttattcttacactggctgcttatggtgacaattgagagattgttgccatatagctattggattggccatccggtgagcaatagagcgattatctattcttttgttggatttgtgccattagattacactgccatcatcacactgaagtacattttattgttaaacacaacaaa

SEQ ID NO: 1150 - DNA, 747 bp, Coxsackievirus
  A5, complete genome.1
ttttaaaacaggctgtgggttgtacccacccgcagggcccactgggcgctagcactctggtaccacggtacctttgtgcgcctgttttatctccccaaaccccgtaacgctacattagaagttaaacaatatgaccgatagtcagtggggcaacccagcctcactttggtcaagcacttctgttctcccgggcttagtaccaataagctgctcgcgcggctgaaggggaacgcgcccgttatccggctaactacttcgagaaacctagtaccaccatggaagttgcagagtgtttcgctcagcactaccccagtgtagatcaggctgatgagtcaccgtgcaccccacgggcgaccgtgacggtgactgcgttggcggcctgcccatggtgtataccatgggacgctctaatacagacatggtgcgaagagtctattgagctagttagtagtcctccggcccctgaatgcggctaatcctaactgcggagcacgcgctctcaacccagagagtagcgtgtcgtaacgggtaactctgcagcggaaccgactactttgggtgtccgtgtttctttttattcttacattggctgcttatggtgacaattgagagattgttaccatatagctattggattggccatccggtgtgtaacagagctatcatatattcttttgttggcttcgtgccactagattatactgcaattgttactttaaggtacatcttacttctgaatacggtaaa

SEQ ID NO: 1151 - DNA, 747 bp, Enterovirus A
  strain A2 R1580/XY/CHN/2017, complete genome.1
tttaaaacagcctgtgggttgtacccacccacagggcccactgggcgttagcacactgattctacggaatctttgtgcgcctgttttatatccctcccctaaaatagtaatttagacgttgaacatttacacgaccaatagtgggcgtggcgcaccagtcacgtcttggtcaagcactcctgttcccccggaccgagtatcaataggctgctcacgtggctgaaggagaaagtgttcgttatccggctaactacttcgggaaacccagtaacaccatgaaagttgcagagtgtttcgttcagcacttcccccgtgtagatcaggctgatgagtcactgcaaaccccacgggcgaccgtggcagtggctgcgttggcggcctgcctatggggtaacccataggacgctctaatacagacatggtgcgaagagtctactgagctagttagtattcctccggcccctgaatgcggctaatcctaactgcggagcacatgccctcaatccagagggtggtgtgtcgtaatgggcaactctgcagcggaaccgactactttgggtgtccgtgtttccttttattcttatactggctgcttatggtgacaattgaaaagttgttaccatatagctattggattggccatccggtgaataacagagctttggtttatcagttcattgggttcgtgcccttatcatctacagcttacacaactttggtgtacttgttatatcttaatagtaagaa

SEQ ID NO: 1152 - DNA, 747 bp, Coxsackievirus
  A8,isolate CV-A8/P82/2013/China, complete genome.1
ttaaaacagcctgtgggttgttcccactcacagggcccactgggcgctagcacactgattctccggtacctttgtgtgcttgttttagtatccctcccccaaactcgtaacttagaagaataacacgctatcgatcaatagcaggcatggcgcaccagccatgtctcgatcaagcacttctgtttccccggacagagtatcaatagactactcacgtggttgaaggagaaaacgtccgttatccggctaactacttcgagaaacctagtaacaccattgaagctgcagagcgtttcgttcagcacttaccccgtgtagatcaggtcgatgagtcactgcattccccacgggcgaccgtggcagtggctgcgttggcggcctgcctatggggtcacccataggacgctctaatgtggacatggtgcgaagagtctattgagctagttagtagtcctccggcccctgaatgcggctaatcctaactgcggagcgcataccctcaaaccagggggtagtgcgtcgtaacgggcaactctgcagcggaaccgactactttgggtgtccgtgtttccttttattttcttactggctgcttatggtgacaattgaagaattgttgccatatagctattggattggccatccggtgtgtaacagagcaatcatctatttgtttgccgggtacatcccattaacgctcaactcttttagtacattacagtatatactaatcctgaatacaagaaa

SEQ ID NO: 1153 - DNA, 747 bp, Enterovirus sp.
  A114,strain V13-0285, partial genome.1
ttaaaacagcctgtgggttgttcccacccacagggcccactgggcgctagcactctggttctccggaacctttgtgcgcctgttttgaaaccccctcccccaactcgaaacgtagaagtaatgtacactactgatcagtagcaggcgtggcgcaccagccatgtctcgatcaagcacttctgtttccccggactgagtatcaatagactgctcacgcggttgaaggtgaaaacgtccgttacccggctaactacttcgagaaacctagtagcaccatagaaactgcagagtgtttcgctcagcacttcccccgtgtagatcaggtcgatgagtcactgcaatccccacgggtgaccgtggcagtggctgcgttggcggcctgcctatggggcaacccataggacgctctaaggtggacatggtgtgaagagtctattgagctagttagtagtcctccggcccctgaatgcggctaatcctaactgtggagcgcatactcccaaaccagggagcagtgcgtcgtaacgggcaactccgcagcggaaccgactactttgggtgtccgtgtttccttttattcctatactggctgcttatggtgacaattgagagattgttaccatatagctattggattggccatccagtgtgtaatagagcaatcatttaccaatttgttggatttactccattaacccacacgtctctcaacacactacatttcatcttactactgaacactagaaa

SEQ ID NO: 1154 - DNA, 747 bp, Enterovirus sp.
  C96,isolate 127/SD/CHN/1991, complete genome.1
ttaaaacagctctggggttgttcccaccccagaggcccacgtggcggccagtacaccggtattacggtacccttgtacgcctgttttatactccctacccctgcaacttagaagcaaataatccaagttcaatagtagggggtacaaaccagtaccaccacgaacaagcacttctgtttccccggtgatgttgtatagactgtacccacggttgaaaacaattgatccgttacccgctcttgtacttcgagaagcctagtatcatcttggaaccttcgatgcgttgcgctcagcactcaaccccagagtgtagcttgggtcgatgagtctggacaatccacaccggcgacggtggtccaggctgcgttggcggcctacctgtggcccaaagccacaggacgctagttgtgaacaaggtgtgaagagcctattgagctacaagagagtcctccggcccctgaatgcggctaatcccaaccacggagcaggtgatcacaacccagtgattagcctgtcgtaatgcgtaagtctgtggcggaaccgactactttgggtgaccgtgtttccttttatttttattgtggctgcttatggtgacaatcttagattgttatcataaagcgatttggattggccatccggtgaaagttaaacacattatttacttgtttgttggattcactccgttgtcctctcgcactacgtatattattaacgctgtgctattaattaggtcaatacatcaca

SEQ ID NO: 1155 - DNA, 747 bp, Human enterovirus sp.
  96,isolate FIN04-7, complete genome.1
ttaaaacagcctgtgggttgttcccaccccagaggcccacgtggcggccagtacaccggtattacggtacccttgtacgcctgttttatacttccttcccccgtaacttagaagtttacaaaccaagttcaatagaagggggtacaaaccagtaccaccacgaacaagcacttctgtttccccggtgagtttgcatagactgtatccacggttgaaagtgaacgatccgttacccgctcttgtacttcgagaagcctagtaaccccttggaatcttcgatgcgttgcgctcagcactcaaacccagagtgtagcttaggtcgatgagtctggacactcctcaccggtgacggtggtccaggctgcgttggcggcctacctgtggtccaaagccacaggacgctagttgtgaacaaggtgtgaagagcctattgagctacttgagagtcctccggcccctgaatgcggctaatcctaaccatggatcaggtggtcacaatccagtgactggcctgtcgtaatgcgcaagtccgtggcggaaccgactactttgggtgtccgtgtttccttttattcttataatggctgcttatggtgacaatcatagattgttatcatatagcgaattggattggccatccggtgtgaacaaaacacttgattcacttgttggttgaatttgtttcattaattgaacacataccagagctcatttgattggcatttttgcttagacaattgtaccaca

SEQ ID NO: 1156 - DNA, 747 bp, Unknown
  Description of Unknown: Human coxsackievirus A11, isolate CV-A11_67874, complete genome.1 sequence
ttaaaacagctctggggttgttcccaccccagaggcccacgtggcggctagtacaccggtatcacggtacccttgtacgcctgttttatactcccttcccccagtaacttagaagtaataaaccaagttcaatagaagggggtacaaaccagtaccaccatgaacaagcacttctgttcccccggtgaggttgtatagactgtgcccacggttgaaagcgaccgatccgttatccgctcttgtacttcgagaagcctagtatcaccttggaatcttcgatgcattgcgttcagcacttgatcccggagtgtagcttaggccgatgagtctggacgttccccaccggtgacggtggtccaggctgcgttggcggcctacctgtggtccaaagccacaggacgctagttgtgaacaaggtgtgaagagcctattgagctacatgagagtcctccggcccctgaatgcggctaatcccaaccacggagcagatggttgcaatccagcggctagtctgtcgtaacgcgcaagtctgtggcggaaccgactactttgggtgtccgtgtttccttttatctttataatggctgcttatggtgacaatcattgattgttgccataaagcgacttggattggccatccggtgaaaatcagatcgattatctacttgtttattggattcacacccttatctatatacacgctaagtttgatcagagtcaccttgttaattagatattattaccacg

SEQ ID NO: 1157 - DNA, 747 bp, Human enterovirus sp.
  96,strain 09228C1, complete genome.1
ttaaaacagctctggggttgttcccaccccagaggcccacgtggcggctagtactccggtatcacggtacccttgtacgcctgttttatactccctacccctgcaacttagaagctagtaactcaagttcaatagtagggggtacaaaccagtaccaccacgaacaagcacttctgtttccccggtgatgccgtatagactgtgcccacggttgaaaacgactgacccgttatccgctcttatacttcgagaagcctagtatcatcttggaatcttcgatgcgttgcgctcagcactcaaccctagagtgtagcttaggtcgatgagtctggacattcctcaccggcgacggtggtccaggctgcgttggcggcctacctgtggcccaaagccacaggacgctagttgtgaacaaggtgtgaagagcctattgagctacaagagagtcctccggcccctgaatgcggctaatcccaaccacggagcaagtgatcacgaaccagtgattggcttgtcgtaacgcgcaagtctgtggcggaacccgactactttgggtgtccgtgtttcctttatttcatatatggctgcttatggtgacaattatagattgtcatcatagagcgaattggattggccatccggtgaaagttagacatattgtttacctatttgttggctttacatccttcaacctccacaccccgtattttgttaaggttgtgttgtcgatcagatcactataccaca

SEQ ID NO: 1158 - DNA, 747 bp, Unknown
  Description of Unknown: Human coxsackievirus A13, strain ARG98-10613, complete genome.1 sequence
ttaaaacagcctgtgggttgttcccaccccagaggcccacgtggcggccagtactccggtatcacggtacccttgtacgcctgttttatacccccttccccgtaacttagaagtaaacaaaaccaagttcaatagaaggcggtacaaaccagtgccaccatgaacaagcacttctgtttccccggtgatgttgtatagactgtttccacggttgaaagcgactgatccgttatccgctcaagtacttcgggaagcctagtatcatcttggaatcttcgatgcgttgcgttcagcactcaacccccgagtgtagcttaggtcgatgagtctggacattcctcaccggtgacggtggtccaggctgcgttggcggcctacctgtggcccaaaaccacaggacgctagttgtgaacaaggtgtgaagagcctactgagctacttgagagtcctccggcccctgaatgcggctaatcctaaccacggatcaggtgattgcaaaccagcagttggcctgtcgtaacgcgcaagtctgtggcggaaccgactactttgggtgtccgtgtttccttttatttttccattggctgcttatggtgacaatcgtagattgttgtcataaagcgaattggattggccatccggtgaaagtcaagtacattatttatttatttgtgggttttactcctataacagcaaatacccttcatcttatcaccatcacactactgattagatatcactaccaca

SEQ ID NO: 1159 - DNA, 747 bp, Unknown
  Description of Unknown: Human coxsackievirus A18 genomic RNA, complete genome,strain:1 sequence
ttaaaacagctctggggttgttcccaccccagaggcccacgtggcggccagtacactggtattacggtacctttgtacgcctgttttatgctcccttcccctgcaacttagaagattacaaaccaagttcaatagaagggggtgcaaaccagtaccaccacgaacaagcacttctgtttccccggtgaacttgtatagactgtacccacggtcgaaaacgagtgatccgttatccgctcttgtacttcgagaagcccagtaccttcttgggatcattgatgcgttgcgctcagcactcgaccccggagtgtagcttaggctgatgagtctggacatccctcaccggcgacggtggtccaggctgcgttggcggcctacctgtggtccaaagccacaggacgctaaatgtgaacaaggtgtgaagagcctattgagctacatgagagtcctccggcccctgaatgcggctaatcctaaccacggagcaggtggttgcaaaccagcaattggcctgtcgtaatgcgtaagtctgtggcggaaccgactactttgggtgtccgtgtttctctttatttttacaatggctgcttatggtgacaatcttagattgttgtcataaagcgaattggattggccatccggtgaagataaagcatatcatttatctatttattggattcactccattaaactcttggacttatcatttaatacaagtagtgttattgataagaagtgttcaccaca

SEQ ID NO: 1160 - DNA, 747 bp, Unknown
  Description of Unknown: Human coxsackievirus A13 strain BAN99-10430, complete genome.1 sequence
ttaaaacagcctgtgggttgttcccaccccagaggcccacgtggcggctagtactccggtattacggtacccttgtacgcctgttttatacccccttcccccagaaacttagacgctatgaaaccaagttcaataggagggggcacgaaccagtgtcaccacgaacaagcacttctgtttccccggtgattttacataagctgtacccacggctgaaagtgaatgatccgttatccgcttgggtacttcgagaagcctagtaccacctttggatcttcgatgcgttgcgctcagcactctaccccgagtgtagcttaggtcgatgagtctgggcataccccaccggtgacggtggcccaggctgcgttggcggcctacccatggttaacaccatgggacgctagttgtgaacaaggtgtgaagagcctattgagctactcaagagtcctccggcccctgaatgcggctaatcctaaccatggagcaggtgctttcaatccagaaagtggcctgtcgtaatgcgtaagtccgtggcggaaccgactactttgggtgtccgtgtttccttttttacttttgtatggctgtttatggtgacaatcatagattgttatcataaagcgaattggattggccatccggtaaaaattaaacacatcatttatctatttgttggattcgctccaatcacttctaaaacacttcagttgatacgtgtagtattaataatcaggctattgtatcaca

SEQ ID NO: 1161 - DNA, 747 bp, Unknown
  Description of Unknown: Human coxsackievirus A13, strain USA/Ca98-10615, complete genome.1 sequence
ttaaaacagcctgtgggttgttcccaccccagaggcccacgtggcggctagtacaccggtatcacggtacccttgtacgcctgttttatactcccttcccccgtaacttagaagtataacaaccaagttcaatagaagggggtacaaaccagtaccaccacgaacaagcacctctgtttccccggtgaacttgcatagactgtgcccacggttgaaagcgagcgatccgttacccgctcttgtacttcgagaagcctagtattatcttggaatcattgatgcgttgcgctcagcactcaaccccagagtgtagcttaggtcgatgagtctggacactcctcaccggtgacggtggtccaggctgcgttggcggcctacctgtggcccatggtcacaggacgctaaatgtgaacaaggtgtgaagagcctattgagctacatgagagtcctccggcccctgaatgcggttaatcctaaccacggagcaggcggttacaaaccagtaactagcctgtcgtaatgcgcaagtctgtggcggaaccgactactttgggtgaccgtgtttccttttatttttacaatggctgcttatggtgacaatctcagattgttatcataaagcgagttggattggccatccggtaaagataaagtgtattatctatctatttgttggatttactccgttaaataccagaacatatcacttgatacaagcggtattactaattaggaacttctatcaca

SEQ ID NO: 1162 - DNA, 747 bp, Unknown
  Description of Unknown: Human coxsackievirus A17 strain G12, complete genome.1 sequence
ttaaaacagctctggggttgttcccaccccagaggcccacgtggcggctagtactccggtattgcggtacccttgtacgcctgttttatactcccttcccccgtaacttagaagcaatcaaacaaagttcaatagaagggggtacaaaccagtaccaccacgaacaagcacttctgtttccccggtgaagttgtatagactgtacccacggttaaaagcaattgatccgttacccgctcttgtacttcgagaagcctagtactaccttggaatcttcgatgcgttgcgctcaacactcaaccccagagtgtagcttgggctgatgagtctggacgttccccaccggcgacggtggtccaggctgcgttggcggcctacctgtggcccaaagccacaggacgctagttgtgaacaaggtgcgaagagcctattgagctacaagagagtcctccggcccctgaatgcggctaatcccaaccacggagcaggtagttgcaagccagcaatcgacctgtcgtaacgcgtaagtctgtggcggaaccgactactttgggtgtccgtgtttccttttaattttaaactggctgcttatggtgacaatcattgattgttatcataaagcgaattggattggccatccggtgagaatcagatccattatctacttgttcattggatttactccattgacaacatacacatacgaccttattagagtcaatttactattgagacatctccaccata

SEQ ID NO: 1163 - DNA, 747 bp, Unknown
  Description of Unknown: Human coxsackievirus A17, complete genome, genomic RNA, isolate1 sequence
ttaaaacagctctggggttgttcccaccccagaggcccacgtggcggccagtacactggtatcacggtacccttgtacgcctgttttatactcccttcccccgtaacttagaagccataaatccaagttcaacagaagggggcacaaaccagtgccaccacgaacaagcacttctgtctccccggtgaagttgcatagactgtaaccacggttaaaagcgattgatccgttatccgctcatgtacttcgagaagcctagtaccaccttggaaccttcgacgcgttgcgctcagcactcaaacccagagtgtagcttaggccgatgagtctggacgttccccaccggcgacggtggtccaggctgcgttggcggcctacctgtggctcaaagccacaggacgctagttgcgaacagggtgtgaagagcctattgagctacatgagattcctccggcccctgaatgcggctaatcctaaccgcggagcaggtagttgcaagccagcaactggcctgtcgtaacgcgtaagtctgcggcggaaccgactactttgggtgtccgtgtttcctttatttcttataatggctgcttatggtgacaatcatagattgttatcataaagcgaattggattggccatccagtgaaagtcagactgattatccttctgtttgttgggtttgttccactcaattcacacactttgcacttaatcagaattgtcttattgacacgacaatatcatcact

SEQ ID NO: 1164 - DNA, 747 bp, Human poliovirus 1
  isolate 558/BRA-PE/88, complete genome.1
ttaaaacagctctggggttgttcccaccccagaggcccacgtggtggccagtactctggtattacggtacctttgtacgcctgttttatactcccttcccctgtaacttagaagcaatctaacctagttcaataggagggggtacaaaccagtaccactacgaacaagcacttctgttaccccggtgaagttgtatagactgtgcccacggtcgaaaatgactgatccgttatccgctcatgtacttcgggaagcctagtaccatcttcggatcttcgatgcgttgcgctcagcactcgaccccagagtgtagcttaggtcgatgagtctggacaatcctcactggcgacagtggtccaggctgcgttggcggcctacctgtggtccaaagccacaggacgctagttgtgaacaaggtgtgaagagcctactgagctacttgagagtcctccggcccctgaatgcggctaatcccaaccacggagcaagtagttgcaaaccagcaaccagcttgtcgtaacgcgtaagtctgtggcggaaccgactactttgggtgtccgtgtttccttttatttttacactggctgcttatggtgacaatcatagattgttatcataaggcgaattggattggccacccggtgtaagtcagatcaattgtctactcgtttgttggatatactccaataacgcactacactcttgagcttaacagagttgttctgctggcgagaagttgctatcgca

SEQ ID NO: 1165 - DNA, 747 bp, Human poliovirus 1
  isolate Pak-11, complete genome.1
acagtaaaacagctctggggttgttcccaccccagaggcccacgtggcggctagtactctggtatcgcggtacctttgtacgcctgttttatacccctaccccatgtaactttagaagcagttcaacaagttcaatagggggggtgcaaaccagcaccaccacgaacaagcacttctgtaaccccggtgaccttgtataagctgtacccacggctgaaagcgagtgatccgttatccgcttaagtacttcgagaagcctagtatcaccttagaatcttcgatgcgttgcgctcagcactctatcccgagtgtagcttaggctgatgagtctgggcgttcctcaccggcgacggtggcccaggctgcgttggcggcctacccatggctaacgccatgggacgctagatgtgaacaaggtgtgaagagcctattgagctacttaagagtcctccggcccctgaatgcggctaatcccaaccacggagcaggtgccttcaacccagagggtggcctgtcgtaacgcgcaagtctgtggcggaaccgactactttgggtgtccgtgtttccttttatcttttatatggctgcttatggtgacaatcatagattgttatcataaagcgacttggattggccatccggtaaaatacaaacacatcatttacttgtttgttggatttactccactctcccaatttactcctagcataatatccattgttttgttaacaagacattactatcaca

SEQ ID NO: 1166 - DNA, 747 bp, Poliovirus type 2
  (Lansing strain), complete genome.1
ttaaaacagctctggggttgttcccaccccagaggcccacgtggcggccagtacactggtattgcggtacctttgtacgcctgttttatactcccttcccccgtaacttagaagcacaatgtccaagttcaataggagggggtacaaaccagtaccaccacgaacaagcacttctgttcccccggtgaggctgtataggctgtttccacggctaaaagcggctgatccgttatccgctcatgtacttcgagaagcctagtatcaccttggaatcttcgatgcgttgcgctcaacactcaaccccagagtgtagcttaggtcgatgagtctggacgttcctcaccggcgacggtggtccaggctgcgttggcggcctacctgtggcccaaagccacaggacgctagttgtgaacaaggtgtgaagagcctattgagctacctgagagtcctccggcccctgaatgcggctaatcctaaccacggagcaggcagtggcaatccagcgaccagcctgtcgtaacgcgcaagttcgtggcggaaccgactactttgggtgtccgtgtttccttttatttttacaatggctgcttatggtgacaatcattgattgttatcataaagcaaattggattggccatccggtgagaatttgattattaaattactctcttgttgggattgctcctttgaaatcttgtgcactcacacctattggaattacctcattgttaagatatcatcaccact

SEQ ID NO: 1167 - DNA, 747 bp, Unknown
  Description of Unknown: Human coxsackievirus A21, strain BAN00-10467 polyprotein gene,1 sequence
ttaaaacagcctgtgggttgttcccaccccagaggcccacgtggcggctagtactctggtacccggtacccttgtacgcctgttttatatcccccttcccatgtaactttagaagcaattcactaagttcaacagggggggtgcaaaccagtaccaccacgaacaagcacttctgtttccccggtgatttcacataagctgtgcccacggccgaaagtggatgatccgttacccgcttgggtacttcgagaagcctagtatcaccttggaatcttcgacgcgttgcgttcagcgctctaacccgagtgtagcttaggctgatgagtctgggcgatccccaccggtgacggtggcccaggctgcgttggcggcctacccatggttaacgccatgggacgctagttttgaacaaggtgtgaagagcctattgagctactcaagagtcctccggcccctgaatgcggctaatcccaaccacggagcaagtgtcctcaaaccagagggtggcttgtcgtaacgcgcaagtctgtggcggaaccgactactttgggtgaccgtgtttccttttatttcatatttggctgcttatggtgacaatcacggattgttatcataaagcgaattggattggccatccggtgaaatacaagcacattatttacctttttgtcggattcattccaatagaatattcttcgccaaagttgatccaaataatcttagtgattagaagttattatttcagca

SEQ ID NO: 1168 - DNA, 747 bp, Human poliovirus 2
  strain CHA1218986, complete genome.1
ttaaaacagctctggggttgttcccaccccagaggcccacgtggcggccagtactccggtattacggtacccttgtacgcctgttttatactcccttcccctgtaacttagaagcatacaaaccaagttcaatagaagggggtacaaaccagtaccaccacgaacaagcactcctgtttccccggtgacattgcatagactgtacccacggttgaaagcgatcgatccgttacccgctcctgtacttcgagaagcctagtatcatcttggaatcttcgatgcgttgcgctcagcactcaaccccagagtgtagcttaggctgatgagtctggacgtcccccaccggcgacggtggtccaggctgcgttggcggcctacctgtggcccaaagccacaggacgctagttgtgaacaaggtgtgaagagcctattgagctacaagagagtcctccggcccctgaatgcggctaatcctaaccacggagcaggcagttgcaaaccagcaaccggcctgtcgtaacgcgcaagtctgtggcggaaccgactactttgggtgtccgtgtttccttttatttttacaatggctgcttatggtgacaatcatagattgttatcataaagcgacttggattggccatccggtgaaagtaaaacacattgtttacttgtttgttggattcactccaattaacacttttacttacaaactcattacaacaactctattaattagagataagcatcaca

SEQ ID NO: 1169 - DNA, 747 bp, Human poliovirus 2
  strain EGY88-074, complete genome.1
ttaaaacagctctggggttgttcccaccccagaggcccacgtggcggctagtacactggtattacggtacccttgtacgcctgttttatactcccttccccgtaacttagaagctatgtaatccaagttcaatagaagggggtacaaaccagtaccaccacgaacgagcacttctgtttccccggtgagattgtataagctgttcccacggccgaaaacgatcgatccgttacccgctcttgcacttcgagaagcctagtatcatcttgggatcttcgatgcgttgcgctcagcactctaccccagagtgtagcttaggtcgatgagtctggacattcctcaccggcgacggtggtccaggctgcgttggcggcctacctgtggtccaaagccacaggacgctagttgtaaacaaggtgtgaagagcctattgagctgcaagagagtcctccggcccctgaatgcggctaatcccaaccacggagcaggtggttgcaacccagtaactggcctgtcgtaacgcgtaagtctgtggcggaaccgactactttgggtgtccgtgtttccttttatttctataatggctgcttatggtgacaatcatagattgttatcataaagcgaattggattggccatccggtgagagttaagacaattatccacttgtttgttggatttacccctctgactaattacacactcaactttattaggattgtcattctagtgagatattaccatcaca

SEQ ID NO: 1170 - DNA, 747 bp, Human poliovirus 2
  gene for polyprotein, genomic RNA,isolate1
ttaaaacagctctggggatgtacccaccccagaggcccacgtggcggctagcactccggtatcacggtacccttgtgcgcctgttttatactcccttcccgtaacttagaagcacgaaaccaagttcaatagaagggggtacaaaccagtaccaccacgaacaagcacttctgtttccccggtgatgttgcatagactgctcacgcggttgaaagcgactgatccgttatccgcttgtgtacttcgagaagcctagtatcaccttggaatcttcgtcgcgttgcgctcggcacccgaccccggggtgtggcttaggctgatgagtctggacattcctcaccggtgacggtggtctaggctgcgttggcggcctacctatggctaacgccataggacgctagatgtgaacaaggtgtgaagagcctattgagctacgcaagagtcctccggcccctgaatgcggctaatcccaaccacggagcaagcgatcgcaaaccagcgattggcttgtcgtaacgcgtaagtctgtggcggaaccgactactttgggtgtccgtgtttcctgttatttttatcatggctgcttatggtgacaatctgagattgttatcataaagcgaattggattggccatccggtgagtactgtctcaggtatactgctgcttaacggaaccgctaagttattcctactcctcatttagccaactcttccagaataatacgagggtaaaataacaatactata

SEQ ID NO: 1171 - DNA, 747 bp, Human poliovirus 2
  strain NIE0611451, complete genome.1
ttaaaacagctctggggttgttcccaccccagaggcccacgtggcggctagtactccggtatcacggtacccttgtacgcctgttttacactcccttcccccgtaacttagaagaaacaaacaaagttcaatagaagggggtacaaaccagtaccaccacgaacaagcacttctgtttccccggtgacgttgtatagactgtacccacggtcgaaaacgattgatccgttatccgcttttgtacttcgagaagcctagtatcatcttggaatcttcgatgcgttgcgctcagcactcaatcccagagtgtagcttaggtcgatgagtctggacgttcctcaccggcgacggtggtccaggctgcgttggcggcctacctgtggcccaaagccacaggacgctagttgtgaacaaggtgtgaagagcctattgagctacaagagagtcctccggcccctgaatgcggctaatcctaaccacggagcaagggtgtgtgagccaacacataccttgtcgtaatgcgtaagttcgtggcggaaccgactactttgggtgtccgtgtttccttttattcttgtattggctgcttatggtgacaatcatagattgttatcataaagcgacttggattggccatccagtggaagtgaaataccttgtctacctgtctgttggttttactccatttgactaattcacttacaagcttattgctataatttttattgactaaacaacaatactaca

SEQ ID NO: 1172 - DNA, 747 bp, Human poliovirus 2
  isolate 44624/BRA2014, complete genome.1
ttaaaacagctctggggttgttcccaccccagaggcccacgtggcggctagtactctggtatcgcggtacctttgtacgcctgttttatactccccttccctgtaacttagaagcaaacaagccaagttcaatagaagggggtacaaaccagtaccaccacgaacaagcacttctgttaccccggtgaagttgtataaactgtccccacggttgaaaacgactgatccgttacccgcttttgtacttcgagaagcctagtaccatcttggaatcttcgatgcgttgcgctccgcactcaatcccagagtgtagcttaggtcgatgagtctggacagtcctcaccggcgacggtggtccaggctgcgttggcggcctacctgtggcccaaagccacaggacgctagttgtgaacaaggtgtgaagagcctattgagctacaaaagagtcctccggcccctgaatgcggctaatcctaaccatggagcaggtggttacaaaccagtaattgacctgtcgtaacgcgtaagtccgtggcggaaccgactactttgggtgtccgtgtttccttttatttttaatgcggctgcttatggtgacaatcattgattgttatcataaagcgaattggattggccatccggtgtgaataaaacttattgtctacttgtttgttggatacactccactaaacgcattcacccctagcattatttctatagtgatcaaaatcagacaattacattaca

SEQ ID NO: 1173 - DNA, 747 bp, Human poliovirus 2
  strain USA0911201, complete genome.1
ttaaaacagctctggggttgttcccaccccagaggcccacgtggcggctagcactctggtatcacggtacccttgtgcgcctgttttacaccccctccctgcaatttagaagcacaaaactaagttcaatagaagggggtacaaaccagtaccaccacgaacaagcacttctgtttccccggtgacattacatagactgctcacgcggttgaaagtgatcgatccgttacccgcttgtgtacttcgagaagcctagtatcactttgggatcttcgacgcgttgcgcccagcactcaaacccagggtgtagcttaggccgatgagtctggacgctcctcaccggcgacggtggtccaggctgcgttggcggcctacctatggctgacgccataggacgctagatgtgaacaaggtgtgaagagcctattgagctacgcaagagtcctccggcccctgaatgcggctaatcccaaccacggagcaggcggtcacaaaccagtgactggcttgtcgtaacgcgcaagtctgtggcggaaccgactactttgggtgtccgtgtttcctgttatctttattatggctgcttatggtgacaatcagagattgttaccataaagcgaattggattggccatccggtgtgtattgcattggatatacaactgtttactaaaattactgtgttatctctactttccatttaactggttaatcaggaacgatacgagaataaaacaacaacatcacg

SEQ ID NO: 1174 - DNA, 747 bp, Coxsackievirus
  B5, isolate CVB5-JZ-P50, complete genome.1
tttttaaaacagccctgtgggttgttcccacccacggggcccattgggcgctagcacactggtatcacggtacccttgtgcgcctgttttatccaccccctccccaatgtaacatagaagcacaaactaagtggtcaatagacggctcagtgcaccaactgggtttagaccaagcacttctgttaccccggactgagtatcaataggctgctcacgcggctgaaggagaaaacgttcgttacccggccaactacttcgagaagcccagtaccaccatgaaggttgcgcagtgtttcgttcagcacaaccccagtgtagatcaggtcgatgagtcaccgcaatccccacgggcgaccgtggcggtggctgcgctggcggcctgcccatggggtgacccatgggacgcttcaattccgacatggtgcgaagagcctattgagctagttggtagtcctccggcccctgaatgcggctaatcccaactgcggagcaagcacccacaaaccagtgggctgtttgtcgtaacgggcaactctgcagcggaaccgactactttgggtgtccgtgtttccttttattcctacactggctgcttatggtgacaattgaaagattgttgccatatagctattggattggccatccggtaacaaacagagctattattcacttatttgttggctttgtgccgttgaatttcaaagttataaaaaccataacctccatcttgacactcaacacagcaaa

SEQ ID NO: 1175 - DNA, 748 bp, Enterovirus sp.
  A71,isolate N7008-TW99/VP1-E98K, complete genome.1
ttaaaacagcctgtgggttgcacccactcacagggcccacgtggcgctagcactctggttctacggaacctttgtgcgcctgttttacgccccttcccccaatttgcaacttagaagcaatacacaacactggtcaacagtaggcatggcgcaccagccatgtcttgatcaagcacttctgtttccccggaccgagtatcaatagactgctcacgcggttgaaggagaaagcgtccgttatccggctaactacttcgagaaacttagtaacaccattgaagctgcagagtgtttcgctcggcacttcccccgtgtagatcaggtcgatgagtcactgcaatccccacgggtgaccgtggcagtggctgcgctggcggcctgcctatggggtaacccataggacgctctaatgcggacatggtgcgaagagtctattgagctagttagtggtcctccggcccctgaatgcggctaatcctaactgcggagcacatgccttcaatccagagggtagtgtgtcgtaatgggcaactctgcagcggaaccgactactttgggtgtccgtgtttccttttattcttatattggctgcttatggtgacaattacagaattgttaccatatagctattggattggccatccggtgtgcaatagagctattatatacctatttgttggctttgtgccactaaccttaaaatctataaccaccctcgactttatactaaccctcaatacagtcaaac

SEQ ID NO: 1176 - DNA, 748 bp, Coxsackievirus
  A4,isolate HK458564/2016 polyprotein gene, complete1
tttaaaaccaagctgtgggttgtacccactcacagggcccactgggcgctagcactctgattccgcggaatctttgtgcgcctgttttataacccctcccccgatttgtaatttagaagtaatgcacaccactgatcaacagcaagcgtggcgcgccagccatgttcagatcaaatacttctgttttcccggactgagtatcaatagactgctcacgcggttgaaggagaaaacgttcgttacccggctaactacttcgagaaacctagtagcaccatcgaaactgcagagtgtttcgctcagcactttccccgtgtagatcaggtcgatgagtcactgcaatccccacgggcgaccgtggcagtggctgcgttggcggcctgcctatgggcttgcccataggacgctctaatgtggacatggtgtgaagagtctattgagctagttggtagtcctccggcccctgaatgcggctaatcctaactgcagagcgcataccctcaatccagggggtggtgcgtcgtaacgggcaactctgcagcggaaccgactactttgggtgtccgtgtttccttttattcttatattggctgcttatggtgacaattgagagattgttgccatatagctattggattggccatccagtgtctaacagagcaattgtatacttgtttgttggattcgttccactgtcatatacatccactaacaccttatactatattacaaaattgaacacaagaaa

SEQ ID NO: 1177 - DNA, 748 bp, Human enterovirus sp.
  90, isolate F950027, complete genome.1
tttaaaacagctctagggttgttcccaccctagaggcccaagtggcggctagcactctggtattacggtacctttgtgcgcctgttttatatcccttcccccatgtaacttagaagatattaaacaaagttcaataggagggggtacaaaccagtgccaccacgaacaaacacttctgtttccccggtgaagctacatagactgttcccacggttgaaagtggcagatccgttatccgctttggtacttcgagaaacctagtaccaccttggaatcttcgatgcgttgcgctcagcactcaaccccagagtgtagcttaggtcgatgagtctggacgatcctcactggcgacagtggtccaggctgcgttggcggcctacctgtggcgaaagccacaggacgctagttgtgaacaaggtgtgaagagtctattgagctaccaaagagtcctccggcccctgaatgcggctaatcccaaccacggagcaagtgcccacaaaccagtgggtggcttgtcgtaatgcgtaagtctgtggcggaaccgactactttgggtgtccgtgtttccttttatttttatcatggctgcttatggtgacaatctaagattgttatcatatagctattggattggccatccggtgactaacagagatcttgcatacctgtttgttggttttactaaactagatatagttacatttaaaactcttctttatatcatacagttgaatagtagaaagagaaa

SEQ ID NO: 1178 - DNA, 748 bp, Enterovirus sp.
  A71 gene for polyprotein, polyprotein region,strain1
ttaaaacagcctgtgggttgcacccacccacagggcccactgggcgctagcaccctgattctgcggaatctttgtgcgcctgttttacaacccttcccccgatttgtaatttagaagcaacgaacctcaccgatcaatagtaggcgtggcgcgccagctacgtcttgatcaagcacttctgtttccccgggctgagtatcaatagactgcttgcgcggtcgaaggagaaaacgctcgttatccggctaactacttcgagaaacccagtaacaccattgaaactgcagagtgtttcgctcagcacttcccccgtgtagatcaggtcgatgagtcactgcaatccccacgggcgaccgtggcagtggctgcgttggcggcctgcctatggggcaacccataggacgctctaaggtggacatggtgtgaagagtctattgagctagttagtagtcctccggcccctgaatgcggctaatcctaactgcggagcgcatgccctcaaaccagagggtggtgcgtcgtaatgggcaactctgcagcggaaccgactactttgggtgtccgtgtttccttttattctcttaatggctgcttatggtgacaattaaggaattgttaccatatagctattggattggccatccggtgtgtagtagagctattatttatctatttgttggttttgtaccattaaacttaaggtctgtcaccactttacaatatatactgatcctcaatacggttaagc

SEQ ID NO: 1179 - DNA, 748 bp, Enterovirus sp.
  A71 partial CDS gene for polyprotein,strain1
gcgcccagtgggccctgtgggttgcacccacccacagggcccactgggcgctagcactctggcactaaggtacctttgtgcgcctgttttatttcccttcccccaaagtaatttagaagttatgcaccaacgatcaatagcaggtgtgacacaccagtcatatcttgatcaagtactcctgtttccccggaccgagtatcaataagctgctcgcgcggctgaaggagaaaacgttcgttacccgaccaactacttcgagaagcttagtaccaccatgaacgaggcagagtgtttcgttcagcacaaccccagtgtagatcaggctgatgagtcactgcaaaccccatgggcgaccatggcagtggctgcgttggcggcctgcccatggagaaatccatgggacgctctaattctgacatggtgtgaagagcctattgagctagttggtagtcctccggcccctgaatgcggctaatcctaactgcggagcacatgctcacaaaccagtgggtggtgtgtcgtaatgggtaactctgcagcggaaccgactactttgggtgtccgtgtttccttttattcttatgttggctgcttatggtgacaatcaaagaattgttaccatatagctattggattggccatccggtgtgcaacagagcaattgtttacctatttgttggttttgtaccactatcactgaagtctgtgatcactctcaaattcattctgaccctcaactcaatcaaac

SEQ ID NO: 1180 - DNA, 748 bp, Unknown
  Description of Unknown: Human coxsackievirus A13, isolate CV-A13_68095, complete genome.1 sequence
ttaaaacagctctggggttgttcccaccccagaggcccacgtggcggccagtacaccggtatcacggtacccttgtacgcctgttttatactccctttcccccgtaacttagaagcaataaaaccaagttcaatagaaagggggtacaaaccagtaccaccacgaacaagcacttctgtttccccggtgatgttgtatagactgtttccacggttgaaaacgactgatccgttatccgctcttgtacttcgagaagcctagtatcatcttgggatcttcgatgcgttgcgctcaacactcgaccccggagtgtagcttaggccgatgagtctggacgttccccaccggcgacggtggtccaggctgcgttggcggcctacctgtggtccaaagccacaggacgctagttgtgaacaaggtgtgaagagcctattgagctacttgagagtcctccggcccctgaatgcggctaatcccaaccacggagcaggtggttgcaatccagcaactagcctgtcgtaacgcgcaagtctgtggcggaaccgactactttgggtgtccgtgtttccttttatttttcattggctgcttatggtgacaatctcagattgttatcataaagcgagttggattggccatccggtgaaaatcagatcgattatttacctttttgttggatttacacctttaacattacacactttgaaactcattgaaattgtactgttgatacggtattactatcaca

SEQ ID NO: 1181 - DNA, 748 bp, Unknown
  Description of Unknown: Human coxsackievirus A13, isolate CV-A13_67001, complete genome.1 sequence
ttaaaacagctctggggttgttcccaccccagaggcccacgtggcggccagtacaccggtatcgcggtacccttgtacgcctgttttatactccctttccccgtaacttagaagcaatgaaaccaagttcaatagaaagggggtacaaaccagtaccaccacgaacaagcacttctgtctccccggtgaggtcgtatagactgttcccacggttgaaaatgactgatccgttatccgctcttgtacttcgagaagcctagtaccaccttggaatcttcgatgcgttgcgctcagcactcaaccccggagtgtagcttgggctgatgagtctggacattccccaccggcgacggtggtccaggctgcgttggcggcctacctgtggcccaaagccacaggacgctagttgtgaacaaggtgtgaagagcctattgagctacatgagagtcctccggcccctgaatgcggctaatcccaaccacggagcaggcgattgcaatccagcaattagcctgtcgtaacgcgtaagtctgtggcggaaccgactactttgggtgaccgtgtttccttttattcttacattggctgcttatggtgacaatcatagattgttatcataaagcgagttggattggccatccagtgagaattagatcgatcatctacctttttgttggatttacacctttaaaaccacacagcttgaatctcatcaaaattgtattgttgatacgacattattatcatt

SEQ ID NO: 1182 - DNA, 748 bp, Unknown
  Description of Unknown: Human coxsackievirus A24, strain PUR82-10686 polyprotein gene,1 sequence
ttaaaacagctctggggttgttcccaccccagaggcccacgtggcggccagtacaccggtatcgcggtacccttgtacgcctgttttatactcccttccccccgtaacttagaagcatataacacaagttcaatagaagggggtgcaaaccagcaccaccacgaacaagcacttctgtttccccggtgagatcacatagattgttcccacggtcgaaagtgatcagtccgttatccgctcttgtacttcgagaagcctagtaccttcttggaatcttcgatgcgttgcgctcagcactcaaacccagagtgtagcttaggccgatgagtctggacattccccaccggtgacggtggtccaggctgcgttggcggcctacctgtgacccaaagtcacaggacgctagttgtgaacaaggtgagaagagcctattgagctacaagagattcctccggcccctgaatgcggctaatcccaaccatggagcaggtggctgcaaaccagcagacggcctgtcgtaacgcgcaagtccgtggcggaaccgactactttgggtgtccgtgtttcctttattttttattgtggctgcttatggtgacaatcattgattgttatcataaagcgaattggattggccatccagcgataattaaccagaccatttactagtttgttggatttactccactgacattctaaacactcaatctcatagaagtggtgaaattaattggataatttaactaca

SEQ ID NO: 1183 - DNA, 748 bp, Unknown
  Description of Unknown: Human coxsackievirus A13 strain ARG98-10614, complete genome.1 sequence
ttaaaacagcctgtgggttgttcccaccccagaggcccacgtggcggctagtactccggtattacggtacccttgtacgcctgttttatactcccttcccccgcaacttagaagttttacaaaactcgttcaacagaagggggtacaaaccagtaccaccacgaacaagcacttctgtttccccggtgacgttgtatagactgttcccacggtcgaaagcgactgatccgttatccgctctggtacttcgggaagcctagtagcaccttgggatcttcgacgcgttgcgttcaacactcaaccccggagtgtagcttaggtcgatgagtctggacgctcctcaccggcgacggtggtccaggctgcgttggcggcctacctgtggtccaaagccacaggacgctagttgtgaacaaggtgtgaagagcctactgagctacctgagagtcctccggcccctgaatgcggctaatcctaaccacggatcaggtgattgcaaaccagcaattggcctgtcgtaatgcgcaagtctgtggcggaaccgactactttgggtgtccgtgtttccttttattttaaaaatggctgcttatggtgacaatcatagattgttatcataaagcgagttggattggccatccggtgaaagtaaagtatattatctacttgtttgtgggatttactcctataactgcatacacttatcatctcattacgatcacactattgattagatcctgttaccaca

SEQ ID NO: 1184 - DNA, 748 bp, Unknown
  Description of Unknown: Human coxsackievirus A21 strain BAN00-10542 polyprotein gene,1 sequence
ttaaaacagcctgtgggttgttcccaccccagaggcccacgtggcggctagtactctggtatcgcggtacctttgtacgcctgttttatactcccttccccatgtaactttagaagcaattcaccaagttcaatagagggggtacaagccagtaccaccacgaacaagcacttctgttaccccggtgagtttgcataagctgtgcccacggctgaaagtaaatgatccgttatccgcttgagtacttcgagaagcctagtatcaccttggaatcttcgacgcgttgcgctcaacactctaccccgagtgtagcttaggctgatgagtctgggcatcccccaccggcgacggtggcccaggctgcgttggcggcctacccatggccaacgccatgggacgctagttgtgaacaaggtgtgaagagcctattgagctactcaagagtcctccggcccctgaatgcggctaatcctaaccatggagcaagtggccccaacccaggggatggcttgtcgtaacgcgcaagtccgtggcggaaccgactactttgggtgtccgtgtttccttttattttatatatggctgcttatggtgacaatcacagattgttatcataaagcgaattggattggccatccggtgaaatataagcacattatttatatctttgctggattcgctccgttgacacattcttcaccaaagttgatttatacagtcttagtaattagaaatcaccacttcagtc

SEQ ID NO: 1185 - DNA, 748 bp, Unknown
  Description of Unknown: Human coxsackievirus A20 strain MOR83-10617 polyprotein gene,1 sequence
ttaaaacagcctgtgggttgttcccaccccagaggcccacgtggcggctagtactccggtattacggtacccttgtacgcctgttttatactcccttcccctgtaacttagaagcaccgaacacaagttcaatagaagggggtacaaaccagtaccaccacgaacaagcacttctgtttccccggtgaagttgtattaaactgttcccacggttgaaagcggctgatccgttatccgctcatgtacttcgggaagcctagtaccatcttggaatcttcgatgcgttgcgctcagcactcaaccccagagtgtagcttaggtcgatgagtctggacaaacctcactggcgacagtggtccaggctgcgttggcggcctacctgtggcccaaagccacaggacgctagttgtgaacaaggtgtgaagagcctactgagctacatgagagtcctccggcccctgaatgcggccaatcccaaccacggagcaggcgactacaagccagtggttagtctgtcgtaatgcgcaagtctgtggcggaaccgactactttgggtgtccgtgtttccttttattttgacattggctgcttatggtgacaatcatagattgttatcataaagcgaattggattggccatccggtgagagtcaaaactattatctacctttttattggatttactccactgaacgcttataccccagtccttattagacttgcattgttgattagatatcactattata

SEQ ID NO: 1186 - DNA, 748 bp, Human poliovirus 2
  isolate CHN1025 polyprotein gene, complete cds.1
ttaaaacagctctggggttgtacccaccccagaggcccacgtggcggccagcactccggtattacggtacccttgtgcgcctgttttatactccctctcccgcaacttagaagcacgaaaccaagttcaatagaagggggtacaaaccagtaccaccacgaacaagcacctctgtttccccggtgacattgcatagactgctcacgcggttgaaagtgatcgatccgttacccgcttgtgtacttcgaaaagcctagtatcgccttggaatcttcgacgcgttgcgctcagcacccgaccccggggtgtagcttaggctgatgagtctggacattcctcaccggtgacggtggtccaggctgcgttggcggcctacctatggctaacgccataggacgctagttgtgaacaaggtgtgaagagcctattgagctacataagagtcctccggcccctgaatgcggctaatcctaaccacggagcaggcggtcgcgaaccagtgactggcttgtcgtaacgcgcaagtctgtggcggaaccgactactttgggtgtccgtgtttcctgttatttttatcatggctgcttatggtgacaatcagagattgttatcataaagcgaattggattggccatccggtgagtgttgtgtcaggtatacaaccgtttgttggaaccactgtgttagctttacttctcatttaaccagttaatcaaaaacaatacgaggacaaaacaacaatactaca

SEQ ID NO: 1187 - DNA, 748 bp, Human poliovirus 2
  strain NIE1519322, complete genome.1
ttccgctcctctggggttgttcccaccccagaggcccacgtggcggctagtactccggtattacggtacccttgtacgcctgttttatactcccttccccgcaacttagaagaattaaaccaagttcaatagaagggggtacaagccagtaccaccacgaacaagcacttctgtttccccggtgacgccgtatagactgtacccacggttgaaaacgactgatccgttatccgctttcgtacttcgagaagcctagtatcatcttgggatcatcgatgcgttgcgctcagcactcaaccccggggtgtagcttaggccgatgagtctggacattcctcaccggtgacggtggtccaggctgcgttggcggcctacctgtggcccaaagccacaggacgctagttgtgaacaaggtgtgaagagcctattgagctacgaaagattcctccggcccctgaatgcggctaatcccaaccacggagcaagtgctcgcacaccagtgagtagcttgtcgtaacgggtaactctgtggcggaaccgactactttgggtgtccgtgtttcctgttatttttatcatggctgcttatggtgacaatcagagattgttatcataaagcgaattggattggccatccggtgagcgttgtgtcaggtatacaactgtttgttggaaccactgtgttagctttacttctcatttaaccaatttatcaaaaataatacgaggataaaacaacaatactaca

SEQ ID NO: 1188 - DNA, 748 bp, Human poliovirus 3
  strain NIE1219535, complete genome.1
gttaaaacagctctggggttgttcccaccccagaggcccaagtggcggctagtactccggtatcacggtacccttgtacgcctgttttatactcccttcccccgtaacttagaagagttaaaccaagttcaatagaagggggtacaaaccagtaccaccacgaacaagcacttctgtttccccggtgatattgtatagactgtacccacggtcgaaaatgattgatccgttatccgctctcatacttcgagaagcctagtatcatcttggaatcttcgatgcgttgcgctcggcactcgatcccggagtgtagcttaggtcgatgagtctggacactcctcaccggtgacggtggtccagactgcgttggcggcctacctgtggtccaaagccacaggacgctagttgtgaacaaggtgtgaagagcctattgagctatgagagagtcctccggcccctgaatgcggctaatcccaaccacggagcgagagtgcgcaagccagcgtatatctcgtcgtaacgcgcaagtctgtggcggaaccgactactttgggtgtccgtgtttccttttatttttgtattggctgcttatggtgacaatcacagattgttatcataaagcgaattggattggccatccggtgaaagtgaaatacattatttgcttatttattggattcagtccacctaattgctatactcacgaacccaccacagccgttttgttaactgaaagccggtaccaata

SEQ ID NO: 1189 - DNA, 748 bp, Human poliovirus 3
  strain PAK1019536, complete genome.1
tggggttaaaacagctctggggttgttcccaccccagaggcccacgtggcggctagtactctggtatcatggtacctttgtacgcctgttttatacccctaccccacgtaactttagaagcaactcaacaagttcaatagggggggtacaaaccagtaccaccacgaacaagcactcctgttaccccggtgatcttgcataagctgtgcccacggctgaaggcgagagatccgttatccgcttgagtacttcgagaagcctagtatcaccttgggatcttcgacgcgttgcgctcagcactccacccgagtgtagcttaggctgatgagcctgggcattccccaccggcgacggtggcccaggctgcgttggcggcctacccatggctaacaccatgggacgctagatgtgaacaaggtgtgaagagcctattgagctactcaagagtcctccggcccctgaatgcggctaatcccaaccacggagcaggtgtcttcaacccagaaggtagcctgtcgtaacgcgtaagtctgtggcggaaccgactactttgggtgtccgtgtttccttttatcttttatatggctgcttatggtgacaatcacagattgttatcataaagcgatttggattggccatccggtgaagtacaaacacattatctacttgtttgttggatttactccactcacacaccccacccccaatataacatctattgttttgttaacaagaaattactttcgaa

SEQ ID NO: 1190 - DNA, 749 bp, Human cosavirus
  B1 polyprotein gene, complete cds.1
ttgccagttttttgaaacgtgtggtttgacgtctaaccattatggcagtgggtggagtactgcaaagatgtcaccgtgctttacacggtttttgaaccccacaccggctgtttggcgcttgcaggacagcaggtttattttcttttaactctctctttctagccacacacgatctatgtgtgtgggcggagtgatactcccgttccttcttggacaggcggcctccacgccctttgtggatcttaaggctaccaagtcactggtgttggaaagtgaagagaaaggagttccttgggaactacatgtggcattgacagaggttgtagcgatgctgtgtgtgtgtgcggattacccccgtggcgacacggaccccacaggccaaaagccctgtccgaaaggacccacacagtggagcaaccccagctcccctcttcaatgttttgtgttagcaaccttggtattattttctctcaagcttccaatacaccgggccccaaagatgtcctgaaggtaccccgtgtatctgaggatgagcaccatcaactacccggacttgttctttcgagaacagacgcatgtggtaacccagccccgatcctaaggggtcggggcttttgctcactcagcacaggatctgatcaggagacctcccccccctgctttacagggggcgggggtttaaaaattgcccaaggcctggcaaataacctaggggactaggttttcctttttattttaaagttgtcaat

SEQ ID NO: 1191 - DNA, 749 bp, Human enterovirus sp.
  90 polyprotein gene, complete cds.1
ttaaaacagctcttagggttgttcccaccctagaggcccacgtggcggctagcactctggtatcacggtacctttgtgcgcctgttttatacccccctcccccatgtaacttagaagctattaaataaagttcaatagaagggggtacaaaccagtaccaccacgaacaagcacttctgtttccccggtgaagctacatagactgttcccacggttgaaagtggcagatccgttatccgctttggtacttcgagaaacctagtatcatcttggaatcttcgatgcgttgcgttcagcactcaaccccagagtgtagcttaggtcgatgagtctggacgatcctcactggcgacagtggtccaggctgcgttggcggcctacctgtggcgaaagctacaggacgctagttgtgaacaaggtgtgaagagtctattgagctatcaaagagtcctccggcccctgaatgcggctattcccaaccacggagcaagtgctcacaaaccagtgagtggcttgtcgtaacgcgcaagtctgtggcggaaccgactactttgggtgcccgtgtttccttttatttttatcatggctgcttatggtgacaatctaagattgttatcatatagctattggattggccatccggtgactaacagagatatcatatattcatttgttggttttgttaaactagactcaactacattcaagtctcttctcttcatcatacaattgaataatagaaagagaaa

SEQ ID NO: 1192 - DNA, 749 bp, Enterovirus sp.
  A90,isolate PSH40F/XJ/CHN/2011, complete genome.1
ttaaaacagctctgggggttgttcccaccctagaggcccacgtggcggctagcactctggtatcacggtacctttgtgcgcctgttttatatccctttccccatgcaacttagaagttttttaaacaaagttcaatagaagggggtacaaaccagtgccaccacgaacaagcacttctgtttccccggtgaagctgcatagactgtccccacggttgaaagcggcagatccgtcatccgctttggtacttcgagaaacctagtatcaccttggaatcttcgatgcgttgcgctcagcactcaaccccagagtgtagcttaggttgatgagtctggacaatcctcactggcgacagtggtccaggctgcgttggcggcctacctgtggtgaaaaccacaggacgctagatgtgaacaaggtgtgaagagtctattgagctaccaaagagtcctccggcccctgaatgcggctaatcctaaccacggagcaagtacccacaaaccagtgggcagcttgtcgtaacgcgcaagtctgtggcggaaccgactactttgggtgtccgtgtttcctttttattttatcatggctgcttatggtgacaatctaagattgttatcatatagctattggattggccatccggtgactaacagagatattatatacctatttgttggttttgttagattaaatactatcacattcaaaactcttctttatatcatacaattgaacagtagaaagagaaa

SEQ ID NO: 1193 - DNA, 749 bp, Human enterovirus sp.
  71isolate 237-TW86 polyprotein gene, complete1
ttaaaacagcctgtgggttgttcccacccacagggcccactgggcgctagcactctgatttcacgaaatccttgtgcgcctgttttatatcccttccccccagtctgaaacatagaagcaatgcgcatcactgatcaatagcaggcgtaacgcgccagttacgtcatgatcaagcacatctgtctccccggaccgagtatcaatagactgcttgcgcggttgaaggagaaacagttcgttacccggctaactacttcgagaagcccagtagcaccatggaagctgcagggtgtttcgctcagcacttcccccgtgtagatcaggtcgatgagtcactgcaacccccacaggcgactgtggcagtggctgcgttggcggcctgcctatggggagacccataggacgctctaatgtggacatggtgtgaagagcctattgagctagttagtagtcctccggcccctgaatgcggctaatcctaactgcggagcacacgccctcaacccagagggtagtgtgtcgtaacgggcaactctgcagcggaaccgactactttgggtgtccgtgtttcttattattcttatattggctgcttatggtgacaattacagaattgttaccatatagctattggattggccatccggtgtgcaatagagctgttatatacctatttgttggttttgtgccactgactttaaaatctatagttactcttaatttcatattggctctcaacacaattaaac

SEQ ID NO: 1194 - DNA, 749 bp, Coxsackievirus
  A16 gene for polyprotein,isolate1
ttaaaacagcctgtgggttgttcccacccacagggcccactgggcgctagcactctggtattacggtacctttgtgcgcctgttttatgccccttaccccttaaattggtaacttagaagttttacatacctgcgaccaatagcgggcatgacgcaccagccatgtcttggtcaagcacttctgttcccccggactgagtatcaatagactgctcacgcggtcgaaggagaaaacgttcgttatccggctggctacttcgagaaacccagtaacaccatgaaagttgcagagtgtttcgctcagcactacccccgtgtagatcaggtcgatgagtcactgcgaaccccacgggcgaccgtggcagtggctgcgctggcggcctgcccatggggtgacccatgggacgctctaatacagacatggtgtgaagagtctattgagctagtcagtagtcctccggcccctgaatgcggctaatcctaactgcggagcacatgccctcaatccagggggtggtgtgtcgtaacgggtaactctgcagcggaaccgactactttgggtgtccgtgtttccttttattcctatcatggctgcttatggtgacaattgaaagattgttaccatatagctactggattggccacccggtgtctaacagagctattgtttatctatttgttgggtacgtccttcttgactataaggcccttcagactcttaagtacatcttgtacctcaatcaaaagag

SEQ ID NO: 1195 - DNA, 749 bp, Coxsackievirus
  A8,isolate HZ040/SD/CHN/2015 polyprotein gene,1
ttaaaacagcctgtgggttgtacccacccacagggcccactgggcgccagcactctgattctacggaatctttgtgcgcctgttttataatcccctccccccaagtttgtaatttagaagcaaagtaccgtaacgatcaacagcaggcgtggcgcaccagccatgtctcgatcaagcacttctgttcccccggacagagtatcaatagactactcacgtggttgaaggagaaaacgtccgttatccggctaactacttcgagaaacctagtaacaccattgaaactgcagagcgtttcgctcagcacttaccccgtgtagatcaggtcgatgagtcactgcattccccacgggcgaccgtggcagtggctgcgttggcggcctgcctatggggtcacccataggacgctctaatgtggacatggtgcgaagagtctattgagctagttagtagtcctccggcccctgaatgcggctaatcctaactgcggagcgtatgccctcaaaccagggggtggtgcgtcgtaacgggtaactctgcagcggaaccgactactttgggtgtccgtgtttccttttatttccttactggctgcttatggtgacaattgaagaattgttgccatatagctattggattggccatccggtgtgtaacagagcaatcatctatttgttcgtcgggtatatcccactaacgctcaactcttttaacacattacaatacatactaatcctaaatacaagaaa

SEQ ID NO: 1196 - DNA, 749 bp, Human enterovirus sp.
  99,strain BAN00-10461 polyprotein gene, complete1
ttaaaacagcctgtgggttgttcccaccccagaggcccacgtggcggccagtactccggtattacggtacccttgtacgcctgttttatactccctttccctagtaacttagaagttgtacaattaagttcaatagaagggggtacaaaccagtaccaccacgaacaagcacttctgtttccccggtgaagttgcatagactgtccccacggttaaaagtgactgatccgttatccgctcatttacttcgggaagcctagtatcatcttgggatcttcgatgcgttgcgctcaacactcaaccccagagtgtagcttaggtcgatgagtctggacactccccactggtgacagtggtccaggctgcgttggcggcctacctgtggtccaaagccacaggacgctagtagtgaacaaggtgtgaagagcctactgagctaattgagagtcctccggcccctgaatgcggataatcctaaccacggagcaggtgatcacaatccagtgattggcctgtcgtaatgcgtgagtctgtggcggaaccgactactttgggtgtccgtgtttcctttttactcttattatggctgcttatggtgacaatcatagattgttatcataaagcgaattggattggccatccggtgagaattaaatcgctaatatatctatttgttggatttaccaaaatcaactacagaacactagccttaattcgaatcgtgttactgatcagattccaccatcaca

SEQ ID NO: 1197 - DNA, 749 bp, Unknown
  Description of Unknown: Human coxsackievirus A20 serotype CAV20a, complete genome.1
ttaaaacagctctggggttgttcccaccccagaggcccacgtggcggctagtactctggtattacggtacctttgtacgcctgttttatactcccttcccctccgtaacttagaagcatgagaatcaagttcaatagaagggggtacaaaccagtaccaccacgaacaagcacttctgtcaccccggtgaggttgtatagactgtccccacggttgaaagcgactgatccgttatccgctcaattacttcgggaagcctagtaccatcctggaatcttcgatgcgttgcgctcagcactcaaccccagagtgtagcttaggccgatgagtctggacaatcctcactggcgacagtggtccaggctgcgttggcggcctacctgtggtccaaagccacaggacgctagttgtgaacaaggtgcgaagagcctactgagctaattgagagtcctccggcccctgaatgcggctaatcccaaccacggagcaggcggttgcaaaccagcaactggcttgtcgtaacgcgaaagtctgtggcggaaccgactactttgggtgtccgtgtttccttttattcttatgatggctgcttatggtgacaatcgttgattgttatcataaagcgaattggattggccatccggtgaaaatcaaatctattgtttacctgttcattgggttcactccactaacttcacacactatatatctcattaaggtcgtattactagtaaggaattatcaccaaa

SEQ ID NO: 1198 - DNA, 749 bp, Human poliovirus 2
  strain NIE0711441, complete genome.1
ttaaaacagctctggggttgttcccaccccagaggcccacgtggcggctagtactctggtattacggtacccttgtacgcctgttttatactcccttccccgtaacttagaagaaataaaccaagttcaatagaagggggcacaaaccagtgtcaccacgaacaagcacttctgtttccccggtgatattgtatagactgtacccacggttaaaagcgattgatccgttatccgctcttgtacttcgaaaagcctagtatcatcttggaatcttcgatgcgttgcgctcaacactcaaccccagagtgtagcttaggtcgatgagtctggacattccccaccggcgacggtggtccaggctgcgttggcggcctacctgtggcccaaagccacaggacgctagttgtgaacaaggtgtgaagagcctattgagctgcaagagagtcctccggcccctgaatgcggctaatcccaaccacggagcaagtgctcacacaccagtgagtggcttgtcgtaacgcgcaagtctgtggcggaaccgactactttgggtgtccgtgtttcctgttatttttatcatggctgcttatggtgacaatcagagattgttatcataaagcgaattggattggccatccggtgagtgttgtgtcaggtatacaactgtttgttggaaccactgtgttaactttacttctcatttaaccaattaatcaaaaacaatacgaggataaaacaacaatactaca

SEQ ID NO: 1199 - DNA, 749 bp, Human poliovirus 2
  strain EGY93-034, complete genome.1
ttaaaacagctctggggttgttcccaccccagaggcccacgtggcggccagtacaccggtattacggtacccttgtacgcctgttttatactcccttccccctgtaacttagaagctcaagaatccaagttcaatagaagggggtacaaaccagtaccaccacgaacaagcacttctgtttccccggtgaagttgcatagactgttcccacggttgaaagtgactgatccgttatccgctcaactacttcgagaagcccagtatcatcttggaatcttcgatgcgttgcgctcagcactcgaccccggagtgtagcttaggctgatgagtctggacgttccccactggtgacagtggtccaggctgcgttggcggcctacctgtggtccaaagccacaggacgctagttgtgaacaaggtgtgaagagcctattgagctaattgagaatcctccggcccctgaatgcggctaatcccaaccacggagcaggtggttacaacccagtaactggcctgtcgtaacgcgtaagtctgtggcggaaccgactactttgggtgtccgtgtttccttttattcctataatggctgcttatggtgacaatcacagattgttatcataaagcgaattggattggccatccggtgagagttaagacaattatccacttgttcattggatttacccctctgactaattacacactcaaccttattagaattgtagttctagtgagatactactgtcata

SEQ ID NO: 1200 - DNA, 749 bp, Human poliovirus 2
  strain NIE0110767, complete genome.1
ttaaaacagctctggggttgttcccaccccagaggcccacgtggcggctagtactccggtattacggtacccttgtacgcctgttttatactcccttccccgtaacttagaagcaataaatcaagttcaccaggagggggtacaaaccagtaccaccacgaacaagcacttctgtttccccggtgacgttgcatagactgtccccacggttgaaagcgactgatccgttatccgctcgtgtacttcgagaagcctagtatcatcttggaatcttcgatgcgttgcgctcagcactcgaccccggagtgtagcttaggctgatgagtctggacattcctcaccggcgacggtggtccaggctgcgttggcggcctacctgtggctcaaagccacaggacgctagttgtgaacaaggtgtgaagagcctattgagctacacgagaatcctccggcccctgaatgcggctaatcccaaccacggagcaagtgctcacaaaccagtgagtggcttgtcgtaacgggtaactctgtggcggaaccgactactttgggtgtccgtgtttcctttttatttttgtatggctgcttatggtgacaatcagagattgttatcataaagcgtattggattggccatccggtgagtgttgtgtcaggtatacaactgtttgttggaaccactgtgttagctttacttctcatttaaccaattaatcaaaaacaatacgaggataaaacaacaatactaca

SEQ ID NO: 1201 - DNA, 750 bp, Rabbit picornavirus
  strain Rabbit01/2013/HUN, complete genome.1
ttccccttcccccttttcacggcccggccgcccgccgggtcgtcacccgttcagacacctacgggttatctgttcgggctataaatatgggcattcctcttcccccttccccttttgaagatgagtgcgcatattcttgactccgcctggattggccgcccaaggcgtgaacaagcagctaggccaccatgacactgcggtggtgtccgaacccgcgggtgccttcacgggcacctgtggtatgtaggactcccaccgtggtcttccctttccccctcaatctttccccctggttcgactaacgggaccagtgctggaacctgtccggtgaacggtatagcaggcccccccggcagaaacacccggtgcttaccccttaaggctagcccccttccatgaatttggttggggcaactagtgggtgtacagttggcgtgaaccctccggtctaggagtgctcttgcccaatcctctgtgtgtgccttgcagtagggactggcaatccttcgcgtaggtgatccgctgtgccatgccatcctggcgacaggaggcccagtgtgcgcaacctacgtcccttctgggtgctgcattgcattacctttggagtaagcttggtgtgccgaaaccccagggtttacgtaccactcgtggtgtgaggaatgtgccgcaggtaccccatccttgaggtgggatctgagcggtagctaattgtctagcaccactttcttccttttttctttgctggtcacg

SEQ ID NO: 1202 - DNA, 750 bp, Coxsackievirus
  A14 gene for polyprotein, polyprotein region,strain1
ttaaaacagctctggggttgtacccactcacagggcccactgggcgctagcactctgattctacggaatccttgtgcgcctgttttataaccccctcccaatatgtaacttagaagcagcacatactaccgatcaatagtgggcatggcgcaccagccatgtctcgatcaagcacttctgtttccccggactaagtatcaatagactgctcacgcggttgaaggagaaagcgtccgttacccggctaactacttcgagaaacccagtagcaccactgaagctgcagagtgtttcgctcagcacttcccccgtgtagatcaggtcgatgagtcaccgcaatccccacgggcgaccgtggcggtggctgcgtggcggcctgcctgtggggcaacccacaggacgctctaaagtggacatggtgcgaagagtctattgagctagttagtagtcctccggcccctgaatgcggctaatcctaactgcggagcgcatgccttcaaaccagatggtagtgcgtcgtaatgggcaactctgcagcggaaccgactactttgggtgtccgtgtttccttttattcttacattggctgcttatggtgacaatcacagaattgttaccatatagctattggattggccatccggtgtgtaatagagcaataatttactcttttgttgcttttgttccattgaccttcactacactgaacactttacagtacatacttcaactcaactccagaaagcaatc

SEQ ID NO: 1203 - DNA, 750 bp, Enterovirus sp.
  A120,strain TRT/2013-23196, complete genome.1
ttaaaacagcctatgggttgcacccacccatagggcccactgggcgctagcactctgattctacggaatctttgtgtgcctgttttatagtccctccccccgacttgtaacttagaagtaatgcaaaccactggtcaatagcaggcatgacgcaccagtcatgtcttgatcaagcacttctgtccccccgggctgagtatcaatagactgctcacgcggttgaaggagaaaacgctcgttacccggctaactacttcgagaaacctagtagcaccattgaaactgcagagcgtttcgctcagcactccccccgtgtagatcaggtcgatgagtcactgcactcctcacgggcgaccgtggcagtggctgcgttggcggcctgcctatggggtaacccataggacgctttaatgtggacatggtgcgaagagtctattgagctagttagtagtcctccggcccctgaatgcggctaatcctaactgcggagcacacgcccttaatccaaggggtagtgtgtcgtaatgggcaactctgcagcggaaccgactactttgggtgtccgtgtttccttttatttttatactggctgcttatggtgacaattgagagattgttaccatatagctattggattggccatccggtgtgcaacagagctattatctacctgtttgttggatatataccactcacagctgacaaaacccttatcacattattgtacatcctacacttgaactcaagaaa

SEQ ID NO: 1204 - DNA, 750 bp, Coxsackievirus
  A24,strain K282/YN/CHN/2013, complete genome.1
ttaaaacaagctgtggggttgttcccaccccagaggcccacgtggcggctagtactccggtattgcggtacccttgtacgcctgttttatactccctgcccccgtaacttagaagcacaaagaaatcaagttcaacagcagggggtacaaaccagtaccaccacgaacaagcacttctgttcccccggtgacgtcgcatagactgtgcccacggttgaaaacgattgatccgttaaccgctcttgtacttcgagaagcctagtatcacattggaatctacgatgcgttgcgctcagcactcaaccccagagtgtagcttaggctgatgagtctggacattcctcaccggtgacggtggtccaggctgcgttggcggcctacctgtggcccagagccacaggacgctagttgtgaacaaggtgtgaagagcctattgagctacaagagagtcctccggcccctgaatgcggctaatcccaaccatggagcaggtggtcacaatccagtgattggcctgtcgtaatgcgcaagtccgtggcggaaccgactactttgggtgtccgtgtttccttttattttacacttggctgcttatggtgacaatcatagattgttgtcataaagcaaattggattggccatccggtgaaaactaaatacgctatttacctgtttgttggatttataccttcaacttacaacacttattgtattatttgcattgtgttattgattagacaacaatactaca

SEQ ID NO: 1205 - DNA, 750 bp, Human poliovirus 2
  strain NIE0711199, complete genome.1
ttaaaacagctctggggttgttcccaccccagaggcccacgtggcggccagtactccggtattacggtacccttgtacgcctgttttatactcccttcccctgtaacctagaagaagtaaattaagttcaataggagggggtacaaaccagtaccaccacgaacaagcacttctgtttccccggtgacgttgtatagactgtgtccacggtcgaaagcaattgatccgttatccgctcttgtacttcgagaagcctagtaccagcttggaatcttcgatgcgttgcgttcagcactcaatcccagagtgtagcttaggttgatgagtctggacatccctcaccggcgacggtggtccaggctgcgttggcggcctacctgtggcccaaagccacaggacgctagttgtgaacaaggtgtgaagagcctattgagctacaagagagtcctccggcccctgaatgcggctaatcccaaccacggagcaagggtgcatgaaccaatgcatgccttgtcgtaatgcgtaagtctgtggcggaaccgactactttgggtgtccgtgtttccttttatttttatattggctgcttatggtgacaatcagagattgttatcataaagcgaattggattggccatccggtgagtgttgtgtcgggtatacaactgtttgttggaaccactgtgttaactttgcttcttatttaaccaattaatcaaaaacaatacgaggataaaacaacaataccaca

SEQ ID NO: 1206 - DNA, 750 bp, Human poliovirus 2
  strain NIE0811456, complete genome.1
ttaaaacagctctggggttgttcccaccccagaggcccacgtggcggctagtactccggtattccggtacccttgtacgcctgttttatactcccctcccccgtaacttagaagaaacaaaccaagttcactaggagggggtacaaaccagtaccaccacgaacaagcacttctgtttccccggtgatattgtatagactgtacccacggtcgaaaacgattgatccgttatccgcttctgtacttcgagaagcctagtaccactttggaatcttcgatgcgttgcgctcagcactcaaccccagagtgtagcttaggtcgatgagcctggactttcctcactggcgacagtggtccaggctgcgttggcggcctacctgtggcccaaagccacaggacgctagttgtgaacaaggtgtgaagagcctattgagctacaaaagagtcctccggcccctgaatgcggctaatcccaaccatggagcaagggtgtacgaaccagtacatatcttgtcgtaacgcgcaagtccgtggcggaaccgactactttgggtgtccgtgtttccttttattttcatactggctgcttatggtgacaatcatagattgttatcataaagcgaattggattggccatccggtgagtgttgtgtcaggtatacaattgtttgttggaaccactgtgtcagctttacttctcatttaaccaattaatcaaaaacaatacgaggataaaacaacaataccaca

SEQ ID NO: 1207 - DNA, 751 bp, Ljungan virus
  genomic RNA, nearly complete genome,strain: Fuz1.1
cgcggccatgtttgtaagcatggccgtagggaccccccggtgggctgggtgcacttctcgccttttaggtgggggtgtggctcggctaccaccactgggtggcaaccagttttcatgtaatagccaaacaagtaacattaacacctaagcttctggtgcaccaccctgtctggttgaagccgcttggaataaaattggatagctaaggtggattgtcaaacatgcatttctgtctcctggatatccttaatatccaggtaagggctgtacccgggcggtcctactcttcacaggagtctgcataggtggctttcacctctggacagtgcactccctcccgctccctcacccaagttagctggaacacagaatgaaaaatgagcgaacactagaaccaggtgtagcgaccacacatatgccagcggatttcccctagtggtaacactagcctctgggcccaaaaggcacgtctttgaccatatgtgtgcacaatcccagtgatggttctatctagtagtttatttagtaattttgtgaactggctcactgaacgtgagttggaggcttaggaatggcgggctgaaggatgccctgaaggtacccgtaggtaacgataagctcactatggatctgatcaggggcccaccagcatatttgctgggtagaagtcttcggaccttgggttaaaaaacgtctaggcccgtcccccagagggatctggggtttccctaataaccccaatactgacatt

SEQ ID NO: 1208 - DNA, 752 bp, Rosavirus C
  strain RRTPC2A polyprotein gene, complete cds.1
ggttcccgcccccacctccgtcacagcctttcgaggctgtgctggaacggcgacagggagtttagacttcttgccgctatgggttcttctgccccgtgttttggacgcccggcatggcgttaaactgtcattccccctaccctttccctatttgtaactaagttgtgcctcgcccagacaggctgctaagacgcttgttgctacagcatgtttggactagcgagctctccataagtaaacttttccacccccttgggtgtctttgcccttggggacggtctggagccccgttgtcttagacagagtgtgtcggtgcaggctttctgctctggacccatgccggccacaaactcccatcagtgttgtgaagacggtaggacacaagtgaacaggtacagggaactttcttggaatgtagcgattactgcaagtgagcggacctcccctggtggtaacaccagcctctcaggccaaaagccacggtgttaacagcacccttgcagtaggccactgccccgtggtctccaggatctttctctttactcctagtaatttgtgaatctagctgttctgaagcatactggtgcaaaggctaaggatgccctgaaggtacccacaggtaacgttaagacactgtggatctgatcaggggcctgaatactgaagctttacagaggtagttcaggttaaaaaacgtctatgcctttcccccacgggagtgggggttcccccacacttttatcacaggcact

SEQ ID NO: 1209 - DNA, 753 bp, Coxsackievirus
  A14,isolate PZ05Y/JS/2012, complete genome.1
tttaaaacaagctctggggttgtacccacccacagggcccactgggcgctagcactcttattctacggaatatttgtgcgcctgttttatagccctcccccattaagtaacttagaagtgatgtgcagcacagatcaatagcaggcatagcgcaccagctgtgtcttgatcaagcactcctgtttccccggactgagtatcaataaactgctcacgcggttgaaggagaaaacgttcgttacccggctaaccacttcgagaaacttagtaacaccattgaagctgtagagtgtttcgctcagcacttccccagtgtagatcaggctgatgagtcactgcgaccctcacgggcgaccgtggcagtggctgcgttggcggcctgcctatggggcaacccataggacgctctaaagtggacatggtgtgaagagtctattgagctggttagtagtcctccggcccctgaatgcggctaatcctaactgcggagcgcatgccctcaaaccagggggtggtgcgtcgtaacgggtaactctgcagcggaaccgactactttgggtgtccgtgtttccttttattctcatattggctgcttatggtgacaattgaagaattgttaccatatagctattggattggccatccggtgtgtaacagagcgattatcttctcttttattgcctttgtcccattgaccccaactgcgttaaacactctgcaatatatactctatcttaactctaggaagcgaac

SEQ ID NO: 1210 - DNA, 753 bp, Human enterovirus sp.
  99,strain OMA99-10696 polyprotein gene, complete1
ttaaaacagcctgtgggttgttcccaccccagaggcccacgtggcggctagtactctggtattacggtacccttgtacgcctgttttatactcccttcccatgtaacttagaagcaaataacacaagttcaatagaagggggtacaaaccagtaccaccacgaacaagcacttctgttaccccggtgaagttgcatagactgttcccacggttgaaagcgaccgatccgttatccgctcaagtacttcgagaagcctagtatcaccttggaatcttcgatgcgttgcgctcatcactcaaccccagagtgtagcttgggctgatgagtctggacgtccctcactggcgacagtggtccaggctgcgttggcggcctacctatggcccaaagccataggacgctagttgtgaacaaggtgtgaagagcctattgagctacttgagagtcctccggcccctgaatgcggctaatcccaaccacggatcaggtgattgcaaaccagcaattagcctgtcgtaacgcgcaagtctgtggcggaaccgactactttgggtgtccgtgtttccttttattttactattggctgcttatggtgacaatcattgattgttatcataaagcgaattggattggccatccggtgaaagtaaaacaggttatttacctttttgttggatttactgcattatctaagcacactccagatttaattcgtatcgttcttgcgattaggagagcacacttttccagca

SEQ ID NO: 1211 - DNA, 753 bp, Enterovirus sp.
  B,isolate NL/18-111/FAE/2018 polyprotein gene, complete1
ttgatcaaggcccagttggtgcactgggttgatcccacccacagggcccactgggcgcatgcactctggtatcacggtacctttgtgcgcctgttttatctcccctcccccccgtgtaatttagaagcataagcacaatgatcaatagacaacccagtgcaccaactgggccttgatcaagcacttctgttaccccgggccgactatcaataggctgctcacgtggctgaaggagaaaacgctcgttacccggccagttacttcgagaagcctagtaccaccatgaacgttgcgcagtgtttcgctccgcacaaccccagtgtagatcaggtcgatgagtcaccgcatcccccacgggtgaccgtggcggtggctgcgttggcggcctgcccatggggtaacccatgggacgctacaatactgacatggtgtgaagagtctattgagctaactggtagtcctccggcccctgaatgcggctaatcccaactgcggagcacgtgcttccaatccaggaggtagcgtgtcgtaacgggcaactctgcagcggaaccgactactttgggtgtccgtgtttcctttatctctttattggctgcttatggtgacaattgaaagattgttgccatatagctattggattggccatccggtatctaacagagcaatcatatacctgtttgttggatttgttccacttaacaaaacagagttccgtactttgtgttatattattaggttgaacacatcaaa

SEQ ID NO: 1212 - DNA, 753 bp, Human enterovirus C
  isolate V2-TOL cl1, complete genome.1
ttaaaacagctctggggttgttcccaccccagaggcccacgtggcggccagtacaccggtatcacggtacccttgtacgcctgttttatactccctctcccctgtaacttagaagcaaataaaccaagttcaatagaaagggggtacaaaccagtaccaccacgaacaaacacttctgtttccccggtgaggttgtataaactgtccccacggttgaaaacgactgatccgttacccgctcttgtacttcgagaagcctagtatcatcttggaatcttcgatgcgttgcgctcagcactcgaccccggagtgtagcttaggctgatgagtctggacgttccccaccggcgacggtggtccaggctgcgttggcggcctacctgtggcccaaagccacaggacgctagttgtgaacagggtgtgaagagcctattgagctacaagagagtcctccggcccctgaatgcggctaatcccaaccacggagcaggtggttgcaatccagcaactagcctgtcgtaacgcgcaagtctgtggcggaaccgactactttgggtgtccgtgtttccttttattcttacaatggctgcttatggtgacaatcatagattgttgtcataaagcgaattggattggccatccggtgaaagtcagatcaactatttatttgtttgttggagccactgtgttagctttacttctcatctaaccaattaatcaaaaacaatacgaggataaaacaacaacactaca

SEQ ID NO: 1213 - DNA, 753 bp, Enterovirus sp.
  D94,strain ANG/2010-23293, complete genome.1
ttaaaacagctctggggttgttcccaccccagaggcccacgtggcggctagtactccggtattacggtacccttgtacgcctgttttatactcccttcccccgtaacttagaagtaacacaaatccaagttcaatagaagggggtacaaaccagtaccaccatgaacaagcacttctgtttccccggtgaaatcatagactgtacccacggttgaaagtgatcgatccgtcatccgctcttgtacttcgagaagcctagtatcaccttggaatcttcgatgcgttgcgctcaacactcaaccccagagtgtagcttaggctgatgagtctggacactccccaccggcgacggtggtccaggctgcgttggcggcctacctgtggtccaaagccacaggacgctagttgtgaacaaggtgtgaagagcctattgagctacaggagagtcctccggcccctgaatgcggctaatcccaaccacggagcaggtggtcataatccaatgattggcctgtcgtaacgcgcaagtctgtggcggaaccgactactttgggtgtccgtgtttccttttattttatcattggctgcttatggtgacaatctaagattgccatcatatagcttttggattggccatccggtgatacttcgagttatttagcttgctgcttacatttattttaaacaacatccagttaccagcattcctattttgtttttctttcattctgagttatctaataagtagttaga

SEQ ID NO: 1214 - DNA, 754 bp, Coxsackievirus
  A10,strain 11-1415-1, complete genome.1
gagttcagacgtgtgccttccgatgtgggttgcacccacccacagggcccactgggcgctagcactctgataccacggtacctttgtgcgcctgttttatcaccctaccccacacgaaacttagaagcaatacataactgaccaatagtaggtgtggcgcaccagccacatcttggtcaagcacttctgtctccccgggttgagtatcaataagctgttcacacggctgaaggagaaaacacccgttacccggccaactacttcgagaaacctagtatcaccatgaacgttgcgaggtgtttcgctcagcacttcccccgtgtagatcaggccgatgagtcaccgcattccccacgggtgaccgtggcggtggctgcgttggcggcctgcctatgggttagcccataggacgccttaatactgacatggtgcgaagagtctattgagctagttggtagtcctccggcccctgaatgcggctaatcctaactgcggagcacatacccacaaaccagtgggcggtgtgtcgtaacgggtaactctgcagcggaaccgactactttgggtgtccgtgtttccttttatctttatattggctgcttatggtgacaatcagagaattgttaccatatagctactggattggccatccggtgtccaatagagctattatatacctgtttgttggattcaccccattgacctacaaatccctaaatactttgtgttatattttgaacttaaatacacgaaa

SEQ ID NO: 1215 - DNA, 754 bp, Enterovirus sp.
  C99,isolate YT31/SD/CHN/11, complete genome.1
ttaaaacagcctgtgggttgttcccaccccagaggcccacgtggcggctagtactccggtattacggtacccttgtacgcctgttttatatccccttcccctgtaacttagaagcagacaacacaagttcaatagaagggggtacaaaccagtaccaccacgaacaagcacttctgttaccccggtgacgttgcatagactgttcccacggtcaaaagcgatcgatccgttatccgctcaagtacttcgaaaagcctagtatcaccttggaatcttcgatgcgttgcgctcggcactcgatcccggagtgtagcttaggccgatgagtctggacgatcctcactggcgacagtggtccaggctgcgttggcggcctacctatggcccaaagccataggacgctagttgtgaacaaggtgtgaagagcctattgagctacttgagaatcctccggcccctgaatgcggctaatcccaaccacggatcaggtgattgcaatccagcaattggcctgtcgtaacgcgcaagtctgtggcggaaccgactactttgggtgtccgtgtttccttttaattttattgctggctgcttatggtgacaatcgtagattgttatcatagagcgaattggattggccatccggtgagattaaaacacattatttacctttttgttggatttaccacactatctacgtacactccagacttaatccgcatagtacttttaattagaagatcttatcattataaca

SEQ ID NO: 1216 - DNA, 754 bp, Human enterovirus sp.
  C99,isolate HT-XEBGH09F/XJ/CHN/2011, complete1
ttaaaacagctctggggttgttcccaccccagaggcccacgtggcggctagtactccggtatcgaggtacccttgtacgcctgttttatactcccttcccccgtaacttagaagccaaaaatacaagttcaatagaagggggtacaaaccagtaccaccacgaacaagcacttctgttaccccggtgatgttgcatagactgtccccacggtcgaaagcgattgatccgttatccgcttaggtacttcgagaagcctagtatcaccttggaatcttcgatgcgttgcgctcatcactcgaccccggagtgtagcttaggtcgatgagtctggacgatcctcactggcgacagtggtccaggctgcgttggcggcctacctatggcccaaagccataggacgctagttgtgaacaaggtgtgaagagcctattgagctacttaagagtcctccggcccctgaatgcggctaatcccaaccacggatcaggtgattgcaatccagcgattggcctgtcgtaacgcgcaagtctgtggcggaaccgactactttgggtgtccgtgtttccttttaattttattattggctgcttatggtgacaatcatagattgttatcataaagcgaattggattggccatccggtgaaaataaaacacattatctacctttttgttggatttactacactgtctacacacactccagatataatttatatagttcttttaatcaggagatcttatcattataaca

SEQ ID NO: 1217 - DNA, 754 bp, Human poliovirus 1
  strain ETH1319533, complete genome.1
tggggacaaagttaacagctctggggttgttcccaccccagaggcctacgtggcggctagtactccggtattacggtacccttgtacgcctgttttatactccccaccccgcaacttagaagaagctaatcaagttcaataggagggggtacaaaccagtaccaccacgaacaagcacttctgtctccccggtgacattgcatagactgtccccacggttgaaagcgatcgatccgttatccgctcttgtacttcgagaagcctagtaccatcttggaatcagcgatgcgttgcgctccgcactcaatcccagagtgtagcttaggctgatgagtctggacattcctcaccggcgacggtggtccaggctgcgttggcggcctacctgtggcccaaagccacaggacgctagttgtgaacaaggtgtgaagagcctattgagctataagagagtcctccggcccctgaatgcggctaatcccaaccacggatcaagggtgcacgaaccagtgtataccttgtcgtaacgcgcaagtctgtggcggaaccgactactttgggtgtccgtgtttccttttattgtttcaatggctgcttatggtgacaatcattgattgttatcataaagcgaattggattggccatccggtgaaagtgaaacatattgtttgcctccttattgggtctactccaatcgacctctttacctacaatcttattgccacagttttactggttagaagtgtgtttcaca

SEQ ID NO: 1218 - DNA, 755 bp, Bovine kobuvirus
  strain BKoV/EGY-1, complete genome.1
cgcacgttcgcgtcgtcgtaagtctggattcccaaggccaacttggtttaacttcggtttctggacaaatacaaagaacctcagtcctcttggtactttctcgcctgagtcaacaaagcgagaaacctgcccctctaacgccagacgagcggcataaaacttgaacttctggcacgctccactcttccctctcccaatcccatccccatcgcgctctcaaggtcgcgcaattctgggactagcccagatttaaaagttcctggcaccctttgcccctttaggcccttaaggcaggaactgaccttgtgctgtgacctcggtgcggaagtgctactgcgtagtgattgtaagctcctcttatggttctgccctggcaaggctatagagtactgtgatccgctgcggatgccatcctggtaacaggacccccagtgtgcgtaacagtatgttcacggctcaccgtgttcaccatgactggaacactgctttcgtgaaacagtgtgtgtccaatccctgtgatcagtatcaaccacaccacctaggaatgctaggaaggtaccccggttcgccgggatctgatcctaggctaattgtctacagtggtgctcctttattttctctccaaccatttattgttcacaactgcttgatcttgtgtttgctgcctttctctgctctcactgccattctcaagtgttcacactgtccaagctcctttggttgttttcatccacttgccattgtcaactcttgtc

SEQ ID NO: 1219 - DNA, 755 bp, Unknown
  Description of Unknown: Human coxsackievirus A14, strain G-14, complete genome.1 sequence
ttaaaacagcctgtgggttgtacccacccacagggcccactgggcgctagcacactgattctgcgggatctttgtgcgcctgttttatatcccctccccccaaactaggtaacttagaagattagcacttgtatgaccaatagtaggcgtgacgcgccagtcatgtcttggtcaagcacttctgtttccccggactgagtatcaataagctgcttgcgcggctgaaggagaaaacgttcgttacccggctaactacttcgagaaacctagtaacaccatgaaagttgcggagtgtttcgctcagcacttcccccgtgtagatcaggtcgatgagtcactgcaaaccccacgggtgaccgtggcagtggctgcgttggcggcctgcctatgggtcaacccataggacgctctaatacagacatggtgtgaagagtctattgagctagttagtagtcctccggcccctgaatgcggctaatcctaactgcggagcacacgcttgcaaaccagtgagtagtgtgtcgtaatgggcaactctgcagcggaaccgactactttgggtgtccgtgtttccttttattctcatactggctgcttatggtgacaattgaagaattgttactatatagctattggattggccatccggtgtgtaacagagcgataatctactcctttgttgcatttgttccactaacccttactacattagacattctacaatacatactttatctcaactccaagaaacgaac

SEQ ID NO: 1220 - DNA, 758 bp, Coxsackievirus
  A10,strain 11-691-1, complete genome.1
aacacataaccgaccaataaaacagcctgtgggttgcacccacccacagggcccattgggcgctagcactctggtaccacggtacctttgtgcgcctgttttatcaccctaacccccacgaaacttagaagtaacacataaccgaccaatagtaggtgtggcgcaccagccgcatcttggtcaagcacttctgtttccccgggttgagtatcaataagctgttcacacggctgaaggagaaaacacccgttacccgaccaactacttcgagaaacctagtaccaccatgaacgttgcaaggcgtttcgctcagcacttcccccgtgtagatcaggccgatgagtcaccgcattccccacgggtgaccgtggcggtggctgcgttggcggcctgcctatgggttagcccataggacgccttaatactgacatggtgcgaagagtctattgagctagttggtagtcctccggcccctgaatgcggataatcctaactgcggagcacatactcacaaaccagtgagctgtgtgtcgtaacgggcaactctgcagcggaaccgactactttgggagaccgtgtttccttttatctttatattggctgcttatggtgacaatcagagaattgttgccatatagctattggattggccatccggtgtctaatagagctattatatacctgtttgttggattcactccgctgacacataaatcccttaatactttgtgttatatcttgaacttaaacacacgaaa

SEQ ID NO: 1221 - DNA, 758 bp, Enterovirus sp.
  B93,isolate 99167/XZ/CHN/1999, complete genome.1
tacaaaaaagcaggctttaaaacagctctggggttgttcccacccacagggcccactgggcgctagcactctggtatcacggtacctttgtgcgcctgtttttccacccctccccatacgcaacttagaagagagactcaaccggtcaatagacagcctagtacaccaactaggttctgaccaagaacttctgtttccccggaccgagtatcaataggctgcttacgcggctgaaggagaaaacgttcgttacccggccaattacttcgagaaacctagtatcaccatggaagttgcgcagtgtttcgctccgcacaaccccagtgtagatcaggtcgatgagtcaccgcattccccacaggcgactgtggcggtggctgcgttggcggcctgcccgtggggcaacccacgggacgcttcaataccgacatggtgcgaagagtctattgagctaattggtagtcctccggcccctgaatgcggctaatcctaactgtggagcagatacccacgcgccagtgggcagtctgtcgtaatgggcaactccgcagcggaaccgactactttgggtgtccgtgtttccttttatcctcataatggctgcttatggtgacaattgaaagattgttgccatatagctattggattggccatccggtgactaacagagcaattatttacttgtttgttgggtttgtaccattgaactacaaggtccttaatactctaaactacattataagtctcaatacagtgca

SEQ ID NO: 1222 - DNA, 759 bp, Cosavirus JMY-2014
  isolate Cosa-CHN, complete genome.1
acatgggggagactgcatgtggcagtcttgaaacgtgtggtttgacgtctaccttatatggcagtgggtggagtactgcaaagatgtcaccgtgctttacacggtttttgaaccccacaccggctgtttgacgctcgtagggcagcaggtttattttcattaaaattcttactttctagctgcatgagttctattcatgcagacggagtgatactcccgttccttcttggacaggttgcctccacgccctttgtggatcttaaggtgaccaagtcactggtgttggaggtgaagatagagagtcctcttgggaatgtcatgtggctgtgccaggggttgtagcgatgccattcgtgtgtgcggatttcctctcgtggtgacacgagcctcacaggccaaaagccccgtccgaaaggacccgaatggtggagtgaccctgactcccccctgcatagttttgtgattaggaacttgaggaatttctgtcataaatctctatcacatcaggccccaaagatgtcctgaaggtaccctgtgtatctgaggatgagcaccaccgactacccggacttgcattagcagacacatgtggttgcccagccccacctcttcagaggtggggctttgctcactcagcacaggatctgatcaggagccccgctcgtgtgctttacactcgacgcggggttaaaaattgcccaaggcctggcacaacaacctaggggactaggttttcctatttttgtaaattatgtcaat

SEQ ID NO: 1223 - DNA, 759 bp, Coxsackievirus
  A16,strain S0470B polyprotein gene, complete cds.1
attggctcgagttacttaaaacagcctgtgggttgtacccacccacagggcccactgggcgctagcacactggttctgcgggacctttgtgcgcctgttttataacccttccctaagcagtaacttagaagctttgtacaatcatggccaatagtgggcgtggcgcgccagtcacgtcttggtcaagcacttctgtatccccggactgagtatcaatagactgctcacgtggttgaaggagaaaacgtccgttacccggctaactacttcgagaaacctagtagcaccatgaaagttgcggagtgtttcgttcagcacttcccccgtgtagatcaggtcgatgagtcactgtaaaccccacgggcgaccgtgacagtggctgcgttggcggcctgcccatggggtaacccatgggacgctctaatacagacatggtgcgaagagtctattgagctagttagcagtcctccggcccctgaatgcggctaatcctaactgcggagcgcgcaccctcaacccagggggcggcgcgtcgtaatgggcaactctgcagcggaaccgactactttgggtgtccgtgtttccttttattctttattggctgcttatggtgacaattgaaaagttgttaccatatagctattggattggccatccggtgtctaacagagctattgtttacctattcattggattcgtccctcttaatctcaaggtcattcaaactctcgattgcatattgctccttaactgtaagaa

SEQ ID NO: 1224 - DNA, 761 bp, Gallivirus A1
  strain turkey/M176/2011/HUN, complete genome.1
tccctacccaagccccagtacaccactatggagttctttatatcccagcgcgtggtggacgcactgtgaggtattccgataccaccccactcgcacttcctggatagtgcgttagatatgcccgacatatcgcttccaggaccaaagccccccttttctctttcccaaccagcttcgccactcaagctgtaattccatgtccggtctttccggccttagtatcatggaaatgtggtcgtgctcaaatgaaattgagttgacattgatcaatgaaagttgcactgaactttgctaaactggctagcgccacctggtgtgtgccgttggtctcctcacatggtaacatgtgccaacgggcccgaaaggctagtgggcaattaccgctccaagggaggggtacccaccccgacctgaacagcggtaatgaagctcacctcccaggctctgaccccgagaagtttagttatttagtaggtgtaattagtacttgtgattggtcaatttgatagtagtttgaaacgttatggatgaatgagtagaccccctgaaggtaccccattacatgggatctgatcagggccacattctgcgtgtctccccgcacttgtggttaaaaccatgaaagttcatcccaaacaatcttttcctcttctttttcttttagtggtgacaacctactggattggtgattaccaatctgtactagtgttgtattaagacttgttgtgtggagaaaatggactctttcaagaagatttttg

SEQ ID NO: 1225 - DNA, 762 bp, Ljungan virus
  strain 87-012G, complete genome.1
ttgaaaggggggccctgtggccaattttggccacagggttcccctggtggggtgggtacacttctcgctcgatgagtgggggtgtggctcattgcccacacctggttggttcccaggttcatacaataaccatcaataaacttttaacatctaagatagtattatcccatactagactggacgaagccgcttggaataagtctagtcttatcttgtatgtgtcctgcactgaacttgtttctgtctctggagtgctttacacttcagtaggggctgtacccgggcggtcccactcttcacaggaatctgcacaggtggctttcacctctggacagtgcattccacacccgctccacggtagaagatgatgtgtgtctttgcttgtgaaaagcttgtgaaaatcgtgtgtaggcgtagcggctacttgagtgccagcggattacccctagtggtaacactagcctctgggcccaaaaggcatgtcatttgaccactcaggtacacaaccccagtgatgcacacgcttagtaatggcttagtaacaaacattgattgatcatttgaaagctgttaggaggtttaggtatgacgggctgaaggatgccctgaaggtacccataggtaaccttaagcgactatggatctgatcaggggcccaccatgtaacacatgggtagaagtcttcggaccttgggttaaaaaacgtctaggcccgccccccacagggatgtggggtttcccttataaccccaatattgtata

SEQ ID NO: 1226 - DNA, 762 bp, Coxsackievirus
  A16,isolate ZJ10-48 polyprotein gene, complete cds.1
tacaaaaaagcaggctttaaaacagcctgtgggttgttcccacccacagggcccactgggcgctagcacactgattctgcgggatctttgtgcgcctgttttataacccctcccctaagcagtaacttagaagcttcacactattacgaccaatagtaggcgtggcgcgccagtcacgttttggtcaagcacttctgtctccccggactgagtatcaatagactgctcacgcggttgaaggagaaaacgttcgttatccggctaactacttcgagaaacctagtagcaccgtgaaagttgcggagtgtttcgctcagcacttcccccgtgtagatcaggtcgatgagtcactgtgaaccccacgggtgaccgtgacagtggctgcgttggcggcctgcccatggggtgacccatgggacgctctaatacagacacggtgtgaagagtctattgagctagttagtagtcctccggcccctgaatgcggctaatcctaactgcggagcgcgcaccctcaatccagggggccagcgcgtcgtaatgggtaactctgcagcggaaccgactactttgggtgtccgtgtttccttttattccttattggctgcttatggtgacaattgaaaagttgttaccatatagctattggattggccatccggtgaccaacagagctattgtttacctgtttattggatacgtccctctcaatctcaaagccattcaaactcttgattacatattacttcttaactgtaagaa

SEQ ID NO: 1227 - DNA, 766 bp, Kobuvirus SZAL6-KoV/2011/HUN
  complete genome.1
tttcacaccctcttttccggtggtccggacccagaccaccgttactccattcagctacttcggtacctgttcggaggaattaaacgggcaccctacccaagggttacatgggaccatattcctcctcccctgtaactttaagttttgtgcccgtattcttgactccaggcggatgttgtgtcgcccgtcctgtgaacaaacagctagacactttcctcccctccctctgggctgctccggcagtccactccctccccccagcgtaacatgccccgctggagtgatgcacctggaagtcgtggacgtgggttagtaacttcggtgaaaacccactataatgacaactggttgacccccacactcaaaggactcgagtctttctcccttaaggctagcccggccacatgaatttgcagctggcaactagtgagtccaccatgtcccgcaacctcggctgcggagtgctgttccccaagcgtatgccttccttctgtaagagtgcgcctggcaagcacatctgagaagtcgttccgctgcgtcgtgccaacctggcgacaggtgacccagtgtgcgtagacttcttccggattcgtccggctcttctctaggaaacatgcgtgtaaggttcatgtgccaaagccctgcgcgcggtgttcttctactgccctaggaatgtgccgcaggtacccctacttcggtagggatctgagcggtagctaattgtctacgggtagtttcatttccatcttctcttcaggtcgacatc

SEQ ID NO: 1228 - DNA, 768 bp, Antarctic picorna-like virus 4
  nonstructural protein and structural1
tatttgtttatttatcacaataagcattacatgagtttgtttaataacatactctgcaaatttattgtaggtgtttagagattaaaccaatctcttttcatttacaaaaccaataagtttgtaaaatagtaaaatttttagccattctgattcaggaatcaaaactgatgtaccactatctgtattttgtgaaaaatcaaaacgacagtagactagaaattactttgtatctaggaatctgtgtctaacgacgatagttaggaacgtgttgcacatttcatgtgcaggcctttatcactaggtctttattaaaaaagtggttgcaagttgtaattgacaacatgtgtttagttaagtttacttctattcatgattatcagggatctccttatcccgctattattagcaaaaggagccttgcaggttataccgacctgcatatgaagcctctacattaatttgtaatttttgtaggaaactgagagggaaagtggcataaccctcgtcctcgcggcgtataatgattcttcggaagaatacgacgtaacccagccgtcacaggtgcccattctctgggattgcatgcttgcatgtcgttctaggatttttcaggaacatttttgagctatagtagtttagatacgctatttgcaatgatgaaactacctagggtgggattatgagaaattcaactttgatctatttttcacaataggttgaggttggattttctcgtatttgggtttggggggtatactatttcaaatc

SEQ ID NO: 1229 - DNA, 769 bp, Gallivirus Pf-CHK1/GV
  complete genome.1
ttgaccccggtatttctccgtctaaattagacggttcttttatatcccagtgcctgaagctggcactgtgaggttagtctactaaccaaggcttccgtgcagggcttgcacgttaggagttcatgttgattcatgctccaatgcccaaaactttgtgtgtttgtctgtgtctttcccaaagttcttcctaaggtttcggtactcaagccttaatctctggtcccagcttttgggccttagtatccagagaatgtacccgtgcttcgatgaacgtaagaaagctgtcttttaccgaaaaattttaatgaaataagtataactggctcgcgccacctggtgtgtgccgttggaattcccccatggtaacatggtccaacgggcccgaaaggctagtgggcaatcggtcctccaaggaaggggttcccaccccgacctgaacaggattcgatgaagctcacctcccaggctcctaaccccaaggaagtttacttaaagtaattaagatctagtacgtaattgctggcaattttgctagtagttgggaacgttatgacctaatgagtagacccccagaaggtaccccattttatgggatctgatctgggccctatactgtgtgtctccccacatatagggttaaaacaatgaaagttaggtccaaaatattcttttctttttattctttctttagtggtgacgccattatatcagcaatttgctgatgttttatagcgtacgcggcgatacgaacgattcatcactagagaaa

SEQ ID NO: 1230 - DNA, 770 bp, Bovine kobuvirus
  strain IL35164, complete genome.1
cacccacttttccggcggcgcacgttcgcgtcgtcgtaagtctggactcccaaggccaactcggttcaacttcggtttccggacaaatacaagaacctcagtcctcttggtactttctcgcctgagtcaacaaagcgagaaacctgcccctctaacgccagacgagcggcatgaaacttgaacttctggcatgttccactttccctctccctcaccccaccccaccgcgctctcaaggtcgcgctcttccgggactagcccggttttaaaagttcctggcaccctttgcccctctaggcccttaaggtaggaactgaccttgtgctgtgatctcggtgcggaagtgctactgcgtagtgattgtaagatccctttgtggttctgccctggcaaggctacagagtactgtgatccgctgcggacgccatcctggtaacaggacccccagtgtgcgcaacagtatgtccacggtcttccgtgttcaccacattcggaacactgctctcgtgaaacagtgtgtgtccaatccctgtgaccagtattaaccacaccacctaggaatgctaggaaggtaccccggttcgccgggatctgatcctaggctaattgtctacagtggtgctccttttattttcccctcacttcattgactacaactgcttgatttccgtgtttgctgctcttcttagctctcactgccattctcaagtgttcacactgtccaagctcctttggttgtttgcctccacttgccactgtcaactcttgtc

SEQ ID NO: 1231 - DNA, 770 bp, Coxsackievirus
  A10,strain 15-2711-1, complete genome.1
cacgtgagtgttgctcttacgtgtgctattccattctgtgggttgttcccacccacagggcccactgggcgccagcactctgattccacggaatctttgtgcgcctgttttataacccttccccaacttgtaacgtagaagtaatacacactacagatcaatagtaggcatggcgcgccagtcatgtctcgatcaagcacttctgtttccccgggctgagtatcaatagactgctcacgcggttgaaggagaaaacgtccgttacccggctaactacttcgagaaacctagtagcaccatagaagctgcagagtgtttcgctcagcacttcccccgtgtagatcaggctgatgagtcactgcaacccccacgggcgaccgtggcagtggctgcgctggcggcctgcctatggggcaacccataggacgctctaatgtggacatggtgcgaagagtctattgagctagttagtagtcctccggcccctgaatgcggctaatcctaactgcggagcacatgcctccaatccaggaggtggtgtgtcgtaacgggtaactctgcagcggaaccgactactttgggtgtccgtgtttctttttatctttatattggctgcttatggtgacaatcacggaattgttgccatatagctattggattggccatccggtgtctaatagagctattgtgtacctatttgttggatttactccactgtcatataaatctttgaacactttgtgctttatattgaacttaaacacacgaaa

SEQ ID NO: 1232 - DNA, 773 bp, Sapelovirus B
  Cam13 genomic RNA, complete genome.1
gtggggtacatgcgttttaaggaacgcatgtatctcacactcatttctccccctcgcccccacaggcaacccccaccccttctcttacgggagttagggttaaggatctagtggtcaggcgttgtatcctcttacctttacccaccccacccacacggactggttaatggttttagactgaggttgtggatctgatttcaaatctgttacccattcagaggaaaaatggagtcatacattctggatttgacttgatatgaccaagagttaacaccttgcgtgttggccgtatggaatgttttaaggctactctatggattatgatttcagggttggccgcccaggataaaaggcaattgtggtaagtgatgttagtcattggtagttgaaagctgcccaagacatccgaggtctacgctttgcgggccggagtaagcttgggaacaacagtgagtatgctattttttgctttcacccaacacgaccgtgcatgaaagagctagaggcatctggaggcaaagggaaaagaatttcttatcccgaatgttcattcgagtccttgacgagtgcatccctactgtcccgtaggtgaggtgtatggcgcatgctcatggcattactccaaggtgtatctgtgaggggggggcccctcacacttagtctagtgctacctgacagggttgcggctggtcatttatgcatggtataaccagtagtaatcccccatggattgctttaactccccctccccccttacaaagacattctctaag

SEQ ID NO: 1233 - DNA, 773 bp, Enterovirus E
  isolate PD2017, complete genome.1
ggcgtcagtacactggtacgtcagtacctttgtacgcctgtttttccctcccttaaataaattaagatcaccactactgaggggagtagtccgactccgctccggtaccgccgcaccagtattccggtacgcctagtaccctaatacggagtagatggtgtccctcacccgaaacttagaagaaagtaaactacccgaccaataggagcgcggcatccagtcgcgtatcggtcaagcacttctgtttccccggtctgcatagatcgttacccgcccgacccactgcgagaagcctagtagctggccaagcgaatgcgaggttgcgctcaaccacaaccccagtggtagctctggaagatggggctcgcaaactcccccgtggtaacacggttgcttgcccgcgcgtgcttccgggttcggtctcacgccgttcacctcaacctcgcgtaaccagtcaagagcttattgcgctggggcggttctcctccggggccgtgaatgctgctaatcctaacctctgagcgtgtgcgcacaaaccagtgttgctacgtcgtaatgcgcaagttggaggcggaacagactactttcggtaccccgtgtttcctttaattttatatttcaatttatggtgacattgactgacatttgccaagttgctcggttacctctgaacattgctttgtattatctgatagctttctacaaaaccacccagctttcacttgaactcattgagtttgtagtttatttgaaccaagcacacaaattctacg

SEQ ID NO: 1234 - DNA, 774 bp, Enterovirus G
  isolate 990/UK-NI, complete genome.1
tattttccaggtggaatggggatgcaggcctgagttgtttttgcccccaaggaataaatcaatattcccagagccgaggggagtagtccgactccgctccactacggtgctccagtagattgctattgcggtagctctctacggggtggctggtattcctcaccctgaaacttagaagtttgtacacaccgaccaatagcggtctggcagccagccaggcaacggtcaagcacttctgtttccccggtccgcaaggatcgttacccgcccgaattgctacgaaaagcctagtaagtacccaagtttgtgcgaggttgcgttcagccacaatcccagtggtagctctgagtgatggggctcgtgattacccctctggtgacagagacacttgcccgcgcgtgcacttgggttcaccagaaatggtgttcacctcaatcaagcgcaagtactgaagagccaattgtgccaatttggtctcctccggggccgtgaatgctgctaatcctaacctccgagcgtgtgcgcacaatccagtgttgctacgtcgtaacgcgtaagttggaggcggaacagactactttcggtaccccgtgtttccttattttattcatttaaatttatggtgacaattgttgagatttgtgagctagcaaaattaccattgaatttggcattgtactgtctcattgcttttcacaaaacctcagatatcccacccagttacattgatcttttagttcatttgaatttacagttcaaactgagacaagtaaa

SEQ ID NO: 1235 - DNA, 775 bp, Shrew hepatovirus
  isolate KS121289Sorara2012 polyprotein gene,1
ttgaaaggtggccggagggtttcttgaagccctccgacgcctttcagcgcccggttcacaggggtgtaagtactgtgggcccgtttgccgtgggatacggctgcctgtgtctcaggggtaagtactggggccgtgttaaccgtgcgttacggttttgcttttagattaggatgtccgactgtccggcactctcttttgcttaaaatggccttaaatccatgggaggcgtaaccatgggccctttgttacctagacatgattgcattgggggccgtccttggggcttcggccccagccaatttcccttgactcgtctaagagtttgtttcatccttttcttttcttttattttccaggctctcggcatgccaacggctctgaccactgcgcccggtggggttaaccacacgactagcgtgtggctgtaggagttaaaagtgccgacaggccaattctgacgtaagttcattctatgttaacttgaccacgtaaggttgactgatctttgtgagagggtaggctacgggtgaaaccctctaggttaatactcatattgagagatacctccagaaggtgaaggttggcggatattggtgagttcttttaggacaaaaacctttcaacgcctgtgggcccacctcactggcacaatgctttcatccccaattgtgatgggtagtttggactgaaatcaggagtaacctgccctacgagtttaggggtagttcaggggtatttaggcttccacatttgatagagtttatgagagtgagcc

SEQ ID NO: 1236 - DNA, 775 bp, Coxsackievirus
  A4,isolate 06/Taian/SD/2017, complete genome.1
tttcaaaagaatattaggaggggggggttttaaaacagcctgtgggttgtacccactcacagggcccactgggtgctagcactctgattctgcggaacctttgtgcgcctgttttaaaacccccccctcaattcgtgatttagaagtaatgcacaccattgatcaacagcaagcgtggcgcaccagccatgttcagatcaaacacttctgtttccccgggctgagtatcaatagactgctcgcgcggttgaaggagaaaacgctcgttacccggctaactacttcgagaaacctagtagcaccattgaaactacagagtgtttcgctcagcactttccccgtgtagatcaggtcgatgagtcactgcaatccccacgggcgaccgtggcagtggctgcgttggcggcctgcctatgggcttgcccataggacgctctaaagtggacatggtgtgaagagtctattgagctagttagtagtcctccggcccctgaatgcggctaatcctaactgcggagcgcatgccctcaatccagggggtggtgcgtcgtaacgggcaactctgcagcggaaccgactactttgggtgaccgtgtttccttttattcttatattggctgcttatggtgacaattgagagattgttaccatatagctattggattggccatccagtgtctaacagagcaatcgtatacttatttgttggattcatcccactatcatacatatccattaacaccttatactatattataagattgaacacaagaaa

SEQ ID NO: 1237 - DNA, 776 bp, Hedgehog dicipivirus
  strain hedgehog/H14/2015/HUN, complete genome.1
agaaaaggccccccggggggataccgtctatggtatctctacgaggtcttttcgaacactccacatcatgagtgtataataaactgatgacctttaaatttcaccaacccttgacctgtaatgtcagtggacagagtgctcctctgttcccggttaccgtgttccaggacacgattgtaatcctgcgcctcaccagcgctgcgtgcacgtctgcataaggaaacgtgccttccccatgtctctatcaattctttggtgagtgaccgccctagttgctcatcctatgggattcttctctcatgggttctttgtggcatgcgaatgtcaccttaattggaggtctttaattagatatcctttcttcatctttgatatgagtgtcggaatttgattcctagtctctgcaaaacaaccccacttgatgaattcaacttttcaaccgcacaaacataatcaggtttttaaattgaatgtttctaaattctaaatttagtttatttaagtagtttgccatcttgactcgatgtaaaattgtcatacaagtcttcttttcttttctttacactttgaagtttgcacttagcagtcgttctgcacagctttcgagttttgtttgatcgacatcgcaacttccacccacctctctttttctagtgttgaatgcggctaatcctaacccgagagcaataaacccaggtttattgtcgtaacgcgcaagtcttggacggaaccgactatacacacacctctttaccctttagtacacccttggtacg

SEQ ID NO: 1238 - DNA, 776 bp, Pigeon picornavirus B
  strain GAL-7/2010/Hungary, complete genome.1
tgaaatggcctgggggtagcatgtacgctaaggcgtgcatgttactcccagaccatttctccccaccccctcaccttgccttttccccctcatttaatttttgtcgtaagtggcatcgacaaccacacaatttaaggagaggggcagccgtggaaactaaaagaccctaattggtatcttaatgtgctaaagccttgttctgaagaggggttccccaggccccatagtaggatcttggtgttccacattaagctctaccgaccacacatccaaacgataggcggtgtaagggctctctagctaagtgtttactcattgctagggaagtgttgcgacccgttatcaatagggatacaggaggtcttagttgcctaaccagataaagtggtgctgaaatattgcaagctcaatgtctggcgaacgacggactaccgttgaactgttgttaacgcccatatgtgtaggcaacatatgggttagtaggtcacttacattgacatccgtgccgggaaagcggatctgagctatcgattgcctgatagggtgccggcgggcgcggtacgtgtggtatagtccgctgttttggggtatggcgtctactcggttttgttgtcgtttcggaatgtcccatgtcggagatgtcgttaccggtgtttgttttacttgtgcacggataaggaagcaaagtttggagttctggaagctaatggataacattaagtttccgttgcgttcttcgtgcattttgggccagaaaatcgaccacaaaatcgaga

SEQ ID NO: 1239 - DNA, 779 bp, Antarctic picorna-like virus 1
  nonstructural protein and structural1
aataaggtatgctgtttatttattaaacagtgtatcttattttgccctcatcgagagttggaggttaactaacatcctttgccacatggagtctctgtggttggttccctggccatgtatttttacaaaacagatgtgccctttgcagcttatgcaattttcggttgtttccccttttgttcgcaagattgtctcttcatttgagattttgacgttttcactcgtagtactatatgagagtgatttattacattttattttgttagcaagattggtttagttccgtcttttcttagcggagttgcacacttttctttattgctaattgcattcaccctttactggtttttcctactagttcagatcattgcaatttgttaatttccttgtctgtttggcgacccccttagtagagaggttatgatgcatcaagtgaattatgaaacagggtgtctatttaagcatttgttcttaattacgttttctttgaaaaccatttcggtggtttggcttgaattggtccctagtcacgtagttggaatgtattaagtttatttatagtcccagtgttcacggtgtttttgatcctttttgaacgggattgtacccgttcagataattcagaatttagcaaagggatttgtaatttgttccctttattggttttacaccgagacaactaccggtgacctggacatcgacaacacatcctaggggaatggcatcaccttacgagccaccacaactaaaacacaaatatacattacaatttaattatt

SEQ ID NO: 1240 - DNA, 787 bp, Coxsackievirus
  A10,strain 13-2185-1, complete genome.1
gtcaacacggtgttgtcggtattgtgtctaccggtggtaatgggcttgttggcttcgcagtgttcccacccacagggcccactgggcgccagcactctgattccacggaatctttgtgtgcctgttttacaaccctttcctaatttgtaacgtagaagcaatatacactactgatcaatagcaggcatggcgcgccagtcatgtctcgatcaagcacttctgtttccccggactgagtatcaatagactgctcacgcggttgaaggagaaaacgttcgttatccggctaactacttcgagaaacctagtagcaccatagaagctgcagagtgtttcgctcagcacttcccccgtgtagatcaggctgatgagtcactgcaatccccacgggcgaccgtggcagtggctgcgctggcggcctgcctatggggcaacccataggacgctctaatgtggacatggtgcgaagagtctattgagctagttagtagtcctccggcccctgaatgcggctaatcttaactgcggagcacatgccttcaacccaggaggtggtgtgtcgtaacgggcaactctgcagcggaaccgactactttgggtgtccgtgtttctctttatccttatattggctgcttatggtgacaattacggaattgttaccatatagctattggattggccatccggtgtctaatagagctattgtgtacctatttgttggatttactccgctatcatataaatctctgaacactttgtgctttatattgaacttaaacacacgaaa

SEQ ID NO: 1241 - DNA, 797 bp, Kobuvirus sheep/TB3/HUN/2009
  complete genome.1
tttgaaaagggggtgggggggcttcggccccctcaccctcttttccggcggcgcaagttcgcgtcgtcgtaagcctggacacccatgttcgcatcggtctccgggcaaatacaagaaccccagaccttctggtacttcttcgcctgggtcacaaaagcgaagaacctgcctctctaacgccagacgagcggcattaaacttgaacttctggcactctccactctcccttttccctgtccctttccccactgcgctctcaaggtcgcgcaatcctgggactagcccagttttaaaagttcctggcaccctttgcccctctaggcccttaaggtaggaactgaccttgtgctgtgatctcggtgcgggagtgctaccacgtagtcatcgtaagcctcgtttctggttctgccctggcaaggctacagagtaccgtgttccgctgtggatgccatccgggtaaccggacccccagtgtgtgtagcggtatgttcacggtccgccgtgttcaccagattcctgacctggctttgctagaaatggtgtgtgcccaatccctgtgaccagtatcaattacatcacctaggaatgctaggaaggtaccccagtcctgagctgggatctgatcctaggctaattgtctacggtgatgctccttttattttcttacaactgctattgactgtctgattgctgattctgctcttgtgctcttctgctctggctcattctcaagggttctctttgtccaagatcctttggttctctccttgttccacttgccactgccaacgcttgtc

SEQ ID NO: 1242 - DNA, 798 bp, Enterovirus G
  EV-G/Pig/JPN/Kana-Ebi1/2019/G1_PL-CP genomic RNA,1
gggttgttcccaccccagggcccactgggcgccagtacactggtacgctagtaccttggtattacggtaccattgtacgccagtacctttgtacgcctgttttatattccctacccccacatgtaactttagaagtttaagtaacaaagaccaataggagtccaacatccagttggattgcggtcaagcacttctgtttccccggacctagtagtgataggctgtacccacggccgaagatgaacccgtccgttatccggccagctacttcgagaagcctagtagcatcaaagatctgtcttggcgtttcgctcagcgcgttccccccgcgtagatcgggctgatgggtctccgcattccccacgggcgaccgtggcggaggccgcgtggcggcccgcctatggcgaaagccataggacgccatttcagtgacagggtgtgaagagcctattgagctagttggtagtcctccggcccctgaatgcggctaatcctaaccactgagcgtccaccagcaaaccagctgggagggcgtcgtaacgggtaactcggtggcggaaccgactactttgggtgtccgtgtttccttttgatcctattgtggctgcttatggtgacaacttacagttgttatcataaagcttttggattggccatccggaaaaagttatcagtgtttgatattgttcggctttcacgcctaccaataagacaatcactttacttgttagttgcattttatcccactaaggatatcactgagttacatcttcaattgctcctaacattatcagcaca

SEQ ID NO: 1243 - DNA, 798 bp, Enterovirus G
  isolate PoEnV-BEL-12R021, complete genome.1
gggttgttcccacccgcggggcccactgggcgctagtacactggtacgccagtaccttggtattacggtaccattgtacgtcagtacctttgtacgcctgttttatatcccttcccccacatgtaacattagaagtcaagtaaacaaagaccaataggagcccaacaaccagttgggttgcggtcaagcacttctgtctccccggacctagtagtgataggctgtacccacggccgaagatgaacccgtccgttatccggccagctacttcgagaagcctagtaacatcaaagatctgtcttggcgtttcgctcagcgcgttccccccgcgtagatcgggctgatgggtctccgcataccccacgggcgaccgtggcggaggccgcgtggcggcccgcctatggcgaaagccataggacgccatttcagtgacagggtgtgaagagcctattgagctagttggtagtcctccggcccctgaatgcggctaatcctaaccacggagcatccaccagcaaaccagctgggagggtgtcgtaacgggtaactctgtggcggaaccgactactttgggtgtccgtgtttccttttgatcctattttggctgcttatggtgacaacgataagttgttatcataaagcttttgggttggccacctggaaaaaattgtcagtgtttgatatcgctcggctttcacgcctaccagtcaaacaagctctttatctccttgttggattctactcaataaaggacataactcagtttcacataaatctgttgctttcattgtcagcaaa

SEQ ID NO: 1244 - DNA, 800 bp, Enterovirus E
  strain EV_NGR_2017, complete genome.1
ggggttgtacccacccctggggcccacgtggcgccagtaccctggtacgttagtacctttgtacgcctgttttccccccccttaaacaaattaagatcgctggtcctgtggggagtagtccgactccgcaccgatacgtcgcaccagcactccggtacgcctagtaccctagtgcggaggtaccagtgtccccccccctcgaaacttagaagcaatgaaccaaaccgacccaaaaggatgcgttgcacccagcagcgtaatggtcaagcacttctgtttccccggccgcaaggtcgttatccgcccgcaccactacgagaagcctattaggcagccaagcttgcaaagcgttgcgttcagccacaaccccagtggtagctctgagagatgggactcgttgttcccccatggtaacatggtgacttgtccgcgtgtgctctcgggttcgccatcaggcgttcacgctgcacaagtgtaactgctgaagagcctattgtgctggagcggttttcctccggaaccgtgaatgctgctaatcctaacctctgagcgtgtgcgcacaaaccagtgttgctacgtcgtaacgcgtaagtcggaggcggaacagactactttcggtactccgtgtttccttattttatatcgtttcatttatggtaacaattactgagattttaaagattgccaagctgcccttaaacattggtttgtattatctagttgcattttataaaacctctgagctttcacttgaattgattgatttcttagtctttctaaacaagcataaattgaggaca

SEQ ID NO: 1245 - DNA, 801 bp, Enterovirus G
  genomic RNA, nearly complete genome,strain:1
cctgtgggttgtacccacccacagggcccaccgggcgccagtacactggtacgccagtaccatggtattacggtaccatgttacgtcagtacctttgtacgcctgttttatatcccctccccgaagtaaccttagaagtttaagtaacaaagaccaataggagtccagcaaccagctggattgcggtcaagcacttctgtttccccggacctagtagtgataggctgtacccacggccgaagatgaacccgtccgttatccggccagctacttcgagaagcctagtagcatcaaagatctgtcttggcgtttcgctcagcgcgtttcccccgcgtagatcgggctgatgggtctccgcataccccacgggcgaccgtggcggaggccgcgtggcggcccgcctatggcgaaagccataggacgccatttcagtgacagggtgtgaagagcctattgagctagttggtagtcctccggcccctgaatgcggctaatcctaaccacggagcgtccaccagcaaaccagctggcggggcgtcgtaacgggtaactctgtggcggaaccgactactttgggtgtccgtgtttccttttgatcctattttggctgcttatggtgacaacaataagttgttatcataaagcttttgggttggccacctggaaaaagttatcagtgtttgatattgttcggctttcacgcctaccaacaaaacaagccttatatttattggttgccttttgtcccttggcggaaattactgattttcacctaaagcttctgattacattgacggcaaa

SEQ ID NO: 1246 - DNA, 803 bp, Kobuvirus cattle/Kagoshima-2-24-KoV/2015/JPN
  genomic RNA, complete1
ttgaaaagggtgtggggggggataccctccccctccacactcttttcgacggcgcgcctcggcaaggccgccgataccgcactgtgctacttcggtaccactctgcgggaatgacaatatgcccggtgtatagtttgcctgtttctcgcaccgttaccgctcgttcgggaatgtgaaactggcacccctcctctcccctaccaccctttctccttcgcccccattcataatttacaacgccgcacacagcggcggccgccaagggctagcctggcggttataaaaggaacctgggtctttccctcttcaagccaaaaggtaggttccctgtgtccctgaatgctcggtgaggaatgctgcaccgtaacgctttgtgaagtgtttgcaagttctggcccggcaagcctacagagtgctgtgatccgctgcggacgccatcctggtaacaggacccccagtgtgcgcaacagtatgttcagacttcggtttgttcacttgctttcatggaccattgcgcgaaagtgcgtgcgccatatccctgtacttcaggtgtgcttctctggaccctaggaatgctgcgaaggtaccccgtttcggcgggatctgatcgcaggctaattgtctatgggttcagtttcctttttctttactccacaattgactgcttaactgactctggatcttgtgcttccactgctctttctgctctcaaaacggcttcacttaccaactctcacctttcgaccaacaccatttacacactaacttttttcgactcttctgactcctggcttggtgaagac

SEQ ID NO: 1247 - DNA, 804 bp, Enterovirus G
  genomic RNA, nearly complete genome,strain:1
ctgtgggttgttcccacccacagggcccactgggcgctagtacactggtatgcctaacctcggtattacggtaccgttgtttacagtacctttgtacgcctgttttatatcccctccccacaagcaactttagaagtatcaagcaaataaggaccaataggagtccaacacccagttggatcatggtcaagcacttctgtctccccggacctagtagtgataggctgtacccacggccgaagatgaaaccgtccgttatccggccagctacttcgagaagcctagtagcatcaaagatctgtcttggcgtttcgctcagcgcgttttcccccgcgtagatcgggctgatgggtctccgcataccccacgggcgaccgtggcggaggccgcgtggcggcccgcctatggcgaaagccataggacgccatttcagtgacagggtgtgaagagcctattgagctagttggtagtcctccggcccctgaatgcggctaatcctaaccacggagcgtttaccagcaaaccagctggcggaacgtcgtaacgggtaactctgtggcggaaccgactactttgggtgtccgtgtttccttttgatcctattgtggctgcttatggtgacaacttacggttgttatcataaagcttttggattggccatccggaaagagttatcagtgtttgatattgttcggctttcacgcctaccattaagacaatcactttatttgttagttgcattttatcctgccaaggacattactgagtttcacctacaactttactcatacaattacatcaagt

SEQ ID NO: 1248 - DNA, 808 bp, Aichivirus B
  genomic RNA, complete genome,strain:U-1.1
tttgaaaagggggtgggggggcttcggccccctcaccctcttttccggcggcgcatgttcgcgtcgtcgtaagtctggattcccaaggcccactcggttcaacttcggtttccggacaaatacaaagaacctcagtcctcttggtactttctcgcctgagtctacaaagcgagaaacctgcccctctaacgccagacgagcggcataaaactcgaacttctggcacgttccaccaccccttctcctatcccaacccccattgcgctctcaaggtcgcgcttttccgagactagctcggattcaaaaagttcctggcaccctttaccccttcaggcccttaaggtaggaactgaccttgtgctgtgatctcggtgcggaagtgctactgcgtagtgattgtaagatccttttgtggttctgccctggcaaggctacagagtgctgtgatccgctgcggatgccatcctggtaacaggacccccagtgtgcgcaacagtatgttcacggtcttccgtgttcaccacattcggaacactgctttcgtgaaacagtgtgtgtccaatccctgtgatcagtatcaaccacaccacctaggaatgctaggaaggtaccccggttcgccgggatctgatcctaggctaattgtctacggtggtgctcctttttattttccacttcaactcactggttacaactgcttgatttctgtgtttgctgcttttctctgctctcactgccattctcaagtgttcacactgtccaagctcctttggttgttcgcttccacttgccactgtcaactcttgtc

SEQ ID NO: 1249 - DNA, 809 bp, Porcine enterovirus 9
  strain UKG/410/73 polyprotein gene, complete1
ttaaaacagcctgtgggttgttcccacccacagggcccactgggcgctagtacactggtatgccttacctcggtattacggtaccgatgtatatagtacctttgtacgcctgttttatatccctcccccacatgtaaccttagaagtttacacaaacaaagaccaataggagtccaacacccagttggattgcggtcaagcacttctgtttccccggacctagtagtgataggctgtacccacggccgaagatgaacccgtccgttatccggctacctacttcgggaagcctagtaacattctgaagtctctgaggcgtttcgctcagcacgaccccggtgtagatcgggctgatgggtctccgcataccccacgggcgaccgtggcggaggccgcgttggcggcccgcctatggcgaaagccataggacgcctcttagatgacagggtgtgaagagcctactgagctgggtagtagtcctccggcccctgaatgcggctaatcctaaccacggagcgtccaccagcaatccagctggcagggcgtcgtaacgggcaactctgtggcggaaccgactactttgggtgtccgtgtttccttttgatcctattttggctgcttatggtgacaacgataagttgttatcataaagctcttgggttggccacctggaaaaagttatcagtgtttgatattgttcggctctcacgcctaccaataagacaagccctatatttacttgttgcattttactcgtcagaagaaatcacagagtatcatttggatttgttactcacattaaggacaag

SEQ ID NO: 1250 - DNA, 809 bp, Enterovirus F
  genomic RNA, complete genome,strain: BEV Ho12/Bos1
gggggttgttcccacccctggggcccacgtggcgccagtactctggtacgttagtacctttgtacgcctgttttcccctcccttaaacaaattaagattaccactactgaggggagtagtccgactccgctccagcactgctgcaccagtgaattggtacgctagtacctctgcacggagtagatggtatcccccccccgaaacttagaagtttgcaacaaacccgaccaataggtgcgtggcatccagctgcgtaaaggtcaagcacttctgtttccccggtccacaaggatcgttacccgcccaacccactgcgagaagcctattaactggccaaacaactgaagagttgcgctccgccacgacccctgtggtagctctggaagatggggctcgcacttcccccgtggtaacacggttgcctgcccgcgcgtgcttccgggttcgacctagtgtcgttcactccaaagttgcgtaaccagccaagagcctattgcgctgggatggttttcctccggggccgtgaatgctgctaatcctaacctccgagcgtgtgcgcacaaaccagtgttgctacgtcgtaacgcgtaagttggaggcggaacagactactttcggtaccccgtgtttcctcttatttttatataatattttatggtgacaattgctgagatttgtgatttggccaccctaccattgaatattgctttgtattatctggttgcatttcataaagcttcagaaatacctgcttcctatatcgatctacttgtattcctcaatttaaagcacaaattagagaacataag

SEQ ID NO: 1251 - DNA, 811 bp, Porcine enterovirus G1
  isolate 13-03212, complete genome.1
ttaaaacagcctgtgggttgttcccacccacagggcccactgggcgctagtacactggtatacttagcctcggtattgcggtaccggtgtatatagtacctttgtacgcctgttttatgtcccctcccccttaagtaacattagaagtttgaacaaacaaagaccaatagaggtccaacatccagttggattgcggtcaagcacttctgtctccccggacctagtagtgataggctgtacccacggccgaagatgaactcgtccgttatccggctatccacttcgggaagcctagtagcatcaaagctctgtcgaggcgtttcgctcagcacgtaaccccagtgtagatcgggctgatgggcctccgcataccccacgggtgaccgtggcggaggccgcgtggcggcccgcctatggcgaaagccatgggacgcctcttggatgacagggtgtgaagagcctactgagctgggtagtagtcctccggcccctgaatgcggctaatcctaaccacggagcgtccaccaacaaaccagttggcagggcgtcgtaacgggtaactctgtggcggaaccgactactttgggtgtccgtgtttccttttgatcctatgttggctgcttatggtgacaacgataagttgttatcataaagcttttgggttggccacctggaaaacgatatcagtgtttgacattgttcggctttcacgcctaccaacgagaaaagctctttattgctgagttgcattttatccaaaagaggtaataaccaccttccatttacaactcttactcacattatcatcaag

SEQ ID NO: 1252 - DNA, 812 bp, Enterovirus E
  strain BJ101, complete genome.1
ttaaaacagcctgggggttgtacccacccctggggcccacgcggcgccagtactctggttcgattagaacctttgtacgcctgttttcccctcccttaaacaaattaagatctctgccaatgtggggagtagtccgactccgcaccgatacgtcgcaccagcagaccggttcgcttaggacccttctgcggattggtatgagtccctctcccgaaacttagaagtttggacaaaccgaccaataggtgcgtggcatccagccatgttacggtcaagcacctctgtttccccggtcagaaatgatcgttacccgccctacccactacgaaaagcctattaaccattgaaagtgatgaggagttgcgctcagccatgaccccgatggtagctctgagggatggagctcgcagttcccccgtggtaacacggttgcttgctcgcgtgtgcccttgggttcgaccatttggtcgttcactccaaatcatcgtaaatggccaagagccaattgtgctggggaggttttcctccggagccgtgaatgctgctaatcccaacctccgagcgtgtgcgcacaatccagtgttgctacgtcgtaacgcgtaagttggaggcggaacagactactttcggtactccgtgtttccttttattttattattatattaatggtgacactgtttgagatttgcgagattgccaaattgccactcaacattgcactctattatttggtatcattctacaatacctcagaacttacggttgagctcattgatttcctcgtctttttgaataaaaataaattaaagaca

SEQ ID NO: 1253 - DNA, 813 bp, Enterovirus G
  genomic RNA, nearly complete genome,strain:1
taataacagtctatgggttgttcccacccacagggcccactgggcgtcagtacactggtatgccagtaccttggtatcacggtaccattgtacgccagtacctttgtacgcctgttttatattcccttccccatacgtaactttagaagtttaagcaaattaagaccaataggagtccaacaaccagttggattgcggtcaagcacttctgtttccccggacctagtagtgataggctgtacccacggccgaagatgaacccgtccgttatccggccagctacttcgagaagcctagtagcatcaaagatctgtcttggcgtttcgctcagcgcgttccccccgcgtagatcgggctgatgggtctccgcataccccacgggcgaccgtggcggaggccgcgtggcggcccgcctatggcgaaagccataggacgccatttcagtgacagggtgtgaagagcctattgagctagttggtagtcctccggcccctgaatgcggctaatcctaaccactgagcgtccaccaacaaaccagttgggagggcgtcgtaacgggtaactcggtggcggaaccgactactttgggtgtccgtgtttccttttgatcctattttggctgcttatggtgacaacgataagttgttatcataaagcttttgggttggccacctggaaaaagttatcagtgtttgatattgttcggctttcacgcctaccattcagactaactctttatttgcttattgcattttacccatcggaggatattacagacttccatctacaactcttattcacattatcaacaca

SEQ ID NO: 1254 - DNA, 814 bp, Enterovirus E
  strain BEV-GX1901 polyprotein gene, complete cds.1
ttaaaacaggctgggggttgtacccacccccggggcccacgcggcgccagtactctggttcgattagaacctttgtacgcctgttttccccacccttaaataaatcaagatctctgccaatgtggggagtagtccgactccgcaccgatacgtcgcaccagcagaccggttcgcttaggacccttctgcggattggtatgagttcccacccttgtaacttagaagttctcacaaaccgaccaatagcggcgttgcatccagcagcgcaacggtcaagcacttctgtttccccggcgcgtcgcgtcgttacccgcccggtctactacgggaagcccagtatggtcccaattgattgcgcagttgcgttcggccacaaccccagtggtagctctgaggaatggggctcgcccttcccccacagtaatgtggtggcctgcccgcgcgtgtcctcgggttcactcctagagtgttcactgcaattttgagtaagatctgaagagcctactgtgctaggttggttttcctccggagccgtgaatgctgctaatcccaacctccgagcgtgtgcgcacaatccagtgttgctacgtcgtaacgcgtaagttggaggcggaacagactactttcggtactccgtgtttccttattttattcacttattttatggtgacactgactgatatttgtgagtttgctcggctgcccttgaatattgctttgtactatttaatagcatttcatagaaccactcaactttcaattgagcttattgacttcgccgtctttctcaatcagatacacaaaaccacacata

SEQ ID NO: 1255 - DNA, 814 bp, Porcine enterovirus 10
  strain LP 54 polyprotein gene, complete cds.1
ctaaaacagcctgcgggttgtacccgcccgcagggcccactgggcgctagtactctggtacgctagtacactagcacgttagtgcttttgtacgccagtacctttgtacgcctgttttattttcccttccccacatgtaactttagaagtttagaaacaaacaatgaccaataggagtccagcatccagttggattgcggtcaagtacttctgtttccccggacctagtagtgataggctgtacccacggccgaagatgaacccgtccgttatccggctacctacttcgggaagcctagtaacattctgaagtctctgaggcgtttcgctcagcacgaccccggtgtagatcgggctgatgggtctccgcataccccacgggtgaccgtggcggaggccgcgttggcggcccgcctatggcgaaagccataggacgcctcttagatgacagggtgtgaagagcctactgagctgggtagtagtcctccggcccctgaatgcggctaatcctaaccacggagcgtccaccggcaaaccggtcgggagggcgtcgtaacgggtaactctgtggcggaaccgactactttgggtgtccgtgtttccttttgatcctattttggctgcttatggtgacaacgataagttgttatcataaagcttttgggttggccacctggaaaaagttatcagtgtttgatattgttcggctctcacgccttccaacaaaacaggccttacttcttttaattgcattttatccatcggaggttattacagatttccatctgaagcttcttctcacagtagcagtaaa

SEQ ID NO: 1256 - DNA, 814 bp, Enterovirus G
  genomic RNA, nearly complete genome,strain:1
aaaccagtctgtgggttgttcccacccacggggcctactgggcgccagtggactggtacgccagtaccttggtatcacggtaccactgtacgctagtacctttacacgcctgttttataccccttccccaaacgtaacattagaagtttaacaagcaaagaccaataggagtccaacacccagttggattgcggtcaagtacttctgtctccccggacctagtagtgataggctgtacccacggccgaagatgaaaccgtccgttatccggccagctacttcgagaagcctagtagcatcaaagatctgtcttggcgtttcgctcagcgcgttttcccccgcgtagatcgggctgatgggtctccgcataccccacgggcgaccgtggcggaggccgcgtggcggcccgcctatggcgaaagccataggacgccatttcagtgacagggtgtgaagagcctattgagctagttggtagtcctccggcccctgaatgcggctaatcctaaccacggagcgtttaccagcaaaccagctggcggaacgtcgtaacgggtaactctgtggcggaaccgactactttgggtgtccgtgtttcctgttgatcctattttggctgcttatggtgacaacgataagttgttatcataaagcttttgggttggccacctggaaaaaagttatcagtgtttgatattgttcggctttcacgcctaccattaagacaatcactttatttgttagttgcattttatcctgccaaggacattactgagtttcacctacaacttttactcatacaattacatcaagt

SEQ ID NO: 1257 - DNA, 814 bp, Enterovirus E
  isolate VD 2860/1-99 polyprotein gene, partial cds.1
ttcaaacagcctgggggttgtacccacccctggggcccacgtggcgctagcactctggtatgcttagtacctttgtgcgcctgttttcccctcccttaaacaaattaagattgccactactgaggggagtagtccgactccgctccggtacagccgcaccagtactccggtgcgcatagcaccctagtacggagtaggtggtatcccttcccgaaacttagaagttatgaaccaaaccgaccaataggagcgtggcatccagccatgttgtggtcaagcacttctgtttccccggtccgcaaggatcgttacccgcccgacccactacgagaagcctattaactggccaagcgattgcgaagttgcgctcagccacaatcccagtggtagctctggaagatggggctcgcactccccccgtggtaacacggttgcttgcccgcgtgtgcttccgggttcggtcaccgaccgttcacttcaatctcgcgtaaccagccaagagccgattgtgctgggacggttttcctccggggccgtgaatgctgctaatcctaacctccgagcgtgtgcgcacaaaccagtgttgctacgtcgtaacgcgtaagttggaggcggaacagactactttcggtaccccgtgtttcttttgatttattttgtattttaatggtgacactgactgacatttgtgagtttgctcgattgcctttgaatattgctctgtattatctaatagcatttcacaagactacccaactttcactcgagcttattgactttgctgtttacttgaaccgcatacacaaactcaaca

SEQ ID NO: 1258 - DNA, 815 bp, Ovine enterovirus
  strain ovine/TB4-OEV/2009/HUN, complete genome.1
taaacagtcagggggttgtacccacctccggggcccacgtggcgtcagtgctctggtgcgttagtacctttgcacgcctgttttcccttcccttaaacaaattaagatcgccagcgccgaggggagtagtccgactccgctccactacggtgctccagtggattgctattacggtagctcttcacggggtggctggtgtccccaaccccgcaacttagaagccagcacagatcgaccaatagcggctcggcagccagtcgggcaacggtcaagcacttctgtttccccggtccgtaaggatcgttacccgcccaggatgctacgagaaacttagtaaacacccaagcttgtgagaggttgcgctcagccacaaccccagtggtagctctgagtgatggggctcgtgactacccctctggtaacagagacacttgcccgcgtgtgcactcgggttcatcagaaatggtgttcacctcgaccaagcgtaagtgttgaagagtctattgtgccagcctggtttcctccggggccgtgaatgctgctaatcctaacctccgagcgtgtgcgcacaatccagtgttgctacgtcgtaacgcgtaagttggaggcggaacagactactttcggtaccccgtgtttcctcattcattatttcaatttatggtgacaattacagagatttgtgaattggcgaaactaccactgaatttggccttgtattgtcttattgccttccacaaaacttctgatattccacccagttatatcgatctcctggtttatctaaatttacaatataaattgaaccagataca

SEQ ID NO: 1259 - DNA, 816 bp, Enterovirus E
  isolate V251, complete genome.1
ttaaaacagcctaggggttgttcccacccctggggcccacgcggcgctagtactctggtacgtcagcacccttgtacccccgtttttccctcccttaaacaaattaagattaccactactgaggggagtagtccgactccgctccggtactgccgcaccagtactccggtacgtttagtactctagtacggagtagatggtatcccccacccttgcaacttagaaggaatcaaactacccgaccaataggcgcgcggcatccagccgcgttacggtcaagcacttctgtttccccggtccgcaagggtcgttatccgcccgctccactacgaaaagcctagtagccaaccaaacgactgcgaagttgcgttcagccacaaccccagtggtagctctggaagatggggctcgcaatacccccgtggtgacacggttgcttgcccgcgcgtgcttccgggttcggtcatgtaccgttcactttaatgtcgtgtaattggtcaagagcctattgtgctggagcggttttcctccggggccgtgaatgctgctaatcccaacctctgagcgtgtgcgcacaaaccagtgttgctacgtcgtaacgcgtaagtcggaggcggaacagactactttcggtaccccgtgtttcacttatttttactttatattttatggtgacacttgctgatatttgtgaatttgctcgcttgccgttgaacatagccttgtattatttagtagcattttacaacacaagccagctttcagttgaactcattgattttgctgtttacctcaattacatacacaaacacaaca

SEQ ID NO: 1260 - DNA, 816 bp, Yak enterovirus
  strain SWUN-AB001, complete genome.1
tttaaacagtctgggggttgttcccacccctggggcccacgtggcgctagcactctggtacgctagtacctttgtacgcctgttttccccacccttaaataaattaagattaccactaccgaggggagtagtccgactccgctccggcacagccgcaccagtgcactggtacgctagtaccttttcacggggtagtcggtatccccccccgtaacttagaagcatgtaacaaaccgaccaataggtgcgcggcagccagctgcgttgcggtcaagcacttctgtctccccggtccgcaaggatcgttacccgcccactccactacgaggagcctagtaactggccaagtgattgcggagttgcgttcagccacaaccccagtggtagctctggaagatggggctcgcacatcccccgtggtaacacggttgcttgcccgcgtgtgcttccgggttcagtctccgactgttcacttcaacatcacgcaaccagccaagagccgattgtgctggagtggtcttcctccggggccgtgaatgctgctaatcctaacctccgagcgtgtgcgcacaatccagtgttgctacgtcgtaacgcgtaagttggaggcggaacagactactttcggcaccccgtgtttcctttattttattcttattttatggtgacaattgcagagatttgtgatattgcgactttaccgttaaacatagcactgcattacctggttgcattccacaaaacttcagagattcctagttcctacattgacctacttgtttatttgaatcttaaatacaaacttgagcaagtgaa

SEQ ID NO: 1261 - DNA, 816 bp, Enterovirus E
  isolate D 14/1/96 polyprotein gene, partial cds.1
ttcaaacagcctgggggttgtacccacccctggggcccacgcggcgccagtactctggtacgctagtacctttgtacgcctgttttcccctcccttaaacaaattaagattgccactactgaggggagtagtccgactccgctccgacactgtcgcaccagtactccggtacgcttagtaccctagtacggagtaggtggcatccccaccccgaaacttagaagtatgcaaacaaaccgaccaataggcgcgcggtatccagccgtgtgaaggtcaagcacttctgtctccccggtccgtaaggatcgttacccgcccgacctactacgaaaagcctagtagttggccaagcgagcacgaggttgcactcaaccacaaccccagtggtagctctggaagatggggctcgcagttcccccgtggcaacacggttgcttgcccgcgtgcgcttccgggttcggacttgtgccgttcacctcaaactcgcgtaaccagcgaagagccgattgtgctaggacggttttcctccggggccgtgaatgctgctaatcccaacctccgagcgtgtgcgcacattccagtgttgctacgtcgtaatgcgtaagtcggaggcggaacagactactttcggtaccccgtgtttcctcttattttatttacattttatggtgacactgactgacattcgtgagctagcccgcttgcctctcaatattgcactttattatttggtagcattttacaatactctcgaacttacccttgagcttgttgatttcatcgtttacctaaatcggcttgacaaaggatacaata

SEQ ID NO: 1262 - DNA, 817 bp, Enterovirus E3
  polyprotein gene, partial cds.1
ttaaaacagcctgggggttgtacccacccctggggcccacgtggcgccagtactctggtacgctagtacctttgtacgcctgttttccccacccttaaataaattaagattaccactactgaggggagtagtccgactccgctccgacactgccgcaccagtattccggtacgcttagtaccctaatacggagtagatggtatccccaccccgcaacttagaagcatgcaaacaacccgaccgataggagcgcggcatccagtcgcgtataggtcaagcacttctgtttccccggtccgaaaggatcgttacccgcccaacccactacgagaagcctagtaactggccaaacaaccgcaaagttgcgctcagccacaaccccagtggtagctctggaagatggggctcgcacctcccccgtggtaacacggttgcttgcccgcgtgtgcttccgggttcggcctagtgccgttcactttaaagttgtgtaaccagcaaagagcctattgtgctgggatggttttcctccggggccgtgaatgctgctaatcccaacctccgagcgtgtgcgcacaaaccagtgttgctacgtcgtaatgcgtaagttggaggcggaacagactactttcggtaccccgtgtttccttttattgttatttacattttatggtgacactgactgacatttgtgaatttgctcgcttgcctctcaatattgcactatattacctgattgcatttcacaacactagtaaactaacccttgaacttatcgactttgctgtttacctaagtcacttaaatcacaagtacaata

SEQ ID NO: 1263 - DNA, 817 bp, Enterovirus E
  isolate D 58/96-V2130 polyprotein gene, partial cds.1
ttcaaacagcctgggggttgtacccacccctggggcccacgtggcgccagtactctggtacgttagtacctttgtacgcctgttttcccctcccttaaataaattaagattgccactactgaggggagtagtccgactccgctccggcactgccgcaccagtactccggtacgcctagtaccctagtacggagtagatggtatcccccccccgaaacttagaagtaatgagtctaaccgaccaataggcgcgcggcatccagccgtgttacggtcaagcacttctgtttccccggtccgcaaggatcgttacccgcccgacccactacgagaagcctattaactggccaagcgtcagtgaagttgcactcagccacaaccccagtggtagctctggaagatggggctcgcatctcccccgtggtaacacggttgcttgcccgcgcgtgcttccgggttcagcctcgcgctgttcacttcaatgacacgtaaccagccaagagccgattgtgctgggacggttttcctccggggccgtgaatgctgctaatcctaacctccgagcgtgtgcgcacaatccagtgttgctacgtcgtaacgcgtaagttggaggcggaacagactactttcggtaccccgtgtttcccttaaatttttccttaaatatatggtgacattgactgacatttgtgagtttgctcgcttgccaatcaacattgcactctattacctaatagcatttcacaatacttgtgaactcacccttgaacttgtcaatttctccgcctatttgaactacttaaatagaaagtataaca

SEQ ID NO: 1264 - DNA, 818 bp, Enterovirus E4
  strain bovine enterovirus,strain MexKSU/5, complete1
tttaaaacagctcgggggttgttcccactcccggggcccacgtggcgctagtactctggtacgttagtaccttgtacgcctgttttcccctccttaaacaaattaagattaccactactgaggggagtagtccgactccgctccagcactgctgcaccagtgaattggtatgattagtacctcttcacggagtagatggtattcctaccccgcaacttagaagtttattaacaaaccgaccaataggtgcacagtatccagctgtgtaacggtcaagcacttctgtttccccggtccaccaggatcgttacccgcccgacccactacgagaagcctagtaactagccaagtgactgcgaagttgcgctcaaccacaaccccagtggtagctctggaagatggggctcgcacctcccccgtggtaacacggttgcctgcccgcgtgtgcttccgggttcggccttgtgccgttcacttctacgtcatgtaactagccaagagcctattgtgctgggacggttttcctccgggaccgtgaatgctgctaatcctaacctccgagcgtgtgcgcacaatccagtgttgctacgtcgtaacgcgtaagttggaggcggaacagactactttcggtaccccgtgtttcctcttttattatattatttaatggtgacaattgcagaaatttgtgatttagcgactttaccattgcacatagcattatattgtttgattgctttccacaaaacatctgatatacccaactcttatatcgatctacttatctttctttgcttgaagaataaattaaagaaagcacg

SEQ ID NO: 1265 - DNA, 818 bp, Bovine enterovirus
  genomic RNA, complete genome.1
ttaaaacagcctgggggttgtacccacccctggggcccacgtggcgctagtactctggttcgttagaacctttgtacgcctgttttcccctccttaaacaaattaagatctctgccaatgtggggagtagtccgactccgcaccgatacgtcgcaccagtagaccggttcgcttaggacccttctacggattggtatgagttccccaccccgtaacttagaagtactagcaaaaccgaccaataggagcgtggcacccagctgcgttaaggtcaagcacttctgtctccccggccagaaatggtcgtcacccgccctctctactacgagaagcctattaaccattgaaggcgatgaggagttgcgctccaccacaaccccagtggtagctctgagagatggggctcgcagtcacccccgtggtaacacggttgcttgcccgcgtgtgctctcgggttcggccacttggccgttcactccaactcgttgtaagtggccaagagcctattgtgctagagaggttttcctccggagccgtgaatgctgctaatcccaacctccgagcgtgtgcgcacaatccagtgttgctacgtcgtaacgcgcaagttggaggcggaacagactactttcggtactccgtgtttccttattattttatacaacaatttatggtgacattgactgatactattgagttcgcccgcttgccattgaatattgccttgtattaccttatagcatttcaaaaagccacagatctcaccctcgagctcattcactttgcagtttgtttgaatcgcatacacaagacatttgaac

SEQ ID NO: 1266 - DNA, 818 bp, Enterovirus E
  strain LC-R4 polyprotein gene, complete cds.1
ttaaaacagcctgggggttgtacccacccccggggcccacgtggcgccagtactctggtttgcttagaacctttgtacgcctgttttcccccccctttaaataaattaagatctctgccaatgtggggagtagtccgactccgcaccgatacgtcgcaccagcagaccggttcgcctagaacccttctgcggattggtatgagttcctccccgaaacttagaagcaccgcaccaaccgaccaataggagcgtggcacccagccatgttacggtcaagcacttctgtttccccggtcagaaatgatcgttatccgccctctcccctacgagaagcctattaaccaccgaacgtggtgaagagttgcgctcagccacaatcccagtggtagctctgagagatggggctcgcatttcccccgtggtaacacggttgcttgcccgcgcgtgctctcgggttcagtcttctgactgttcactctgaaccacggtaagtggccaagagcctattgtgctggagaggttctcctccggagccgtgaatgctgctaatcccaacctctgagcgtgtgcgcacaatccagtgttgctacgtcgtaacgcgtaagtcggaggcggaacagactactttcggtactccgtgtttccttattatctattaatcaatttatggtgacactgactgatattgttgagtttgctcgattgcccttgaacattgccttatactatcttattgcattttaatagagccacagagcttactgttgagcttattgactttgctgtttacttgaatcaaatatacgcattagataaac

SEQ ID NO: 1267 - DNA, 819 bp, Bovine enterovirus type 2
  strain PS87, complete genome.1
tttaaaacagcctgggggttgtacccacccctggggcccacgcggcgctagtactctggtacgttagtacctttgtacgcctgttttcccctcccttaaataaattaagattaccactactgaggggagtagtccgactccgctccgacaatgtcgcaccagtgcactggtacgctagtaccttttcacggagtagctggtattccctcccgaaacttagaagcacttaaatcaaccgaccaataggcgcgcggtagccagccgcgttacggtcaagcactcctgtttccccggtccacaaggatcgttacccgcccgacccactgcgagaaacctagtagttggccaagtggtaacgaggttgcgctcagccacaaccccagtggtagctccggaagatggggctcgcaccacccccgcggtaacgcggttgcttgcccgcgcgtgcttccgggtccggtctcgtaccgttcacctcaataccacgtaaccagcaaagagtctattgcgctgggacggttttcctccggggccgtgaatgctgctaatcccaacctccgagcgtgtgcgcacaatccagtgttgctacgtcgtaacgcgtaagttggaggcggaacagactactttcggtaccccgtgtttccctatcattccatttcattttatggtgacaattgctgagatctgtgatttggcgaccttaccactgaatattgccttatattacttggttgcattccacaaaacctctgacatacctgcttcctatatcgacctacttgttttcctcaatttaaagtatagactacaaatagcaga

SEQ ID NO: 1268 - DNA, 819 bp, Enterovirus E
  isolate D 8/01 polyprotein gene, partial cds.1
ttaaaacagcctgggggttgtacccacccctggggcccacgtggcgctagtactctggttcgtttagaacccttgtacgcctgttttcccctcccttaaacaaattaagatctctgccaatgtggggagtagtccgactccgcaccgatacgtcgcaccagcagaccggttcgcttagaacccttctgcggattggtatgagttccccccccttgcaacttagaagcatgagaacaaccgaccaataggagcatggcatccagccgtgtcacggtcaagcacttctgtttccccggccagagatggtcgttacccgccctacccactacgagaagcctattaactaccgaaatcagcgaagagttgcactcagccacaaccccggtggtagctctgagagatggggctcgcaacaacccccgtggtaacacggttgcttgcccgcgcgtgctctcgggttcagtctttgactgttcactccgacctgacgtaagtagccaagagcctattgtgctgggaaggttttcctccggagccgtgaatgctgctaatcctaacctccgagcgtgtgcgcacaaaccagtgttgctacgtcgtaacgcgcaagttggaggcggaacagactactttcggtactccgtgtttccttattttattaactccaatttatggtgacattgactgatattgttgtatttgcccgcctaccgttgaacatagctttatatcatctcattgcattcaagaaatccacagagcttaccctggaactccttgactttgcagttttcttaaatcggatacataaactcagtaaga

SEQ ID NO: 1269 - DNA, 819 bp, Enterovirus E
  isolate 56/59/1 polyprotein gene, partial cds.1
ttcaaacagcctgggggttgtacccacccccggggcccacggggcgccagtactctggtatgcttaatacctttgtacgcctgtttttccctcccttaaataaattaagattaccactactgaggggagtagtccgactccgctccggtaccgccgcaccagtactccggtacgctcagtaccctagtacggagtagttggtattccctccctgtaatttagaagtatgaaattaaaccgaccaataggaggcgtggcatccagtcgcgttacggtcaagcacttctgtttccccggtccgtaaggatcgttacccgcccgacccactacggaaagcctagtaactggccaactggatgagaggttgcactcagccacaaccccagtggtagctctggaagatggggctcgcaccttcccccgtggtaacacggttgcttgcccgcgtgtgctcccgggttcggtccccgaccgttcacttcgattccaggtaaccagccaagagccaactgtgctgggacggttttcctccggggccgtgaatgctgctaatcctaacctccgagcgtgtgcgcgcaaaccagcgttgctacgtcgtaacgcgtaagttggaggcggaacagactactttcggtaccccgtgtttccttttattttacttattgtttatggttacactgactgatatttgtgagtttgctcgtttgcctttgaatattgctttgtattactttgttgcttttcacaaaacgacccagctcaccgttgaacttgtcgattttgctgtttttcttaatctaacctacaagaaacttaaca

SEQ ID NO: 1270 - DNA, 820 bp, Sicinivirus A3
  isolate 100C, complete genome.1
agtattaatgttgccgaattggactgacacaagttgaggagcacatagggcatggttgtaagaccactagcttgtacattccatgggcgatgctgggggtccacgtagccctcaggggaggcggtgacaagcagcgccccggccagtggcagacttgcaaaatttcctaccaaaccaccatctcactcctattaccccttccctctatacctttcgttatggtggttaccactgtttcattgccttggctgaaaatggccaccctctcgacacatgccccttgctgccccatcgtgcgactttccatttgtccactcagttagaaaagcacgggggtcctgtctgcgtcccgagcccggttggtgatcttcctcccccccgcccgattgatggcccggaggggtttgctgatgcgctttatgatgcttgcctgtccttcctccgtcggcgcgaacatgcgctcgttgagcttgcggaaatacagccttgcttccgtttctcccaccccgcataccctggccgcctcccgcttgaaattcgcttcgtccggcatcctggtgtgcctcccccgctgcgtgactttacccgtggcattcgacgccctggcattcagtacattccgctacctaacctaggcggtctcccccagtcccccgctcccccaattgcacacgtgatatccgccgctgtcaatgccgtgcgccgcggtagccactggcattgtcctctgcttcgtcaagtgtccactcacggctggctatttacctattctggctattggtgctctatcctgttgcatgaggggcgacatgaccacgac

SEQ ID NO: 1271 - DNA, 820 bp, Bovine enterovirus type 2
  strain 3A, complete genome.1
tttaaaagagtcagggggttgtacccacccctggggcccacgtggcgctagtactctggtacgccagtacctttgtacgcctgttttcccctccctaaataaattaagattaccactactgaggggagtagtccgactccgctccggcaatgccgcaccagtgcactggtacgctagtaccttttcacggagtagatggtattcctcaccccgaaacttagaagcacgaaaacaaaccgaccaataggtgcatggcatccagccgtgttatggtcaagcacttctgtttccccggtccgcaaggatcgttacccgcccgacccactacgagaagcctagtaactgaccaagtagttgagaggttgcgctcagccacaaccccagtggtagctctggaagatggggctcgcacttcccccgtggtaacacggttgcttgcccgcgcgtgcttccgggttcggcctctgccgttcacctcgattctgcgtaatcagccaagagcctattgtgctgggacggtttcctccggggccgtgaatgctgctaatcccaacctccgagcgtgtgcgcacaatccagtgttgctacgtcgtaacgcgtaagttggaggcggaacagactactttcggaaccccgtgtttcctttgttttaattttaatgctttatggtgacaattgttgagatctgcgatctagcgaccttgccattgaacattgctttgtattatttggttgcattccacaaaacctctgacatacccagctcctatattgatcttttggtttatctaaacttaaaacacaaactcgaaggattgcg

SEQ ID NO: 1272 - DNA, 820 bp, Enterovirus E
  isolate Vir 404/03 polyprotein gene, complete cds.1
ttcaaacagcctgggggttgtacccacccctggggcccacgcggcgccagtactctggtacgcttagtacctttgtacgcctgttttccctttcccttaaacaaattaagattaccactgttgaggggagtagtccgactccgctccggcactgccgcaccagtactccggtatgcctagtaccctagtacggagcagatggtatccccctttccctgaaacttagaagtctgacgcaaacccgaccaataggagcgcggtatccaaccgcgtaacggtcaagcacttctgtttccccggtccgcaaggatcgttacccgcccgtcccactacgggaagcctagtaactggccaactgagtgagaggttgcgctcagccacatacccagtggtagctctggaagatggggctcgcactccccccgtggtaacacggttgcttgcccgcgtgtgcttccgggttcggtttcgaccgttcacctcaaccccaggtaaccagccaagagcctactgtgctggagcggttttcctccggagccgtgaatgctgctaatcccaacctccgagcgtgtgcgcacaaaccagtgttgctacgtcgtaacgcgtaagttggaggcggaacagactactttcggtactccgtgtttccttttgttttatctattgtttatggtgacactgtctgacatttgtgaatttgctcgcttacccttgaatattgcattgtattatctggttgcatttcacaacacaacccaactctccattgaactcatcaactttgctgtatttcttaacacaatacaaagaaagcgagata

SEQ ID NO: 1273 - DNA, 820 bp, Enterovirus E
  strain PS 83 polyprotein gene, complete cds.1
ttaaaacagcctgggggttgtacccacccccggggcccacgcggcgctagtactctggttcgtttagaacccttgtacgcctgtttttcccccccttaaataaattaagatctctgccaatgtggggagtagtccgactccgcaccgatacgtcgcaccaacagaccggttcgcctaggacccttctgcggattggtatgagtcccccccccgaaacttagaagcacattacaaactggccaataggagcgtggtatccaaccgcgttgcggtcaagcacttctgtttccccggtcagaaatgatcgttacccgccctccccactacgagaagcctattaaccactgaaagtgatgatgagttgcgctcagccacaaccccggtggtagctctgagagatggggctcgcaccacccccgtggtgacacggttgcttgcccgcgtgtgctctcgggttcagtcgcgagactgttcactctgactcattgtaggtggccaagagcctattgtgctggggaggttttcctccggagccgtgaatgctgctaatcccaacctccgagcgtgtgcgcacaatccagtgttgctacgtcgtaacgcgtaagttggaggcggaacagactactttcggtactccgtgtttccttaattttattgttcaaatttatggtgacattgtctgacatttgtgaattcgctcgcctgccacttaatatcgctttatatcatctgatagcattccataagactacagaactcactttggaactcatcgactttgctgttttcctgaatactgttcacaaccaaacaaaacaaa

SEQ ID NO: 1274 - DNA, 821 bp, Enterovirus AN12
  genomic RNA, complete genome,strain: AN12.1
ttaaaacagcctgggggttgttcccacccccggggcccacgtggcgccagtactctggcacgttagtgcccttgtacgcctgttttcccctccttaaacaaattaagattgccactactgaggggagtagtccgactccgctccagtaccgctgcaccagtgagctggtacgctagtaccttcgcacggagtagatggcatcccccaccccgtaacttagaagcaaagtacacatctggccaatagtggcgctgcatccagccgcgcaacggtcaagcacttctgtttccccggtccgcaagggtcgttatccgcccagtccactacggaaagcctactaaccattgaagctatcgagaggttgcgctcggccacgaccccggtggtagctctgagtgatggggctcgcaaacacccccgtggtaacacggatgcttgcccgcgcgtgcactcgggttcagcctattggttgttcacctcaacatagtgtaaatggccaagagcctactgtgctggattggttttcctccggagccgtgaatgctgctaatcccaacctccgagcgtgtgcgcacaatccagtgttgctacgtcgtaacgcgtaagttggaggcggaacagactactttcggtactccgtgtttcttttgttttattttgaattttatggtgacaattgctgagatttgcgaattagcgactctaccgctgaacattgccctgtactacctaatcgcatttcacaaaacctcagagataccaagctcttacattgatctgcttgttttcctgaatctcaaatataaattggaacaagcaaa

SEQ ID NO: 1275 - DNA, 821 bp, Enterovirus E
  isolate Jena 38/02 polyprotein gene, partial cds.1
ttcaaacagcctgggggttgtacccacccctggggcccacgtggcgctagtactctggtacgttagtacctttgtacgcctgttttcccctcccttaaacaaattaagattaccactactgaggggagtagtccgactccgctccggtactgccgcaccagtactccggtacacttagtaccctagtacggagtagatggtatccccaccccgcaacttagaagcatgcaaacaaaccgaccaataggcgcacgatatccagtcgtgtttcggtcaagcacttctgtctccccggtccgaaaggatcgttacccgcccgacccactacgagaagcccagtaactggccaagtgattgcgaagttgcgctcagccacaaccccagtggtagctctggaagatggggctcgcgtctcccccgtggtgacacggtcgcttgcccgcgtgtgcttccgggttcggcctacgccgttcacttcaatgtcacgtaaccagccaagagcctattgtgctgggacggttttcctccggggccgtgaatgctgctaatcccaacctccgagcgtgtgcgcacaacccagtgttgctacgtcgtaatgcgtaagttggaggcggaacagactactttcggtaccccgtgtttcctttaaattttattcattattttatggtgacaattgctgagatctgcgaattagcgactctgccgttgaatattgctctgtactatttggttgcattccacaaaacctctgacatccccagtacatacattactttacttgtttacctcaatctaaagcacaagctagataatacaaa

SEQ ID NO: 1276 - DNA, 822 bp, Picornaviridae sp.
  rodent/Mc/PicoV/Tibet2015 polyprotein gene,1
tttaaaagagcctgggggttgttcccacccccaggatgcccactcgtgggcatgtggtactgtggtatcgcggtaccacagtacgcctctttgaccgccctgacccaagaatcttttcctttaacagatctcttcgtaacaagggcctcagcctgacgcaagtgcctccattggagtctctccaagccctccggggcttggagggcgccgaccccctgcctagggggagcccacgacacggctggagtccattggcacaccgcagccacgattcaagccagaattgaaagcgggaagcacttctgtctccccggtgtggatcatacgctgtacccacggcgaaaagtgaagcatcgttacccgactcggtacttcgagaagcccagtacagttgtggatctctgcagggtatacgctcagcgtgacccctacgtagttccttgagatggctgagagaacaccccacgggcgaccgtgtctctcggcgcgtggctcaaggccgggccttcagtggctcggtgccttgcagagtgaagcctccgaacagcctattgagctaccgtttagcctccgccctcttgaatgcggctaatcctaaccatggagcgcccgcccacagtccagtgggtagagcgtcgtaacgcgcaagtccgtggcggaaccgactactttagagtggcgtgtttccaatttatcctttataaagttgcttatggtgacaccacaagagatccacgatttcttgtttcttatcactgagacacaagtcatattcatcaatctttattgcggaattaacttggtgcgtccaaacacatcagc

SEQ ID NO: 1277 - DNA, 822 bp, Bovine enterovirus type 2
  strain BHM26, complete genome.1
tttaaaacagcctgggggttgtacccacccccggggcccacgtggcgccagtactctggtacgctagtacccttgtacgcctgtttttcccccccttaaataaattaagactgccactactgaggggagtagtccgactccgctccggcactgccgcaccagtacactggtatgttagtacctttgtacggagtaagtggtatccccaccctgaaacttagaagtatgcaaacaaaccgaccaataggtgcgcggtatccaaccgcgtaacggtcaagcacttctgtctccccggtccgaaaggatcgttatccgcccgacccactacgagaagcccagtagctggccaagtgaacgcgaggttgcgctcagccacaaaccccagtggtagctctggaagatggggctcgcacttcccccgtggtgacacggttgcttgcccgcgtgtgcttccgggttcggactcgtgccgatcacctcaaattcacgcaaccagtcaagagcctattgtgctgggacggttttcctccggagccgtgaatgctgctaatcctaacctccgagcgtgtgcgcacaatccagtgttgctacgtcgtaacgcgtaagttggaggcggaacagactactttcggtactccgtgtttcctttgaattttatcattattttatggtgacaattgctgaaatctgtgatttggcaactctcccactgaacatcgcactatactacctgattgcatttcacaaaacctccgatatccccagttcctatatcgacctacttgtttatctcaatttgaaacataaactaggacggttgaa

SEQ ID NO: 1278 - DNA, 822 bp, Enterovirus F
  strain IL/alpaca, complete genome.1
tttaaaagagcctgggggttgtacccacccctggggcccacgtggcgctagtactctggtacgccagtacctttgtacgcctgttttcccctcccttaaataaattaagattgccactactgaggggagtagtccgactccgctccagcaatgctgcaccagtgcactggtacgccagtaccttttcacggagtagatggcatccccaccccgaaacgtagaagcatgcaaacaaaccgaccaccaggcgcgcggcatccaaccgcgttacggtcaagcacttctgtttccccggtccgcaaggatcgttacccgcccgacccactacgagaagcccagtaactggccaagtggtcgcgaggttgcactcagccacaaccccagtggtagctctggaagatggggctcgcagttcccccgtggtaacacggttgcctgcccgcgcgtgcttccgggttcggctctcgccgttcacctcaaccccacgtaaccagccaagagcctattgtgctgggacggtattcctccggggccgtgaatgctgctaatcccaacctccgagcgtgtgcgcacaatccagtgttgctacgtcgtaatgcgtaagttggaggcggaacagactactttcggtaccccgtgtttcctttatttttccttcaaaaattttatggtgacaattgttgagatttgcgatttggccactttaccattgaatattgccttgtattacttggttgcttttcacagaacctctgacatacccagttcgtatattgatcttcttgtttatttaaacctaaaacacaaacttagaaagctaag

SEQ ID NO: 1279 - DNA, 822 bp, Enterovirus F
  strain BEV-261 polyprotein gene, complete cds.1
tttaaacagcctgggggttgttcccacccctggggcccacgtggcgctagtactctggtacgctagtacctttgtacgcctgtttttcccctcccttaaataaatcaaggttgccactactgaggggagtagtccgactccgctccagcaatgctgcaccagtgcactggtacgctagtaccttttcacggagtagatggtatcccttaccccggaacctagaagattgcacacaaaccgaccaataggcgcaccgcatccagccgtgcagcggtcaagcacttctgtctccccggtctgtaaagatcgttatccgcccgacccactacgaaaagcctagtaactggccaagtgaacgcgaagttgcgctccgccacaaccccagtggtagctctggaagatggggctcgcaccacccccgtggtaacacggttgcctgcccgcgtgtgcttccgggttcggtctcgtgccgttcacttcaacttcacgcaaccagccaagagcctattgtgctgggacggttttcctccggggccgtgaatgctgctaatcccaacctccgagcgtgtgcgcacaatccagtgttgctacgtcgtaacgcgtaagttggaggcggaacagactactttcggtaccccgtgtttcctctcattttatttaatattttatggtgacaattgttgagatttgcgctcttgcaacgttgccattgaatattggcttatactatttggttgccttttacaaaacctctgatatacccagttcttacattgatctgcttgtttttctcaatttgaagtatagactacaaatagcaaa

SEQ ID NO: 1280 - DNA, 822 bp, Enterovirus F
  strain PS87/Belfast polyprotein gene, complete cds.1
tttaaaacagcctgggggttgtacccacccctagggcccacgtggcgccagtactctggtacattagtacctttgtacgcctgttttcccctcccttaaataaatcaagattaccactactgaggggagtagtccgactccgctccagcaatgctgcaccagtgcactggtacgctagtaccttttcacggagtagatggtatccccaccccgaaacttagaagcatgtgatcaaatcgaccaataggcgcgcggttgccagccgcgtttcggtcaagcacttctgtttccccggtccgcaaggatcgttacccgcccgacccactgcgagaagcccagtaactggccaagcggtagcgaggttgcactcagccacaaccccagtggtagctctggaagatggggctcgcagttcccccgtggtaacacggatgcctgcccgcgtgtgcttccgggttcggtctcgtgccgttcacctcaataccgcgtaaccagtgaagagcctattgcgctgggacggttttcctccggggccgtgaatgctgctaatcctaacctctgagcgtgtgcgcacaatccagtgttgctacgtcgtaacgcgtaagtcaggggcggaacagactactttcggtaccccgtgtttccttttattttatatttatcattttatggtgacaattgctgagatttgcgatttagcggttttgccattgaacattgctttgtactacttggttgcatttcacaaaacctccgacatacccagctcctacatcgacttgcttgtttttcttaattaagacataaactagagaacacaaa

SEQ ID NO: 1281 - DNA, 822 bp, Enterovirus F
  genomic RNA, complete genome,strain: BEV IS2/Bos1
ttaaaacagcctgggggttgtacccacccctggggcccacgtggcgccagtactctggttcgcttagaacctttgtacgcctgttttcccctcccttaaacaaattaagattgccactactgaggggagtagtccgactccgctccagcactgctgcaccagtgaattggtacgctagtacctctccacggagtagataggaatccctacccgaaacttagaagcatgtaaataacccgaccaataggagcgtggtatccaaccatgttaaggtcaagcacttctgtttccccggccagaaatggtcgttacccgccctacccactacgagaagcccagtaactacccaaacaagtgagaagttgcactcatccacaaccccagtggtagctctgagagatggggctcgcatcttcccccgtggtaacacggttgcttgcccgcgtgtgctctcgggttcgaccccgtgtcgatcacctccgatctgacgtaaccagccaagagcctattgtgctgggaaggttttcctccggagccgtgaatgctgctaatcccaacctccgagcgcgtgcgcacaatccagtgttgctgcgtcgtaatgcgtaagttggaggcggaacagactactttcggtactccgtgtttccttttattcatttattgattttatggtgacattgctgagatttgtgatttggctgttttaccactgaacattgccctgtattacctgattgcattccacaaaacttctgagatacctacatcttatattgatttacttgtcttccttaacctgaggcacaaactagagaacacaaa

SEQ ID NO: 1282 - DNA, 823 bp, Bovine enterovirus type 2
  strain BJ001, complete genome.1
tttaaaagagtcagggggttgtacccacccctggggcccacgtggcgctagtactctggtacgttagtacccttgtacgcctgtttttccctcccttaaataaattaagactaccactactgaggggagtagtccgactccgctccggcactgccgcaccagtacaccggtacgctagtacccttgtacggagtagatggtatccccacccccgaaacttagaagcaagcacacaaaccgaccattaggcgcgcggcatccagtcgcgtaacggtcaagcacttctgtttccccggtccgcaaggatcgttacccgcccgacccactacgagaagcctagtagttggccaagtgaacgcgaggttgcgctcagccacaaccccagtggtagctctggaagatggggctcgcacttcccccgtggtaacacggttgcttgcccgcgcgtgcttccgggttcggcttcgtgccgttcacctcaacttcacgtaaccagcaaagagcctattgtgctgggacggttttcctccggggccgtgaatgctgctaatcccaacctccgagcgtgtgcgcacaatccagtgttgctacgtcgtaacgcgtaagttggaggcggaacagactactttcggtaccccgtgtttccttttaattttattcattattttatggtgacaattgctgagatttgtgatttggcgactttaccattgaatattgcattctattaccttatagcatttcacaaaacttctgatattccaccctcctacatcgacctgcttgttttcctgaatctcaaatataaatttgaagagacaaa

SEQ ID NO: 1283 - DNA, 828 bp, Rosavirus 2
  strain GA7403, complete genome.1
ttttcaaagccggggttgggggggctgcaccccatccccccttcttcccctcttcctccgttgcgcgcgttcctgacgcccgccgcggagttcctagctggctaacacccagttgggagggctctcactccctcacacctcgcgctttggacgccaggcatggcgttaaacatgcattcccttcccctagtaacctcccttcgccccttccccacgttgtaccccctccgagatggctgctaaggcgcttgctgctacagcagtctcgtgtttcgggtgttataagtgctttcttttccactccactccctgcctatggggagcggaacggccttgtctcggtcgttgcttcttgcagatcttcacccctccaggctttctggactcgccaggggtggagtagtaggcgcactgtctaagtgaaggtagcagtgttgttggcgaagagttgtggacctactttgagtttgtagcgatcatccagagctagcggatctccccacgcggtaacgcgtgcctctaggcccaaaaggcacggtgttcacagcaccctttggatggcgggggtgcccccctccgcacttaaagtagaaaaacagcttagtagtcaaataacatggctttcctcaagcattcagtgctacatgggactgaaggatgcccagaaggtacccgcaggcaacgataagctcactgtggatctgatctggggccctgggccaggtgctatacacctggttaaaaccaaatctggtagtcagggttaaaaaacgtctaagtcccacccccccggggacggggggttcccttaaaccctcaactgacacc

SEQ ID NO: 1284 - DNA, 830 bp, Rattus tanezumi hunnivirus
  strain Wencheng-Rt38-2 polyprotein gene,1
cccccctcccccccttcccttccctttgcaacgcaacaattgtaagtgccctcacctgtcaattgggaccaccactttcagtgaccccatgcgaagtgctgagagaaaggaagctttcttacccttcatttgtgaacccactggtctaagccgcttggaatacgatgagtggaaaagttcattcttaatggagtgaaacatgcttaaatttccagctcgtgctggtctttccagtacggggcggccctgtctggccgtaattcttcagagtgtcacgccacacttgtggatctcacgtgccacatgacagcgctacagctggaactgggtgcttggtgcccatggagtaacagcgaaaagtgttagatcaagccttgcttgggctatgagcctgcggaacaacaactggtaacagttgcctcaggggccgaaagccacggtgttaacagcaccctcatagtttgatccacctcagggtggtgatgtttagcagttagtagttgccaatctgtgttcactgaaatctcggcataccgtgtagtgtacaggggtgaaggatgcccagaaggtacccgtaggtaaccttaagagactatggatctgatctggggccttgtccggagtgctttacacacggctcaaggttaaaaaacgtctagccccacagagcccgagggattcgggttttccctttaaaaacccgactagagcttatggtgacaattattgctgttcagacgaacagtgtaattgttgtctattcacagcagttctatcagagcttttcccacaacggatcttcttggcaagcaaatacagcaggagtcaat

SEQ ID NO: 1285 - DNA, 837 bp, Enterovirus E
  genomic RNA, nearly complete genome,strain:1
atttaaggaggggaaaacagcctgggggttgtacccacccctggggcccacgtggcgctagtactctggtacgttagtacctttgtacgcctgttttcccctccttaaataaattaagattaccactactgaggggagtagtccgactccgctccagcaatgctgcaccagtgaattggtacgctagtacctctgcacggagtagatggtatccctttccccgaaacttagaagaaagcaaacaaaccgaccaataggagcgcggcaaccagccgtgttgcggtcaagcacttctgtttccccggtccgcaaggatcgttatccgcccgacccactacggaaagcctagtaactggccaaacagcaaagaagttgcgctcggccacaaccccagtggtagctctggaggatggggctcgcatctcccccgtggtaacacggttgcttgcccgcgtgtgcctccgggttcagtcatcgactgttcacttcaatgctgtgtaaccagccaagagcctactgtgctgggacggttttcctccggggccgtgaatgctgctaatcccaacctccgagcgtgtgcgcacaaaccagtgttgctacgtcgtaacgcgtaagtcggaggcggaacagactactttcggtaccccgtgtttcctttgatttttatttaatattttatggtgacaattactgagatttgtgatttggctgctttaccattgaatattgctctgtactatttagtcgcatttcacaaaacttctgagatccctgcgtcttttattgacttgcttgttttcctcaatttgaagtgcaaactagaaggcataaaaagag

SEQ ID NO: 1286 - DNA, 843 bp, Washington bat picornavirus
  polyprotein gene, complete cds.1
cctatcgacagagtttgttgccgttaaaaagaggtcccaggggtgtttcccctggggcccctttttaacggcaacaaactctgtcgataggctaacgccgagcgttcacttagtgagggcgatttacatcacataacaccgccttgtttgacatgtttcactcaaggacaagatatggtaaatctgtgcactacttgaaaattctcgacgttagcggagctaaaacaacaccacaacacaacacaacaattaacaacacattagaaattcgaatttagaagttagaccccaatttttgatttaacatctgttattttgactttgggcaatccactgatctttgaatttcacacgacagccgtggagagacggcacacgctacttcagcatagatccaaggatagctggtagcggcgacgaagtccacaatcactctatattttcaggcttctgaaagtgctgataaattgattaagttcggtttatcggaattgccgaggtccctcgaagaaacccgcggaaatgagaatatagatgttggtatggcagccagaagacatgaactatgacaagtacgtacgagcgtgtgttcggacctggttccccgccttaggatcagcgccctgtgaggggaccctttggaaagatgatcactacatagactactcgaacgagaaactatgcaaataacagggaacgtttggccacccggatgaatccagtagtacggaaaagcttaggaattcgattttggatcttttacctgtgttttaataagaaatgcaggagttgataaatagggctcgactgggagcgagactgcagcggctaaagcagcagtaa

SEQ ID NO: 1287 - DNA, 847 bp, Dromedary camel enterovirus
  strain 20CC, complete genome.1
ttaaaacagcctgggggttgttcccacccccagggcccacgtggcgcaagtactctgcttcgttagaagccttgtacgcctgttttcccctccttaaataaattaagattaccacttccgaggggagtagtccgactccgctccgatacgtcgctccagtgcgctagtacgcttagtactttctcacggggatagtggtacccctccctagtaatttagaagacttgaaaaaccgaccaataggcacctcgcatccagcggggtaaaggtcaagcacttctgtttccccgggtcgagtagcgatagactgtgcccacggtcgaaggtgaaacaacccgttatccgactttgtacttcgggaagcctagtaccaccaaagattatgcttggggtttcgctcagcacgaccctggtgtagatcaggctgatggatcaccgcgttcctcacaggcgactgtggcggtggtcgcgtggcagcctgccgatggggcaacccatcggacgccaagcatatgacagggtgtgaagagcctactgagctacaaagtattcctccggcccctgaatgcggctaatcccaaccacggagcatttgctaccaaaccaggtagtggaatgtcgtaacgggtaactctgtggcggaaccgactactttgggtgtccgtgtttccttttaatttatcattctgtgtatggtgacaactatagtgctatctcgatttgcattactattgttgagattgacactttattacattgttgcattttaccctttgagtgagttttcacctgaacagattaatttacttatcctgtttatatatcacaagcagaaatacttgcaaag

SEQ ID NO: 1288 - DNA, 867 bp, Falcon picornavirus
  complete genome.1
tttgcgcgcgggacctctgctacggccgggctcatattatcctccggggttttatgggtcgggcctagcccctttctgtaacggtctgtgtgagacctaaaaccacacataatatcgtgcctgatggttaacgcttgttagccgtctgtaaactaagaacctaccaacacactatgcacctcttggcgaagccgcttggaataagttgagaggaattatgcatgctagttgtgtttgtttacaactaattgttctaatccaagtgaagctcttcgcttggggcggcacgacacttgccgtaattcttctaccgtccctccacaccttgtggatgaagggccggatgtgtggcctctggctaacccctctctctggggtgatgctactggatgttttactcctagaccaaatcacatgaactcctcttgatccacttcggtggggctatgagcctgcggattaatagctggcgacagctaccccaggggccaaaagccacggtgttagcagcaccctcatagtctgatgcccaagggctgatgttgggagctagtagtgtgtgtctggcctatgtttaggacttctggccaagcgcagaggagtggggctgaaggatgcccagaaggtacccgtaggtaaccttaagagactatggatctgatctggggccccctcacgtggctttaccacgtgttgggggttaaaaaacgtctaggccccaccagcccacgggagtgggctttcccttaaaaagcccaacaatatttatggtgacaattcactgtttcttctttgcaatttttgtattcttggactccttattttttgtttgcttgattttagtggacattcagattcaaatacaaa

SEQ ID NO: 1289 - DNA, 891 bp, Antarctic picorna-like virus 3
  nonstructural protein gene, complete1
aagttgcattattaggtgcaaccataattgtttattttttcccgtgtgagacggaattctcatgacagggcagtcgagagagagcgatctctctctttgcctctaatagcaatattagcgttaccctttttcgataaaagagaaatatcaaaacgatagtagacgaaagttaatctatgtcctacatttgtagggaatgaaatactgattagttgtcattgacgacagatctaagctgtaatcaacagccggacttgtgcaaagttcgataagtagaataagtactagagattagtggatttgtgacccacaacttgaattaaaggcttgtatgtgcggaaatgctgtacaagaaaagagctaaaatgcgttttcctacgtgacgatataaacgatggaggtggggttcacttatttggagaaccgacctagacggctgtttttaacagcacccccagttgcctttctgggcttagtttcgggaataggaccccgaaacggcgtacgccactaaaaaggagaagacgtcaagcagcatgcgattaggacatgtatgtgtttttatccgattatggaaccaggtggttccgtaattgagacatatacccctatatttaaggtgtcgaaagatacccattatatgcaattactggagtattttgtatatatgtgctgtgagggcactatcctaggttaccgtgggatcgcaagatcaccttacggactgagcagtaaaagccattttggccgtctcttagcgtagagcacacactcatgcgaaacccaaactcgaaagagcgggctagtaggacttagggcagattgatgatcaaagaccccccaaaaggtctttttctctttctgcgtcttcatcttcctcatatgttttag

SEQ ID NO: 1290 - DNA, 899 bp, Equine rhinitis B virus
  strain 421, complete genome.1
ttttgtaactgaggttttaacatctcattgtttttgagccccaacgtcttggtggatgctcaaaagagattactcttgatgcttggctctcagaaagaatggcacctcaacgtgttgagacccgattcttttgagtcgagaccacttcccctcacccttaagattgcttttcttccaactaaacccctattgatgtgttggtcgtttgccaatcggagggcgacagatgcaggtcgctctgaggtctagtagtgtgggaacttgtcgctactaatgaaacgaggtagtgacacttagtacctacgaacaaatcttggagcaactccctttgcttccttcacccatctttcacttttcgttccgctttagcaggggtcttctttctgtccccctggcggcattggaactagccgtcgcgccttagcgcgcagccctgaaggccccacatcttgtggatctcgccgtgggcatgtttccggcatgtgtttctcaagcctgcaaccgaagaccgaacagccacttgaacggtttgagcgtggtagcgctgtgcgagttggcggtggactcccctcgtggcgacacgagcccccgcggccaaaagcccagtgtttgcagcacctctcgcatccaggacaaccccatcctggcgctcactcttagtagtgtggcttagtacgtattaggtggtaagccgagctctccctcggtcttgttctgaatgcacacatgtctaggggctaaggatgtcctacaggtacccgcacgtaaccttaagagagtgtggatctgagtaggagaccgtggtgcactgctttacagttgtagcccggtttaaaaaacgtctatgcccctacagggtagcggtgggccgcgccctttcctttaaaaatatttgtttt

SEQ ID NO: 1291 - DNA, 899 bp, Pacific black duck sicinivirus-like virus
  isolate1
ttacacgcgagttttgcctcgcgcgcccgtaagggcacaaacccccctaggacgtgcacttgcccattggtacgtccggaaaccgtctgcctcggcacgcggcttctccacggtcgcaagcgacccacaatgcttcctggccatggtgtcccccaggaagagcgaacttgtggtgcggcgacccgggagtcgcgtcggcagctcaagtttctctggcagcacaccattttcccctttgtaacctcccgaaaatggcccgggggtagtccgccccctcaaaatggaccgtgtgcacccctccccacgcgttaaagcgggaagggccctcagtcggcgcagggaagcgcgctgaccctgttaagtggataggtcaggaaaaacatgtccacatcataaccccaattcccacggtcgctgatggtctgaccgttaggggcggcccaccggcgctctttgccgggcgtggcttaaccacaccatctcctctagtggattcctagagttctcccacttagtaagctcattccccccactgctgatcccgcaagggagtacaagtgcccagtgagcccacctggtaacaggtgcactggggcccaaaaggctagtggacagggggaagaccccgaatgccgtgggttcccacctgcggtgaagggtttcccccgaagtccacctttgtacttggctatggcctgttggtagtgtggagagtggcgccgaaaggtctggatgtactctctgaggaaactagtaggatcggagaacgttagtagacccccactaggtacccgcgcaagcggatctgaggtgggcccggtgactatgccgttccggtaagtccgggttaaaacaatgaacgcgttctccacaaatcactttcctctctttcttattca

SEQ ID NO: 1292 - DNA, 900 bp, Equine rhinitis B virus
  strain 396, complete genome.1
ttttgtaactgaggttttgacatctcattgtttttgagccccaacgtcttggtggatgctcaaagaagattactcttgatgcttggctctcagaaagaatggcacctcaatgacttgagacccgattcttttgagtcgagacctttttccctctccccttttgaagattgctttcttccaactaaacccctattgatgtgttggtcgtttgccaatcggagggcgacaggcacaggtcgctcctgagctcagtagtgtgggaacttgttgctactaatgaaacgaggtagtgacacttagtacctgcgaacgactcaggtgcaatccctgtacttctttcaccaaccttccactttccgttccactttagcaggggtcttctttctgtccccctggcggcattggaactagccgttgcgccttagcgcacagccctgaaggccccacaccttgtggatcttgccgtgggcatgtttctggcatgtgtttctcaagcctgtaaccgacgaccgaacggtcacgtgaacagtttgagcgtggtagcgctgtgtgagttggcggtggactcccctcgtggcaacacgagcccccgtggccaaaagcccagtgtttgcagcacctctcacatccagggaaaccccaccctggcgctcactcttagtaacgtggcttagtacgtattaggtggtaagccgagctctccctcggtcttgtactgaatgcacacatgtctaggggctaaggatgtcctacaggtacccgtacgtaacctttagagagtatggatctgagtaggagaccgtggtgcactgctatacagatgtagcccggtttaaaaagcgtctatgcccctacagggtagcggtgggccgcgccctttcctttttaaaacttgttttt

SEQ ID NO: 1293 - DNA, 904 bp, Equine rhinitis B virus 2
  strain 1228, complete genome.1
tatccccttgatgcaactgaggttttaacatctcattgtttttgagccccaacgtcttggtggatgctcaaagaagattactcttgatgcttggctctcagaaagaatggcacctcaacacttttgagacccgattcttttgagtcgagaccacttcccttcccctcaaggattgcttttcttccaactaaacccctattgatgtgttggtcgtttgccaatcggagggcgacagatacaggtcgctttggcgcttggtagtgtgggaacttgtcgctgctgatgaaacgaggtagtgacacttagtacctacgagaggcaacaaggcaataccccatcttccttcaccaactttttcttttcgttccactttagcggaggtcttctttctgtccctccggcggcattggaactagccgttgtgcctcagcacacagccctgaaggctccacaccttgtggatcttgccgtgggcatgtttctggcatgtgtttctcaagcctgcaaccgaagaccgaaccgttgcatgaacagtttgagcgtggtagcgctgtgcgagttggcggtggattcccctcgcggcaacacgagcccccgcggccaaaagcccagtgttcacagcacctctcgcatccaggaaaaccccctcctggcgctcactcttagtagtgtgacctagtacgtactaggtggtaagccgagctctccctcggtcttgttctgaatgcacacatgtctaggggctaaggatgtcctacaggtacccgtacgtaaccttcagagagtatggatctgagtaggagaccgtggtgcgctgctttacagtcgtagcccggtttaaaaagcgtctatgcccctacagggtagcggtgggccgcaccctttcctttgaaactattgtttt

SEQ ID NO: 1294 - DNA, 905 bp, Equine rhinovirus 3
  strain P313/75, complete genome.1
tatccccttgatgcaactgaggttttaacatctcattgtttttgagccccaacgccttggtggatgctcaaagaagattactcttgatgcttggctctcagaaagaatggcacctcaaagttttgagacccgattcttttgagtcgagaaccttacccccaacccttgagattgcttttcttccaactaaacccctattgatgtgttggtcgtttgccaatcggagggcgacaggcgcaggtcgccccaacagctagtattgtgggaacttgccactgctgatgaaacgaggtagtggcatttagtacctgagaacgctggaggagcatctccccctcttccttcattaatctttcacttttcgttcctctttagcgggggtcttcttgctatccccccggcggcattggaactagccgttgcgccttagcgcacagtcctgaaggccccacatcttgtggatcttgccgtggacatgtttctggcatgtgtttctcaagcctgcaaccgacgactgaacagacgtgtgaacagtttgagtgtggtagcgctgtgtgagttggcggtggaaccccctcgtggtgacacgagcccccgtggccaaaagcccagtgtttacagcacctctcacatccagggaaaccccaccctggcgctcactcttagtaacacttcctagtaggtattaggtggtaagccgagctcttcctcggtcttgttctgaatgcacacatgtctaggggctaaggatgtcctacaggtacccgcacgtaaccttcagagagtgtggatctgagtaggagactgtggtgcgctgctttacagacgtagcccagtttaaaaaacgtctatgcccctacagggtcgcggtgggccgcaccctttccttttacaaacttggtttt

SEQ ID NO: 1295 - DNA, 906 bp, Sicinivirus sp.
  strain RS/BR/2015/4S polyprotein gene, complete1
gttgcgtgcctgcagccgctcagcgtccatccttcctgttacccacctaatttggtggtaccccccggtcccttccctatccccccatacagccggaacggaccacacacctccgggtctgtggcccaaccccgactcggggttgtggcggtggtcacagctccggctgtgacttcctaaccactcctttcacccacccctttcttacatctacttaagtttatgtttgccctctcatcccaaggccttggctcatgtcctttgaggctatctggcacaaacactctttgtttggcgtctggagacccactgagccaccacttatccatgctcaatgcaacccccattagtaaccacgcaaatctaatagtggttctgcctcggcagcacctaagtgcccagggagttcaactggcgacagttgccctggggcccaaaaggctaggtggtaagggtctggccaagcaaggggtccccaccccaagctgaacccatggccccgaagccaccctttaggtggaggttatgtacccgatcgctattctatttgtttggcgaacctggccggaaacatttagtttgtggattcgttggtttgtggtgattagtagaccccctggaggtacccgttttggatctgaccagggacccgtgactataccgctccggtaattcgggtttaaaaccatgaacgtcaccacttgtcttcttttcccattttattcttcttatagtggtctgtttaaatgctcttagaatttctgttggtgactacggcacttaccatagtggttctttcccccagtgagttgcatcagctgcttgctatttgcgtgtataattttgcattaattttcctctggttgctcggaattttggagttgcctagttaccccgctatacagc

SEQ ID NO: 1296 - DNA, 915 bp, Coxsackievirus
  A16, strain S1082b polyprotein gene, complete cds.1
caggaacattcattagacgccatcagatccgtctcagggaaaagatcggtcgttgatctcctttctatgagacttcatgaagcgagggtttgtagttcgaagtggcatcagacacctcatggggttccgagaacttaattgggggacaaaagtgtacaaaaaagcaggctttaaaacagctctggggttgttcccacccacagggcccactgggcgctagcacactgattctgcgggatctttgtgcgcctgttttataaccctccccctaagcagcaacttagaagctctgtacaatcacgaccagtagtgggcgtggcgcgccagccatgtcttggtcaagcacttctgtatccccggactgagtatcaatagactgcttacgtggtcgaaggagaaaacgttcgttacccggctaactacttcgagaaacccagtagcactatgaaagttgcggagtgtttcgctcagcacttcccccgtgtagatcaggtcgatgagtcactgtaaaccccacgggcaaccgtgacagtggctgcgttggcggcctgcccatggggtaacccatgggacgctctaatacagacatggtgtgaagagtctattgagctagttagtagtcctccggcccctgaatgcggctaatcctaactgcggagcgcgcaccctcaacccagggggcggcgcgtcgtaatgggtaactctgcagcggaaccgactactttgggtgtccgtgtttccttttattccttattggctgcttatggtgacaattgagaagttgttaccatatagctattggattggccatccggtgtctaacagagccattgtttacctattcattggatacgtccctcttgatctcaaggccattcaaactcttgactatatattgctccttaactgcaagaa

SEQ ID NO: 1297 - DNA, 934 bp, Picornaviridae sp.
  isolate zftwig05pic3 genomic sequence.1
ccgtgggaccggagatgtgtgtccgaaaggtggcccgtttcgtgggccagacgttgaaagggggatgcagggtatgctgttttaatacagcaaagacccacacatccccgctttcaacgtctggcccacgaaacgggccacctttcggactgaccattggtttattattgaaattggcttggaaatgctgacactgtaagctggtttgtgatttaaacaatggttgttctggactctctttgagagatttacctggtggcttggcacagcctccttaaggacgtctggtccagaaaggcccggtcaagacttatattggactggtcccctgtccactgagtattctgttctgaaccgtgtaggcagggctagcgccaccatgattgccaagggactgcctccctggtgacagggacccttgggcccaaaaggctaggtggcaactctcatgtcaagagaggggtatccaccccaatctgaatcatgtggagtgaagccactcgtcatggctctgaccccgagactgtctacatttagtaagatggatgaaaactggatttggagaccactttgattgtcttgatgagaaagtccgctatttgactgagtagatgccctccagctacccttacggatgtgaggaggggaccgtgactatagcgttccgctaaaccggtttaaaaaacatgaaaggtcaaatatgtggcgccattttccatttttactaataaccatatgcctgacgaagttgattgtgctgagtgctctaagccctcctggactgtcagattaaaattggcttttctgcaatattttggctgccagtttgtatgggtttatcactcaggaaagaatcaagagaaagattgaaaatcttggattgtgcaaccaaggctcatttttgtccttgtgaaggcaaccagagattgcagtc

SEQ ID NO: 1298 - DNA, 944 bp, Mus musculus picornavirus
  strain Wencheng-Mm283 polyprotein gene,1
accccggtaaaggtcagggtgtacttgcccacgttggtcggcttgtcaacactggttccggctttatcctgatacgtcaccgtgtactcgctgccatcgatcacaaacccctcatcgtccttgacagtgaccgcaggctcctgcttctctccgttgaacgtcaccgagggcggcgtcacctggatggtgggcgcggtcacggtgttgctgatgatggacgcatctaccgaagcaggtgtgctgtcattgtggttgctgtcgccctgggccttgtaccagacagtgtaattgtccacagctttcccggtgggaatggttggagtatacgggccgtcctcagccagagcgtagaccatcgtgccgtcggaagcggtgcccgcctcaatcagcgcctgctcggtgccgttgtagggcagattttccaaacccttcggagccgttgccaccgatgcagcacccttcgcaatcacaaaggtccccgtaccgtttacgatgtagttgccgccgttggcgttggtgatgatgaccgtcgccgtaccggcgttgatgttgtcgcggtaggacagggtgtactcgtcgctggggatggtgttgccgccgtcctccaccttactgcgagactcctagtagggagtggacgtattttgtgtgtgacccggagtttcccccgctccagaaacctgtgatgagctatcctcacgcccacctggcaacaggcgaggacgctgcgttggcacaggacctcattgaggctcacaacttgctgaagcaaacgaagagacgattgcgctaaggtggtttcctccggcctcctgaatgcggctaatcccatcccttggtcatccgcccactagccagtgggtagggtgtcgtaacgcgcaagccgagggcggaaccgactactttggagtgtccgtgtttctattttattttatacggcagtc

SEQ ID NO: 1299 - DNA, 957 bp, Foot-and-mouth disease virus
  type SAT 1,isolate1
ctgtctgcctaatggaggtacgacagccagaggtctagccccagcgtcgcgtaacgaccgtccccggttgaaacgccactactcagacctctggctgtcgtacctccattaggcagacaggaaccacccttctggggcctacgctactgtgcccttttggggcccgcggtcgtcatcaccgcgcctccattaggctcgcagtcgtacctcctctaggctgacaactgtcgcccttttagggcctacgaccttcaagttacggttttggcgtccctcccgcggccgactcgcctacgtgaacgctagctcttcacccgaaggcccgcctttacgttaccgtcttttccgacgttaaaggattgcaaccacacgatttgccttcttttccgaagtaaaaggatacaagcacacagttttgcccgttttcatgagaaatgggacgtctgcgcacgaaacgcgctgttgctcttcgcattcttgtacaaacacgatcttgacgcaggaatcttagaccaacccaacccgtgcacctgcaagtttcgcccggtccttccgggtcttgagagacaaacagatgtactgagatcaactccacgattggtctactagcgggtactagtaacactcactttgcttcgtagcggagcacatgagcggtgggacctcccccatggtaacatggacccaccgggccaaaagccacgcctcacggcctcatgtgtgtgcaaccccagcacggcaacttgtttgtgaaacacaccttaaggtaacactgagactggtacttgatttctggagacaggctaaggatgcccttcaggtaccccgaggtaacaagagacactcgggatctgagaaggggaccaggagttctatcaaactgcccggtttaaaaagcttctatgcctggataggtgaccggaggccggcaccttttcctttatttaaactcacttt

SEQ ID NO: 1300 - DNA, 966 bp, Canine picornavirus
  isolate A128thr polyprotein gene, complete cds.1
gggcctcctttcaccggggttcgcgtgacccggttataaaccacgtgacgtctttccagcgctgggttttgacgataaaataacccaggcactatagacagcgatgtctttaaacatccagacagaacagtctttaaaattacaagcttattcaattacaactagtggtgactcactttaaaatgtccaaatttaaggttggcagcttaactgcccgtgattgggctcacgtataaatggtcctggctggccgactacggccacacaatcaccgaatgatttaaacttcgggtgtgagctactaagctccttgtgtaagggtgacaccttgcccaagtatcttgtccccggtctgttgccgcttggaggcagatagggttattttccttgttactttctactcattggggatctatcccagtgaagggtcaagtggcaacccctctcttcttgaggagtggcatggcggtctttccgcatctcgaaccatgccacgcgccatgcacatatgtgacttataagtctgaagattttgaaacactttggttgacaagttgatgactgtagcgactccagtgtgcgagcggacttcccctcatggtaacatgagcctctcggaccaaaagtcaagcgttcatagcgccacactggacgggactttcctagtccctcatcaatgaaacacaatttgtgaatctttctttggacgaaagagtctgatgtgtaggatggagtgaagatggcctgaaggtaccccgtatacgggatctgatcaggtgcccctctcttggggttaaaaattactcggctcctcccacaaactggtggtccagtttttctctttaatttttactgcttatatggtgacagttattgacattctagtgttgattgcctattgttactttatattgttgttgtttttcctgaattgctttttacaaccttatactattacctttgaac

SEQ ID NO: 1301 - DNA, 970 bp, Ampivirus A1
  strain NEWT/2013/HUN, complete genome.1
ttaaaatgaaaatgtgcgagcatttagctcgcacttttcattttaaatatgtccacagccctcaagggacttagtcccttgtccgcctcggcgacttaatatttaacttgtagttacttatataaagcccgtaatttatacgatacatacaaaactccagcatccactctgactgccatagtggaataaaccaagaccactctctacatccggagagtcaaatccattggacgaccatttgatactattctacaaaatctattttgatcatattatattaagcattaagcgtcattgacttggttgattaattagtttcactgattaatcgagtcaacaaacaacttcctaaattaatataattttgctcaaacgagaatttcagaatattatgcgaccatttaactatgtttacttaagcatcattgacttttgagtcaacaaataccttaagtttccgctcatctccttaccttcatacgcaggcccataagcctatattatttacctctatttataattttaatcattaatctgcacaattccaccgtttagacattattagggtttataacaacactaataattattgtatgaaaaccagtagttccagcgcgtcgtggcctattgacccccatacaaagttcataagaatagttttgctgttttcagtcattcattctttcccttaaaaggtttggtcacctataagtccagctcattacatcgagtatggcaagtctgcccaacatttgttatatctgactctggtgataataaatgtggcgggataaagttacaagtctagttatatagacagctttagctcaaaaccccaatttccccccttgtgtattattattgtattattaattgtaattatgtatttaatgtaaattgtacttttatctatccaacttcttatttcaattttctatcaagacttttttcttgtcgaaactcaatatct

SEQ ID NO: 1302 - DNA, 975 bp, Carfax virus
  polyprotein gene, partial cds.1
cacggggttaacacctcgtgcgatcttttcaaccacatatatatatattctgggcggaatattagaaaatcttgggattatatatatgtaattgatatattgggcggaatatttgaaaatcttgatatatctcttacaaaattttgaaaccaaccattttagaataggtttattagcgtgacaaactatgcgacctgtagagaaaaatgtcaaaatcaatacaaaattttaaaatgttaaaaatgtttatatatttagtaaactcaagttgaattgtgatagagaaggcaagtaactaccagatgactcttctcgcaacaggattatcccagactgttgttccagcaaattgatggatgtaaactaaatttataatgataaatagttaagtaggagacccttatggtactcaagcttgtattaaaatttttaactatagatatgtattattgaaatgtgttctgtctcttatatgtacacccacgtagtcgtggtaccgctataacgccaatcggactaaataacaagaatgtgaggttcctattgagatttcaaaatttatcatattgtcacgaccaatctctttgggtaaggacttgcatggtatgcgaaaggtcggattgccagaatctgcttgctgctttctggatgtgtacacattttaattttaagatttatgatagttaatttgataatacaaggacagtgcgttttgtgacgtgcttgtttgcatctctgtcttagatgacaggtttctacactaggcgatgtgtagaagtgtagacctctaatggtttggtgcatcgtgccccggttctttttcaaggcttctccggttcaaagatagcggaggacccccctttgtaatgcagacaccattgtggataatttatctacaattcgaagcgataatttttccattcatttttgtatctttaaaacttcttacggagattttcaatattaactagaaaa

SEQ ID NO: 1303 - DNA, 723 bp, Unknown
  Description of Unknown: Expression vector pAV-UCSF, complete sequence.1 sequence
cctcggccccctcaccctcttttccggtggtctggtcccggaccaccgttactccattcagcttcttcggaacctgttcggaggaattaaacgggcacccatactccccccaccccccttttgtaactaagtatgtgtgctcgtgatcttgactcccacggaacggaccgatccgttggtgaacaaacagctaggtccacatcctcccttcccctgggagggcccccgccctcccacatcctccccccagcctgacgtatcacaggctgtgtgaagcccccgcgaaagctgctcacgtggcaattgtgggtccccccttcatcaagacaccaggtctttcctccttaaggctagccccggcgtgtgaattcacgttgggcaactagtggtgtcactgtgcgctcccaatctcggccgcggagtgctgttccccaagccaaacccctggcccttcactatgtgcctggcaagcatatctgagaaggtgttccgctgtggctgccaacctggtgacaggtgccccagtgtgcgtaaccttcttccgtctccggacggtagtgattggttaagatttggtgtaaggttcatgtgccaacgccctgtgcgggatgaaacctctactgccctaggaatgccaggcaggtaccccacctccgggtgggatctgagcctgggctaattgtctacgggtagtttcatttccaatccttttatgtcggagtc

SEQ ID NO: 1304 - DNA, 712 bp, Aichi virus
  genomic RNA, complete genome.1
tcaccctctttcccggtggtctggtcccggaccaccgttactccattcagcttcttcggaacctgttcggaggaattaaacgggcacccatactccccccacccccctttggtaactaagtatgtgtgctcgtgatcttggctcccacggagcggaccgatccgttggtgaacaaacagctaggtccacatcctcccttcccctgggagggcccccgccctcccacatcctccccccagcctgacgtatcacaggctgtgtgaagcccccgcgaaagctgctcacgtggcaattgtgggtccccccttcatcaagacaccaggtctttcctccttaaggctagccccggcgtgtgaattcacgttgggcaactagtggtgtcactgtgcgctcccaatctcggccgcggagtgctgttccccaagccaaacccctggcccttcactatgtgcctggcaagcatatctgagaaggtgttccgctgtggctgccaacctggtaacaggtgccccagtgtgcgtaaccttcttccgtctccggacggtagtgattggttaagatttggtgtaaggttcatgtgccaacgccctgtgcgggatgaaacctctactgccctaggaatgccaggcaggtaccccacctccgggtgggatctgagcctgggctaattgtctacgggtagtttcatttccaatccttttatgtcggagtc

SEQ ID NO: 1305 - DNA, 712 bp, Kobuvirus sp.
  strain 16317x87 polyprotein gene, complete cds.1
tcaccctcttttccggtggtctggtcccggaccaccgttactccattcagcttcttcggaacctgttcggaggaattaaacgggcacccatacacccccatcccctttctgcaacttaagtatgtgtgctcgtgatcttgactcccacggaatggatcgatccgctggagaacaaactgctagatccacatcctcccttcccctgggaggaccttggtcctcccacatcctccccccagcctgacgtaccacaggctgtgtgaagcccccgcgaaagctgctcacgtggcaattgtgggtccccccttcatcaagacaccaggtctttcctccttaaggctagccccgatgtgtgaattcacattgggcaactagtggtgtcactgtgcgctcccaatctcggccgcggagtgctgttccccaagccaaacccctggcccttcactatgtgcctggcaagcatacctgagaaggtgttccgctgtggctgccagcctggtaacaggtgccccagtgtgcgtaaccttcttccgtcttcggacggtagtgattggttaagatttggtgtaaggtccatgtgccaacgccctgtgcgggatgaaacctctactgccctaggaatgccaggcaggtaccccacccccgggtgggatctgagcctgggctaattgtctacgggtagtttcatttccaattcttttatgtcggagtc

SEQ ID NO: 1306 - DNA, 712 bp, Aichi virus
  isolate Chshc7, complete genome.1
tcaccctctttcccggtggtctggtcccggaccaccgttactccattcagcttcttcggaacctgttcggaggaattaaacgggcacccatacatccccatcccctttctgtaacttaagtatgtgtgcttgtaatcttgactcccacggaatggatcgatccgctggagaacaaactgctagatccacatcctcccttcccctgggaggaccttggtcctcccacatcctccccccagcctgacgtaccacaggctgtgtgaagcccccgcgaaagctgctcacgtggcaattgtgggtccccccttcatcaagacaccaggtctttcctccttaaggctagccccgatgtgtgaattcacattgggcaactagtggtgtcactgtgcgctcccaatctcggccgcggagtgctgttccccaagccaaacccctggcccttcactatgtgcctggcaagcatatctgagaaggtgttccgctgtggctgccagcctggtaacaggtgccccagtgtgcgtaaccttcttccgtctccggacggtagtgattggttaagatttggtgtaaggttcatgtgccaacgccctgtgcgggatgaaatctctactgccctaggaatgccaggcaggtaccccaccctcgggtgggatctgagcctgggctaattgtctacgggtagtttcatttccaatccttttatgtcggagtc

SEQ ID NO: 1307 - DNA, 679 bp, Aichi virus
  strain kvgh99012632/2010 polyprotein gene, complete1
gtgttactccattcagcttcttcggaacctgttcggaggaattaaacgggcacccatactcccccccaccccccttttgtaactaagtatgtgtgctcgtgaccttgactcccacggaacggaccgatccgttggtgaacaaacagctaggtccacatcctcctttcccctgggagggtccccgccctcccacatcccccccccagcctgacgtgtcacaggctgtgtgaagcccccgcgaaagctgctcacgtggcaattgtgggtccccccttcatcaagacaccaggtctttcctccttaaggctagccccggcgtgtgaactcacgttgggcaactagtggtgtcactgtgcgctcccaatctcggccgcggagtgctgttccccaagccaaacccctggcccttcactatgtgcctggcaagcacacctgagaaggtgttccgctgtggctgccagcctggtaacaggtgccccagtgtgcgtaaccttcttccgtcttcggacggtggtgattggttaagatttggtgtaaggttcatgtgccaacgccctgtgcgggatgaaacctctactgccctaggaatgccaggcaggtaccccaccttcgggtgggatctgagcctgggctaattgtctacgggtggtttcatttccaattctttcatgtcggagtc

SEQ ID NO: 1308 - DNA, 727 bp, Aichi virus
  isolate Goiania/GO/03/01/Brazil, complete genome.1
ggcttcggccccctcaccctcttttccggtggtctggtcccggaccaccgttactccattcagcttcttcggaacctgttcggaggaattaaacgggcacccatacacccccatccccttttttgcaacttaagtatgtgtgctcgtaatcttgactcccacggaatggatcgatccgctggagaacaaactgctagatccacatcctccctcccccctgggaggacctcggtcctcccacatcctccccccagcctgacgtatcacaggctgtgtgaagcccccgcgaaagctgctcacgtggcaattgtgggtccccccttcatcaagacaccaggtctttcctccttaaggctagtcccgatgtgtgaattcacatcgggcaactagtggtgtcactgtgcgctcccaatctcggccgcggagtgctgttccccaagccaaacccctggcccttcactatgtgcctggcaagcatatctgagaaggcgttccgctgtggctgccagcctggtaacaggtgccccagtgtgcgtaaccttcttccgtccccggacggtagtgattggttaagacttggcgtaaggttcatgtgccaacgccctgtgcgggatgaaacctctactgccctaggaatgccaggcaggtaccccaccttcgggtgggatctgagcctgggctaattgtctacgggtagtttcatttctaattctttcatgtcggagtc

SEQ ID NO: 1309 - DNA, 710 bp, Aichi virus 1
  strain PAK56 polyprotein gene, complete cds.1
accctcttttccggtggtctggccccggaccaccgttactccattcagcttcttcggaacctgttcggaggaattaaacgggcacccatacacccccaccccctttctgcaacttaagtatgtgtgctcgtgatcttgactcccacggaatggatcgatccgctggagaacaaactgctagatccacatcctcccttcccttgggtggacctcggtcctcccacatcctccccccagcctgacgtatcacaggctgtgtgaagcccccgcgaaagctgctcacgtggcaattgtgggtccccccttcatcaagacaccaggtctttcctccttaaggctagccccgatgtgtgaattcacattgggcaactagtggtgtcactgtgcgctcccaatctcggccgcggagtgctgttccccaagccgaacccctggcccttcactatgtgcctggcaagcatatctgagaaggtgttccgctgtggctgccagcctggtaacaggtgccccagtgtgcgtaaccttcttccgtcctcggacggtagtgattggttaagatttggtgtaaggttcatgtgccaacgccctgtgcgggatgaaacctctactgccctaggaatgccaggcaggtaccccaccctcgggtgggatctgagcctgggctaattgtctacgggtagtttcatttccaattctttcatgtcggagtc

SEQ ID NO: 1310 - DNA, 710 bp, Aichi virus 1
  isolate ETH/2016/P4, partial genome.1
accctcttttccggtggtctggtcccggaccaccgttactccattcagcttcttcggaacctgttcggaggaattaaacgggcacccatacacccccaccccctttttgcaacttaagtatgtgtgctcgtgatcttgactcccacggaatggatcgatccgctggagaacaaactgctagatccacatcctcccttcccttgggaggacctcggtcctcccacatcctccccccagcctgacgtaccacaggctgtgtgaagcccccgcgaaagccgctcacgtggcaattgtgggtccccccttcattaagacaccaggtctttcctccttaaggctagtcccgatgtgtgaattcacattgggcaactagtggtgtcactgtgcgctcccaatctcggccgcggagtgctgttccccaagccaaacccctggcccttcactatgtgcctggcaagcatatctgagaaggtgttccgctgtggctgccagcctggtaacaggtgccccagtgtgcgtaaccttcttccgtcttcggacggtagtgattggttaagatttggcgtaaggttcatgtgccaacgccctgtgcgggatgaaacctctactaccctaggaatgccaggcaggtaccccaccctcgggtgggatctgagcctgggctaattgtctacgggtagtttcatttccaattcttctatgtcggagtc

SEQ ID NO: 1311 - DNA, 710 bp, Aichi virus 1
  strain PAK585 polyprotein gene, complete cds.1
accctctttcccggtggtctggtcccggaccaccgttactccattcagcttcttcggaacctgttcggaggaattaaacgggcacccatacactcccatcccctttctgcaacttaagtatgtgtgctcgtgatcttgactcccacggaatggatcgatccgctggagaacaaactgctagatccacatcctcccttcccttgggtggacctcggtcctcccacatcctccccccagcctgacgtatcacaggctgtgtgaagcccccgcgaaagctgctcacgtggcaattgtgggtccccccttcatcaagacaccaggtctttcctccttaaggctagccccgatgtgtgaattcacattgggcaactagtggtgtcactgtgcgctcccaatctcggccgcggagtgctgttccccaagccgaacccctggcccttcactatgtgcctggcaagcatatctgagaaggtgttccgctgtggctgccagcctggtaacaggtgccccagtgtgcgtaaccttcttccgtcctcggacggtagtgattggttaagatttggtgtaaggttcatgtgccaacgccctgtgcgggatgaaacctctactgccctaggaatgccaggcaggtaccccaccctcgggtgggatctgagcctgggctaattgtctacgggtagtttcatttccaattctttcatgtcggagtc

SEQ ID NO: 1312 - DNA, 677 bp, Aichi virus
  strain D/VI2169/2004 polyprotein gene, complete cds.1
gttactccattcagcttcttcggaacctgttcggaggaattaaacgggcacccatacacccccacccccttttctgcaacttaagtatgtgtgctcgtaatcttgactcccacggaatggatcgatccgctggagaacaaactgctagatccacatcctcccttcccctgggaggaccccggtcctcccacatcctccccccagcctgacgtatcacaggctgtgtgaagtccccgcgaaagctgctcacgtggcaattgtgggtccccccttcatcaagacaccaggtctttcctccttaaggctagccccgatgtgtgaattcacattgggcaactagtggtgtcactgtgcgctcccaatctcggccgcggagtgctgttccccaagccaaacccctggcccttcactatgtgcctggcaagcatatctgagaaggtgttccgctgtggctgccagcctggtaacaggtgccccagtgtgcgtaaccttcttccgtctccggacggtagtgattggttaagatttggtgtaaggttcatgtgccaacgccctgtgcgggatgaaacctctactgccctaggaatgccaggcaggtaccccaccttcgggtgggatctgagcctgggctaattgtctacgggtagtttcatttccaattcttttatgtcggagtc

SEQ ID NO: 1313 - DNA, 677 bp, Aichi virus
  strain D/VI2244/2004 polyprotein gene, complete cds.1
gttactccattcagcttcttcggaacctgttcggaggaattaaacgggcacccatacacccccacccccttttctgcaacttaagtatgtgtgctcgtaatcttgactcccacggaacggatcgatccgctggagaacaaactgctagatccacatcctcccttcccctgggaggaccccggtcctcccacatcctccccccagcctgacgtaacacaggctgtgtgaagtccccgcgaaagctgctcacgtggcaattgtgggtccccccttcaccaagacaccaggtctttcctccttaaggctagccccgatgtgtgaattcacattgggcaactagtggtgtcactgtgcgctcccaatctcggccgcggagtgctgttccccaagccaaacccctggcccttcactatgtgcctggcaagcatatctgagaaggtgttccgctgtggctgccagcctggtaacaggtgccccagtgtgcgtaaccttcttccgtctccggacggtagtgattggttaagatttggtgtaaggttcatgtgccaacgccctgtgcgggatgaaacctctactgccctaggaatgccaggcaggtaccccaccttcgggtgggatctgagcctgggctaattgtctacgggtagtttcatttccaattcttttatgtcggagtc

SEQ ID NO: 1314 - DNA, 677 bp, Aichi virus
  strain D/VI2359/2004 polyprotein gene, complete cds.1
gttactccattcagcttcttcggaacctgttcggaggaattaaacgggcacccatacacccccacccccttttctgcaacttaagtatgtgtgctcgtaatcttgactcccacggaatggatcgatccgctggagaacaaactgctagatccacatcctcccttcccctgggaggaccccggtcctcccacatcctccccccagcctgacgtatcacaggctgtgtgaagtccccgcgaaagctgctcacgtggcaattgtgggtccccccttcatcaagacaccaggtctttcctccttaaggctagccccgatgtgtgaattcacattgggcaactagtggtgtcactgtgcgctcccaatctcggccgcggagtgctgttccccaagccaaacccctggcccttcactatgtgcctggcaagcatatctgagaaggtgttccgctgtggctgccagcctggtaacaggtgccccagtgtgcgtaaccttcttccgtctccggacggtagtgattggttaagatttggtgtaaggttcatgtgccaacgccctgtgcgggatgaaacctctactgccctaggaatgccaggcaggtaccccaccttcgggtgggatctgagcctgggctaattgtctacgggtagttccatttccaattcttttatgtcggagtc

SEQ ID NO: 1315 - DNA, 677 bp, Aichi virus
  strain D/VI2287/2004 polyprotein gene, complete cds.1
gttactccattcagcttcttcggaacctgttcggaggaattaaacgggcacccatacacccccacccccttttctgcaacttaagtatgtgtgctcgtaatcttgactcccacggaatggatcgatccgctggagaacaaactgctagatccacatcctcccttcccctgggaggaccccggtcctcccacatcctccccccagcctgacgtatcacaggctgtatgaagtccccgcgaaagctgctcacgtggcaattgtgggtccccccttcatcaagacaccaggtctttcctccttaaggctagccccgatgtgtgaattcacattgggcaactagtggtgtcactgtgcgctcccaatctcggccgcggagtgctgttccccaagccaaacccctggcccttcactatgtgcctggcaagcatatctgagaaggtgttccgctgtggctgccagcctggtaacaggtgccccagtgtgcgtaaccttcttccgtctccggacggtagtgattggttaagatttggtgtaaggttcatgtgccaacgccctgtgcgggatgaaacctctactgccctaggaatgccaggcaggtaccccaccttcgggtgggatctgagcctgggctaattgtctatgggtagtttcatttccaattcttttatgtcggagtc

SEQ ID NO: 1316 - DNA, 664 bp, Aichi virus
  strain D/VI2321/2004 polyprotein gene, complete cds.1
gcttcttcggaacctgttcggaggaattaaacgggcacccatacacccccacccccttttctgcaacttaagtatgtgtgctcgtaatcttgactcccacggaatggatcgatccgctggagaacaaactgctagatccacatcctcccttcccctgggaggaccccggtcctcccacatcctccccccagcctgacgtatcacaggctgtgtgaagtccccgcgaaagctgctcacgtggcaattgtgggtccccccttcatcaagacaccaggtctttcctccttaaggctagccccgatgtgtgaattcacattgggcaactagtggtgtcactgtgcgctcccaatctcggccgcggagtgctgttccccaagccaaacccctggcccttcactatgtgcctggcaagcatatctgagaaggtgttccgctgtggctgccagcctggtaacaggtgccccagtgtgcgtaaccttcttccgtctccggacggtagtgattggttaagatttggtgtaaggttcatgtgccaacgccctgtgcgggatgaaacctctactgccctaggaatgccaggcaggtaccccaccttcgggtgggatctgagcctgggctaattgtctacgggtagtttcatttccaattcttttatgtcggagtc

SEQ ID NO: 1317 - DNA, 629 bp, Aichivirus A
  strain FSS693 polyprotein gene, complete cds.1
cacccatacacccccacccccttttctgtaactcaagtatgtgtgctcgtaatcttgactcccacggaatggatcgatccgctggagaacaaactgctagatccacatcctccctccccttgggaggacctcggtcctcccacatcctccctccagcctgacgtatcacaggctgtgtgaagcccccgcgaaagctgctcacgtggcaattgtgggtccccccttcatcaagacaccaggtctttcctccttaaggctagccccgatgtgtgaattcacattgggcaactagtggtgtcactgtgcgctcccaatctcggccgcggagtgctgttccccaagccaaacccctggcccttcactatgtgcctggcaagcatatctgagaaggtgttccgctgtggctgccagcctggtaacaggtgccccagtgtgcgtaaccttcttccgtctccggacggtagtgattggttaagatttggtgtaaggttcatgtgccaacgccctgtgcgggatgaaacctctactgccctaggaatgccaggcaggtaccccaccttcgggtgggatctgagcctgggctaattgtctacgggtagtttcatttccaattcttttatgctggagtc

SEQ ID NO: 1318 - DNA, 487 bp, Aichi virus 1
  isolate ETH/2016/P9 polyprotein gene, partial cds.1
catcctccccccagcctgacgtaccacaggctgtgtgaagcccccgcgaaagctgctcacgtggcaattgtgggtccccccttcattaagacaccaggtctttcctccttaaggctagtcccgatgtgtgaattcacattgggcaactagtggtgtcactgtgcgctcccaatctcggccgcggagtgctgttccccaagccaaacccctggcccttcactatgtgcctggcaagcatatctgagaaggtgttccgctgtggctgccagcctggtaacaggtgccccagtgtgcgtaaccttcttccgtcttcggacggtagtgactggttaagatttggcgtaaggttcatgtgccaacgccctgtgcgggatgaaacctctactaccctaggaatgccaggcaggtaccccaccctcgggtgggatctgagcctgggctaattgtctacgggtagtttcatttccaattcttctatgtcggagtc

SEQ ID NO: 1319 - DNA, 438 bp, Aichi virus 1
  isolate C1_Kwanak_06 polyprotein gene, partial cds.1
aagctgctcacgtggcaattgtgggtccccccttcatcaagacaccaggtctttcctccttaaggctagccccggcgtgtgaattcacgttgggcaactagtggtgtcactgtgcgctcccaatctcggccgcggagtgctgtcccccaagccaaacccctggcccttcactatgtgcctggcaagcatatctgagaaggtgttccgctgtggctgccagcctggtaacaggtgccccagtgtacgtaaccttcttccgtctccggacggtagtgattggttaagatttggtgtaaggttcatgtgccaacgccctgtgcgggatgaaacctctactgccctgggaatgccaggcaggtaccccacctccgggtgggatctgagcctgggctaattgtctacgggtagtttcatttccaatccttttatgtcggagtc

SEQ ID NO: 1320 - DNA, 724 bp, Aichivirus A
  strain rat08/rAiA/HUN, complete genome.1
tgtcggccccctcaccctcttttccggtggtctggacccggaccaccgttactccattcagcttcttcggaacctgttcggaggaattaaacgggcacccactttcctgtcctctccccttttctgtaactccaagtgtgtgctcgtaatcttgactcccgcggattgaccgctccgctggtgaacaaactgctaggtcatctcctccccacccttgggcgtccttccgggcgtccacaccctccccccagcctgacgtgtcacaggctgtacaaagaccccgcgaaagctgctaacgtggcaattgtgggtcccccctttgtaaaggaaccgagtctttctcccttaaggctagacccctgtgtgaattcacaggtggcaactagtggttccactgcatgctcccgacctcggccgcggagtgctgttccccaagtcgtaacactgaccttcacttatgtgcctggcaagcatatctgagaagatgttccgctgtggctgccaaacctggtaacaggtgccccagtgtgcgtagtcttcttccgtcttcggacggtaggtgttaggtaaagatgcggcgtaaggttcaagtgccaacgccctggaagggatgacccttctactgccctaggaatgccgcgcaggtaccccaggttcgcctgggatctgagcgcgggctaattgtctacgggtagtttcatttccctcttcttccactggcatc

SEQ ID NO: 1321 - DNA, 438 bp, Aichi virus 1
  isolate Inlet_2011MAR_Aichi_A leader protein gene,1
aagctgctcacgtggcaattgtgggtccccccttcatcaagacaccaggtctttcctccttaaggctagccccgacgtgtgaactcacgttgggcaactagtggtgtcactgtgcgctcccaatctcggccgcggagtgctgttccccaagccaaacccctggcccttcactatgtgcctggcaagcatatctgagaaggtgttccgctgtggctgccagcctggtaacaggtgccccagtgtgcgtaaccttcttccgtcttcggacggtagtgattggttaagatttggtgtaaggttcatgtgccaacgccctgtgcgggatgaaacctctactgccctaggaatgccaggcaggtaccccaccttcgggtgggatctgagcctgggctaattgtctacgggtagtttcatttccaattcttttatgtcggagtc

SEQ ID NO: 1322 - DNA, 438 bp, Aichi virus 1
  isolate C3_Seongbuk_09 polyprotein gene, partial cds.1
aagctgctcacgtggcaattgtgggtccccccttcatcaagacaccaggtctttcctccttaaggctagccccggcgtgtgaactcacgttgggcaactagtggtgtcactgtgcgctcccaatctcggccgcggagtgctgttccccaagccaaacccctggcccttcactatgtgcctggcaagcatatctgagaaggtgttccgctgtggctgccagcctggtaacaggtgccccagtgtgcgtaaccttcttccgtcttcggacggtagtgattggttaagatttggtgtaaggttcatgtgccaacgccctgtgcgggatgaaacctctactgccctaggaatgccaggcaggtaccccaccttcgggtgggatctgagcctgggctaattgtctacgggtagtttcatttccaattctttcatgtcggagtc

SEQ ID NO: 1323 - DNA, 438 bp, Aichi virus 1
  isolate Inlet_2011JAN_Aichi_B leader protein gene,1
aagctgctcacgtggcaattgtgggtccccccttcatcaagacaccaggtctttcctccttaaggctagccccgatgtgtgaattcacattgggcaactagtggtgtcactgtgcgctcccaatctcggccgcggagtgctgttccccaagccaaacccctggcccttcactatgtgcctggcaagcatatctgagaaggtgttccgctgcggctgccaccctggtaacaggtgccccagtgtgcgtaaccttcttccgtctccggacggtagtgattggttaagatttggtgtaaggttcatgtgccaacgccctgtgcgggatgaaacctctactgccctaggaatgccaggcaggtaccccacccccgggtgggatctgagcctgggctaattgtctacgggtagtttcatttccaattcttttatgtcggagtc

SEQ ID NO: 1324 - DNA, 438 bp, Aichi virus 1
  isolate C4_Yongdeongpo_07 polyprotein gene, partial1
aagctgctcacgtggcaattgtgggtccccccttcatcaagacaccaggtctttcctccttaaggctagccccgatgtgtgaattcacattgggcaactagtggtgtcactgtgcgctcccaatctcggccgcggagtgctgttccccaagccaaacccctggcccttcactatgtgcctggcaagcatatctgagaaggtgttccgctgtggctgccagcctggtaacaggtgccccggtgtgcgtaaccttcttccgtctccggacggtagtgattggttaagatttggtgtaaggttcatgtgccaacgccctgtgcgggatgaaacctctactgccctaggaatgccaggcaggtaccccacccccgggtgggatctgagcctgggctaattgtctacgggtagtttcatttccaattcttttatgtcggagtc

SEQ ID NO: 1325 - DNA, 438 bp, Aichi virus 1
  isolate Inlet_2011JAN_Aichi_A leader protein gene,1
aagctgctcacgtggcaattgtgggtccccccttcatcaagacaccaggtctttcctccttaaggctagccccggcgcgtgaactcacgttgggcaactagtggtgtcactgtgcgctcccaacctcggccgcggagtgctgttccccaagccaaacccctggcccttcactatgtgcctggcaagcatatctgagaaggtgttccgctgtggctgccagcctggtaacaggtgccccagtgtgcgtaaccttcttccgtcttcggacggtagtgattggttaagatttggtgtaaggttcatgtgccaacgccctgtgcgggatgaaacctctactgccctaggaatgccaggcaggtaccccaccctcgggtgggatctgagcctgggctaattgtctacgggtagtttcatttccaattcttttatgtcggagtc

SEQ ID NO: 1326 - DNA, 438 bp, Aichi virus 1
  isolate C2_Kangdong_01 polyprotein gene, partial cds.1
aagctgctcacgtggcaattgtgggtccccccttcatcaagacaccaggtctttcctccttaaggctagccccgatgtgtgaattcacattgggcaactagtggtgtcactgtgcgctcccaatctcggccgcggagtgctgttccccaagccaaacccctggcccttcactatgtgcctggcaagcatatctgagaaggtgttccgctgtggctgccagcctggtaacaggtgccccagtgtgcgtaaccttcttccgtctccggacggtagtgattggttaagatttggcgtaaggttcatgtgccaacgccctgtgcgggatgaaacctctactgccctaggaatgccaggcaggtaccccaccctcgggtgggatctgagcctgggctaattgtctacgggtagtttcatttccaattcttttatgtcggagtc

SEQ ID NO: 1327 - DNA, 438 bp, Aichi virus 1
  isolate C2_Eunpyeong_01 polyprotein gene, partial1
aagctgctcacgtggcaattgtgggtccccccttcatcaagacaccaggtctttcctccttaaggctagccccggcgtgtgaactcacgttgggcaactagtggtgtcactgtgcgctcccaatctcggccgcagagtgctgttccccaagccaaacccctggcccttcactatgtgcctggcaagcatatctgagaaggtgttccgctgtggctgccagcctggtaacaggtgccccagtgtgcgtaaccttcttccgtcttcggacggtagtgattggttaagatttggtgtaaggttcgtgtgccaacgccctgtgcgggatgaaacctctactgccctaggaatgccaggcaggtaccccaccttcgggtgggatctgagcctgggctaattgtctacgggtagtttcatttccaattctttcatgtcggagtc

SEQ ID NO: 1328 - DNA, 438 bp, Aichi virus 1
  isolate C6_Mapo_22 polyprotein gene, partial cds.1
aagctgctcacgtggcaattgtgggtccccccttcatcaagacaccaggtctttcctccttaaggctagccccggcgtgtgaactcgcgttgggcaactagtggtgtcactgtgcgctcccaatctcggccgcggagtgctgttccccaagccaaacccctggcccttcactatgtgcctggcaagcatatctgagaaggtgttccgctgtggctgccagcctggtaacaggtgccccagtgtgcgtaaccttcttccgtcttcggacggtagtgattggttaagatttggtgtaaggttcgtgtgccaacgccctgtgcgggatgaaacctctactgccctaggaatgccaggcaggtaccccaccttcgggtgggatctgagcctgggctaattgtctacgggtagtttcatttccaattccttcatgtcggagtc

SEQ ID NO: 1329 - DNA, 438 bp, Aichi virus 1
  isolate C4_Yongdeongpo_16 polyprotein gene, partial1
aagctgctcacgtggcaattgtgggtccccccttcatcaagacaccaggtctttcctccttaaggctagccccgatgtgtgaattcacattgggcaactagtggtgtcactgtgcgctcccaatctcggccgcggagtgctgttccccaagccaaacccctggcccttcactatgtgcctggcaagcatatctgagaaggtgttccgctgtggctgccagcctggtaacaggtgccccggtgtgcgtaaccttcttccgtctccggacggtagtgattggttaagatttggtgtaaggttcatgtgccaacgccctgtgcgggatgaaacctctactgccctaggaatgccaggcaggtaccccaccctcgggtgggatctgagcctgggctaattgtctacgggtagtttcatttccaattctttcatgtcggagtc

SEQ ID NO: 1330 - DNA, 725 bp, Aichivirus A
  strain Wencheng-Rt386-2 polyprotein gene, complete1
cctcggccccctcaccctcttttccggtggtctggacccggaccaccgttactccattcagcttcttcggaacctgttcggaggaattaaacgggcacccactttcctgtcctctccccctttctgcaactcaagtgtgtgctcgtaatcctgactcccacgggttgaccgccccgttggtgaacaaacagctaggtcattccctccctacccctgggcgccatttcagtggcgttcatatcctccccccagcctgacgtgtcacaggctgtgcaaagtccccgcgaaagctgctcacgtggcaattgtgggtcccccctttgtgaaggaaccgagtctttctcccttaaggctagacccctgtgtgaactcacaggtggcaactagtggttccactgcatgctcccgacctcggccgcggagtgctgttccccaagtcgtgacactgacctccacttatgtgcctggcaagcatatctgagaagatgttccgctgtggctgccaaacctggtaacaggtgccccagtgcgtgtagtcttcttccgtctccggacggtaagtgtgtggtaaagatgcggcgtaaggttcaagtgccaacgccctggaagggatgacccttctactgccctaggaatgccgcgcaggtaccccaggttcgcctgggatctgagcgcgggctaattgtctacgggtagtttcatttccctctcttttcactggcatc

SEQ ID NO: 1331 - DNA, 438 bp, Aichi virus 1
  isolate C5_Mapo_01 polyprotein gene, partial cds.1
aagctgctcacgtggcaattgtgggtccccccttcatcaagacaccaggtctttcctccttaaggctagccccggcgtgtgaactcacgttgggcaactagtggtgtcactgtgcgctcccaatctcggccgcggagtgctgttccccaagccaaacccctggcccttcactatgtgcctggcaagcatatctgagaaggtgttccgctgtggctgccagcctggtaacaggtgcccccgtgtgcgtaaccttcctccgtcttcggtcggtagtgattggttaagatttggtgtaaggttcgtgtgccaacgccctgtgcgggatgaaacctctactgccctaggaatgccaggcaggtaccccaccttcgggtgggatctgagcctgggctaattgtctacgggtagtttcatttccaattccttcatgtcggagtc

SEQ ID NO: 1332 - DNA, 395 bp, Kobuvirus sp.; identical to SEQ ID NO: 431
  strain 16806x8 polyprotein gene, partial cds.1

SEQ ID NO: 1333 - DNA, 733 bp, Marmot kobuvirus
  strain HT9, complete genome.1
cttcggccctcacaccctcttttccgatggtctggtcccggaccaccgtcactccattcagcttcttcggaacctgttcggaggaattaaacgggcaccccacttcccccccccaccctcgcaacttcaagtgtgtgtgcccataaccttgacccctgccggtatgccgcccggttcagtggacaaactgctaggcaaattcccccctccccctgtggctggtccttcaaccagccactctcttccccccagccggacgtgctacaggctgtgcaaagcccccgcgaaagctgctcacgtggcaattgtgggtcccccctttgtcaaggcttcgagtctttctcccttaaggctagtcccgtactgtgaaatcagtgtgggcaactagtgaagccactgcacgctcccgaccacggacgcggagtgctgtcccccaagtcatgacactaacaccaagctgtgctgcctggcaagcatagcctgggaaggtgttccgctgtggctgccaaacctggtaacaggtgccccagtgtgtgtaaccttcctccagtcttcggactggcagctttgtgtgaagacgtgacgtaaggttcaagtgccaactccctggaagggatgacccctctactgccctaggaatgctacgcaggtacccctggttcgccagggatctgagcgtaggctaattgtctacgggtagtttcatttcccacctttttatttctttagcatc

SEQ ID NO: 1334 - DNA, 729 bp, Feline kobuvirus
  isolate FKV/18CC0718, complete genome.1
cctcggccccctcaccctcttttccggtggtctggtcccggaccaccgttactccattcagcttcttcggaacctgttcggaggaattaaacgggcacccactcatccctacctccccctgtaacttgaagtgtgtgctcgtgaccttgactcctgcgggcttcaccgacccgtccagtgaacaaactgctaggtgatttcttcccctcccctgacctggatgttccacatccaggtcttcctcccccagcccgacatgtcatgggctgtttggaatccccgcgaaagctgctaacgtggcaattgtgggtcccccttccaacaagacaccgagtctttctcccttaaggctagccccgtgtggtgaattccaccgggcaactagtgatgtcaatgcatgcctccgacctcggccgcggagtgctgccccccaagttgcgaaactgaccaaggattgtgctgcctggcaagcatagtctgaggagatgttccgctgtggctgccaaacctggtaacaggtgccccagtgcgcgtagtctccttccggttcgtccggctgtcctttggtaaagacacaatgtaaggggcgtgtgccaacgccctggaaagagtgaacttctactgccctaggaatgccacgcaggtacccctggtctcctaccagggatctgagcgtgggctaattgtctaacgggtagtttcatttctctcctcccttttgttgacacc

SEQ ID NO: 1335 - DNA, 729 bp, Feline kobuvirus
  isolate FKV/18CC0503, complete genome.1
cctcggccccctcaccctcttttccggtggtctggtcccggaccaccgttactccattcagcttcttcggaacctgttcggaggaattaaacgggcacccactcacccccatctccccctgtaacttgaagtgtgtgctcgtgaccttgactcctgcgggcttcaccgacccgtccagtgaacaaactgctaggtgatttcttcccctcccctagcctggatgttccacatccaggtcttcttcccccagcccgacatgtcatgggctgtttggaatccccgcgaaagctgctaacgtggcaattgtgggtcccccttccaacaagacaccgagtctttctcccttaaggctagccccgtgtggtgaattccaccgggcaactagtggtgtcaatgcatgcctccgacctcggccgcggagtgctgccccccaagttgcgaaactgaccaaggattgtgctgcctggcaagcatagtctgaggagatgttccgctgtggttgccaaacctggtaacaggtgccccagtgcgcgtagtctccttccggttcgtccggctgtcctttggtaaagacacaatgtaaggggcgtgtgccaacgccctggaaagagtgaacttctactgccctaggaatgccacgcaggtacccctggtttcttaccagggatctgagcgtgggctaattgtctaacgggtagtttcatttccctcccttcttttgttgacatc

SEQ ID NO: 1336 - DNA, 717 bp, Feline kobuvirus
  isolate 12D240, complete genome.1
tcaccctcttttccggtggtccggtcccagaccaccgttactccactcagcttcttcggaacctgtctggaggaattaaacgggcacccactcatccccaccccccttgtaacttaaagtgtgtgctcgtgaccttgactcctgcgggcttcaccgacccgttcagtgaacagactgctaggtgatttcttccccttccctggcctggatggcccacatccaggtccccttcccccagcccgacatgtcatgggctgtttggaatccccgcgaaagctgctaacgtggcaattgtgggtcccccttccaacaagacaccgagtctttctcccttaaggctagccccgtgtggtgaattccaccgggcaactagtgacgccactgcatgcctccgacctcggccgcggagtgctgccccccaagttgtgaaactggccaaggactgtgctgcctggcaagcatagtctgaggagatgttccgctgtggctgccaaacctggtaacaggtgccccagtgtgcgtagtctccttccggttcgtccggctgtcctttggtaaagacacaatgtaaggggcgtgtgccaacgccctggaaagagtgaacttctgctgccctaggaatgccacgcaggtacccctggtttcccaccagggatctgagcgtgggctaattgtctaacgggtagtttcatttccctcctctcttttgttgacatc

SEQ ID NO: 1337 - DNA, 523 bp, Rat kobuvirus
  MM33, partial genome.1
cctccccacccctgggcgccgcctaggcgacgtccacatcctccccccagcctgacgtgtcacaggctgtgcaaagaccccgcgaaagctgctcacgtggcaattgtgggtcccccctttgtgaaggaaccgagtctttctcccttaaggctagacccctgtgtgaattcacaggtggcaactagtggttccactgcatgctcccgacctcggccgcggagtgctgttccccaagtcgtaacactgacctccacttatgtgcctggcaagcatatctgagaagatgttccgctgtggctgccaaacctggtaacaggtgccccagtgtgcgtagtcttcttccgtctccggacggtaagtgtgtggtaaagatgcggcgtaaggttcaagtgccaacgccctggaagggatgacccttctactgccctaggaatgccgcgcaggtaccccaggttcgcctgggatctgagcgcgggctaattgtctacgggtagtttcatttccctctttcttcactggcatc

SEQ ID NO: 1338 - DNA, 534 bp, Rat kobuvirus
  GZ85, partial genome.1
ctaggtcattccctccccacccctgggcgccgcttcggcggtgtccacatcctccccccagcctgacgtgtcacaggctgtgcaaagaccccgcgaaagctgctcacgtggcaattgtgggtcccccctttgtgaaggaaccgagtctttctcccttaaggctagacccctgtgtgaattcacaggtggcaactagtggttccactgcatgctcccgacctcggccgcggagtgctgttccccaagtcgtaacactgacctccacttatgtgcctggcaagcatatctgaaaagatgttccgctgtggctgccaaacctggtaacaggtgccccagtgtgcgtagtcttcttccgtcttcggacggtaagtgtgtggtaaagatgcggcgtaaggttcaagtgccaacgccctggaagggatgacccttctactgccctaggaatgccgcgcaggtaccccaggttcgcctgggatctgagcgcgggctaattgtctacgggtagtttcatttccctctttcttcactggcatc

SEQ ID NO: 1339 - DNA, 306 bp, Aichi virus 1
  isolate ETH/2016/P24 polyprotein gene, partial cds.1
cggagtgctgttccccaagccaaacccctggcccttcactatgtgcctggcaagcatatctgagaaggtgttccgctgtggctgccagcctggtaacaggtgccccagtgtgcgtaaccttcttccgtcttcggacggtagtgattggttaagatttggcgtaaggttcatgtgccaacgccctgtgcgggatgaaacctctactaccctaggaatgccaggcaggtaccccaccctcgggtgggatctgagcctgggctaattgtctacgggtagtttcatttccaattcttctatgtcggagtc

SEQ ID NO: 1340 - DNA, 301 bp, Aichi virus 1
  isolate ETH/2016/P6 polyprotein gene, partial cds.1
gtgctgttccccaagccaaacccctggccctccactatgtgcctggcaagcatacctgagagggtgttccgctgtggctgccagcctggtaacaggtgccccagtgtgcgtaaccttcttccgtcttcggacggtagtgatcggttaagatttggtgtaaggttcatgtgccaacgccctgtgcgggatgaacctctactgccctaggaatgccaggcaggtaccccaccctcgggtgggatctgagcctgggctaattgtctacgggtagtttcatttccaatccttttatgtcggagtc

SEQ ID NO: 1341 - DNA, 610 bp, Mouse kobuvirus; identical to SEQ ID NO: 665
  M-5/USA/2010, complete genome.1

SEQ ID NO: 1342 - DNA, 711 bp, Canine kobuvirus
  strain CaKoV-26, complete genome.1
tcaccctcttttccggtggtccggacccagaccaccgttactccattcagcttcttcggaacctgttcggaggaattaaacgggcacccactcaccccctctccctcctcgtaactaagtgtgtgcccagtctctttactcctgctggcttcaccgaccagtagtggccaaaatgctaggtgaacctcctccctcccccactgggctcccgcccagtttcctccccccagcctgacgtgtcacaggctgtgcaaagaccccgcgaaagctgccaaaagtggcaattgtgggtcccccctttgtcaaggcgtcgagtctttctcccttaaggctagccccgtcagtgaattctgtcgggcaactagtgacgccactgcatgcctccgacctcggccgcggagtgctgccccccaagtcatgcccctgaccacaagttgtgctgtctggcaaacattgtctgtgagaatgttccgctgtggctgccaagcctggtaacaggctgccccagtgtgtgtagttctcatccggacttcggtctggcaacttgctgttaagacatggcgtaaggggcgtgtgccaacgccctggaacgagtgtccactctaataccccgaggaatgctacgcaggtacccctggcctgccagggatctgagcgtaggctaattgtctaagggtattttcatttcccactctttctttcttgttcata

SEQ ID NO: 1343 - DNA, 713 bp, Canine kobuvirus 1; identical to SEQ ID NO: 871
  isolate 12D049, complete genome.1

SEQ ID NO: 1344 - DNA, 712 bp, Canine kobuvirus; identical to SEQ ID NO: 867
  US-PC0082, complete genome.1

SEQ ID NO: 1345 - DNA, 712 bp, Canine kobuvirus 1; identical to SEQ ID NO: 866
  isolate DD2 polyprotein mRNA, complete cds.1

SEQ ID NO: 1346 - DNA, 711 bp, Canine kobuvirus
  strain S272/16, complete genome.1
tcaccctcttttccggtggtccggacccagaccaccgttactccattcagcttcttcggaacctgtttggaggaattaaacgggcacccacccaccttcacccccttttcgtaactaagtgtgtgcccaatctcatgactcctgctgacttcaccgaccagcagtgtccaaaacgctaggtgaatttccttcctccccctctgggcttctgcccagctccctccctccagcctgacgtgccacaggctgtgcaaagaccccgcgaaagctgccaaaagtggcaattgtgggtcccccctttgtaaaggcgtcgagtctttctcccttaaggctagacccgtcagtgaattctgtcgggcaactagtgacgccactgcatgcctccgacctcggccgcggagtgctgccccccaagtcgtgcccctgactacaagttgtgctgtctggcaaacattgtctgtgagaatgttccgctgtggctgccaagcctggtaacaggctgccccagtgtgcgtagttctcatccagacttcggtctggcaacttgctgttaagacacggcgtaaggggcgtgtgccaacgccctggaacgagtgtccactctaataccccgaggaatgctacgcaggtacccctggctccccagggatctgagcgtaggctaattgtctaagggtattttcatttcccactctttctttcttgttcata

SEQ ID NO: 1347 - DNA, 646 bp, Feline kobuvirus
  strain FK-13, complete genome.1
ggaattaaacgggcacccactcacccccatccccccctgtaacttaaagtgtgtgctcgtgaccttgactcctgcgggcttcaccgacccgtccagtgaacaaactgctaggtgactccttccccccccctggcctggatggcccacatccaggtcttcttcccccagcccgacatgtcatgggctgtttggaatccccgcgaaagctgctaacgtggcaattgtgggtcccccttccaacaagacaccgagtctttctcccttaaggctagccccgtgtggtgaattccaccgggcaactagtggtgtcaatgcatgcctccgacctcggccgcggagtgctgccccccaagttgcgaaactgaccaagactgtgctgcctggcaagcatagtctgaggagatgttccgctgtggttgccaaacctggtaacaggtgccccagtgtgcgtagtctccttccggttcgtccggctgtcctttggtaaagacacaatgtaaggggcgtgtgccaacgccctggaaagagtgaacttctactgccctaggaatgccacgcaggtacccctggtttcccaccagggatctgagcgtgggctaattgtctaacgggtagtttcatttccctcctctcttttgttgacatc

SEQ ID NO: 1348 - DNA, 712 bp, Canine kobuvirus 1
  isolate 75 polyprotein mRNA, complete cds.1
tcaccctcttttccggtggtccggacccagaccaccgttactccattcagcttcttcggaacctgttcggaggaattaaacgggcacccactcaccccctctccctcctcgtaactaagtgtgtgcccagtctctttactcctgctggcttcaccgaccagtagtggccaaaatgctaggtgaacctcctccctcccccactgggctcccgcccagtttcctccccccagcctgacgtgtcacaggctgtgcaaagaccccgcgaaagctgccaaaagtggcaattgtgggtcccccctttgtcaaggcgtcgagtctttctcccttaaggctagacctgtcagtgaattctgccgggcaactagtgacgccactgcatgcctccgacctcggctgcggggtgctgccccccaagttgtgcccctgagccacaagttgtgctgtctggcaaacattgtctgtgagaatgttccgctgcggctgccaagcctggtgacaggctgccccagtgtgtgtagttctcatccagacctcggtctggcaacttgctgttaagacacggcgtaaggggcgtgtgccaacgccctggaacgagtgtccattctaataccccgaggaatgctacgcaggtacccctggttcaccagggatctgagcgtaggctaattgtctaagggtattttcatttcccactctttctttcttgttcata

SEQ ID NO: 1349 - DNA, 712 bp, Canine kobuvirus 1
  isolate B103 polyprotein mRNA, complete cds.1
tcaccctcttttccggtggtccggacccagaccaccgttactccattcagcttcttcggaacctgttcggaggaattaaacgggcacccactcaccctctctccctcctcgtaactaagtgtgtgcccagtctctttactcctgctggcttcaccgaccagtagtgaccaaaatgctaggtgaacctcctcccacgccctctgggcccccgcccagtttcctccccccagcctgacgtgtcacaggctgtacaaagaccccgcgaaagctgccaaaagtggcaattgtgggtcccccctttgtcaaggcgtcgagtctttctcccttaaggctagacccgtcagtgaattctgccgggcaactagtgacgccactgcatgcctccgacctcggctgcggagtgctgccccccaagtcgtgcccctgagccacaagttgtgctgtctggcaaacattgtctgtgagaatgttccgctgcggctgccaggcctggtaacaggctgccccagtgtgtgtagttctcatccagatctcggtctggcaacttgctgttaagacacggcgtaaggggcgtgtgccaacgccctggaacgagtgtccattctaataccccgaggaatgctacgcaggtacccctggtgaaccaggggtctgagcgtaggctaattgtctaagggtattttcatttcccactctttctttcttgttcata

SEQ ID NO: 1350 - DNA, 646 bp, Feline kobuvirus
  strain FeKoV/TE/52/IT/13, complete genome.1
ggaattaaacgggcacccactcacccccatccccccctgtaacttaaagtgtgtgctcgtgaccttgactcctgcgggcttcaccgacccgtccagtgaacaaactgctaggtgatttcttcccctccctcagcctgggtgttccacatccaggtctttttcccccagcccgacatgtcatgggctgtttggaatccccgcgaaagctgctaacgtggcaattgtgggtcccccttccaacaagacaccgagtctttctcccttaaggctagccccgtgtggtgaactccaccgggcaactagtggtgtcaatgcatgcctccgacctcggccgcggagtgctgccccccaagttgtgaaactgaccaaggatgtgctgcctggcaagcatagtctgaggagatgttccgctgtggctggcaagcctggtaacaggtgccccagtgtgcgtagtctccttccggttcgtccggctgtcctttggtaaagacacaatgtaaggggcgtgtgccaacgccctggaaagagtgaacttttactgccctaggaatgccacgcaggtacccctggtttcccaccagggatctgagcgtgggctaattgtctaacgggtagtttcatttccctcctctcttttgttgacatc

SEQ ID NO: 1351 - DNA, 647 bp, Feline kobuvirus
  strain WHJ-1, complete genome.1
ggaattaaacgggcacccactcatccctacctccccctgtaacttgaagtgtgtgctcgtgaccttgactcctgcgggcttcaccgacccgtccagtgaacaaactgctaggtgatttcttccccttcccccacctggatgttctacatccaggtcttcctcccccagcccgacatgtcatgggctgtttggaacccccgcgaaagctgctaacgtggcaattgtgggtcccccttccaacaagacaccgagtctttctcccttaaggctagccccgtgtggtgaattccaccgggcaactagtggtgtcaatgcatgcctccgacctcggccgcggagtgctgccccccaagttgtgaaactgaccaaggattgtgctgcctggcaagcatagtctgaggagatgttccgctgtggctgccaaacctggtaacaggtgccccagtgcgcgtagtctccttccggttcgtccggctgtcctctggtaaagacacaatgtaaggggtgtgtgccaacgccctggaaagagtgaacttctactgccctaggaatgccacgcaggtacccctggtcccccaccagggatctgagcgtgggctaattgtctaacgggtagtttcatttctctcctctcctttgttgacatc

SEQ ID NO: 1352 - DNA, 579 bp, Murine kobuvirus 1
  isolate MKV1/NYC/2014/M014/0146, partial genome.1
gccaggtcgcatcgcctggttggtgaccaaactgctagatgctcctccctttccctcggggttggcgcaccgccatccctgcatcctccccccagcctgacatgctacaggctgtgcaagaaccccgcgaaagctgccaccgtggcaattgtgggtccccctcttgtcaaggcacagagtctttctcccttaaggctagacccctctgtgaattcagaggcggcaactagttgtgccactacatgcctcagacctcggtcgcggagtgctgttccccaaaccctgacactgccgcgtgagtatgctgcttggcaagcattgcctggatggtcgttccgctggggctgccaggtctggtaacagaccgctccagtgtgcgtagaccatctccagcttcggctggtgctcacaaggtaagactcggtgtaaggttcatgtgccaacaccctggaatgagtgaaaactctactgccctaggaatgctacgcaggtacccctgctcccttgggagccagggatctgagcgtaggctaattgtctgtcgggtagtttcatttcccacctcctagactgttcacc

SEQ ID NO: 1353 - DNA, 601 bp, Canine kobuvirus
  CH-1, complete genome.1
tttaagtgttgtgcccaatctcttgactcctgctggaaccaccgaccagtagtgtccaaaatgctaggtggaaaatcctcccttcccctctgggctccatgcccagcatcctccccccagcctgacgtgtcacaggctgtgcaaagaccccgcgaaagctgccaaaagtggcaattgtgggtcccccctttgtcaaggcgtcgagtctttctcccttaaggctagccccgtcagtgaattctgacgggcaactagtgacgccactgcatgcctccgacctcggccgcggagtgctgccccccaagtcatgcccctgaccacaagttgtgctgtctggcaaacactgtctgtgagaatgttccgctgtggctgccaagcctggtaacaggctgccccagtgtgcgtagttctcatccagacctcggtctggcaacttgctgttaagacatggcgtaaggggcgtgtgccaacgccctggaacgagtgtccactctaataccccgaggaatgctacgcaggtacccctggttcgccagggatctgagcgtaggctaattgtctaagggtattttcatttcccactctctctttcttgttcata

SEQ ID NO: 1354 - DNA, 601 bp, Canine kobuvirus
  isolate SMCD-59, complete genome.1
tttaagtgttgtgcccaatctcttgactcctgctggaaccaccgaccagtagtgtccaaaatgccaggtggaaaatcctcccttcccctctgggcttcatgcccggcatcctccccccagcctgacgtgccacaggctgtgcaaagaccccgcgaaagctgccaaaagtggcaattgtgggtcccccctttgtcaaggcgtcgagtctttctcccttaaggctagtcctgtcagtgaactctgtcgggcaactagtgacgccactgcatgcctccgacctcggccgcggagtgctgccccccaagtcatgcccctgaccacaagttgtgctgtctggcaaacattgtctgtgagaatgttccgctgtggctgccaagcctggtaacaggctgccccagtgtgcgtaattctcatccagacttcggtctggcaacttgctgttaagacatggcgtaaggggcgtgtgccaacgccctggaacgagtgtccactctaataccccgaggaatgctacgcaggtacccctggctcgccagggatctgagcgtaggctaattgtctaagggtattttcatttcccaccctcttcttcttgttcata

SEQ ID NO: 1355 - DNA, 493 bp, Canine kobuvirus
  isolate CaKoV_CE9_AUS_2012 polyprotein gene,1
tcctccccccagcctgacgtgtcacaggctgtgcaaagaccccgcgaaagctgccaaaagtggcaattgtgggtcccccctttgtcaaggcgtcgagtctttctcccttaaggctagccccgacagtgaattctgtcgggcaactagtgacgccactgcatgcctccgacctcggccgcggagtgctgccccccaagtcgtgcccctgactacaagttgtgctgtctggcaaacattgtctgtgagaatgttccgctgtggctgccaagcctggtaacaggctgccccagtgtgcgtagttctcatccagacttcggtctggcaacttgctgttaagacgcggcgtaaggggcgtgtgccaacgccctggaacgagtgtccactctaataccccgaggaatgctacgcaggtacccctggctcgccagggatctgagcgtaggctaattgtctaagggtattttcatttcccactctttctctctcgttcata

SEQ ID NO: 1356 - DNA, 612 bp, Canine kobuvirus; identical to SEQ ID NO: 680
  strain UK003, complete genome.1

SEQ ID NO: 1357 - DNA, 766 bp, Kobuvirus SZAL6-KoV/2011/HUN; identical to SEQ ID NO: 1227
  complete genome.1

SEQ ID NO: 1358 - DNA, 561 bp, Kobuvirus dog/AN211D/USA/2009
  polyprotein gene, complete cds.1
ccgaccagtagtgtccgaaatgctagagtggacttcctcccttcccctctgggtatcttgcccagtttcctccccccaacctgacgtgccacaggctgtgaaaacaccccgcgaaagctgccaaaagtgggaattgtgggtccccccctttgccaaggagtcgagtctttctcccttaaggctagccccatcagtgaattctgttgggcaactagtgacgccactgcatgcctccgacctcggccgcggagtgctgccccccaagtcgtgcccctgaccacaagttgtgctgtctggcaaacattgtctgtgagaatgttccgctgtggctgccaagcctggtaacaggctgccccagtgtgcgtagttctcatccagacttcggtctggcaacttgctgttaagacacggcgtaaggggcgtgtgccaacgccctggaacgagtgtccactctaataccccgaggaatgctacgtaggtacccctggttcgccagggatctgagcgtaggctaattgtctaagggtattttcatttcccactctctctttcttgttcata

SEQ ID NO: 1359 - DNA, 699 bp, Salivirus A
  strain GUT/2009/A-1746, complete genome.1
tatggcaggcgggcttgtggacggtttcggcccacccacagcaagaatgccatcatctgtcctcacccccaattttccctttcttcccctgcaatcatcacgcttactcgcatgtgcattgagtggtgcatgtgttgaacaaacagctacactcacatgggggcgggttttcccgccctacggcctctcgcgaggcccacccttcccctccccttataactacagtgctttggcaggtaagcatcctgatcccccgcggaagctgctcacgtggcaactgtggggacccagacaggttatcaaaggcacccggtctttccgccttcaggagcatccccactagtgaattctagtggggctctgcttggtgccaacctcccccaaatgcgcgctgcgggagtgctcttccccaacccatcctagtatcctctcatgtgtgtgcttggtcagcatatctgagacgacgttccgctgtcccagaccagtccagtaatggacgggccagtgtgcgtagtcgtcttccggcttgtccggcgcatgtttggtgaaccggtggggtaaggttggtgtgcccaacgcccgtactttggtgacacctcaagaccacccaggaatgccagggaggtaccccgcctcacggcgggatctgaccctgggctaattgtctacggtggttcttcttgcttccacttctttctt

SEQ ID NO: 1360 - DNA, 709 bp, Salivirus NG-J1
  complete genome.1
tatggcaggcgggcttgtggacggcttcggcccacccacagcaagaatgccatcatctgtcctcacccccaattttcccttttcttcccctgcaaccattacgcttactcgcatgtgcattgagtggtgcatgtgttgaacaaacagctacactcacatgggggcgggttttcccgccctacggcctctcgcgaggcccaccccttccctccccttataactacagtgctttggtaggtaagcatcctgatcccccgcggaagctgctcacgtggcaactgtggggacccagacaggttatcaaaggcacccggtctttccgccttcaggagtatccctactagtgaattctagcggggctctgcttggtgccaacctcccccaaatgcgcgctgcgggagtgctcttccccaactcaccctagtatcctctcatgtgtgtgcttggtcagcatatctgagacgatgttccgctgtcccagaccagtccagtaatggacgggccagtgcgtgtagtcgtcttccggcttgtccggggcatgtttggtgaaccggtggggtaaggttggtgtgcccaacgcccgtactttggtgacacctcaagaccacccaggaatgccagggaggtaccccacctcacggtgggatctgaccctgggctaattgtctacggtggttcttcttgcttccacttctttcttctgttcacg

SEQ ID NO: 1361 - DNA, 720 bp, Salivirus A
  strain YZ03, complete genome.1
cccctttcgaccgacctatggcaggcgggcttgtggacggcttcggcccacccacagcaagaatgccatcatctgtcctcacccccatcttcccctttcttccctgcaaccgtcacgcttactcgcatgtgcattgagtggtgcacgtgtcgaacaaacagctacactcacatggggcgggttttcccgccttgcggcctctcgcgaggcccacccctccctctcctcccataactacagtgctttggtaggtaagcatcctgatcccccgcggaagctgctcacgtggcaactgtggggacccagacaggttatcaaaggcacccggtctttccgccttcaggagtatccctgctagtgaattctagtagggctctgcttggtgccaacctcccccaaatgcgcgctgcaggagtgctcttccccaactcaccctagtatcctctcatgtgtgtgcttggtcagcatatctgagacgatgttccgctgtcccagaccagtccagtaatggacgggccagtgtgcgtagtcgtcttccggcttgcccggcgcatgtttggtgaaccggtggggtaaggttggtgtgcccaacgcccgtactttggtgatacctcaagaccacccaggaatgccagggaggtaccccgcttcacagcgggatctgaccctgggctaattgtctacggtggttcttcttgcttccacttctttctactgttt

SEQ ID NO: 1362 - DNA, 724 bp, Salivirus A
  strain YZ02, complete genome.1
cttccccctttcgaccgccctatggcaggcgggcttgtggacggcttcggcccacccacagcaagaatgccatcatctgtcctcacccccatcttcccctttcttccctgcaaccgtcacgcttactcgcatgtgcattgagtggtgcacgtgtcgaacaaacagctacactcacatggggcgggttttcccgccttgcggcctctcgcgaggcccacccctcccccccctcccataactacagtgctttggtaggtaagcatcctgatcccccgcggaagctgctcacgtggcaactgtggggacccagacaggttatcaaaggcacccggtctttccgccttcaggagtatccctgctagtgaattctagtagggctctgcttggtgccaacctcccccaaatgcgcgctgcaggagtgctcttccccaactcaccctagtatcctctcatgtgtgtgcttggtcagcatatctgagacgatgttccgctgtcccagaccagtccagtaatggacgggccagtgtgcgtagtcgtcttccggcttgcccggcgcatgtttggtgaaccggtggggtaaggttggtgtgcccaacgcccgtactttggtgatacctcaagaccacccaggaatgccagggaggtaccccgcttcacagcgggatctgaccctgggctaattgtctacggtggttcttcttgcttccacttctttctactgttt

SEQ ID NO: 1363 - DNA, 731 bp, Salivirus A; identical to SEQ ID NO: 931
  strain YZ01, complete genome.1

SEQ ID NO: 1364 - DNA, 650 bp, Salivirus A
  SZ1 polyprotein gene, partial cds.1
tctgtcctcaccccatcttcccttctttcctgcaccgttacgcttactcgcatgtgcattgagtggtgcacgtgcttgaacaaacagctacactcacatgggggcgggttttcccgccctgcggcctctcgcgaggcccacccctccccttcctcccataactacagtgctttggtaggtaagcatcctgatcccccgcggaagctgctcacgtggcaactgtggggacccagacaggttatcaaaggcacccggtctttccgccttcaggagtatccctgctagtgaattctagtagggctctgcttggtgccaacctcccccaaatgcgcgctgcgggagtgctcttccccaactcaccctagtatcctctcatgtgtgtgcttggtcagcatatctgagacgatgttccgctgtcccagaccagtccagtaatggacgggccagtgtgcgtagtcgtcttccggcttgtccggcgcatgtttggtgaaccggtggggtaaggttggtgtgcccaacgcccgtactttggtgatacctcaagaccacccaggaatgccagggaggtaccccgcttcacagcgggatctgaccctgggctaattgtctacggtggttcttcttgcttccacttctttctactgttcatg

SEQ ID NO: 1365 - DNA, 708 bp, Salivirus A
  isolate BN-2, complete genome.1
tatggcaggcgggcttgtggacggcttcggcccacccacagcaagaatgccatcatctgtcctcacccccatgtttcccctttctttccctgcaaccgttacgcttactcgcaggtgcatttgagtggtgcacgtgttgaataaacagctacactcacatgggggcgggttttcccgccctgcggcctctcgcgaggcccacccctccccttcctcccataactacagtgctttggtaggtaagcatcctgatcccccgcggaagctgctcacgtggcaactgtggggacccagacaggttatcaaaggcacccggtctttccgccttcaggagtatccctgctagtgaattctagtagggctctgcttggtgccaacctcccccaaatgcgcgctgcgggagtgctcttccccaactcaccctagtatcctctcatgtgtgtgcttggtcagcatatctgagacgatgttccgctgtcccagaccagtccagtaatggacgggccagtgtgcgtagtcgtcttccggcttttccggcgcatgtttggtgaaccggtggggtaaggttggtgtgcccaacgcccgtactttggtgatacctcaagaccacccaggaatgccagggaggtaccccgcttcacagcgggatctgaccctgggctaattgtctacggtggttcttcttgcttccacttctttctactgttc

SEQ ID NO: 1366 - DNA, 484 bp, Salivirus sp.
  isolate ETH_P14_2016 polyprotein gene, complete cds.1
gtgctttggcaggtaagcatcctgatcccccgcggaagctgctcacgtggcaactgtggggacccagacaggttatcaaaggcacccggtctttccgccttcaggagtaccctcactagtgaattctagtggggctctgcttggtgccaacctcccccaaatgcgcgctgcgggagtgctcttccccaacccatcctagtaccctctcatgtgtgtgcttggtcagcacatctgagacgacgttccgctgtcccagaccagtccagtaatggacgggccagtgtgcgtagtcgtcttccggcttgtccggcgcatgtttggtgaaccggtggggtaaggttggtgtgcccaatgcccgtactttggtgatacctcaagaccacccaggaatgccagggaggtaccccgcctctcggcgggatctgaccctgggctaattgtctacggtggttcttcttgcttccactcttttcttctgttcacg

SEQ ID NO: 1367 - DNA, 718 bp, Salivirus A
  isolate 02394-01, complete genome.1
tttcgaccgccttatggcaggcgggcttgtggacggcttcggcccacccacagcaagaatgccatcatctgtcctcacccccatttctcccctccttcccctgcaaccattacgcttactcgcatgtgcattgagtggtgcacgtgttgaacaaacagctacactcacgtgggggcgggttttcccgcccttcggcctctcgcgaggcccacccttccccttcctcccataactacagtgctttggtaggtaagcatcctgatcccccgcggaagctgctcgcgtggcaactgtggggacccagacaggttatcaaaggcacccggtctttccgcctccaggagtatccctgctagtgaattctagtggggctctgcttggtgccaacctcccccaaatgcgcgctgcgggagtgctcttccccaactcaccctagtatcctctcatgtgtgtgcttggtcagcatatctgagacgatgttccgctgtcccagaccagtccagcaatggacgggccagtgtgcgtagtcgtcttccggcttgtccggcgcatgtttggtgaaccggtggggtaaggttggtgtgcccaacgcccgtactttggtgacaactcaagaccacccaggaatgccagggaggtaccccgcctcacggcgggatctgaccctgggctaattgtctacggtggttcttcttgcttccatttctttcttctgttc

SEQ ID NO: 1368 - DNA, 624 bp, Salivirus CH
  complete genome.1
ttctcctgcaaccattacgcttaatcgcatgtgcattgagtggtgcatgtgttgaacaaacagctacaatcacatgggggcgggttttcccgccccacggcttctcgcgaggcccatccctcccttttctcccataactacagtgctttggtaggtaagcatcccgatctcccgcggaagctgctcacgtggcaactgtggggacccagacaggttatcaaaggcacccggtctttccgccttcaggagtatccctgctagcgaattctagtagggctctgcttggtgccaacctctcccaaatgcgcgctgcgggagtgctcttccccaaatcaccccagtatcctctcatgtgtgtgcctggtcagcatatctgagacgatgttccgctgtcccagaccagtccagtaatggacgggccagtgtgcgtagtcgtcctccggcttgtccggcgcatgtttggtgaaccggtggggtaaggttggtgtgcccaacgcccgtaatcaggggatacctcaaggcacccaggaatgccagggaggtatcccgcctcacagcgggatctgaccctggggtaaatgtctgcggggggtcctcttggcccaattctcagtaattttcagg

SEQ ID NO: 1369 - DNA, 624 bp, Salivirus A; identical to SEQ ID NO: 736
  strain SH1 polyprotein gene, complete cds.1

SEQ ID NO: 1370 - DNA, 730 bp, Salivirus FHB
  complete genome.1
acatggggggtctgcggacggcttcggcccacccgcgacaagaatgccgtcatctgtcctcattacccgtattccttcccttcccccgcaaccaccacgcttactcgcgcacgtgttgagtggcacgtgcgttgtccaaacagctacacccacacccttcggggcgggtttgtcccgccctcgggttcctcgcggaacccccccctccctctctctctttctatccgccctcacttcccataactacagtgctttggtaggtgagcaccctgaccccccgcggaagctgctaacgtggcaactgtggggatccaggcaggttatcaaaggcacccggtctttccgccttcaggagtatctctgccggtgaattccggtagggctctgcttggtgccaacctcccccaaatgcgcgctgcgggagtgctcttccccaactcatcttagtaacctctcatgtgtgtgcttggtcagcatatctgaggcgacgttccgctgtcccagaccagtccagcaatggacgggccagtgtgcgtagtcgctttccggttttccggcgcatgtttggcgaaacgctgaggtaaggttggtgtgcccaacgcccgtaatttggtgatacctcaagaccacccaggaatgccagggaggtaccccacttcggtgggatctgaccctgggctaattgtctacggtggttcttcttgcttccacttctcttttttctggcatg

SEQ ID NO: 1371 - DNA, 752 bp, Salivirus A; identical to SEQ ID NO: 128
  isolate BN-5, complete genome.1

SEQ ID NO: 1372 - DNA, 471 bp, Kobuvirus cattle/Kagoshima-1-22-KoV/2014/JPN; identical to SEQ ID NO: 12
  genomic RNA, nearly1

SEQ ID NO: 1373 - DNA, 750 bp, Rabbit picornavirus; identical to SEQ ID NO: 1201
  strain Rabbit01/2013/HUN, complete genome.1

SEQ ID NO: 1374 - DNA, 555 bp, Porcine kobuvirus
  isolate GS-2/2012/CH, complete genome.1
cctcggccccctcaccctcttttccggtggccattcgcccgggccaccgttactccactccactccttcgggactggtttggaggaacacaacagggcttcccatccctgtttaccctttattccatcatcctttccccaagtttaccctatccacaccccactgactgactcctttggattttgacctcagaatgcctatttgacctcccactcgcctctcccttttcggattgccggtggtgcctggcggaaaaagcacaagtgtgttgcaggctaccaaactcctacccgacaaaggtgcgtgtccgcgtgctgagtaatgggataggagatgcctacaacaggctcgcccatgagtagagcatggactgcggtgcatgtgacttcggtcaccacgggcatagcattgctcacccgtgaatcaagtcatcgagatttctctgacctctgaagtgcactgtggttgcgtggctgggaatccacgcttgaccatgtactgcttgatagagtcgcggctggccgactcatgggttaaagtcagttgacaagacac

SEQ ID NO: 1375 - DNA, 555 bp, Porcine kobuvirus
  strain KobuV/Pig-wt/ESP/P2B/2017, complete1
cctcggccctctcaccctcttttccggtggccactcgcccgggccaccgttactccattccactccttcgggactggtttggaggaacataacagggcttcccatccctgtttatcctaattccacttacctttctccataattaaccctatccacaccccactgaccgatccctttggattttgacctcagaatgcctacctgacctcccacttgcctttcccttttcggattgccggtggtgcctggcggaaaaagcacaagtgtgttgatggctaccaaactcctacccgacaaaggtgcgtgtccgcgtgctgagtaatgggataggagatgccattgacaggctcgcccatgagtagagcatggactgcggtgcatgtgacttcggtcaccaggggcatagcattgctcacccctgaatcaagtcatcgagatttctctgacctctgaagtgcactgtggttgcgtggctgggaatccacgcttgaccatgtactgcttgatagagtcgcggctggccgactcatgggttaaagtcagttgacaagacac

SEQ ID NO: 1376 - DNA, 556 bp, Porcine kobuvirus
  isolate CH/HNXX-4/2012, complete genome.1
cctcggccccctcaccctcttttccggtggccactcgcccgggccaccgttactccactccactccttcgggactggtttggaggaacataacagggcttcccatccctgtttacccttaattccatttaccttctcccccaactaaccctatccacaccccactgactgactcctttggattttgacctcagaatgcctacttgacctcccacttgcctctcccttctcggattgccggtggtgcctggcggaaaaagcacaagtgtgttgcaggctaccaaactcctacccgacaaaggtgcgtgtccgcgtgctgagtaatgggataggagatgcctacaacaggctcgcccatgagtagagcatggactgcggtgcatgtgacttcggtcaccacgggcatagcattgctcacccgtgaatcaagtcatcgagatttctctgacctctgaagtgcactgtggttgcgtggctgggaatccacgcttgaccatgtactgcttgatagagtcgcggctggccgactcatgggttaaagtcagttgacaagacac

SEQ ID NO: 1377 - DNA, 556 bp, Porcine kobuvirus
  strain WUH1, complete genome.1
cctcggccccctcaccctcttttccggtggccactcgcccgggccaccgttactccactccactccttcgggactggtttggaggaacacaacagggcttcccatccctgttcaccctacactccacataccctttccctcaaccaaccctatccaaaccccactgaccgactcccttggattttgacctcagaatgcctacttgacctcccacttgcctctcccttctcggattgccggtggtgcctggcggaaaaagcacaagtgtgttgcaggctatcaaacttctacccgacaaaggcgcgtgtccgcgtgctgagtaatgggataggagatgcctacaacaggctcgcccatgagtagagcatggactgcggtgcatgtgacttcggtcaccacgggcatagcattgctcacccgtgaatcaagtcatcgagatttctctgacctctgaagtgcactgtggttgcgtggctgggaatccatgcttgaccatgtactgcttgatagagtcgcggctggccgactcatgggttaaagtcagttgacaagacac

SEQ ID NO: 1378 - DNA, 555 bp, Porcine kobuvirus
  isolate K-11/2012/CH, complete genome.1
cctcggccccctcaccctcttttccggtggccacccgcccgggccaccgttactccactccactccttcgggactggtttggaggaacataacagggcttcccatccctgtttacccttattccacttaccctttcccttaaccaaccctatccacaccccactgactgattcctttggattttgacctcagaatgcctacttgacctcccacttgtctctcccttctcggattgccggtggtgcctggcggaaaaagcacaagtgtgttgcaggctaccaaactcctacccgacaaaggtgcgtgtccgcgtgctgagtaatgggataggagatgcctacaacaggctcgcccatgagtagagcatggactgcggtgcatgtgacttcggtcaccacgggcatagcattgctcacccgtgaatcaagtcatcgagatttctctgacctctgaagtgcactgtggttgcgtggctgggaatccacgcttgaccatgtactgcttgatagagtcgcggctggccgactcatgggttaaagtcagttgacaagacac

SEQ ID NO: 1379 - DNA, 555 bp, Porcine kobuvirus
  isolate GS-1/2012/CH, complete genome.1
cctcggccccctcaccctcttttccggtggccacacgcccgggccaccgttactccactccactccttcgggactggtttggaggaacacaacagggcttcccatccctgtttaccctttattccatcatcctttccccaagtttaccctatccacaccccactgactgactcctttggattttgacctcagaatgcctatttgacctcccactcgcctctcccttttcggattgccggtggtgcctggcggaaaaagcacaagtgtgttgcaggctaccaaactcctacccgacaaaggtgcgtgtccgcgtgctgagtaatgggataggagatgcctacaacaggctcgcccatgagtagagcatggactgcggtgcatgtgacttcggtcaccacgggcatagcattgctcacccgtgaatcaagtcatcgagatttctctgacctctgaagtgcactgtggttgcgtggctgggaatccacgcttgaccatgtactgcttgatagagtcgcggctggccgactcatgggttaaagtcagttgacaagacac

SEQ ID NO: 1380 - DNA, 555 bp, Porcine kobuvirus
  strain WB-1-HUN/2011/HUN, complete genome.1
cctcggccccctcaccctcttttccggtggccacccgcccgggccaccgttactccactccactccttcgggactggtttggaggaacataacagggcttcccatccctgtttacccttactccactcacccttctccttgaccaaccctatccacaccccactgactgactcctttggattttgacctcagaatgcctacctgacctcccacttgcctctcccatctcggactgccggtggtgcctggcggaaaaagcacaagtgtgttgatggctaccaaactcctacccgacaaaggtgcgtgtccgcgtgctgagtaatgggataggagatgccattgacaggctcgcccatgagtagagcatggactgcggtgcatgtgacttcggtcaccaggggcatagcattgctcacccctgaatcaagtcatcgagatttctctgacctctgaagtgcactgtggttgcgtggctgggaatccacgcttgaccatgtactgcttgatagagtcgcggctggccgactcatgggttaaagtcagttgacaagacac

SEQ ID NO: 1381 - DNA, 555 bp, Porcine kobuvirus
  swine/K-30-HUN/2008/HUN, complete genome.1
cctcggccccctcaccctcttttccggtggccacccgcccgggccaccgttactccactccactccttcgggactggtttggaggaacataacagggcttcccatccctgtttacccttactccactcacccctccccttgaccaaccctatccacaccccactgactgactcctttggatcttgacctcggaatgcctacttgacctcccacttgcctctcccttttcggattgccggtggtgcctggcggaaaaagcacaagtgtgttgttggctaccaaactcctacccgacaaaggtgcgtgtccgcgtgctgagtaatgggataggagatgccaataacaggctcgcccatgagtagagcatggactgcggtgcatgtgacttcggtcaccaggggcatagcattgctcacccctgaatcaagtcatcgagatttctctgacctctgaagtgcactgtggttgcgtggctgggaatccacgcttgaccatgtactgcttgatagagtcgcggctggccgactcatgggttaaagtcagttgacaagacac

SEQ ID NO: 1382 - DNA, 555 bp, Porcine kobuvirus
  swine/S-1-HUN/2007/Hungary, complete genome.1
cctcggccccctcaccctcttttccggtggccacccgcccgggccaccgttactccactccactccttcgggactggtttggaggaacataacagggcttcccatccctgtttacccttactccactcacccttccccttgaccaaccctatccacaccccactgactgactcctttggatcttgacctcggaatgcctacttgacctcccacttgcctctcccttttcggattgccggtggtgcctggcggaaaaagcacaagtgtgttgttggctaccaaactcctacccgacaaaggtgcgtgtccgcgtgctgagtaatgggataggagatgccaataacaggctcgcccatgagtagagcatggactgcggtgcatgtgacttcggtcaccaggggcatagcattgctcacccctgaatcaagtcatcgagatttctctgacctctgaagtgcactgtggttgcgtggctgggaatccacgcttgaccatgtactgcttgatagagtcgcggctggccgactcatgggttaaagtcagttgacaagacac

SEQ ID NO: 1383 - DNA, 555 bp, Porcine kobuvirus
  strain KobuV/Pig-wt/ESP/VC14/2017, complete1
cctcggccctctcaccctcttttccggtggccactcgcccgggccaccgttactccactccactccttcgggactggtttggaggaacataacagggcttcccacccctgtttaccctcactccacttatccttctcctcaactaaccctatccacaccccactgattgattcctttggatttcgacctcagaatgcctacttgacctcccacttgcctctcccctctcggattgccggtggtgcctggcggaaaaagcacaagtgtgttgttggctaccaaactcctacccgacaaaggtgcgtgtccgcgtgctgagtaatgggatgggagatgccaataacaggctcgcccatgagtagagcatggactgcggtgcatgtgacttcggtcaccaggggcatagcattgctcacccctgaatcaagtcatcgagatttctctgacctctgaagtgcactgtggttgcgtggctgggaatccacgcttgaccatgtactgcttgatagagtcgcggctggccgactcatgggttaaagtcagttgacaagacac

SEQ ID NO: 1384 - DNA, 555 bp, Porcine kobuvirus
  strain KobuV/Pig-wt/ESP/C375/2017, complete1
cctcggccctctcaccctcttttccggtggccactcgcccgggccaccgttactccactccactccttcgggactggtttggaggaacataacagggcttcccacccctgttcacccttactccactcacccttatccttaaccaaccctatccacaccccactgactgattcctttggattttgacctcagaatgcccacctgacctcccacttgcttctcccttctcggattgccggtggtgcctggcggaaaaagcacaagtgtgttgttggctaccaaactcctacccgacaaaggtgcgtgtccgcgtgctgagtaatgggataggagatgccaatgacaggctcgcccatgagtagagcatggactgcggtgcatgtgacttcggtcaccaggggcatagcattgctcacccctgaatcaagtcatcgagacttctctgacctctgaagtgcactgtggttgcgtggctgggaatccacgcttgaccatgtactgcttgatagagtcgcggctgaccgactcatgggttaaagtcagttgacaagacac

SEQ ID NO: 1385 - DNA, 555 bp, Porcine kobuvirus
  strain KobuV/Pig-wt/ESP/P284/2017, complete1
cctcggccctctcaccctcttttccggtggccactcgcccgggccaccgttactccactccactccttcgggactggtttggaggaacataacagggcttcccatccctgtttacccttattccacttacccttctcctcaaccaaccctatccacaccccactgactgattcctttggattttgacctcagaatgcctacctgacctcccacttgcctctcccctctcggattgccggtggtgcctggcggaaaaagcacaagtgtgttgttggctaccaaactcctacccgacaaaggtgcgtgtccgcgtgctgagtaatgggataggagatgccaataacaggctcgcccatgagtagagcatggactgcggtgcatgtgacttcggtcaccaggggcatagcattgctcacccctgaatcaagtcatcgagatttctctgacctctgaagtgcactgtggttgcgtggctgggaatccacgcttgaccatgtactgcttgatagagtcgcggctggccgactcatgggttaaagtcagttgacaagacac

SEQ ID NO: 1386 - DNA, 555 bp, Porcine kobuvirus
  strain KobuV/Pig-wt/ESP/B304/2017, complete1
cctcggccctctcaccctcttttccggtggccactcgcccgggccaccgttactccactccactccttcgggactggtttggaggaacataacagggcttcccatccctgtttaccctcattccacttacccttccccttaaccaaccctatccacaccccactgactgattcctttggattttgacctcagaatgcctacctgacctcccacttgcttctcccctctcggattgccggtggtgcctggcggaaaaagcacaagtgtgttgttggctaccaaactcctacccgacaaaggtgcgtgtccgcgtgctgagtaatgggataggagatgccaataacaggctcgcccatgagtagagcatggactgcggtgtatgtgacttcggtcaccaggggcatagcattgctcacccctgaatcaagtcatcgagatttctctgacctctgaagtgcactgtggttgcgtggctgggaatccacgcttgaccatgtactgcttgatagagtcgcggctggccgactcatgggttaaagtcagttgacaagacac

SEQ ID NO: 1387 - DNA, 555 bp, Porcine kobuvirus
  strain KobuV/Pig-wt/ESP/C429/2017, complete1
cctcggccctctcaccctcttttccggtggccactcgcccgggccaccgttactccactccactccttcgggactggtttggaggaacataacagggcttcccacccctgttcaccctaactccacttaccctttcccttaaccaaccctatccacaccccactgattgactcccttggattttgacctcggaatgcctacttgacctcccacttgcctttcccttcccggattgccggtggtgcctggcggaaaaagcacaagtgtgttgttggctaccaaactcctacccgacaaaggtgcgtgtccgcgtgctgagtaatgggataggagatgccaatgacaggctcgcccatgagtagagcatggactgcggtgcatgtgacttcggtcaccaggggcatagcattgctcacccctgaatcaagtcatcgagatttctctgacctctgaagtgcactgtggttgcgtggctgggaatccacgcttgaccatgtactgcttgatagagtcgcggctggccgactcatgggttaaagtcagttgacaagacac

SEQ ID NO: 1388 - DNA, 555 bp, Porcine kobuvirus
  strain KobuV/Pig-wt/ESP/VT25C/2017, complete1
cctcggccctctcaccctcttttccggtggccactcgcccgggccaccgttactccactccactccttcgggactggtttggaggaacacaacagggcttcccacccctgtttacccttactccactcacccttccccataaccaaccctatccacaccccactgactgactcctttggattttgacctcagaatgcctatttaacctcccacttgcctctcccctctcggattgccggtggtgcctggcggaaaaagcacaagtgtgttgttggctaccaaactcctacccgacaaaggtgcgtgtccgcgtgctgagtaatgggataggagatgccaatgacaggctcgcccatgagtagagcatggactgtggtgcatgtgacctcggtcaccaggggcatagcattgctcacccctgaatcaagtcatcgagatttctctgacctctgaagtgcactgtggttgcgtggctgggaatccacgcttgaccatgtactgcttgatagagtcgcggctggccgactcatgggttaaagtcagttgacaagacac

SEQ ID NO: 1389 - DNA, 555 bp, Porcine kobuvirus
  strain KobuV/Pig-wt/ESP/VC20B/2017, complete1
cctcggccctctcaccctcttttccggtggccactcgcccgggccaccgttactccactccactccttcgggactggtttggaggaacataacagggcttcccatccctgtttaccctcattccacttacccttttccttaaccaaccctatccacaccccactgactgattcctttggattttgacctcagaacgcctacttgacctcccacttgcttctcccttcccggattgccggtggtgcctggcggaaaaagcacaagtgtgttgttggctaccaaactcctacccgacaaaggtgcgtgtccgcgtgctgagtaatgggataggagatgccaataacaggctcgcccatgagtagagcatggactgcggtgcatgtgactccggtcaccgggggcatagcattgctcacccccgaatcaagtcatcgagatttctctgacctctgaagtgcactgtggttgtgtggctgggaatccacacttgaccatgtactgcttgatagagtcgcggctggccgactcatgggttaaagtcagttgacaagacac

SEQ ID NO: 1390 - DNA, 558 bp, Porcine kobuvirus
  isolate OH/RV11/2011, complete genome.1
cctcggccccctcaccctcttttccggtggccactcgcccgggccaccgttactccactccactccctcgggactggtttggaggaacataacagggcttcccatccctgtttttacccttatttccatctaccctttcccttaaccaaccctatccacaccccactgactgactcctttggattttgacctcagaatgcctacttgacctcccacttgcctctcccttatcggattgccggtggtgcctggtggaaaaagcacaagtgtgttgttggctaccaaactcctacccgacaaaggtgcgtgtccgcgtgctgagtaatgggataggagatgccaatgacaggctcgcccatgagtagagcatggactgcggtgcatgtgacttcggtcaccaggggcatagcattgctcacccctgaatcaagtcatcgagatttctctgacctctgaagtgcactgtggttgcgtggctgggaatccacgcttgaccatgtactgcttgatagagtcgcggctggccgactcatgggttaaagtcagttgacaagacac

SEQ ID NO: 1391 - DNA, 555 bp, Porcine kobuvirus
  isolate JXAT2015, complete genome.1
cctcggccccctcaccctcttttccggtggccactcgcccgggccaccgttacttcactccactccttcgggactggtttggaggaacataacagggcttcccatccctgtttacccttatttccacttaactttttcccaatctactctaaccacaccccactgactgactcctttggattttgacctcagaatgcctacctggcctcccactcgcctcatccttttcggattgccggtggtgcctggcggaaaaagcacaagtgtgttgcaggctaccaaactcctacccgacaaaggtgcgtgtccgcgtgctgagtaatgggataggagatgcctacaacaggctcgcccatgagtagagcatggactgcggtgcatgtgacttcggtcaccacgggcatagcattgctcacccgtgaatcaagtcatcgagatttctctgacctctgaagtgcactgtggttgcgtggctgggaatccacgcttgaccatgtactgcttgatagagtcgcggctggccgactcatgggttaaagtcagttgacaagacac

SEQ ID NO: 1392 - DNA, 555 bp, Porcine kobuvirus
  JS-01-CHN/2013/China, complete genome.1
cctcggccccctcaccctcttttccggtggccactcgcccgggccaccgttacttcactccactccttcgggactggtttggaggaacacaacagggcttcccaacccctgttacccttactctaattcccttttccctcaaccaaccctttccactccccactgactgactcccttggattttgacctcagaatgcctacttgacctcccacttgcctttcccttctcggattgccggtggtgcctggcggaaaaagcacaagtgtgttgcaggctaccaaactcctacccgacaaaggtgcgtgtccgcgtgctgagtaatgggataggagatgcctacaacaggctcgcccatgagtagagcatggactgcggtgcatgtgacttcggtcaccacgggcatagcattgctcacccgtgaatcaagtcatcgagatttctctgacctctgaagtgcactgtggttgcgtggctgggaatccacgcttgaccatgtactgcttgatagagtcgcggctggccgactcatgggttaaagtcagttgacaagacac

SEQ ID NO: 1393 - DNA, 555 bp, Porcine kobuvirus
  SH-W-CHN/2010/China, complete genome.1
cctcggccccctcaccctcttttccggtggccactcgcccgggccaccgttacttcactccactccttcgggactggtttggaggaacataacagggcttcccatccctgtttaccctcattccactcaccccttccctaaaccaaccctatccacaccccactgactgactcctttggattttgacctcagaatgcctacctgacctcccacttgcctctcccttctcggattgccggtggtgcctggcggaaaaagcacaagtgtgttgcaggctaccaaactcctacccgacaaaggtgcgtgtccgcgtgctgagtaatgggataggagatgtctacaacaggctcgcccatgagtagagcatggactgcggtgcatgtgacttcggtcaccacgggcatagcattgctcacccgtgaatcaagtcatcgagatttctctgacctctgaagtgcactgtggttgcgtggctgggaatccacgcttgaccatgtactgcttgatagagtcgcggctggccgactcatgggttaaagtcagttgacaagacac

SEQ ID NO: 1394 - DNA, 555 bp, Porcine kobuvirus
  isolate EdoMex/2018/205, complete genome.1
cttcggccctctcaccctcttttccggtggccactcgcccgggccaccgttactccactccactccttcgggactggtttggaggaacataacagggcttcccatccctgtttaccctcattccactcaccccttcccttgaccaaccccatccacaccccactgactgattcctttggattttgacctcagaatgcctacctgacctcccactcgcctctccctcttcggattgccggtggtgcctggcggaaaaagcacaagtgtgttgctggctaccaaactcctacccgacaaaggtgcgtgtccgcgtgctgagtaatgggataggagatgctaacaacaggctcgcccatgagtagagcatggactgcggtgcatgtgacttcggtcaccacgggcatagcattgctcacccgtgaatcaagtcatcgagatttctctgacctctgaagtgcactgtggttgcgtggctgggaatccacgcttgaccatgtactgcttgatagagtcgcggctggccgactcatgggttaaagtcagttgacaagacac

SEQ ID NO: 1395 - DNA, 555 bp, Porcine kobuvirus
  strain KobuV/Pig-wt/ESP/VC8/2017, complete1
cctcggccccctcaccctcttttccggtggccacacgcccgggccaccgttactccactccactccctcgggactggtttggaggaacacaacagggcttcccatccctgtttaccctcactccacccatccttctccttaaccaaccctatccacaccccactgactgactccattggattttgacctcagaatgcctacctgacctcccacttgcctctcccttctcggattgccggtggtgcctggcggaaaaagcacaagtgtgttgttggctaccaaactcctacccgacaaaggtgcgtgtccgcgtgctgagtaatgggataggagatgccaatgacaggctcgcccatgagtagagcatggactgcggtgcatgtgactttggtcaccaggggcatagcattgctcacccctgaatcaagtcatcgagatttctctgacctctgaagtgcgctgtggttgcgtggctgggaatccacgcttgaccatgtactgcttgatagagtcgcggctggccgactcatgggttaaagtcagttgacaagacac

SEQ ID NO: 1396 - DNA, 555 bp, Porcine kobuvirus
  strain KobuV/Pig-wt/ESP/P452/2017, complete1
cctcggccccctcaccctcttttccggtggccacacgcccgggccaccgttactccactccactccctcgggactggtttggaggaacacaacagggcttcccatccctgtttaccctcactccacttacccttctccttaaccaaccctatccacacctcactgactgattcctttggattttgacctcagaatgcctacttgacctcccacttgcctttcccttctcggattgccggtggtgcctggcggaaaaagcacaagtgtgttgttggctactaaactcctacccgacaaaggtgcgtgtccgcgcgctgagtaatgggataggagatgccaataacaggctcgcccatgagtagagcatggactgcggtgcatgtgacttcggtcaccaggggcatagcattgctcacccctgaatcaagtcatcgagacttctctgacctctgaagtgcactgtggttgcgtggctgggaatccacgcttgaccatgtactgcttgatagagtcgcggctggccgactcatgggttaaagtcagttgacaagacac

SEQ ID NO: 1397 - DNA, 556 bp, Porcine kobuvirus
  strain KobuV/Pig-wt/ESP/P259/2017, complete1
ccctcggccccctcaccctcttttccggtgcccacccgcccgggccaccgttactccactccactccttcgggactggtttggaggaacataacagggcttcccacccctgtttacccttattccactcacccttctccttaatcaaccctatccacaccccattgactgactcctttggattttgacctcagaatgcctacctgacctcccacttgcctctcccttctcggactgccggtggtgcctggcggaaaaagcacaagtgtgttgatggctaccaaactcttacccgacaaaggtgcgtgtccgcgtgctgagtaatgggataagagatgccattgacaggctcgcccatgagtagagcatggactgcggtgcatgtgacttcggtcaccaggggcatagcattgctcacccctgaatcaagtcatcgagatttctctgacctctgaagtgcactgtggttgcgtggctgggaatccacgcttgaccatgtactgcttgatagagtcgcggctggccgactcatgggttaaagtcagttgacaagacac

SEQ ID NO: 1398 - DNA, 555 bp, Porcine kobuvirus
  strain KobuV/Pig-wt/ESP/P437/2017, complete1
cctcggccctctcaccctcttttccggtggccacccgcccgggccaccgttactccactccactccttcgggactggtttggaggaacataacagggcttcccacccctgtttacccttattccactcacccttccccttaatcaaccctatccacaccccactgactgactcctttggtttttgacctcagaatgcctacctgacctcccacttacctctcccttttcggattgccggtggtgcctggtggaaaaagcacaagtgtgttgttggctactaaactcctacccgacaaaggtgcgtgtccgcgtgctgagtaatgggataggagatgccaataacaggctcgcccatgagtagagcatggactgcggtgcgtgtgacttcggtcaccaggggcatagcattgctcacccctgaatcaagtcatcgagatttctctgacctctgaagtgcactgtggttgcgtggctgggaatccacgcttgaccatgtactgcttgatagagtcgcggctggccgactcatgggttaaagtcagttgacaagacac

SEQ ID NO: 1399 - DNA, 555 bp, Porcine kobuvirus
  strain KobuV/Pig-wt/ESP/P37/2017, complete1
cctcggccctctcaccctcttttccggtggccacccgcccgggccaccgttactccactccactccttcgggactggtttggaggaacacaacagggcttcccacccctgtttacctttactccacttacctttctcctaaaccaatcctatccacaccccactgactgattcctttggattttgacctcagaatgcctacatgacctcccactcgtctctcccttcccggattgccggtggtgcctggcggaaaaagcacaagtgtgttgatggctaccaaactcctacccgacaaaggtgcgtgtccgcgtgctgagtaatgggataggagatgccattgacaggctcgcccatgagtagagcatggactgcggtgcatgtgacttcagtcaccaggggcatagcattgctcacccctgaatcaagtcatcgagatttctctgacctctgaagtgcactgtggttgcgtggctgggaatccacgcttgaccatgtactgcttgatagagtcgcggctggccgactcatgggttaaagtcagttgataagacac

SEQ ID NO: 1400 - DNA, 555 bp, Porcine kobuvirus
  strain KobuV/Pig-wt/ESP/P393/2017, complete1
cctcggccctctcaccctcttttccggtggccattcgcccgggccaccgttactccactccactccctcgggactggtttggaggaacacaacagggcttcccacccctgtttacccttactccacttaccaccccccttaaccaatcctatccacaccccactgactgattcctttggattttgatctcagaatgcctacttgacctcccacttgcctctcccttctcggattgccggtggtgcctggcggaaaaagcacaagtgtgttgttggctaccaaactcctacccgacaaaggtgcgtgtccgcgtgctgagtaatgggataggagatgccaatgacaggctcgcccatgagtagagcatggactgcggtgcatgtgacttcggtcaccaggggcatagcattgctcacccctgaatcaagtcatcgagatttctctgacctctgaagtgcactgtggttgcgtggctgggaatccacgcttgaccatgtactgcttgatagagtcgcggctggccgactcatgggttaaagtcagttgacaagacac

SEQ ID NO: 1401 - DNA, 555 bp, Porcine kobuvirus
  strain KobuV/Pig-wt/ESP/C247/2017, complete1
cctcggccccctcaccctcttttccggtggccacacgcccgggccaccgttactccactccactccctcgggactggtttggaggaacacaacagggcttcccatccctgtttaccctaacttcactcacccttatccttaaccaaccctatccacaccccactgactgattcctttggattttgacctcagaatgcctacctgacctcccacttgcctctcccttttcggattgccggtggtgcctggcggaaaaagcacaagtgtgttgatggctaccaaactcctacccgacaaaggtgcgtgtccgcgtgctgagtaatgggataggagatgccattgacaggctcgcccatgagtagagcatggactgcggtgcatgtgacttcggtcaccaggggcatagcattgctcacccctgaatcaagtcatcgagatttctctgacctctgaagtgcactgtggttgcgtggctgggaatccacgcttgaccatgtactgcttgatagagtcgcggctggccgactcatgggttaaagtcagttgataagacac

SEQ ID NO: 1402 - DNA, 558 bp, Porcine kobuvirus
  gene for polyprotein, complete cds,strain:1
ggcttcggccctctcaccctcttttccggtggccactcgcccgggccaccgttactccactccactccttcgggactggtttggaggaacataacagggcttcccacccctgtttacccttaactccaccaaccctttccttgaattaaccctatccacaccccactgactgactcccttggattttgacctcagaatgcctacctgacctcccacttgcctctccctcctcggattgccggtggtgcctggcggaaaaagcacaagtgtgttgttggctaccaaactcctacccgacaaaggtgcgtgtccgcgtgctgagtaatgggataggagatgccaatgacaggctcgcccatgagtagagcatggactgcggtgcatgtgacttcggtcaccaggggcatagcattgctcacccctgaatcaagtcatcgagatttctctgacctctgaagtgcactgtggttgcgtggctgggaatccacgcttgaccatgtactgcttgatagagtcgcggctggccgactcatgggttaaagtcagttgacaagacac

SEQ ID NO: 1403 - DNA, 556 bp, Porcine kobuvirus
  gene for polyprotein, complete cds,strain:1
cttcggccctctcaccctcttttccggtggccactcgcccgggccaccgttactccactccactccttcgggactggtttggaggaacataacagggcttcccatccctgtttacccttattccactcacccttcccctacaaccaaccctatccacaccccactgactgattcctttggattttgacctcagaatgcctacctgacctcccacttgcctctcccttctcggattgccggtggtgcctggcggaaaaagcacaagtgtgttgttggctaccaaactcctacccgacaaaggtgcgtgtccgcgtgctgagtaatgggataggagatgccaatgacaggctcgcccatgagtagagcatggactgcggtgcatgtgacctcggtcaccaggggcatagcattgctcacccctgaatcaagtcatcgagatttctctgacctctgaagtgcactgtggttgcgtggctgggaatccacgcttgaccatgtactgcttgatagagtcgcggctggccgactcatgggttaaagtcagttgacaagacac

SEQ ID NO: 1404 - DNA, 556 bp, Porcine kobuvirus
  isolate swKoV CH441, complete genome.1
cctcggccccctcaccctcttttccggtggccacccgcccgggccaccgttacttcactccactccttcgggactggtttggaggaacataacagggcttcccaatcccctgttatccttattccaattaccctttcccttaaccaaccctatccacaccccactgactgactcctttggattttgacctcagaatgcctacctgacctcccacttgcctctcccctctcggattgccggtggtgcctggcggaaaaagcacaagtgtgttgcaggctaccaaactcctacccgacaaaggtgcgtgtccgcgtgctgagtaatgggataggagatgcctacaacaggctcgcccatgagtagagcatggactgcggtgcatgtgacttcggtcaccacgggcatagcattgctcacccgtgaatcaagtcatcgagatttctctgacctctgaagtgcactgtggttgcgtggctgggaatccacgcttgaccatgtactgcttgatagagtcgcggctggccgactcatgggttaaagtcagttgacaagacac

SEQ ID NO: 1405 - DNA, 555 bp, Porcine kobuvirus
  isolate JXJC2015, complete genome.1
cctcggccccctcaccctcttttccggcggccactcgcccgggccaccgttacttcactccactccttcgggactggtttggaggaacataacagggcttcccatccctgtttacccttcactccaattacccttcccccaatcaaccctatccacaccccattgactgattcctttggattttgacctcagaatgcctacttgacctcccacttgccttccccttctcggactgccggtggtgcctggcggaaaaagcacaagtgtgttgcaggctaccaaactcctacccgacaaaggtgcgtgtccgcgtgctgagtaatgggataggagatgcctacaacaggctcgcccatgagtagagcatggactgcggtgcatgtgacttcggtcaccacgggcatagcattgctcacccgtgaatcaagtcatcgagatttctctgacctctgaagtgcactgtggttgcgtggctgggaatccacgcttgaccatgtactgcttgatagagtcgcggctggccgactcatgggttaaagtcagttgacaagacac

SEQ ID NO: 1406 - DNA, 661 bp, Caprine kobuvirus
  isolate 12Q108, complete genome.1
cctcggccccctcaccctcttttccggtggccacgcccgggccaccgatacttcccttcactccttcgggactgttggggaggaacacaacagggctcccctgttttcccattccttcccccttttcccaaccccaaccgccgtatctggtggcggcaagacacacgggtctttccctctaaagcacaattgtgtgtgtgtcccaggtcctcctgcgtacggtgcgggagtgctcccacccaactgttgtaagcctgtccaacgcgtcgtcctggcaagactatgacgtcgcatgttccgctgcggatgccgaccgggtaaccggttccccagtgtgtgtagtgcgatcttccaggtcctcctggttggcgttgtccagaaactgcttcaggtaagtggggtgtgcccaatccctacaaaggttgattctttcaccaccttaggaatgctccggaggtaccccagcaacagctgggatctgaccggaggctaattgtctacgggtggtgtttcctttttcttttcacacaactctactgctgacaactcactgactatccacttgctctcttgtgcctttctgctctggttcaagttccttgattgtttttgactgcttttcactgcttttcttctcacaatccttgctcagttcaaagtc

SEQ ID NO: 1407 - DNA, 556 bp, Porcine kobuvirus
  gene for polyprotein, complete cds,strain:1
cttcggccctctcaccctcttttccggtggccattcgcccgggccaccgttactccactccactccctcgggactggtttggaggaacacaacagggcttcccatccctgtttacccttaactccactcaccctttcctacaccaaccctatccacaccctactgattgattcctttggattttgacctcagaatgcctacccgacctcccactcgttttcctccttctcggattgccggtggtgcctggcggaaaaagcacaagtgtgttgttggctaccaaactcctacccgacaaaggtgcgtgtccgcgtgctgagtaatgggataggagatgccaataacaggctcgcccatgagtagagcatggactgcggtgcatgtgacttcggtcaccaggggcatagcattgctcacccctgaatcaagtcatcgagatttctctgacctctgaagtgcactgtggttgcgtggctgggaatccacgcttgaccatgtactgcttgatagagtcgcggctggccgactcatgggttaaagtcagttgacaagacac

SEQ ID NO: 1408 - DNA, 554 bp, Porcine kobuvirus
  gene for polyprotein, complete cds,strain:1
cttcggccctctcaccctcttttccggtggccacccgcccgggccaccgttactccactccactccttcgggactggtttggaggaacacaacagggcttcccacccctgtttaccccgatttcatctacccttctcccgaactgaccctatccacaccccactgactaactcctttggattagacctcggaatgcctacttgacctcccacttgcctctccctttctggattgccggtggtgcctggcggaaaaagcacaagtgtgttgcaggctaccaaactcctacccgacaaaggtgcgtgtccgcgtgctgagtaatgggataggagatgcctacaacaggctcgcccatgagtagagcatggactgcggtgcatgcgacttcggtcgccacgggcatagcattgctcacccgtgaatcaagtcatcgagatttctctgacctctgaagtgcactgtggttgcgtggctgggaatccacgcttgaccatgtactgcttgatagagtcgcggctggccgactcatgggttaaagtcagttgacaagacac

SEQ ID NO: 1409 - DNA, 556 bp, Porcine kobuvirus
  gene for polyprotein, complete cds,strain:1
cttcggccctctcaccctcttttccggtggccacccgcccgggccaccgttactccactccactccttcgggactggtttggaggaacataacagggcttcccaatccctgttaccctttactccatttccccatcccccaaacttaccctatccacaccccactgactgattcctttggattttgacctcagaatgcctacttgacctcccactcgcctctccctctccggactgccggtggtgcctggcggaaaaagcacaagtgtgttgcaggctactaaactcctacccgacaaaggtgcgtgtccgcgtgctgagtaatgggataggagatgcctacaacaggctcgcccatgagtagagcatggactgcggtgcatgtgacttcggtcaccacgggcatagcattgctcacccgtgaatcaagtcatcgagaattctctgacctctgaagtgcactgtggttgcgtggctgggaatccacgcttgaccatgtactgcttgatagagtcgcggctggccgactcatgggttaaagtcagttgacaagacac

SEQ ID NO: 1410 - DNA, 557 bp, Porcine kobuvirus
  gene for polyprotein, complete cds,strain:1
cttcggccctctcaccctcttttccggtggccactcgcccgggccaccgttactccactccactccctcgggactggtttggaggaacataacagggcttcctacccctgttcttccctcaattccactcacccttcccctcaaccacccctatccacaccccactgactgattcctttggattttgacctcagaatgcctacttgacctcccacttgcctctcccttttcggactgccggtggtgcctggtggaaaaagcacaagtgtgttgttggctaccaaactcctacccgacaaaggtgcgtgtccgcgtgctgagtaatgggataggagatgcctacaacaggctcgcccatgagtagagcatggactgcggtgcatgtgacttcggtcaccacgggcatagcattgctcacccgtgaatcaagtcatcgagatttctctgacctctgaagtgcactgtggttgcgtggctgggaatccacgcttgaccatgtactgcttgatagagtcgcggctggccgactcatgggttaaagtcagttgataagacac

SEQ ID NO: 1411 - DNA, 556 bp, Porcine kobuvirus
  gene for polyprotein, complete cds,strain:1
cttcggccctctcaccctcttttccggtggccactcgcccgggccaccgttactccactccactccctcgggactggtttggaggaacataacagggcttcccatccctgtttacccttaattctgcttaccctctccttttaccaaccctgtccacaccccactgactgattcctttggattttgacctcagaatacctacctgacctcccacttgcctctcccttctcggattgccggtggtgcctggcggaaaaagcacaagtgtgttgttggctaccaaactcttacccgacaaaggtgcgtgtccgcgtgctgagtaatgggataggagatgccaatgacaggctcgcccatgagtagagcatggactgcggtgcatgtgacttcggtcaccaggggcatagcgttgctcacccctgaatcaagtcatcgagatttctctgacctctgaagtgcactgtggttgcgtggttgggaatccacgcttgaccatgtactgcttgatagagtcgcggctggccgactcatgggttaaagtcagttgacaagacac

SEQ ID NO: 1412 - DNA, 556 bp, Porcine kobuvirus
  gene for polyprotein, complete cds,strain:1
cttcggccctctcaccctcttttccggtggccactcgcccgggccaccgttactccactccactccctcgggactggtttggaggaacataacagggcttcccatccctgtttacccttaattccacttaccctctccttttaccaaccctatccatacctcactgactgattcctttggattttgacctcagaatgcctacctgacctcccacttgcctctcccttctcggattgccggtggtgcctggcggaaaaagcacaagtgtgttgttggctaccaaactcctacccgacaaaggtgcgtgtccgcgtgctgagtaatgggataggagatgcctacaacaggctcgcccatgagtagagcatggactgcggtgcatgtgacttcggtcaccacgggcatagcattgctcacccgtgaatcaagtcatcgagatttctctgacctctgaagtgcactgtggttgcgtggctgggaatccacgcttgaccatgtactgcttgatagagtcgcggctggccgactcatgggttaaagtcagttgacaagacac

SEQ ID NO: 1413 - DNA, 556 bp, Porcine kobuvirus
  gene for polyprotein, complete cds,strain:1
cttcggccctctcaccctcttttccggtggctactcgcccgggccaccgttactccactccactccctcgggactggtttggaggaacataacagggcttcccatccctgtttacccttaattctgcttaccctctccttttaccaaccctgtccacaccccactgactgattcctttggattttgacctcagaatacctacctgacctcccacttgcctctcccttctcggattgccggtggtgcctggcggaaaaagcacaagtgtgttgttggctaccaaactcttacccgacaaaggtgcgtgtccgcgtgctgagtaatgggataggagatgccaatgacaggctcgcccatgagtagagcatggactgcggtgcatgtgacttcggtcaccaggggcatagcgttgctcacccctgaatcaagtcatcgagatttctctgacctctgaagtgcactgtggttgcgtggttgggaatccacgcttgaccatgtactgcttgatagagtcgcggctggccgactcatgggttaaagtcagttgacaagacac

SEQ ID NO: 1414 - DNA, 556 bp, Porcine kobuvirus
  gene for polyprotein, complete cds,strain:1
cttcggccctctcaccctcttttccggtggccactcgcccgggccaccgttactccactccactccctcgggactggtttggaggaacataacagggcttcccatccctgtttacccttggttccactcaccctttcccctcaccaaccttatccacaccccactgactgactcctttggattttgacctcagaatgcctacttgacctcccactcgcctctcccttctcggactgccggtggtgcctggcggaaaaagcacaagtgtgttgttggctaccaaactcctacccgacaaaggtgcgtgtccgcgtgccgagtaatgggataggagatgccaataacaggctcgcccatgagtagagcatggactgcggtgcatgtgacttcggtcaccagggacatagcattgctcacccctgaatcaagtcatcgagaattctctgacctctgaagtgcactgtggttgcgtggctgggaatccacgcttgaccatgtactgcttgatagagtcgcggctggccgactcatgggttaaagtcagttgacaagacac

SEQ ID NO: 1415 - DNA, 558 bp, Porcine kobuvirus
  gene for polyprotein, complete cds,strain:1
cttcggccctctcaccctcttttccggtggccactcgcccgggccaccgttactccactccactccctcgggactggtttggaggaacacaacagggcttcccacccctgttctttccttaattccactcaccctttccctttaccaaccctatccacaccccactgactgattcctttggattttgacctcagaatacccatttgacctcccacttgcctctccctttttcggattgccggtggtgcctggcggaaaaagcacaagtgtgttgttggctaccaaactcctacccgacaaaggtgcgtgtccgcgtgccgagtaatgggataggagatgcctacaacaggctcgcccatgagtagagcatggactgcggtgcatgtgacttcggtcaccacgggcatagcattgctcacccgtgaatcaagtcatcgagatttctctgacctctgaagtgcactgtggttgcgtggctgggaatccacgcttgaccatgtactgcttgatagagtcgcggctggccgactcatgggttaaagtcagttgataagacac

SEQ ID NO: 1416 - DNA, 555 bp, Porcine kobuvirus
  isolate OH/RV50/2011, complete genome.1
cctcggccccctcaccctcttttccggtggccacccgcccgggccaccgttacttcactccactccctcgggactggtttggaggaacataacagggcttcccatccctgtttacccttatttccaattaccctttcctaaaccaaccctatccacaccccactgactgactcctttggattttgacttcagaatgcctacctgacctcccacttgcctctcccttctcggactgccggtggtgcctggcggaaaaagcacaagtgtgttgttggctaccaaactcctacccgacaaaggtgcgtgtccgcgtgctgagtaatgggataggagataccaataacaggctcgcccatgagtagagcatggactgcggcgcatgtgacctcggtcaccaggggcatagcattgctcacccctgaatcaagtcatcgagacttctctgacctctgaagtgcgctgtggttgcgtggctgggaatccacgcttgaccatgtactgcttgatagagtcgcggctggccgactcatgggttaaagtcagttgacaagacac

SEQ ID NO: 1417 - DNA, 557 bp, Porcine kobuvirus
  gene for polyprotein, complete cds,strain:1
cttacggccctctcaccctcttttccggtggccattcgcccgggccaccgttactccactccactccctcgggactggtttggaggaacacaacagggcttcccatccctgtttatcctaattctacttaccttttcccttttaccgaccctatccacaccccactgactgattcctttggattttgacctcggaatgcctactagatctcccacttgcctctcccttcccggattgccggtggtgcctggcggaaaaagcacaagtgtgttgcaggctaccaaactcctacccgacaaaggtgcgtgtccgcgtgctgagtaatgggataggagatgcctacaacaggctcgcccatgagtagagcatggactgcggtgcatgtgacttcggtcaccacgggcatagcattgctcacccgtgaatcaagtcatcgagatttctctgacctctgaagtgcactgtggttgcgtggctgggaatccacgcttgaccatgtactgcttgatagagtcgcggctggccgactcatgggttaaagtcagttgacaagacac

SEQ ID NO: 1418 - DNA, 555 bp, Kobuvirus pig/JY-2010a/CHN
  isolate Y-1-CHI, complete genome.1
cctcggccccctcaccctcttttccggcggccactcgcccgggccaccgttacttcactccactccctcgggactggtttggaggaacataacagggcttcccatccctgtttacccttactctgacaacccttccccttaatcaaccctatccacaccccactgactgactcctttggattttgacctcagaatgcctacttgacctcccacttgcctctccctcctcggattgccggtggtgcctggcggaaaaagcacaagtgtgttgcaggctaccaaactcctacccgacaaaggtgcgtgtccgcgtgctgagtaatgggataggagatgcctacaacaggctcgcccatgggtagagcatggactgcggtgcatgtgacttcggtcaccacgggcatagcattgctcacccgtgaatcaagtcatcgagatttctctgacctctgaagtgcactgtggttgcgtggctgggaatccacgcttgaccatgtactgcttgatagagtcgcggctggccgactcatgggttaaagtcagttgacaagacac

SEQ ID NO: 1419 - DNA, 420 bp, Bovine kobuvirus; identical to SEQ ID NO: 460
  polyprotein gene, complete cds.1

SEQ ID NO: 1420 - DNA, 555 bp, Porcine kobuvirus
  strain KobuV/Pig-wt/ESP/P461/2017, complete1
cttcggccctctcaccctcttttccggtggccacccgcccgggccaccgttactccactccactccctcgggactggtttggaggaacacaacagggcttctcatccctgtttacccttattccacttacccttctccccgaactacccaacccactccccactgattgactcccttggattaagacctcggaatgtcttcctgaccttcttcttggttttcccttttcggattgccggtggtgcctggtggaaaaagcacaagtgtgttgttggctaccaaactcctacccgacaaaggtgcgtgtccgcgtgctgagtaatgggataggagatgccaataacaggctcgcccatgagtagagcatggactgcggtgcatgtgacttcggtcaccaggggcatagcattgctcacccctgaatcaagtcatcgagatttctctgacctctgaagtgcactgtggttgcgtggctgggaatccacgcttgaccatgtactgcttgatagagtcgcggctggccgactcatgggttaaagtcagttgacaagacac

SEQ ID NO: 1421 - DNA, 557 bp, Porcine kobuvirus
  gene for polyprotein, complete cds,strain:1
cttcggccctctcaccctcttttccggtggccacacgcccgggccaccgttactccactccactccctcgggactggtttggaggaacacaacagggcttcccatccctgttcctccctcaactccacttaccctttccccttaccaaccttatccacaccctattgactgattcctttggattttgacctcagaatgcctatctgacctcccacctgcctcccccttctcggattgccggtggtgcctggcggaaaaagcacaagtgtgttgttggctaccaaactcctacccgacaaaggtgcgtgtccgcgtgctgagtaatgggataggagatgccaataacaggctcgcccatgagtagagcatggactgcggtgcatgtgacttcagtcaccaggggcatagcattgctcacccctgaatcaagtcatcgagatttctctgacctctgaagtgcactgtggttgcgtggctgggaatccacgcttgaccatgtactgcttgatagagtcgcggctggccgactcatgggttaaagtcagttgacaagacac

SEQ ID NO: 1422 - DNA, 557 bp, Porcine kobuvirus
  gene for polyprotein, complete cds,strain:1
cttcggccctctcaccctcttttccggtggccacacgcccgggccaccgttactccactccactccctcgggactggtttggaggaacacaacagggcttcccatccctgttcctccctcaactccacttaccctttccccttaccaacctcatccacacctcattgactgattcctttggattttgacttcagaatgcctatctgacctcccacttgcctcccccttctcggattgccggtggtgcctggcggaaaaagcacaagtgtgttgttggctaccaaactcctacccgacaaaggtgcgtgtccgcgtgctgagtaatgggataggagatgccaataacaggctcgcccatgagtagagcatggactgcggtgcatgtgacttcagtcaccaggggcatagcattgctcacccctgaatcaagtcatcgagatttctctgacctctgaagtgcactgtggttgcgtggctgggaatccacgcttgaccatgtactgcttgatagagtcgcggctggccgactcatgggttaaagtcagttgacaagacac

SEQ ID NO: 1423 - DNA, 556 bp, Porcine kobuvirus
  gene for polyprotein, complete cds,strain:1
ttcggccctctcaccctcttttccggtggccacacgcccgggccaccgttactccactccactccctcgggactggtttggaggaacacaacagggcttcccatccctgttcctccctcaactccacttaccctttccccttaccaacctcatccacacctcattgactgattcctttggattttgacttcagaatgcctatctgacctcccacttgcctcccccttctcggattgccggtggtgcctggcggaaaaagcacaagtgtgttgttggctaccaaactcctacccgacaaaggtgcgtgtccgcgtgctgagtaatgggataggagatgccaataacaggctcgcccatgagtagagcatggactgcggtgcatgtgacttcagtcaccaggggcatagcattgctcacccctgaatcaagtcatcgagatttctctgacctctgaagtgcactgtggttgcgtggctgggaatccacgcttgaccatgtactgcttgatagagtcgcggctggccgactcatgggttaaagtcagttgacaagacac

SEQ ID NO: 1424 - DNA, 557 bp, Porcine kobuvirus
  strain CH/KB-1/2014, complete genome.1
cttcggccctctcaccctcttttccggtggccacccgcccgggccaccgttacttcactccactccttcgggactggtttggaggaacataacagggcttcccaatcccctgttatcctttatcccaaacaccttttcccttaaccaaccctatccacaccccactgactgattcctttggattttgacctcagaatgcctacctgacctcccactcgcctctcccttctcggattgccggtggtgcctggcggaaaaagcacaagtgtgttgcaggctaccaaactcctacccgacaaaggtgcgtgtccgcgtgctgagtaatgggataggagatgcctacaacaggctcgcccatgagtagagcatggactgcggtgcatgtgacttcggtcaccacgggcatagcattgctcacccgtgaatcaagtcatcgagatttctctgacctctgaagtgcactgtggttgcgtggctgggaatccacgcttgaccatgtactgcttgatagagtcgcggctggccgactcatgggttaaagtcagttgacaagacac

SEQ ID NO: 1425 - DNA, 557 bp, Porcine kobuvirus
  genomic RNA, complete genome,strain:1
cttcggccctctcaccctcttttccggtggccactcgcccgggccaccgttactccactccactccctcgggactggtctggaggaacacaacagggcttcccatccctgtttaccctcattccaatttacccttcccttacaaccaaccctatccacaccccactgaatgattcctttggattttgacctcagaatgcctacctgaccccccacttgcttctccctcctcggattgccggtggtgcctggcggaaaaagcacaagtgtgttgttggctaccaaactcctacccgacaaaggtgcgtgtccgcgtgctgagtaatgggataggagatgccaataacaggctcgcccatgagtagagcatggactgcggtgcatgtgacttcggtcaccagggacatagcattgctcacccctgaatcaagttattgagatttctctgacctctgaagtgcactgtggttgcgtggccgggaatccacgcttgaccatgtactgcttgatagagtcgcggctggccgactcatgggttaaagtcagttgacaagacac

SEQ ID NO: 1426 - DNA, 559 bp, Porcine kobuvirus
  isolate JS-02a-CHN/2014/China, complete genome.1
cggcctcggcccactcaccctctttaccggtggccacccgcccgggccaccgttacttcactccactccttcgggactggtttggaggaacataacagggcttcccatccctgttcaccccttattccaattaccctcacccttgattaaccctacccacaccccactgactgattcctttggattttgacctcagaatgcctacttgacctcctacttgcttctcccttctcggattgccggtggtgcctggcggaaaaagcacaagtgtgttgcaggctaccaaactcctacccgacaaaggtgcgtgtccgcgtgctgagtaatgggataggagatgcctacaacaggctcgcccatgagtagagcatggactgcggtgcatgtgacttcggtcaccacgggcatagcattgctcacccgtgaatcaagtcatcgagatttctctgacctctgaagtgcactgtggttgcgtggctgggaatccacgcttgaccatgtactgcttgatagagtcgcggctggccgactcatgggttaaagtcagttgacaagacac

SEQ ID NO: 1427 - DNA, 556 bp, Porcine kobuvirus
  isolate CH/DX/2012, complete genome.1
cttcggccctctcaccctcttttccggtggccactcgcccgggccaccgttacttcactccactccctcgggactggtttggaggaacataacagggcttcccacccctgtttacccttaattccacttacccttccccttaaccaaccctatccacaccccactgactgattcctttggattttgacctcagaatgcctacttgacctcccacttgcctctcccttctcggattgccggtggtgcctggcggaaaaagcacaagtgtgttgcaggctaccaaactcctacccgacaaaggtgcgtgtccgcgtgctgagtaatgggataggagatgcctacaacaggctcgcccatgagtagagcatggactgcggtgcatgtgacttcggtcaccacgggcatagcattgctcacccgtgaatcaagtcatcgagatttctctgacctctgaagtgcactgtggttgcgtggctgggaatccacgcttgaccatgtactgcttgatagagtcgcggctggccgactcatgggttaaagtcagttgacaagacac

SEQ ID NO: 1428 - DNA, 556 bp, Porcine kobuvirus
  isolate CH/HZ/2011 polyprotein gene, complete1
cttcggccctctcaccctcttttccggtggccactcgcccgggccaccgttacttcactccactccctcgggactggtttggaggaacataacagggcttcccacccctgtttacccttaattccacttacccttccccttaaccaaccctatccacaccccactgactgattcctttggattttgacctcagaacgcctacttgacctcccacttgcctctcccttctcggattgccggtggtgcctggcggaaaaagcacaagtgtgttgcaggctaccaaactcctacccgacaaaggtgcgtgtccgcgtgctgagtaatgggataggagatgcctacaacaggctcgcccatgagtagagcatggactgcggtgcatgtgacttcggtcaccacgggcatagcattgctcacccgtgaatcaagtcatcgagatttctctgacctctgaagtgcactgtggttgcgtggctgggaatccacgcttgaccatgtactgcttgatagagtcgcggctggccgactcatgggttaaagtcagttgacaagacac

SEQ ID NO: 1429 - DNA, 556 bp, Porcine kobuvirus
  gene for polyprotein, complete cds,strain:1
cctcggccctctcaccctcttttccggtggccactcgcccgggccaccgttacttcactccactcccttgggactggtttggaggaacacaacagggcttcccacccctgtttaccctacactccactcaccctctcccttaaccaaccctatccacatcccactgactgattcctttggattttgacttcagaatgcctacttgacctcccacttgcttctcccttcccggattgccggtggtgcctggcggaaaaagcacaagtgtgttgttggctaccaaacccctacccgacaaaagcgcgtgtccgcgtgctgagtaatgggataggggatgccaatgacaggctcgcccatgagtagagcatggactgcggtgcatgtgactttggtcaccaggggcatagcattgctcacccctgaatcaagtcatcgagatttctctgacctctgaagtgcactgtggttgcgtggctgggaatccacgcttgaccatgtactgcttgatagagtcgcggctggccgactcatgggttaaagtcagttgacaagacac

SEQ ID NO: 1430 - DNA, 557 bp, Porcine kobuvirus
  gene for polyprotein, complete cds,strain:1
cttacggggctctcaccctcttttccggtggccactcgcccgggccaccgttactccactccactccttcgggactggtttggaggaacacaacagggcttcccacccctgtttacccttaactccactcacccctcccttgaaccaaccctatccacaccccactgactgactcctttggattttgacttcggaatgcctacctaacctcccacttgcctttccctttacggattgccggtggtgcctggcggaaaaagcacaagtgtgttgttggctaccaaactcctacccgacaaaggtgcgtgtccgcgtgctgagtaatgggataggagatgccaatgacaggctcgcccatgagtagagcatggactgcggtgcatgtgacttcggtcaccaggggcatagcattgctcacccctgaatcaagtcatcgagatttctctgacctctgaagtgcactgtggttgcgtggctgggaatccacgcttgaccatgtactgcttgatagagtcgcggctggccgactcatgggttaaagtcagttgacaagacac

SEQ ID NO: 1431 - DNA, 776 bp, Kobuvirus sp.
  sheep/TB3/HUN/2009, complete genome.1
cttcggccccctcaccctcttttccggcggcgcaagttcgcgtcgtcgtaagcctggacacccatgttcgcatcggtctccgggcaaatacaagaaccccagaccttctggtacttcttcgcctgggtcacaaaagcgaagaacctgcctctctaacgccagacgagcggcattaaacttgaacttctggcactctccactctcccttttccctgtccctttccccactgcgctctcaaggtcgcgcaatcctgggactagcccagttttaaaagttcctggcaccctttgcccctctaggcccttaaggtaggaactgaccttgtgctgtgatctcggtgcgggagtgctaccacgtagtcatcgtaagcctcgtttctggttctgccctggcaaggctacagagtaccgtgttccgctgtggatgccatccgggtaaccggacccccagtgtgtgtagcggtatgttcacggtccgccgtgttcaccagattcctgacctggctttgctagaaatggtgtgtgcccaatccctgtgaccagtatcaattacatcacctaggaatgctaggaaggtaccccagtcctgagctgggatctgatcctaggctaattgtctacggtgatgctccttttattttcttacaactgctattgactgtctgattgctgattctgctcttgtgctcttctgctctggctcattctcaagggttctctttgtccaagatcctttggttctctccttgttccacttgccactgccaacgcttgtc

SEQ ID NO: 1432 - DNA, 665 bp, Caprine kobuvirus
  isolate MN1/2018, complete genome.1
gcccgtccccctcaccctcttttccggtggccacgcccgggccaccgatacttcccttcactccctcgggactgttggggaggaacacaacagggctcccctgtatttcctcttcccattccccctttcctaaccccaaccgccgtatctggtggcggtaagacacacgggtctttccctctaaagcacaattgtgtgtgtgtcccaggtcctcctgcgttcggtgcgggagtgctcccacccaactgttgtaagcctgtccaacgtgtcgtcctggcaagactatgacgtcgcatgttccgctgtggatgccgaccgggtaaccggttccccagtgtgtgtagtgcgatcttccaggttctcctggttggcgttgtccagaaactgcttcgggtaagtggggtgtgcccaatccctacaagggttgattctttcaccaccttaggaatgctccggaggtaccccagcaacagctgggatctgaccggaggctaattgtctacgggtggtgtttccattttctttttcacacaacttcattgctgacaactcactgactaatcacttgctctcttgtgcctttctgctctggttcaagttccttgattgtttgtttgattgcttttcactgctttcttcccacaatccttgctcagttcaaagtc

SEQ ID NO: 1433 - DNA, 556 bp, Porcine kobuvirus
  gene for polyprotein, complete cds,strain:1
cttcggccctctcaccctcttttccggtggccgcccgcccgggccaccgttacttcactccactccctcgggactggtttggaggaacacaacagggcttcccatccctgttttcccttaataccacttaccttttccctaattaaccctacccaccacccaccgactgactccctttggattttgacctcagaatgcccacttgacctcccacttgcctcttcctttttggattgccggtggtgcctggcggaaaaagcacaagtgtgttgcaggctaccaaactcctacccgacaaaggtgcgtgtccgcgtgctgagtaatgggataggagatgcctacaacaggctcgcccatgagtagagcatggactgcggtgcatgtgacctcggtcaccacgggcatagcattgctcacccgtgaatcaagtcatcgagatctctctgacctctgaagtgcactgtggttgcgtggctgggaatccacgcttgaccatgtactgcttgatagagtcgcggctggccgactcatgggttaaagtcagttgacaagacac

SEQ ID NO: 1434 - DNA, 549 bp, Porcine kobuvirus
  gene for polyprotein, complete cds,strain:1
cctctcaccctcttttccggtggccacccgcccgggccaccgttactccactccactccttcgggactggtttggaggaacataacagggcttcccacccctgtttacccttattccactcaccctttccccacaaccaaccctatccacaccccactgactgattcctttggattttgacctcagaatgcctacctgacctcccacttgcctctcccttctcggattgccggtggtgcctggcggaaaaagcacaagtgtgttgttggctaccaaactcctacccgacaaaggtgcgtgtccgcgtgctgagtaatgggataggagatgccaatgacaggctcgcccatgagtagagcatggactgcggtgcatgtgacctcggtcaccaggggcatagcattgctcacccctgaatcaagtcatcgagatttctctgacctctgaagtgcactgtggttgcgtggctgggaatccacgcttgaccatgtactgcttgatagagtcgcggctggccgactcatgggttaaagtcagttgacaagacac

SEQ ID NO: 1435 - DNA, 546 bp, Porcine kobuvirus
  gene for polyprotein, complete cds,strain:1
ctcaccctcttttccggtggccactcgcccgggccaccgttactccactccactccctcgggactggtttggaggaacacaacagggcttcccatccctgtttacccttcactccactcaccccttcccttaatcaaccctgtccacaccccactgactgattcctttggattatgacctcagaatgcctacccgatctcccactcgcctctcctttcttggattgccggtggtgcctggcggaaaaagcacaagtgtgttgcaggctaccaaactcctacccgacaaaggtgcgtgtccgcgtgctgagtaatgggataggagatgcctacaacaggctcgcccatgagtagagcatggactgcggtgcatgtgacttcggtcaccacgggcatagcattgctcacccgtgaatcaagtcatcgagatttctctgacctctgaagtgcactgtggttgcgtggctgggaatccacgcttgaccatgtactgcttgatagagtcgcggctggccgactcatgggttaaagtcagttgacaagacac

SEQ ID NO: 1436 - DNA, 755 bp, Bovine kobuvirus; identical to SEQ ID NO: 1218
  strain BKoV/EGY-1, complete genome.1

SEQ ID NO: 1437 - DNA, 729 bp, Bovine kobuvirus; identical to SEQ ID NO: 922
  strain SC1 polyprotein gene, complete cds.1

SEQ ID NO: 1438 - DNA, 787 bp, Aichivirus B
  genomic RNA, complete genome,strain:U-1.1
cttcggccccctcaccctcttttccggcggcgcatgttcgcgtcgtcgtaagtctggattcccaaggcccactcggttcaacttcggtttccggacaaatacaaagaacctcagtcctcttggtactttctcgcctgagtctacaaagcgagaaacctgcccctctaacgccagacgagcggcataaaactcgaacttctggcacgttccaccaccccttctcctatcccaacccccattgcgctctcaaggtcgcgcttttccgagactagctcggattcaaaaagttcctggcaccctttaccccttcaggcccttaaggtaggaactgaccttgtgctgtgatctcggtgcggaagtgctactgcgtagtgattgtaagatccttttgtggttctgccctggcaaggctacagagtgctgtgatccgctgcggatgccatcctggtaacaggacccccagtgtgcgcaacagtatgttcacggtcttccgtgttcaccacattcggaacactgctttcgtgaaacagtgtgtgtccaatccctgtgatcagtatcaaccacaccacctaggaatgctaggaaggtaccccggttcgccgggatctgatcctaggctaattgtctacggtggtgctcctttttattttccacttcaactcactggttacaactgcttgatttctgtgtttgctgcttttctctgctctcactgccattctcaagtgttcacactgtccaagctcctttggttgttcgcttccacttgccactgtcaactcttgtc

SEQ ID NO: 1439 - DNA, 770 bp, Bovine kobuvirus; identical to SEQ ID NO: 1230
  strain IL35164, complete genome.1

SEQ ID NO: 1440 - DNA, 545 bp, Caprine kobuvirus
  isolate CKoV-China/SWUN/F11/2019, complete1
cccccttttccctaaccccaaccgccgtatctggtggcggcaagacacacgggtctttccctctaaagcacaaatgtgtgtgtgtcccaggtcctcctgcgctcggtgcgggagtgctcccacccaactgttgtaagcctgtccaacgtgtcgtcctggcaagactatgacgtcgcatgttccgctgcggatgccgaccgggtaaccggttccccagtgtgtgtagtgcgatcttccaggttcccctggttggcgttgtccagaaactgcttcaggtaagtggggtgtgcccaatccctgcaaaggttgattctctcaccaccttaggaatgctccggaggtaccccagcaacagctgggatctgaccggaggctaattgtctacgggtggtgtttcctttttctttttccacaacttcattgctgacaactcactgactacccatttgctctcttgtgcctttctgctctggttcaagctccttgattgtttttgattgctttctattgctttcttccactcaacccttgctcagttcaaagtc

SEQ ID NO: 1441 - DNA, 782 bp, Kobuvirus sp.
  cattle/Kagoshima-2-24-KoV/2015/JPN genomic RNA, complete1
ataccctccccctccacactcttttcgacggcgcgcctcggcaaggccgccgataccgcactgtgctacttcggtaccactctgcgggaatgacaatatgcccggtgtatagtttgcctgtttctcgcaccgttaccgctcgttcgggaatgtgaaactggcacccctcctctcccctaccaccctttctccttcgcccccattcataatttacaacgccgcacacagcggcggccgccaagggctagcctggcggttataaaaggaacctgggtctttccctcttcaagccaaaaggtaggttccctgtgtccctgaatgctcggtgaggaatgctgcaccgtaacgctttgtgaagtgtttgcaagttctggcccggcaagcctacagagtgctgtgatccgctgcggacgccatcctggtaacaggacccccagtgtgcgcaacagtatgttcagacttcggtttgttcacttgctttcatggaccattgcgcgaaagtgcgtgcgccatatccctgtacttcaggtgtgcttctctggaccctaggaatgctgcgaaggtaccccgtttcggcgggatctgatcgcaggctaattgtctatgggttcagtttcctttttctttactccacaattgactgcttaactgactctggatcttgtgcttccactgctctttctgctctcaaaacggcttcacttaccaactctcacctttcgaccaacaccatttacacactaacttttttcgactcttctgactcctggcttggtgaagac

SEQ ID NO: 1442 - DNA, 537 bp, Porcine kobuvirus
  THA/2007 gene for polyprotein, complete cds,1
ttttccggtggccacacgcccgggccaccgttactccactccactccttcgggactggtttggaggaacacaacagggcttcccacccctgtttaccctttctccactcatccactccctttaaccaaccctgtccacaccccactgactgactcctttggattttgacctcggaatgcctacttgaccttccactcgcctttcccttttcggattgccggtggtgcctggcggaaaaagcacaagtgtgttgcaggctaccaaactcctacccgacaaaggtgcgtgtccgcgtgctgagtaatgggataggagatgcctacaacaggctcgcccatgagtagagcatggactgcggtgcatgtgacttcggtcaccacgggcatagcattgctcacccgtgaatcaagtcatcgagatttctctgacctctgaagtgcactgtggttgcgtggctgggaatccacgcttgaccatgtactgcttgatagagtcgcggctggccgactcatgggttaaagtcagttgacaagacac

SEQ ID NO: 1443 - DNA, 528 bp, Porcine kobuvirus
  gene for polyprotein, complete cds,
  strain:1
gccacacgcccgggccaccgttactccactccactccctcgggactggtttggaggaacacaacagggcttcccatccctgttcctccctcaactccacttaccctttccccttaccaaccttatccacaccctattgactgattcctttggattttgacctcagaatgcctatctgacctcccacctgcctcccccttctcggattgccggtggtgcctggcggaaaaagcacaagtgtgttgttggctaccaaactcctacccgacaaaggtgcgtgtccgcgtgctgagtaatgggataggagatgccaataacaggctcgcccatgagtagagcatggactgcggtgcatgtgacttcagtcaccaggggcatagcattgctcacccctgaatcaagtcatcgagatttctctgacctctgaagtgcactgtggttgcgtggctgggaatccacgcttgaccatgtactgcttgatagagtcgcggctggccgactcatgggttaaagtcagttgacaagacac

SEQ ID NO: 1444 - DNA, 532 bp, Porcine kobuvirus
  gene for polyprotein, complete cds,
  strain:1
ccggtggccacccgcccgggccaccgttactccactccactccctcgggactggtttggaggaacataacagggcctcccacccctgttcaccttaattccacttaccctttccctcaaccaaccctatccacaccccattgactgattcctttggattttgacctcagaatgcctacttgacctcccacttgcctttcccttctcggattgccggtggtgcctggcggaaaaagcacaagtgtgttgcaggctatcaaactcctacccgacaaaggtgcgtgtccgcgtgctgagtaatgggataggagatgcctacaacaggctcgcccatgagtagagcatggactgcggtgcatgtgacttcggtcaccacgggcatagcattgctcacccgtgaatcaagtcatcgagatttctctgacctctgaagtgcactgtggttgcgtggctgggaatccacgcttgaccatgtactgcttgatagagtcgcggctggccgactcatgggttaaagtcagttgacaagacac

SEQ ID NO: 1445 - DNA, 510 bp, Porcine kobuvirus
  isolate Chgz1 polyprotein gene, complete cds.1
cgttactccactccactccctcgggactggtttggaggaacataacagggcttcccacccctgtttacccttaattccactcaccctttccctataaccaaccctatccacaccccactgactgattcctttggattttgacctcagaatgcccacctgacctcccacttgcctctcccttcccggattgccggtggtgcctggcggaaaaagcacaagtgtgttgttggctaccaaactcctacccgacaaaggtgcgtgtccgcgtgctgagtaatgggataggagatgccaataacaggctcgcccatgagtagagcatggactgcggtgcatgtgactttggtcaccaggggcatagcattgctcacccctgaatcaagtcatcgagatttctctgacctctgaagtgcactgtggttgcgtggctgggaatccacgcttgaccatgtactgcttgatagagtcgcggctggccgactcatgggttaaagtcagttgacaagacac

SEQ ID NO: 1446 - DNA, 513 bp, Porcine kobuvirus
  isolate XX, complete genome.1
ccaccgttacttcactccactccctcgggactggtttggaggagcataacagggcttcccatccctgttcaccctcaataccacccaccctttccctcaaccatccctatccacaccccactgactgattcccttggattttgacctcagaacgcctacttgacctcccacttgcctttcccttctcggattgccggtggtgcctggcggaaaaagcacaagtgtgttgcaggctaccaaactcctacccgacaaaggtacgtgtccgcgtgctgagtaatgggataggagatgcctacaacaggctcgcccatgagtagagcatggactgcggtgcatgtgacttcggtcaccacgggcatagcattgctcacccgtgaatcaagtcattgagattcctctgacctctgaagtgcactgtggttgcgtggctgggaatccacgcttgaccatgtactgcttgatagagtcgcggctggccgactcatgggttaaagtcagttgataagacac

SEQ ID NO: 1447 - DNA, 509 bp, Porcine kobuvirus
  isolate Chgz2 polyprotein gene, complete cds.1
cgttactccactccactccctcgggactggtttggaggaacataacagggcttcccacccctgtttacccttaattccactcaccctttcccttaaccaaccctatccacaccccactgactgattcctttggattttgacctcagaatgcccacttgacctcccacttgcctctcccttcccggattgccggtggtgcctggcggaaaaagcacaagtgtgttgttggctaccaaactcctacccgacaaaggtgcgtgtccgcgtgctgagtaatgggataggagatgccaataacaggctcgcccatgagtagagcatggactgcggtgcatgtgactttggtcaccaggggcatagcattgctcacccctgaatcaagtcatcgagatttctctgacctctgaagtgcactgtggttgcgtggctgggaatccacgcttgaccatgtactgcttgatagagtcgcggctggccgactcatgggttaaagtcagttgacaagacac

SEQ ID NO: 1448 - DNA, 509 bp, Porcine kobuvirus
  isolate Chgz3 polyprotein gene, complete cds.1
cgttactccactccactccttcgggactggtttggaggaacataacagggcttcccatccctgtttaccctttattccacttaccctttctcctaatcaaccctatccacaccccactgactgactcctttggattttgacctcagaatgcctacttgacctcccacttgcctctcccttctcggattgccggtggtgcctggcggaaaaagcacaagtgtgttgcaggctaccaaactcctacccgacaaaggtgcgtgtccgcgtgctgagtaatgggataggagatgcctacaacaggctcgcccatgagtagagcatggactgcggtgcatgtgacttcggtcaccacgggcatagcattgctcacccgtgaatcaagtcatcgagatttctctgacctctgaagtgcactgtggttgcgtggctgggaatccacgcttgaccatgtactgcttgatagagtcgcggctggccgactcatgggttaaagtcagttgataagacac

SEQ ID NO: 1449 - DNA, 641 bp, Grey squirrel kobuvirus; identical to SEQ ID NO: 770
  isolate UK 2010 polyprotein gene, complete1

SEQ ID NO: 1450 - DNA, 510 bp, Porcine kobuvirus
  isolate Chgz5 polyprotein gene, complete cds.1
cgttactccactccactccctcgggactggtttggaggaacataacagggcttcccacccctgtttacccttaactccactcaccctttccctacaaccaaccctatccacaccccactgactgattccttcggattttgacctcagaatgcctacctgacctcccacttgcctttcccttcccggattgccggtggtgcctggcggaaaaagcacaagtgtgttgttggctaccaaactcctacccgacaaaggtgcgtgtccgcgtgctgagtaatgggataggagatgccaataacaggctcgcccatgagtagagcatggactgcggtgcatgtgacttcggtcaccaggggcatagcattgctcacccctgaatcaagtcatcgagatttctctgacctctgaagtgcactgtggttgcgcggctgggaatccacgcttgaccatgtactgcttgatagagtcgcggctggccgactcatgggttaaagtcagttgacaagacac

SEQ ID NO: 1451 - DNA, 509 bp, Porcine kobuvirus
  isolate Chgz4 polyprotein gene, complete cds.1
cgttactccactccactccctcgggactggtttggaggaacataacagggcttcccatccctgtttaccctaaattccacttaccctttccctagaccaaccctatccacaccccactgactgattcctttggattttgacctcagaatgcctacctgacctcccatctgcttttccctttccggattgccggtggtgcctggcggaaaaagcacaagtgtgttgttggctaccaaactcctacccgacaaaggtgcgtgtccgcgtgctgagtaatgggataggagatgccaataacaggctcgcccatgagtagagcatggactgcggtgcatgtgacttcggtcaccaggggcatagcattgctcacccctgaatcaagtcatcgagatttctctgacctctgaagtgcactgtggttgcgtggctgggaatccacgcttgaccatgtactgcttgatagagtcgcggctggccgactcatgggttaaagtcagttgacaagacac

SEQ ID NO: 1452 - DNA, 1000 bp, Cardiovirus B; identical to SEQ ID NO: 138
  strain rat08/rCaB/HUN, complete genome.1

SEQ ID NO: 1453 - DNA, 977 bp, Unknown
  Description of Unknown: Theiler's-like virus of rats NGS910 genomic RNA, complete genome.1 sequence
caccccctttggacgcggggcctgcgatagtgccaccccccgtcctccctattccaactacccgaccctaacccagggtccaggaaactggatcaatacaagtcatcccctgaatgctggctaatcagaggaaagtcagcattttccggcccaggctaagagaaacacaataagttagaatctaaattaatccccttgacgaattcgcaacgataagtcctccctcccttgccgctcgttcacacccagaactaacaattcggccccttgtgacgagccccttggtgaaaggacctctttcaatgcgacgtggttggagattaaaccgactccgacgaaagtgctatcatgcctccccgattatgtgatgttttctgccctgctgggcggagcattctcgggttgatacaccttgaatccttcatccttggacctcaggtcccccggtctaagccgcttggaatacgacagggttattttccaatcttctcctttctactttcatgagtcctattcatgaaaagggtctgtgctgccccttccttcttggagaatctgcgcggcggtctttccgtctctcgaaaagcgcagatgcagcatgctggaaccggtgaagaaaacagttctttgtggaaacttagagcagacatcgaaacagctgtagtgacctcacagtagcagcggaaccccctcctggtaacaggagcctctgcggccaaaagccccgtggataagatccactgctgtgagcggtgcaaccccagcaccctggttcgatggttgttctctgtggaaccagagaatggtctttctcaagccctccagtagagaagccaagaatgtcctgaaggtaccccgcatgcgggatctgatcaggagaccaatcgtcagtgctttacactggcgctttggtttaaaaactgtcacagcttctccaaaccaagtggtcttggttttcacttttatcaaactgtttc

SEQ ID NO: 1454 - DNA, 1000 bp, Bovine viral diarrhea virus
  nonstructural proteins (p125/p80, p20)1
ggagggaaggcgattcgtcgccagcttatttatctccgctctggcaacctacacatacaagacttggaattaccacaacctctccaaggtagtagaaccagccttggcatacctcccctacgctaccagtgcactaaaaatgttcaccccaactaggctggagagcgtagtcatacttagcaccacaatatacaaaacttacctctcaataaggaaaggaaaaagtgatggacttctgggtacagggattagtgcagcaatggagattctgtcacagaacccggtgtcagtaggtatatctgtcatgctgggggtgggggcaattgccgctcacaatgcaatcgagtctagtgagcaaaaaaggaccctattgatgaaagtgtttgtaaaaaacttcctggaccaggcggcaacagatgagttggtgaaggaaaatccagagaaaataataatggccttatttgaagcagtacagacaattggcaacccattgaggcttatatatcatctgtatggggtttactacaaaggctgggaagcgaaagaactatccgagaggacagctggcaggaacctgttcactttgataatgttcgaagctttcgaactattagggatggactctgaagggaagataaggaacctatctgggaattacatcttggatttgatctacagtttacataaacagataaacagaggcttgaagaagatagtcttggggtgggctcctgcacccttcagttgtgactggactcctagtgatgggagaatcaggttacccacagacaactatctgagagtagagactaagtgcccatgtggttatgagatgaaagcactaaggaatttcagtggcagtctcacaaaagtggaagagaaagggcctttcctctgtaggaacgggcctggtagggggccagttaactatagagtcacaaagtactatgatgacaacctcacagagataaaaccagttgcaaaactagaaggactgcac

SEQ ID NO: 1455 - DNA, 1000 bp, Boone cardiovirus 1
  isolate BCV-1 polyprotein gene, complete cds.1
ggtttggatcttggatctctctccttccttcccccgtcttcaatttagcttcgtgattgaagcatctcactgtctctagtatttatgtcggactgacgattgagtacgttcagattgtgtttgggaggcccaagggatcgatggacaacacttcgaaagagtcacttgtccaccgctcctttcccctaccctagcaactctggatttgctcacgtggagttcgaggtctgtactttaactctgacttgcttttcttaccttgctatcttgctgacgtggattggttgtagactgattcacgttctcgttagatgctgacgtggagtacgatcgctgtacattccactactgccaattagctcccccttcccgttgctcccctctataaggagagccttctcttgcaaaggtgaagccttcacccccggtcgaagccgcttggaataagacagggttattttctcctctcctcggcgcttgcctcttctaagctgaataggttctatctattcaggcggatggtctggtccgttccttcttggacagagtgtgtatctgggttttccggatctcgaccacacactcaccagagctcaggagtgattaagtcaaggcccgatctgcggcgaaaaggaaatgaagtattttgcagctgtagcgacctctcaaggccagcggatttccccacctggtgacaggtgcctctggggccaaaagccacgtgttaatagcacccttgagagcggtggtaccccaccaccctgcaaattatggatttgacttagtaactaaaagattgacttggcatacctcaacctgagcggcggctaaggatgccctgaaggtacccgtgttgaaatcgcttcggcgaccatggatctgatcaggggccctgcctggagtggttctatcccacacagcgtagggttaaaaaacgtctaaccgccccacaaagaccccggcagggatgccggtttcctttttaccaattcttgacact

SEQ ID NO: 1456 - DNA, 1000 bp, Miniopterus schreibersii picornavirus 1
  complete genome.1
atcacctgcttagggcgaattgtcgagacgtcattgatgttccggcccaggataacaacgaagtgttccaaggtgatttactccgcccttttaacaacgcacttgggcgaactgcactggtgtactggtaattcctgtcttggattgtgtagtggatataaactgtacccacggttgaaacccactactcacctcacagattgtgtttacctttatatctttgtacgcggtaagtgcggcgttgagagcgccttgtaagttcctaagcattagttggtcctccccgattatgtcatcaatggggttgtcggcacgcggttaagcggttgtcgacccgttgcttggtttaagcatgaggtggattcccccgattatgtctacccgttactatggcgggcggtcgtttcagggtgtttctactgaggactgcaccaagtctttatcttttattctcagatctccggctgtttgacgcttgtaggacagcaggactattttctcttaatctttttctacccactagggtcctatcctagtggagggagggtgccaccccttctctctttagagagtgcgcctggcggtctttccgtctctggaaaaaggagcacatggcatgctacaattggcacaagaaaacaagctttgcggattctttctttgtactagaggaagctgtagcgaccctgtatggcgagcggactcccctctcggcgacgagagcctctcgggccaaaagccaagtgttaatagcacccatacaggcggcagtaccccactgccctttctcaacatacaatgactgatgaaccactgttggtttttctgacacctttgtagtaggattccaaggaatgtcctgaaggtaccctgttagcttacgcgcaggatctgatcaggagtctctttacagtgctgtacactgtgcaagggattaaaaattgtttgaggaatccccgagatagtggtctatctcttcctattttgttttacagacacg

SEQ ID NO: 1457 - DNA, 1000 bp, Rodent cardiovirus
  isolate AMzj-2018, complete genome.1
cagtacccgcgtccaaagggggttgcctggggtggtctcaaccgcgaacacactagcgtgtatccgcggtgaagaccccagggccccctttggacgcgggtactgcgacagtgccaaaccccgtccttccctactccacctaccccggccctaacccagggtccaggaaactggatcaatacaaatcatcccctgaatgctggctaatcagaggaaagtcagcattttccggcccaggctaagagaaatacataagttagactcaatcttgatccccttgacgaattcgcaacgaaaagttctccctcccttgccgcttgttcacacccagaactaataattcggcccctcgtgacaagcccctcggtgaaagaacctctttcaatgcgacgtggttggagattaaatccgactccgacgaaagtactatcatgcctccccgattatgtgatgttttctgccctgctgggcggagcattctcgggttgatatactttgaatccttcctccttggacctccggtcccccggtctaagccgcttggaatacgacagggttattttccaaatctttctccttctactttcatgagctctattcatgaaaagggcatgtgctgccccttccttcttggagaatccgcgcggcggtctttccgtctctcaaaaagcgtggatgcagcatgctggaaccggtgaagaatgtagttctttgtggaaacctagagcagacatcgaaccggctgtagcgacctcacagtaccactgctgtgagcggtgcgaccccagcaccctggttcgatggttgttctctgtggaaccagagaatggccttctcaagccatccagtagagaagccaagaatgtcctgaaggtaccccggcccacgggatctgatcaggagactgatttgtggtgctttacaccacaacttcagtttaaaaattgtcacagcttctccaaaccaagtggtcttggttttccctctattacaatgtgac

SEQ ID NO: 1458 - DNA, 1000 bp, Foot-and-mouth disease virus
  - type O,strain Akesu/58, complete1
cgacagctcctgcgttgcactccacacttacgtttgtatgcgcgcgggaaccgctggactttcgttcacccacctacagctggactcacggcaccgcgtggccattttagctggactgtgcggacgaacgccacttgcgcaccccgcgtgactggttaatactcttaccactttccgcctacttggtcgttagcgctgccctgggcactcccgttgggggccgtccggtgctccacggttcccacgcatgacaaactacggtgatggggccgcttcgtgcgagttgatcgcctggtgtgtttcggctgtcacccgaagcccgcctttcacaagttttaccgtcgttcccgacgttaaagggaggtaaccacatgcttattaccgcctttcccggcgttaaagggctgtaaccacacgaattgccttcacccggaagtaaaacggaaatccacacacacggttttgcccgttttcagagagaaacgggacgtgagcgcacgaaacgcgccgtcgcttgtggaagacttgtacaaacacgatctacgcaggtttcctcaactgacacaactcgtgcaaactgtaaccccgcctggtctttccaggtctggaggggaagcttttgtactgtgtttggctccacgttcggtctactggcgagcgctagtagtggcaatgttgtttcgtagcggagcatgttggccgtgggaatccctccttggcgacaaggacccacggggccgcaagccacgtctttgacccaacatgtgtgcaaccccagcacggcaaccttgccacgaaaaccacttcaaggtaacactgatactggtactcaaatactggtgacaggctaaggatgcccttcaggtaccccgaggtaacacgggacacttgggatctgagaaggggattgggacttctataaaagtgcccaatttaaaaagcttctatgcctgaataggtgaccggaggccggcacctttcctctacaactactttacca

SEQ ID NO: 1459 - DNA, 1000 bp, Rodent Cardiovirus
  isolate 1, complete genome.1
ccgcgggagagatccccggggccccctttcaacgcgggtactgcgatagtgccaccccagccttatccttctcccgacttcccgaccctaacccaggttcctcggaaaggaacaccaaaactcaatcccctggatgctgactaatcagaggaaagttggcattttccggcccaggcttagagaagtagataagttagactcaaattgattcaattccccttggcgaatccgcgtcgaggcgccacctctcacttgccgtcctccacacccatccttaattcggcctctgtgttggaccccttgttgaagtggcttccctctgcgcggcgcggttggagaattttgtcatccgactccgacgaaactaccatcatgcctccccgattgtgtgatgccctccgccctgctgggtggagcatcctcgggttgagaaacctcttccttcaaccttggaccccggtcccccggtctaagccgcttggaataagacagggttattttcactctcttcttcttctactccacggatttctattccctggaagggtatgtgttgcccctcgcttcttgcggaacgcgcacggtggtctttccacctctcgaaaagtgtgcgtgcaacatgcagagatacgtgaagaaagcagtttgtgaactagtcctagagcgaacacgaatccggctgtagcgaccacttaagagcagcggaacccccctcccggcgacgggagcctctgcggccaaaagccacgtggataagatccactcttgagtgcggtgcggccccggcaccccggtttcgtggttgttctttgacgaacccacaaatggcgatcttaagcgcctctgtagagaagccaagaatgtccagaaggtacccctatcaagggatctgatctggagacgtgtcacttatgctttacacgagtgctcgcgtttaaaaactgtcacagcttctccaaaccaagtggtcttggttttctccttctaattctctgtcaat

SEQ ID NO: 1460 - DNA, 1000 bp, Unknown
  Description of Unknown: Theiler's encephalomyelitis virusstrain DA, complete genome.1 sequence
tcccccggtcaccccctttcgacgcgggtactgcgatagtgccacccagtctctcctactcccgactcccgaccctaacccaggttcctcggtataggaacaccactttactcatcccctggatgctgactaatcagaggaacgtcagcattttccggcccaggctaagagaagtagataagttacaatccaaattgatttatcatccccttgacgaattcgcgttggaaaagcacctctcacttgccgctcttcacacccatcattttaattcggcctctgtgttgagccccttgttgaagtgtttctctccatcgcgacgtggttggagatctaagtcaaccgactccgacgaaactaccatcatgtctccccgattatgtgatgctttctgccctgctgggtggagcatcctcgggttgagaaatccttcttcctttcaccttggaccccggtcccccggtctaagccgcttggaataagacagggttattttcacctctttttcttctactccacagtgctctatactgtggaagggtatgtgttgccccttccttcttggagaacgtgcgcggcggtctttccgtctctcgacaagcgcgcgtgcaacatgcagagtaacgcgaagaaagcagttcttggactagctttagtatctgcaagaagacagctgtagcgaccacacaaaggcagcggaacccccctcctggtaacaggagcctctgcggccaaaagccacgtggataagatccacctttgtgtgcggtgcaaccccagcaccctggtttcttgaagatactctagtgaacccttgaatggcaatctcaagcgcctctgtaggaaagccaagaatgtccaggaggtacccctacctcgcggaagggatctgacctggagacacgtcgcaagtgctttacacctgtgctcgtgtttaaaaattgtcacagctttcccaaaccaagtggtcttggttttcctttttattactattgacact

SEQ ID NO: 1461 - DNA, 1000 bp, Unknown
  Description of Unknown: Theiler murine encephalomyelitis, complete genome.1
ccggttaccccctttcgacgcgggtactgcgatagtgccaccccagtccttcctactcccgactcccgaccccaacccaggttccttggaacaggaacaccaatttattcatcccttggatgctgactaatcagaggaacgtcagcattttccggcccaggctaagagaagtagataagttagaatctaaattatttatcatccccttgacgaattcgcgttggaaaagcacctctcacttgccgctcttcacacccatcattctaattcggcccctgtgttgagccccttgttgaagtgtttccctccatcgcgacgtggttggagatctaagttaaccgactccgacgaaactaccatcatgcctccccgattatgtgatgctttctgccctgctgggtggagcatcctcgggttgagaaatctttcttccttttaccttggactccggtcccccggtctaagccgcttggaataagacagggttatcttcactcctcttcttttctacttcacagtgttctatgctgtgaaagggtatgtgtcgccccttccttcttcggagaacacgcgtggcggttttttccgtctctcgacaagcgcgtgtgcgacatgcagagtctcgcgaagaaagcagttctcggtctagctttagtgcccacaagaaaacagctgtagcgaccacacaaaggcagcggaacccccctcctggtaacaggagcctctgcggccaaaagccacgtggataagatccacctttgtgtgcggtgcaaccccagcaccctgttttcttggtgacactctagtgaacccctgaatggcgatcttaagcgcctctgtagggaagccaggaatgtccaggaggtaccccttccgctcggaagggatctgacctggagacacatcacatgtgctttacacctgtgcttgtgtttaaaaaattgtcgcagcttccccaaaccaagtggtcttggttttctctttttattatattgtcaat

SEQ ID NO: 1462 - DNA, 1000 bp, Unknown
  Description of Unknown: Theiler's encephalomyelitis virus, complete genome.1 sequence
atcccccggttaccccctttcgacgcgggtactgcgatagtgccaccccagtctttcctactcccgactcccgaccctaacccaggttcctcggaacaggaacaccaatttactcatcccctggatgctgactaatcagaggaacgtcagcattttccggcccaggctaagagaagtagataagttagaatccaaattgatttatcatccccttgacgaattcgcgttggaaaaacacctctcacttgccgctcttcacacccattaatttaattcggcctctgtgttgagccccttgttgaagtgtttccctccatcgcgacgtggttggagatctaagtcaaccgactccgacgaaactaccatcatgcctccccgattatgtgatgttttctgccctgctgggtggagcaccctcgggttgagaaaaccttcttcctttttccttggactccggtcccccggtctaagccgctcggaatatgacagggttattttcacctcttcttttctactccacagtgttctatactgtggaagggtatgtgttgccccttccttcttggagaacgtgcgcggcggtcttccgtctctcgacaagcgcgcgtgcaacatacagagtaacgcgaagaaagcagttctcggtctagctctagtgcccacaagaaaacagctgtagcgaccacacaaaggcagcggaacccctctcctggtaacaggagcctctgcggccaaaagccacgtggataagatccacctttgtgtgcggtgcaaccccagcaccctggtttcttggtgacactctagtgaacccctgaatggcaatctcaagcgcctctgtagggaagccaagaatgtccaggaggtaccccttcctctcggaagggatctgacctggagacacatcacacgtgctttacacctgtgcttgtgtttaaaaattgttacagcttccccgaaccaagtggtcttggttttcactttttatcacactgtcaat

SEQ ID NO: 1463 - DNA, 1000 bp, Aimelvirus 6
  strain gpai006, complete genome.1
cactacgttacggttcccgcccgggacaactggtaccccattaggctacaacatggctgaaaagggtattgggtccccccggattgtgtccgttcgtagtgtgtgtaacgtggtttaccatctccactaacattggactaagcatttcatctttcctccccgattgtgtactcacttggctaacgctgggtggtcgcggttgggtccttgatttactttttctcgtctaagcattccgactgtcctccccgattatgtgctcattcagttaactgctgggtggtcatgactaacatcgaggaaccttctgtccacgcttactttgagctccggtcgcttgacgcttgtagggcgatagggttatcttcctgacaacatctttattctacctccataggctctatctatggagacggagtgtggcacccgtcccttctttgggagcttcggtagtgacgccctttgtcactctcgccagccgaggcatgcctggtgccaggtagcaaagaaagcatatgtttaaggacttgactgatttagcgcaagagtttgtagcgatgtccatagtgtctgcggattccccacacggcgacgtgtgccgcggaggccaaaagccacggtgttcacagcacccctatggatgcccacagaccccagtgggcactcttgttgccggactttcaggaaattaggcataggctcttctcaaactcctggcattggactaggtaagaatgccccggaggtaccccagtactccttcgggagtctgggatctgaccgggggccccacaaacatgctttacgtgtttcgtgcggtcaaaaattgtctaactagtcccaaccttgaacaagggattgttctttcctttttattactgagactggcctatggtgacaacagagattgactgtgaatacagttattttctggtgtttatcatttggtttttctccgtgctcttttacctttgtggtatttgttctttagataggcaaa

SEQ ID NO: 1464 - DNA, 1000 bp, Unknown
  Description of Unknown: Theiler's encephalomyelitis virus isolate Vie415HTR, complete1 sequence
catcccccggtcaccccctttcgacgcgggtactgcgatagtgccaccccagtctttcctactcccgattcccgacccctacccaggttcctcggaacaggaacaccaaattactcatcccctggatgctgactaatcagaggaacgtcagcgttttccggcccaggttaagagaagtagataagttagattctaaattgacctaccatccccttgacgaattcacactggagacgcacctctcacttgccgctcttcacacccatcaatctaattcggcccctgtgttgagccccttgttgaagtgccttcccccattgtgacgtggttggagatctaagtcaaccgactccgacgaaactaccatcatgcctccccgattatgtgatgctttctgccctgctgggtggagcatcctcgggttgagaaaatcttcttcctttttccttggaccccggtcccccggtctaagccgcttggaataagacagggttagcttcatctcctccttcttccacttcaagtgcctatactatgaaagggtatgtgttgccccttccttcttggagaacacacgcggcggcctttccgtctctcgacaagcgcgtgtgcgacatgcagagaaacgtgaagaaagcagtttgcggactagctccagtgcccacaagaaaacagctgtagcgaccacacaaaggctgcggaaccccctcctggtaacaggagcctctgcggccaaaagccacgtggataagatccacctttgtgtgcggtacaaccccagtaccctggtttcttggtgcactctagcgaaaacgcaaatggcaatctgaagcgcctctgtaggaaagcaaagaatgtccaggaggtaccccttccttttggggagggatctgacctggagacacatcacacgtgctttacacttgtgcttgtgtttaaaaactgtccagctttcccaaaccaagtggtcttggttttcattttttaaacaaatttcact

SEQ ID NO: 1465 - DNA, 1000 bp, Rat theilovirus 1
  strain RTV-1, complete genome.1
cgcggtgaagatcaccccgggaaaccccctttggacgcgggacctgcgacagtgccatcccccgtctctcctattccaactacccgaccctaacccagggtccaggacactggatcaatacaagtcatcccctgaatgctggctaatcagaggaaagtcagcattttccggcccaggctaagagaaacacaataagttagaatctaaattaatcaccttgacgaattcgcaaagataagtcctccctcccttgccgctcgatcacacccagaactaacaattcggcctctcgtgacgagccccttggtgaaaggacctctttcaacgcgacgtggttggagattaaaaccgactccgacgaaagtgctatcatgcctccccgattatgtgatgttttctgccctgctgggcggagcattctcgggttgatataccttgaatccttcatccttggacctcccggtcccccggtctaagccacttggaatatgacagggttattttccaaaattcttatttccactttcatgagttcttttcatgaaaagggtatgtgctgccccttccttcttggagaatccgcgtggcggtctttccgtctctcgaaaaacgtggatgcagcatgctggaaacggtgaagaaagtagttctctgtggaaacttagaacagacatcgaaacagctgtagcgacctcacagtagcagcggaaccccctcctggcgacaggagcctctgcggccaaaagccccgtggataagatccactgctgtgagcggtgcaaccccagcaccctggttcgatggttgttctctgtggaatcagagaatggctttcctaagccctccagtagagaagccaagaatgtcctgaaggtaccccgcgtgcgggatctgatcaggagaccaattgccagtgctatacactggtactttggtttaaaaattgtcacagcttctccaaaccaagtggtcttggttttctatctttaataattggttc

SEQ ID NO: 1466 - DNA, 1000 bp, Saffold virus
  gene for polyprotein, complete genome,strain:1
gcgtcttcgcggtgaagaacaccccaggggtaccccctttgaacgcgggacctgcgaaagtgccaacccaagtcttttcctgttcttaccctactccctccttgggtccattggaaggaccaactatattatcccttggatgctggctaatcagaggaaagtcagcattttccggcccaggctaagagaaacatataagttagatatgattttaatcccttgacgaattcaaaacttgatgttctccctcccttgccgcttgatcacacccacctcttaaattcggccttttgtgacaagccccttggtgaaaggacctctcttgtttcgacgtggttggaattaacatcaattccgacgaaagtgctatcatgcctccccgattatgtgatgttttctgccctgctgggcggagcaccctcgggttgagataccttgactcttttcttttggaaccttggttcccccggtctaagccgcttggaatacgacagggttattttctatactcttatttctacttttacgggttctatccgtaaaaagggtatgtgttgccccttccatcttcggagaatccacacggcggtctttccgtctctcaaaaagtgtggatgcaacatgccggaaacggtgaagaaagcagttttctgtggaaatttagaatggacatcgaaacagctgtagcgacctcacagtagcagcggactcccctcttggtaacaagagcctctgcggccaaaagccccgtggataagatccactgctgtgagcggtgcaaccccagcaccctggttcgatggctactctctatggaaccagagaatggttttctcaagccctccggtagagaagccaagaatgtcctgaaggtaccccgcgtgcgggatctgatcaggagaccgaatggtaatgctttacattatcactttggtttaaaaattgtcacagcttctccaaaccaagtggtcttggttttcctttttatccacatggcaag

SEQ ID NO: 1467 - DNA, 1000 bp, Saffold virus
  gene for polyprotein, partial cds,isolate: Pak-2457.1
tagcatcttcgcggcaaagaacaccccaggggtaccccctttgaacgcgggtcctgcgaaagtgccaacccatgtctttcccactctttccccgactcccacctcgggtctaatgaaaagaccaaatatttcatcccttgaatgctggctaatcagaggaaagtcagcattttccggcccaggctaagagaaacatataagttagatttgatttaatcccttgacgaattcgaaacgagacgttttccctcccttgccgcttgttcacacccacttatttaattcggccttttgtgacaagcccctcggtgaaagaacctctctcttttcgacgtggttggaattaccatcatctccgacgaaagtgctatcatgcctccccgattatgtgatgttttctgccctgctgggcggagcattctcgggttgagaaaccttgaatcttttcctttggaaccttggttcccccggtctaagccgcttggaatatgacagggttattttcttaatcttatttctacttttacgggctctatccgtaaaaagggtacgtgctgccccttccttctctggagaatctacacggcggtctttccgtctcttaacaagtgtggatgcagcatgccggaaacggtgaagaaaacagttttctgtggaagtttagagtgcacatcgaaacagctgtagcgacctcacagtagcagcggactcccctcttggcgacaagagcctctgcggccaaaagccccgtggataagatccactgctgtgagcggtgcaaccccagcaccctgattcgatggtcattctctacggaaccagaaaatggttttctcaagccctccggtagagaagccaagaatgtcctgaaggtaccccgcgtgcgggatctgatcaggagaccaattgacggtgctttacactgtcactttggtttaaaaattgtcacagcttctccaaaccaagtggtcttggttttccaattttgttgagtggcaat

SEQ ID NO: 1468 - DNA, 1000 bp, Aimelvirus 2
  strain gpai002, complete genome.1
taggatgacatgttccaagtcagatgccaacgacttggtaaggacgaatttgcccgcactacactacggttcccgcccgggacaactggtaccccattatgccacaacatggctgaaaagggtactgggtccccccggattgtgtccgtttgtagtgtgtgtaacgtggtttaccatctccactaacattggactaagcatttcatctttcctccccgattgtgtactcacttggctaacgctgggtggtcgcggttgggtccttgatttactttttctcgtctaagcatgccgactgtcctccccgattatgtgctcattcagttaactgctgggtggtcatgactaatatcgaggaaccttctgtctacgcttactttgagctccggtcgcttgacgcttgtagggcgatagggttatcttcccaacaacatctttattctacctccataggctctatctatggagacggagtgtggcacccgtcccttctttgggagcttcggtagtgacgccctttgtcactctcgccagccgaggcatgcctggtgccaggtagcaaagaaagcatatacttaaggacttgactgatttagcgcaagagtttgtagcgatgtccatagtgtctgcggattccccacacggcgacgtgtgccgcggaggccaaaagccacggtgttcacagcacccctatggatgcccacagaccccagtgggcactcttgttgccggactttcaggaaattaggtataggctcttctcaaactcctggcattggactaggtaagaatgccccggaggtaccccagtactccttcgggagtctgggatctgaccgggggccccacaaacatgctttacgtgtttcgtgcggtcaaaaattgtctaactagtcccaaccttgaacaagggattgttctttcctttttattactgagactggcctatggtgacaacagagattgactgtgaatacagttattttctggtgttcatcat

SEQ ID NO: 1469 - DNA, 1000 bp, Cardiovirus B
  strain Longquan-Aa3-1 polyprotein gene, complete cds.1
cccccggttaccccttctgaacgcgggtcctgcgatagtgccaaccccagcttatccctaatcccgactccccgaccctaacccagggtcctcggaagaggatcaccaacttcatccccagaatgttgactaatcagaggaaagttagcattttccggcccagacttagagaagtagataagttagagccaaattgatacaagcatccccttgacgaattcgccatgaaacgtcgtccctcacttgccgcttgatcacacccagaactaacaattcggcccctcgtgacaagccccttgttgacacgacctctttctacgcgacgtggttggagattttgaaatcctttgactccgacgaaactaccatcatgtctccccgattatgtgatgctatccgccctgctgggtggagcattctcgggttgagttaacctattcctttactccttggactccggtcccccggtctaagccgcttggaataagacagggttatcttcctaactctctctcttctactcttaagtgtcctctacttaagaagggtatgtgctgccccttccttcttggagaactcgcgtggcggtctttccgtctctcgaagagcgtgagtgcagcatgcaaagacctgcgaagaaagcagtttcctgactaaccttagtttggacaagattccggctgtagcgacctcatagaagcagtggacacccctctcggtaacgagagcccctgcggccaaaagccacgtggatgagatccacttctatgagcggtgcaaccccagcaccccggtatcttggtcatactctggtgaacctggagatggcgatcttaagcaactttgtagagaagccaagaatgtccagaaggtaccccggctcacgggatctgatctggagaccagtacactgtgctttacacattgtctctggtttaaaaactgtcacagcttctccaaaccaagtggtcttggttttcccactttactacttggcaag

SEQ ID NO: 1470 - DNA, 1000 bp, Saffold virus
  gene for polyprotein, partial cds,isolate: Pak-2491.1
tgtcttcgcggtgtagaacaccccaggggtaccccctttgaacgcgggtcctgcgaaagtgccaacccacgtctcttccttcctttaatccgattcccacctcgggtccataaaaaggaccaaatatgtcatcccttgaatgctggctaatcagaggaaagtcagcattttccggcccaggctaagagaaacatataagttagatttgatcacaatcccttgacgaattcagaacgagaagttctccctcccttgccgcttgttcactcccttccattcaattcggcctctcgtgacaagccccttggtgaaagaacctctctctttctgacgtggttggaattaacatcatttccgacgaaagtgctatcatgcctccccgattatgtgatgttttctgccctgctgggcggagcattctcgggttgagaaaccttgaatcttttcttttggaaccttggttcccccggtctaagccgcttggaatatgacagggttattttcttcactcttacttctacttttatgggctctatccataaaaagggtatgtgctgccccttccttcttcggagaattcacacggcggtctttccgtctctcgacaagtgtggatgcagcatgccggaaacggtgaagaaaacagttttctgcggaagtttagaatacgcatcgaaacagctgtagcgacctcacagtagcagcggactcccctcttggcgacaagagcctctgcggccaaaagccccgtggataagatccactgctgtgagcggtgcaaccccagcaccctgattcgatgattattctctacggaaccagaaaatggttttctcaagccttccggtagagaagccaagaatgtcctgaaggtaccccgcgtgcgggatctgatcaggagaccaactggcagtgctttacactgttaccttggtttaaaaactgtcacagcttctccaaaccaagtggtcttggttttcccattttaattgatggcaat

SEQ ID NO: 1471 - DNA, 1000 bp, Saffold virus
  strain Can112051-06 adapted, complete genome.1
gttcgcggtgaagaacaccccaggggtaccccctttggacgcgggacctgcgacagtgccaacccacgtctcttcccactattattattccggttcccgccttaggtccattgaaaagaccaaatatgtcatcccttggatgctggctaatcagaggaaagtcagcattttccggcccaggctaagagaaacatataagttagaaatgattctaatcccttgacgaattcggaacgagaagttctccctcccttgctgcttgttcacacccatcatttaattcggccctttgtgacaagccccttggtgaaaggacctctctctttccgacgtggttggaattaacatcttttccgacgaaagtgctatcatgcctccccgattgtgtgatgttttctgccctgctgggcggagcgtcctcgggttgagaaacctttaatcttttcctttggagccttggctcccccggtctaagccgcttggaatatgacagggttattttccaaactctttatttctactttcatgggttctatccatgaaaagggtatgtgttgccccttccttctttggagaatctgcgcggcggtctttccgtctctcaacaagcgtggatgcaacatgccggaaacggtgaagaaaacagttttctgtggaaatttagagtggacatcgaaacagctgtagcgacctcacagtagcagcggattcctctcttggcgacaagagcctctgcggccaaaagccccgtggataagatccactgctgtgagcggtgcaaccccagcaccctggttcgatggccattctctatggaaccagagaatggttttctcaagccctccggtagagaagccaagaatgtcctgaaggtaccccgcgcgcgggatctgatcaggagaccaattggcagtgctttacgctgccactttggtttaaaaactgtcacagcttctccaaaccaagtggtcttggttttctaattttgttgactggcaat

SEQ ID NO: 1472 - DNA, 1000 bp, Saffold virus
  strain BCH1031, complete genome.1
ttttcgcggcaaagaacacctcaggggtaccccctttgaacgcgggacctgcgatagtgccaacccacgtcttttcccactcctaacccggttcccaccttatgtccattgaaaggaccagatatatcatcccttgaatgctggctaatcagaggaaagtcagcattttccggcccaggctaagagaaacatataagttagaaatgattctaatcccttgacgaaaccagaacgagacgttctccctcccttgccgcttgttcacacccatttgattgattcggccttttgtgacaagccccttggtgaaaggacctctctctttctggcgtggttggaattaacatcctttccgacgaaagtgctatcatgcctccccgattatgtgatgctttctgccctgctgggcggagcattctcgggttgagaaatctcaaaccttttctttttggaactttggttcccccggtctaagccgcttggaatacgacagggttattttctatactcttatttctacttttacgggctctatccgtaaaaagggtaagtgttgccccttccatcttcggagaatccacacgacggtctttccgtctctcgaaaagtgtggatgcaacatgccggaaacggtgaagaaagcagttttctgtggaaatttagaatggacatcgaaacagctgtagcgacctcacagtagcagcggactcccctcttggcaacaagagcctctgcggccaaaagccccgtggataagatccactgctgtgagcggtgcaaccccagcaccctggttcgatggctattctctatggaaccagagaatggttttctcaagccctccggtagagaagccaagaatgtcctgaaggtaccccgcgtgcgggatctgatcaggagaccgaatggtaatgctttacattatcactttggtttaaaaattgtcacagcttctccaaaccaagtggtcttggttttccttttttatccacatggcaag

SEQ ID NO: 1473 - DNA, 1000 bp, Saffold virus
  gene for viral polyprotein,strain Nijmegen2008.1
gcatcttcgcggtgtagaacaccccaggggtaccccctttgaacgcgggacctgcgatagtgccaacccacgtcttttcccacttttgccccgattcccacctcgggtccaatgaaaggaccacatgtttcatcccttgagtgctggctaatcagaggaaagtcagcattttccggcccaggctaagagaaacatataagttagatttgattcaaatcccttgacgaattcggaacgagacgttctccctcccttgccacttgttcacacccacacttttgattcggccttttgtgacaagtcccttggtgaaagaacctctctctttccgacgtggttggaattaacatcatttccgacgaaagtgctatcatgcctccccgattgtgtgatgttttctgccctgctgggcggagcattctcgggttgagaaaccttgaatcttttcctttggaaccctggttcccccggtctaagccgcttggaatacgacagggttattttccttattcttacttctacttttatgggttctatccataaaaagggtatgtgctgccccttccttctttggagaattcgcacggcggtctttccgtctctcgacaagtgtgaatgcagcatgccggaaacggtgaagaaaacagttttctgtggaagtttagagtgcacatcgaaacagctgtagcgacctcacagtagcagcggaaccccctcttggcgacaagaacctctgcggccaaaagccccgtggataagatccactgctgtgagcggtgcaaccccagcaccctgattcgatggtcattctctacggaaccagaaaatggttttctcaagccctccggtagagaagccaagaatgtcctgaaggtaccccgtgcgcgggatctgatcagagaccaattgacagtgctgtacgctgtcactttggtttaaaaactgtcacagcttctccaaccaagtggtcttggttttccaatttttattgaatggcagt

SEQ ID NO: 1474 - DNA, 1000 bp, Sikhote-Alin virus
  strain P-113 polyprotein gene, complete cds.1
cccggccaccccctttcgacgcgggtactgcgatagtgccaccccagtctttcctactcccgactcccgactctaacccaggttccttggaacaggaacaccaatatactcatcccctggatgctgactaatcagaggaacgtcagcattttccggcccaggctaagagaagtagataagttagattccaaattgatttatcatccccttgacgaattcgcgttggaaatgcacctctcacttgccgctcttcacacccattaacttgattcggcctctgtgttgagccccttgttgaagtgcttccctccatcgtgacgtggttggagatctaagtcaaccgactccgacgaaactaccatcatgcctccccgattatgtgatgctttctgccctgctgggtggagcatcctcgggttgagaaaaccttcttcctttttccttggaccccggtcccccggtctaagccgcttggaataagacagggttatcttcacctcttccttcttctacttcatagtgttctatactatgaaagggtatgtgtcgccccttccttctttggagaacacgcgcggcggtctttccgtctctcgaaaagcgcgtgtgcgacatgcagagaaccgtgaagaaagcagtttgcggactagctttagtgcccacaagaaaacagctgtagcgaccacacaaaggcagcggaccccccctcctggcaacaggagcctctgcggccaaaagccacgtggataagatccacctttgtgtgcggcacaaccccagtgccctggtttcttggtgacacttcagtgaaaacgcaaatggcgatctgaagcgcctctgtaggaaagccaagaatgtccaggaggtaccccttccctcgggaagggatctgacctggagacacatcacatgtgctttacacctgtgcttgtgtttaaaaattgtcacagctttcccaaaccaagtggtcttggttttcactctttaaactgatttcact

SEQ ID NO: 1475 - DNA, 1000 bp, Unknown
  Description of Unknown: Theiler's encephalomyelitis virus, isolate1 sequence
cccccggttaccccctttcgacgcgggtactgcgatagtgccaccccagtctttcctactcccgactcccgaccctaacccaggttcctcggaacaggaacacaaatttactcatcccctggatgctgactaatcagaggaacgtcagcattttccggcccaggcttagagaagtagataagttagaatctaaattgatatgacttccccttgacgaattcacgttggaaatgcacccctcacttgccgctcttcacacccactaattgattcggcctactgtgttgagccccttgttgaagtgcttccctccctcgtgacgtggttggagaaatcttgtcacccgactccgacgaaactaccatcatgcctccccgattatgtgatgctttctgccctgctgggtggagtatcctcgggttgagaaatccttcttccttttaccttggaccttggtcccccggtctaagccgcttggaataagacagggttattttcacctcttcttcttctacttcatggtgctctataccatgaaagggtatgtgtcgccccttccttcttggagaactcacgcggcggtcttccgtctctcaaaaagcgcgagtgcgacatgcagagtaacgcgaagaaagcagttcctggcctagctctagtgcccacaagaaaacggctgtagcgaccacacaaaggcagcggaactcccctcctggtaacaggagcctctgcggccaaaagccacgtggattagatccacctttgtgtgcggtgcaaccccagcaccccggtttcttgttgacactctagtgaatccttgaatggcaatctcaagcgcctctgtaggaaagccaagaatgtccaggaggtaccccttcctcgcggaagggatctgacctggagacacatcacacgtgctttacacttgtgcttgtgtttaaaaattgtcacagctttcccaaaccaagtggtcttggttttccttttttatcctactgtcaat

SEQ ID NO: 1476 - DNA, 1000 bp, Human cosavirus A
  clone V8B polyprotein gene, complete cds.1
ggctcactcctgtacaccgtgagtccgcgcagtgctgacttaacacttaagtaatgtgtaggccgagaacgacaccgctcggctcccacctttcaccaccgtgggattaacaggttcaatacacaaattcctgtccttggctatgtcaaagcaatacagtgtgtacatgatgtgcacgctcaaggcggagacttaggcctcacagattgtgttttgtgatattgaatgctggatggtcacgttggagactgcatgtggcagtcttgaaacgtgtggtttgacgtctatccattatggcagtgggtggagtactgcaaagatgtcaccgtgctttacacggtttttgaaccccacaccggctgtttggcgcttgcaggacagcaggtttattttcttatgttctctatttctagccaacaggacactatcctgttgggcggagtgatactcccgttccttcttggacagattgcctccacgacctttgtggatctcaaggtagtcaagtcactggtgaatagagcgaaggttgaggagacctgaggaatttccatgtggctttgccaggagttgtagcgatgctgtgtgtgtgtgcggatttcccctcatggcaacatgagcctcacaggccaaaagccctgtccgaaaggacccacacagtggagcgaccccagctccctcctacaaagctttgtgagaatgaactcacgtttattcttctttattctctatttacatcaggccccaaagatgtcctgaaggtaccttgtgtatctgggcatgagcaccatcaactacccggacttgcacttcggtgcagacgcatgtggtgtcccagcccctctgcttcggcaggggggcttttgctcgctcagcacgagatctgatcaggagtctcccccggtgtgctttacacccggcgggggattaaaaattgcccaaggcctggcaaaataacctaggggactaggttttccttttattaacaatgtctgtcatt

SEQ ID NO: 1477 - DNA, 1000 bp, Human cosavirus A
  strain AM326/BRA-AM/2017, complete genome.1
tccgctgtgatgggctcactcctgtacaccgtgagtccgcgcagtgctgacttaacacttaagtaatgcataggccgagaattacaccgctcggctcccacctttttccatcgtgggattaacaggtttaatgcacaaattcctgtccttggctatgtcaaagcaatacagtgtgtactcggtgtacacgctcaaggcggagatttaggcctcacagattgtgttttgtgttgttgaatgctggatggtcacgttggagactgcatgtggcagtcttgaaacgtgtggtttgacgtctatccattacggcagtgggtggagtactgcaaagatgtcaccgtgctttacacggtttttgaaccccacaccggctgtttggcgcttgcaggacagcaggtttattttcttatattctctatttctagccaacagggtactatcttgttgggcggagtgatactcccgttccttcttggacagattgcctccacgttctttgtggatcttgaggtgatcaagtcactggtaagtagagcgaaggttgaggagacctgaggaatttccatgtggctttgccaggagttgtagcgatgctgtgtgtgtgtgcggatctcccctcatggtaacatgagcctcacaggccaaaagccctgtccgaaaggacccacacagtggagcaatcccagctccctcctacaaagctttgtgagaatgaactcacgtttattcttctttattctctacttacatcaggccccaaagatgtcctgaaggtaccttgtgtatctgggcacgagcaccatcaactacccggacttgtgcttcggcgcagacgcatgtggtgactcagcccctctgcttcggcagaggggctttttgctcgctcagcacgagatctgatcaggagcccctcccagtgtgctttacacctggcgaggggttaaaaattgcccaaggcctggcaaaacaacctaggggactaggttttcctttattaaca

SEQ ID NO: 1478 - DNA, 1000 bp, Picornaviridae sp.
  isolate bbr144pit2 genomic sequence.1
tcagaacagaatactcagtggacaggggaccaatccaatataagtcttgaccgggcctttctggaccagatgtccttaaggaggctgtgccaagccaccaggtaaatctctcaaagagagtccagagtctcgtaggctatgctgtattaatacagcaaagacccacacatccccgctttcaacgtctggcccacgaaacgggccactttctcggtctgaccattggtttattattgaaattggcttggaaatgctgacactgtaagttggtttgtgatttaaacaatggttaatctggactctctttgagagatttacctggtggcttggcacagcctccttaaggacatctggtccagaaaggcccggtcaagacttatattggattggtcccctgtccactgagtattctgttctgaaccgtgtaggcagggctagcgccaccatgattgccaagggactacctccctggtgacagggacccttgggcccaaaaggctaggtggcaactctcatgtcaagagaggggtatccaccccaatctgaatcatgtggagtgaagccactcgtcatggctctgaccccgagactgtctacatctagtaagatggatgaaaactggatttggagaccactctgattgtcttgatgagaaagtccgctatttgactgagtagatgccctccagctacccttatggatgtgaggaggggaccgtgactatagcgttccgctaaaccggtttaaaaaacatgaaaggtcaaatatgtggcgccattttccacttatatcaataaccatatgtctgacgaagttgattgtgctgagtgttctaagccctcctggactgtcagattaaaattggcttttctgcaatattttggttgccagtttgtatgggtttatcactcaggaaagaatcaagagaaagattgaaaatcttggattgtgcaacaaaagctcatttttgtccttgtgaaggcaaccagagattgcagtc

SEQ ID NO: 1479 - DNA, 1000 bp, Cosavirus F
  strain NGR_2017_NHP_CV, complete genome.1
cggtgtgatgggctcactcctgtacatcgtgagtatgctcaaccactgactaaagggctgcttgaacttaacatcatggattccgatccgttacattgatcggcccgtgcccttctcaatatgggattaacagagcttcaacttggttttcctgtcttttagcgttccaacggtattatgccacaacatggcagaaagcccgcggtagctatcacagattgtgtaaccaggtttggctgctggatggtcatattcagatcgcatgcatgtgtggtcttgagatatgtcccggttgacgtttcccttatgttacattcttgacagccggtggagtgctgaaattacgtcaccatgctttacatggtttttgaactccacgccggtcgctagacgcttgtaaggcgataggcttatcttcctatttctcttctttctagcccagtaggttctatctactggggcggagcgaggttcccgttccttcttggacagctggtcaccacaccttgtggattcttagactggcaaaacactggtgcaagagttgaagggattatgtgtttaagtgaagttctactgctttttgaggaatcgtagcggtgctgtgtgtgtgtgcggattccctcctgcggcgacgcaggcctcacaggccaaaagccacggtcgaaagaccccacacagtggagatatcccatctccttcctctcttagtagtttaatgaatctttttcacaggatcttataagactactgcatttcagaccccaaagatggcctgaaggtaccttgtgtattcactttggctgaaccaccgactccccggactggctttgccgacgcatgtgggtgcccagcccctgcccttaagggcaggggcttccctcagcaagtgacacgagatctgatcaggtgccaggtcactggtgctttacaccaccctggttaaaaattgcccaaggtctgacaccccaacccaggggactgggttttcttttatctt

SEQ ID NO: 1480 - DNA, 1000 bp, Human cosavirus
  isolate HCoSV/CMRHP57/CMR/2014 polyprotein gene,1
ctcactcctgtacaccgtgagtccgcgcagtgctgacttaacacttaagtaatgtttaggccgagaattacaccgctcggctcccacctttcaccatcgtgggattaacaggtaaactatgtgtattcctgtccttggttgtttcaaagcaatacggcatgtgcaatggcgcacaggcccaaggcggagaattagacctcacagattgtgttacacatttgtttatgctggatggtcacgttggagactgcatgtggcagtcttgaaacgtgtggtttgacgtctaaccattatggcagtgggtggagtactgcaaagatgtcaccgtgctttacacggtttttgaaccccacaccggctgtttggcgcttgcaggacagtaggtttattttcatttgaattctcttttctagccgtgtaggatctatctacacgggcggagtgatactcccgctccttcttggacaggtgacctccacgctctttgtggatctcaaggtgaccaagtcactggtgtttgaagtgaagattgaagagacactagggagtttcatgtggctttgccagggattgtagcgatgctgtgtgtgtgtgcggatctcccctcgtggcgacacgagcctcacaggccaaaagccctgtccgaaaggacccacacagtggggttgccccgacccctccctacaaagctttgtgcaaacaaacttttgttttgtctttcttaagcttctctcacatcaggccccaaagatgtcctgaaggtaccccgtgtatctgaggatgagcaccatcagctacccggacttgtagaacacattctacagacgcatgtggtaacccagcccctctccttcgggaggggggctttgctcactcagcacaggatctgatcaggagatccacctctcgtgctttacacgagggcgtgggtttaaaaattgcccaaggcctggcaaacaacctaggggactaggttttcctttattcaaaagttgtcaat

SEQ ID NO: 1481 - DNA, 1000 bp, Human cosavirus
  isolate HCoSV/CMRHP49/CMR2014 polyprotein gene,1
ctctgccagtgattcccccttgcgggatctttttaaactttatttcaaactacgtttctaagcaactttaaatacacaagaacgttgacccttccattgggaatggaagagatgaaattgaaatggaagtattctattgtaatgtcaatagtcttaccatccgctgtgatgggctcactcctgtacaccgtgagtccgcgcagtgctgacttaacacttaagtaatgattaggccgagaattacaccgctcggctcccacctttcaccatcgtgggattaacaggtaatttgtatacattcctgtccttggttatgtcaaagcaatacggcatgtgcaaaggcgcacaggcccaaggcggagacttagacctcacagattgtgttgtatattaaattatgctggatggtcacgttggagactgcatgtggcagtcttgaaacgtgtggtttgacgtctaaccattatggcagtgggtggagtactgcaaagatgtcaccgtgctttacacggtttttgaaccccacaccggctgtttggcgcttgcaggacagtaggtttattttctttcaacttctcttttctagccgcacatgttctatgtgtgcgggcggagtgatactcccgctccttcttggacaggtgacctccacgccctttgtggatcttaaggttgccaagtcactggtgtttgaagtgaagattgaagaaacactagggagtttcatgtggctttgccagggattgtagcgatgctgtgtgtgtgtgcggatttcccctcgtggcgacacgagcctcacaggccaaaagccccgtccgaaaggacccacacagtggggttaccccaacccctccctacaaagttttgtgcaaacaagcttttgtttagtctctcttaagcttctttcacatcaggccccaaagatgtcctgaaggtaccccgtgtatctgaggatgagcaccatcgactacccgaacttgcgagcaaatttcgcagacgc

SEQ ID NO: 1482 - DNA, 1000 bp, Human cosavirus
  E/D clone V13C2 polyprotein gene, partial cds.1
ctcactcctgtacaccgtgagtccgcgcagtgctgacttaacacttaaataatgtttaggccgagaattacaccgctcggctcccacctttcaccatcgtgggattaacaggtgactagtttgtattcctgtccttggttttatcaaagcaatacggcatgtgtaacggcgcacaggcccaaggcggagatttagacctcacagattgtgttacaaatttagtcatgctggatggtcacgttggagactgcatgtggcagtcttgaaacgtgtggtttgacgtctaaccattatggcagtgggtggagtactgcaaagatgtcaccgtgctatacacggtttttgaaccccacaccggctgtttggcgcttgcaggacagtaggtttattttcttttaaatctcttttctagccgtgcaggatctgtctgcacgggcggagtgatactcccgctccttcttggacaggtgacctccacgttctttgtggacctcaaggttaccaagtcactggtgtttgaagtgaagactagagagacactagggagtttcatgtggctttgccagggattgtagcgatgctgtgtgtgtgtgcggatttcccctcgtggcaacacgagcctcacaggccaaaagccctgtccgaaaggacccacacagtggggtgaccccgacccctccctacaaagctttgtgcaaacaatcttttgtttagcttttcttaagcttctttcacatcaggccccaaagatgtcctgaaggtaccccgtgtatctgaggatgagcaccaccgactacccggacttgcgcacctaacgcagacacatgtggtaatccagccccctccttgaggggagggggctttgctcactcagcacaggatctgatcaggagatccatctctggtgctttacaccggagcatggatttaaaaattgcccaaggcctggcacacaacctaggggactaggttttcttttttatttttcaagtttgtcaat

SEQ ID NO: 1483 - DNA, 1000 bp, Coxsackievirus
  A10,isolate QD102R/Shandong/China/2014, complete1
catgtcttgatcaagcacttctgtaaccccggactgagtatcaatagactgctcacgtggtcgaaagagaaaacgttcgttatccggctaactacttcgagaaacctagtagcaccactgaagctgcggagtgtttcgctcagcacttcccccgtgtagatcaggtcgatgagtcactgcttaccccacgggtgaccgtggcagtggctgcgttggcggcctgcctatggggcaacccataggacgctctaaagtggacatggtgtgaagagtctattgagctagttagtagtcctccggcccctgaatgcggctaatcctaactgcggagcgcatgcccccaaaccagagggtggtgcgtcgtaacgggtaactctgcagcggaaccgactactttgggtgtccgtgtttcttttattctcataatggctgcttatggtgacaattgaggaattgttaccatatagctattggattggccatccggtgtgcaacagagctattatctacttgtttgttggatacattccattgacacctaaatccttcaatacattgtactatattttaacgttgaacgcaagaaaatgggagctcaagtctcgacgcaaaaatccggcagtcatgagactggtaatgtagccactggaggatctacaataaacttcactaacatcaactattataaagattcttacgccgcgtcagctacccggcaagacttcacacaagatccgaagaaattcacacaaccagtgttagactctattagagaactatcagccctttgaactctccttctgtggaagcttgtggttatagtgatagggtcgcccagctcactgttgggaactcctccatcactacccaagaggctgcaaatattgtattagcttatggagagtggcctgagtactgccctgacacagacgcaactgccgtggataaaccaactcgtccggacgtgtctgtcaacaggttctacactctggactccaaa

SEQ ID NO: 1484 - DNA, 300 bp, Hainan astro-like virus 1
  strain LPXYF118785 hypothetical protein,1
acccttggacgagacaactttccagatcattgttgtgacgctgctttttctcgcatttgttcttcaacttttttccatcgcgctctcatttgtgagccttcgagaagaacaagtgtggtctcccaaaccacgttgggatcgacgtcgtcacaaccaccatccttaaatggaaattgatgaacttgtgttaattgttttgaccctcaatacgattttatttttcttttttattgttgtcgttgttttgatttttggatttattttgtttaatttttgttttcgaaatcggtgtatacccta

SEQ ID NO: 1485 - DNA, 300 bp, Beihai sipunculid worm virus 1
  strain BHNXC40689 hypothetical2
gtcatcggctttgccttcggacaaggcattataatatgtgtccctctgtgcggtgcctccgtacatctgcggaaaaccaaaaaggcaatgtttgtattggttaccatgttcatgttttttacgtatttatatatttacataggcttgcatacatttgtaaaatagtaaccggcgtacctctttcgcacgggaggtgcgactgtacatagaagtgcgtccaacacaacaatctacgatttagagccgactctaaaaacacaaaaagtcggcaccgtcacgttcgctcatgcggaccaacct

SEQ ID NO: 1486 - DNA, 300 bp, Wenzhou channeled applesnail virus 4
  strain WZFSL85898 putative1
tagtgaaaggcagcctgacatgataataagagttgttacgtacgagagatcttctccaattggacagctttcacagcgattcagattagagaacacaatctgtttgtctgcagagcatttcttccttttgaatatagaagacggtcctgtggccttggtgacccctttcttgaacttctatgcagagcgatttgttgcattcaacacctcgccttcgagtgtactcatttccttcgaccaatccatctacgccccatataatcctcatctccaggcaagacagatccaggcagtgtcaga

SEQ ID NO: 1487 - DNA, 301 bp, Lampyris noctiluca chuvirus-like virus 1
  isolate 17FIN7 segment 2,1
atgatacattaagagtagtggataatttaactgcaaaggctagagaaggggcaaggacgaccaatgtcaactcaattggtggaagctgttagagcagcgtttttaaccctagacataagcttagatatatagtgtaggatataccgttaagataccagccttgtagagatgggattgttttaaaaccttaaaataatgaagatacaacagaattcgtatcaaagattcataccataaattgttattcaatcttttacgagtgattagtgcctgttagtattatctacatttgaatttgaaa

SEQ ID NO: 1488 - DNA, 301 bp, Hubei virga-like virus 16
  strain arthropodmix13816 hypothetical2
agctcatgtaccttttacctgtcactcttttacagttgcttcaggttttgttctctccgtcaacaactataactcagaagtgcgaagctgcagagttttaccagcgttataattttctttactatagtaggtgctcttattctgtaaaatattttatctgccccatttgtatccgaagatgttatttttgtgatttctttaatcaagtatttgactgctattggagatttttccagttttcagtttttagaaattttatctgtatagttctttttattcttattattttgtttccgtaata

SEQ ID NO: 1489 - DNA, 302 bp, Barley aphid RNA virus
  10 09BaA3 gene for polyprotein, complete1
cctgtaaacccttgttacttcagtcttttcactgttataaccgtttactactcttggtattccataaataaagaaaatttaagtttcttgatttaacccaatttctaaaactattggttggtttgaatcaaatcttgcgttgttgacacgacactcttgctattaagtttaagagtccaagatcaataccgcgaactctctatactggtgaggaaccgtatagataaccgtcaagttgttgtagacttgcgttaactattttaactttgtttaaaatactgtagtttccagtctgaagcaaa

SEQ ID NO: 1490 - DNA, 302 bp, Beihai bunya-like virus 3
  strain BWBFG40849 RNA-dependent RNA1
atagaacacacttgtgcgcgactgccccccgaagggggcccataacatggaaaacaaaagcaaaagtaataacacaaataaaaacaatactaagctacctcatccagatcagaagggttatagattttacgaattatcagaagaagagaaaaagaagctgattagaccaaggattcaattagaagattatagtacaaaacagagggctagagaggttgaccgagtgacgaggtctcaaattccaaaagaggaaataatattatctgataaagtaaaagaggtacttgagaagtttcctatag

SEQ ID NO: 1491 - DNA, 303 bp, Bremia lactucae associated dsRNA virus 1
  isolate DML-A_DN43224 ORF22
gaagttcgttcccgtgtgtttaaggtttcagtttatgactgggtccgagactctcctgctaatggtttaactgaagattctggtcgtcttgagtggatatatgatactaataagtgtcttatcctggctcaaggtgacggctggtacgttagacctttagtccaatctgatataattaatttactatctggtgagggcgatttagtaggagacactctatatggaggtagcacatgggaagagaaccatatcttgaaagtccctagttctgttcataaatttactccgtcttgggtttatact

SEQ ID NO: 1492 - DNA, 303 bp, Strepsipteran arli-related virus OKIAV104
  cRNA sequence.1
aaaagcgacgcaaaccgccaacagcgaaagcacaaaaagaagacaaacgaaacgagaccatcaaggagttgcgaggataataagttcgagaagtgcaaatataatttagtatttgagttaattacaaaagattaatcaaaacaatatatctaaattagaataattgatcgcacttgggataaaagatatctatatatttgaaattctagtagtttttagatttataggtagtagaataaggcaaaataatcctctttacagataagcaagagatctttctgatctagtttcacagatacaatt

SEQ ID NO: 1493 - DNA, 303 bp, Beihai picorna-like virus 79
  strain BHBJDX18844 hypothetical2
attggcatcgaccgcaatgtcattaaactacgaccggggcaggttaccacgtgcagatcgacaataatctggctaaaagtgatgcacggaggcgccccaaacgacacagttgggtatttacccttacttccaggatgctgttgtggcagccccacgaaaatccaggagaccagatcgacgccgcccagttaagctgctgtggcaactaggctttatgtttagggcgtttaaatgagttagcttgcaacaaataacatcaaacttgcaactctcgaggaagagtttacacatgacgcgactacc

SEQ ID NO: 1494 - DNA, 304 bp, Beihai picorna-like virus 124
  strain BHBJDX18598 hypothetical1
cagagattattattgtttatctctgtgcttccgtcaaatacttattgcttatacttatattttattgaatatttcgaccgagtttacgttggacccaggtgagtcgtaatacgtttactcgtcaagccattttacaagattgatccgcgcgattgggattcaagtctagtcaaacccatttatacatcttctatagcgcgtgacgctttcggtttgtggaaggatattagcgaggcatttgttttagcagtctacctatttgttggagttgttgtgagatctatagacagtgtcatttccaaga

SEQ ID NO: 1495 - DNA, 305 bp, Tacheng tick virus 8
  strain TCP-2 polyprotein gene, complete cds.1
gttacgtcccgcgtttggcttttgcccgtgctttgataaagagcatttcggacttttcggcgagttttcttcgttagtcgaaggaaatttttgacaacaaatttgttgttttatctcgacacttatcgtggtgtagagatctattaattatttgatacaaatatttgtattagataattttatatatataaatatatataatttagttgtattcttttgctttgtttaatagtagcatttaacctacgctttttcttgctttcatttgttacttgttaatcttcttgagagtttgattttttgct

SEQ ID NO: 1496 - DNA, 305 bp, Beihai picorna-like virus 6
  strain BHNXC41284 hypothetical protein2
ttggctttgactagcttaggctttcctggatgagcctttaatcatctaggtctttttgtgctttatatatttatgggttataaaacttctttttctttagccttttcctgtaaggaaggccctttatataaagtacggttctgcgtgtgagcgtgtggggaggtatttacttccgtcctttggcattacttacgttaagtcgggtatttgtcataaaattttaggaaatcgttcctggagggtctagtatgagcagctagcctcctatggtttaaatatagctttcttttaattatactaatttt

SEQ ID NO: 1497 - DNA, 305 bp, Beihai picorna-like virus 42
  strain SCJXSX39263 hypothetical2
gtgatcacatcaccattggcttgcgggaggatcgctatccgctagcttcttaagaaagcgaagactatttggtacagtagtcgattgaccattatctcttcatgtactacggtttgtcgccgtgccccaagacacgaaacagttggattaatctgtccactgtgggtgtaatttattactagtagatttctaaacaatacaatgaagagcattggggaacgcggtataattcccccgcggtttggtatcccgcgacaccagaattaccctccacttccgtgcacatcgtgccagcgcgaacggaa

SEQ ID NO: 1498 - DNA, 305 bp, Hubei toti-like virus 14
  strain QTM6211 hypothetical protein 11
tagaatacgctggaacatggtctccagatgctggcagtcatctgggtgaacctaggaaataccgactgcctatagctgccacccatcttccaatacctatcaacccgagggagtatcacattcatttaccggacaaacttttcttcgaactcaccgttccaagtagtttgaggcgccggccgaaggatgttgagaaactccggcggtattgggggaccgtaccatcatggtggcctatatctaacacgacagactgcgcatggcccatctatgtgcactacaactcaatcaaatcttgtggccat

SEQ ID NO: 1499 - DNA, 306 bp, Trichosanthes kirilowii picorna-like virus
  strain pt111-pil-52
aacttaatagttttctttagtacattcattataattctagtttttattataatttattattatatatatttttaggatttagtgtagatacagagttataatgcattttttataaaattttttaattgcagctactgaacattttttcctattttcaatttttaaaaattttcgtttaatgattgttagaattgtagtaactaacttaaacgtaaaacaaatgctacagcaaccaatcaatcaataacacaatcaaattcagttttttataataataagagcacggcagttagagactcaggctca

SEQ ID NO: 1500 - DNA, 306 bp, Solenopsis invicta virus 7
  isolate Formosa, complete genome.1
attcgcatcgacctcacgtaaaagacgtagagacttcgagatccttcgagtgacgccgaagagaaaatacgcgttattgttttaaaaagtgctcctcatattgagacgaagccgctgtcgctatcacgaccacagcataatcatcttcgtgagacccctcgccagtatctccgaggttaatcctttgattcagcgctcgcgcgtgccacccaccgcttaataagaacgttctgggtttgtcagttttgaccctcacgtggcaccacttaattgacatcaaattaaagtttcgtcatcttctaaaag

SEQ ID NO: 1501 - DNA, 307 bp, Bipolaris maydis chrysovirus 1
  strain SS01 segment RNA3, complete1
cgataaaaacagaaaatccgatagcacgacaacagatagttggccaattgtttaaaacaagattgagatcacttaataataaataatttaaatcaaaattaagttggtgtcttggctggctggtccagaacaagttgtcgagccgtctgatgagtagcacctcagggtcacgaaacgctggacgtaacggcggaacagattattgaggttagtagaacattatcacaaacaaaacaacaacaacacaatcacacaacaacgaacaaacaacaatccaagacaagcactagaggttagcacatgcaag

SEQ ID NO: 1502 - DNA, 307 bp, Human respiratory syncytial virus S2
  complete genome.2
caaatatccttgtagtataaattccatactaataacaagtagttgtagagttactatgtataatcaaaagaacacactatatttcaatcaaaacaaccaaaataaccatatatactcaccgaatcaaccattcaatgaaatccattggacctctcaagacttgattgatgcaattcaaaattttctacaacatctaggtattactgatgatatatacacaatatatatattagtgtcataacactcaatcctaatgcttaccacatcatcaaactattaactcaaacaattcaagccatgggacaaa

SEQ ID NO: 1503 - DNA, 307 bp, Sitobion miscanthi flavi-like virus 1
  07BaA1 gene for polyprotein,1
ctttcaccccttgtggaccctagtgattactgagtacttctacttagaatcctgtctcacagtttttggtgttttctaaataagcataattaagttgcttggttttgttatatttctattgttgtaacatagccttttcgcgttgtctttacgtcccacttctcattagagtaaagtgtccaaagagataccgcgtttttgttttgagcgttgagagaatccgctcataacaggcaccagtcgttgtagactagtgtatctgcacaaatttttattttatttttattttaactatttgtgtaccacc

SEQ ID NO: 1504 - DNA, 307 bp, Picornavirales Q_sR_OV_036
  putative non-structural protein2
tccccccacccacggcattggaatggggccttctttctatggaggaaagtgtgaaggcagcaaatcctgaatccaatgctaagagacgagggttatttagcccgtttatgccatggcgcgtctttaaataaaagctcggcatacctccagtcttcccttaggaataagtgtaccttaggtcgactataaaacaaccacacttgctaacaatgatacaacaaccccccaaactgcatctggttttaccacaaaggaggatttatcctctcgaggacgtcttgatactattcaagacgtttcctcctct

SEQ ID NO: 1505 - DNA, 307 bp, Hubei tombus-like virus 5
  strain WGML136364 hypothetical protein 11
cacgggtgcaccgttaagcacttcaccatgggcatggtaaggttgaatgcccccactcggaaggtggttaacaccgctgaggaccagcgacaccaattccccgctctggactgagccgctcggcgcgatcgttaagagacagcaccaggctagcgtctgccatcaacatagacgtgggaagcatatcccttggaagcgattgcatctgagaacagcccgtaaacttcagcggtaagtgggtcggtcgcctgatcgtgatggccccaggtgcgtgggttaacgcaccatctccccccactaatacact

SEQ ID NO: 1506 - DNA, 308 bp, Big Cypress virus
  strain BCNP2-24 A hypothetical protein 1,1
cataaattcattataaaaaccaagtcgtgcaatcaatttgtacgatcataccaggtacagtttcaatagctgtactcagcaatctgctataaatcaattttataacaacatcacgtgcttacggtcaattcgtaagcataataatcagttctaaataattgtttagaaccatcacgccgatacaagaactttgtatccccataacttgaacgctgtcaatcaacgctcaaaatatccacctacagacacttctgtaagtctcgcgcaatttttcaatattttgaaaaactattccccgtttacccgca

SEQ ID NO: 1507 - DNA, 308 bp, Plasmopara viticola lesion associated ourmia-like virus 11
  isolate1
gccgcaaagtcaagactttacgtcacgacatccgtaaggatgtctggccgaaagggtttccccgaattttagatctttcgatcgataggactgctgctcgaatgagtgtgccgtcttttctatcattgattagtaatttttggacccttaggcccggtattaaatattatgtgcccgcagttgtggtctgcgttacctttctccacactagggatagcatctattcagccatcgcgtacatacctgaatcaaaacaaagtgatagcgcgcctggcccccgttacgggccatcgtaaaacccctcgaac

SEQ ID NO: 1508 - DNA, 308 bp, Perth bee virus 1
  isolate WA2-13 nonstructural polyprotein and2
tcttgtaaatatatataaattcctagttctaaaatatttattatgctatttgtgtattgtcctttattatttaatattaccgcccaagatgggacgaggcagcccctcaatatctagggcacctaggtgcagattgtctgttttagtggacaacaatctaaagaaactcactagcttcaaataacaatttaaccgaaaccaaaacaaaagacacaacctatcaagctagacttgacgaacacactgaagcaggagatattaatcctgggatcgagtaccaacgacaaattgtcactttttcagaagat

SEQ ID NO: 1509 - DNA, 308 bp, Ginkgo biloba picorna-like virus
  strain pt112-pil-2-NY genomic2
aataaacaaatagacatactgtaagtggattgggttataatcgagtaattggcgcttgagccacagcccttacagtaatccacaaaagccaattagagctgatttgattgtataagcttgtaaattcaacaatcgcaaaacaattagataatattgaaaatttaatagatgaagaattgaatctatcatgcggaattaaagaagaatctcaattagatgatgtagtgacagatatatccaggtccataagaccttatctaccatgggaatgtggattaatattagctttagtaccacccttagtaggg

SEQ ID NO: 1510 - DNA, 308 bp, Changjiang tombus-like virus 8
  strain CJLX29920 hypothetical1
ccttatggctttatttgtggtggtgtgaggagaccacgttgtgacacaacaaatagcctcgttgccctggtattacgagcgtcggtaaggttagcatcttgctgccagggatcggtaggtgcatatacgtcaagtgatgtgtgtacctttaatagggggcggcataaggccgccactgtagcacgcgtagcgcggtctaacgaaccgttgttggaggggcgtgttaccaccggcttgccggatggctggtcattctccaggtgttcccctccactccatgacaggaacccctaacactactacttcca

SEQ ID NO: 1511 - DNA, 309 bp, Phomopsis longicolla hypovirus
  isolate ME711, complete genome.1
gggtgtagagaacctctgcgaggttcaatcataatggacatttgtgatgtacttacgtctctaggacgcccattactggtttatactctgtcgagttatcagtgattgtgcttgttctacgtatggaagctacagtttcattcgtaaagctcctacccctgattggttaagaacctgattacactaatgtgtaggccaacccgctggccctagcggtttcattcaattcttgttgggtgttctgtgaacttgaatcggtgagatgggcccgtgtgccccgtctggcctggactttaactagtgcctgag

SEQ ID NO: 1512 - DNA, 309 bp, Fusarium oxysporum dianthi hypovirus 2
  complete genome.1
agacgatttcggtcttacgcccactaggggcgcccaatactggtttatactctgtcgagttgtttgagctggcttgcggacattcaaaggaacgtctcgagctattgggtagcagcaaacgtgatacatgggaagcgctgttgatccgtcggggaggctgtctagcgcgtttggcttggccagctgaggtcagtagggctatgaaacccaagggtggcgatcccacccaatcagcctaggaatccacaccaggataggtgcacggcttaacaaccgaggcacgtggaaatttggccagactatgagtgt

SEQ ID NO: 1513 - DNA, 309 bp, Hubei tombus-like virus 24
  strain GCM76561 hypothetical protein 11
accaatatggttgagtccctggttctctacccatctaactgtcatggaccgttgaaggctggcaaccggaggtgacgcagatttggggtgtttcggactctgtgtattatcttaccgtccggggttttattccctgggaaccgcataattgatattgatgttagacggcagcgaggaagtgatactcagaggaaacgaatctcatcgaaccatcgaggagtccgacgagcagcaggcaggcttgcgactgggattcagcgatggaacgaaaataatggtggagcgtcggcggcagatgatctggccctc

SEQ ID NO: 1514 - DNA, 310 bp, Riboviria sp.
  isolate muf160shi4 genomic sequence.1
gaactcgtccgacacaggaaaacgcgctctaaagcgcctaaaacatacagattacataatttcagagtatgatgaggtagttctcaataagtactttgaacccaacctagtgatatcgagactcctcaaggaatcctcccacaccatagcagctgttctactcgaacaggcaaatattgcttgcaacagccttcgcggcccaaggactattgaaataggacctgatgcaagaatacaagacacacacaagtgcgccgggctaatatgggcctgtagtgacggtaaggaccaaaagcgaattatcgagcac

SEQ ID NO: 1515 - DNA, 310 bp, Sclerotium rolfsii fusarivirus 1
  strain BLH-1-10 RNA-dependent RNA1
tatttaagttattaattgagctggatcattttgtcggagatttgatggatctccctggctgtcctggccagtcttggatgtgctaagttgtgggtagtttccctaggtttcatgcctgcactctttcggaaaattccgaggtggattaaggtgcatctggctgaaaatagttttaaatcactcgtctccatcgcgttttgttcatttaaatcatgcttggtatcaagcctgatagtgccttaaagaccctgatgagccctggcacgaaacgcacttttgtgcgttggttgattttagttgttttgttagt

SEQ ID NO: 1516 - DNA, 310 bp, Auricularia heimuer fusarivirus 1
  isolate CCMJ1296, complete1
ggggtttcgttgcagccttaagtgtgtttcacttgtagactggccagtacggctggcggccctttgtggggcgccttttgtgcaatgcttcgatcccgtacaacaatctggcatttcgccgggcctggcagggcttctcggactttttaatcacgcatgctttctctggctttctcggcgcgtgttttctcggactgtggctaaaattcattaaaatccaaaaacaatgccactacctcaatctcctacttgaccctgatgagcaaggagcgaaacacgactgccatcgtgttggttatgaagttttaaa

SEQ ID NO: 1517 - DNA, 311 bp, Plasmopara viticola lesion associated bunyaarenalike virus 11
ctccacttggtggattgcgacaatcgggctgccactctcattgtagatttgaatgacaggaccccgatggttgcgaccccagtggagtcggaagtggattttggctaattgggtgttgtcgattatggcactcacgtcggcatggcgctgcatgggtgcggtactatggtttgtggacttggcagcaatattgtaatataattgtttcattacctatagtgtgtgtgctgggactggcgtaatacgtaacaactagtcccaaaaaccaaaaaactctttaacaaggattgtcctttgttttcaactgaacg

SEQ ID NO: 1518 - DNA, 311 bp, Xiamen sepia Stingray hepacivirus
  strain DHHHBHGS10983 polyprotein1
aagggaagccctcctaggggcagggagtaaaacagccacccgtcgtgcggtctgcaaaagtctgacgctttgtgtgtatcagggtaaacccaccggaaggtggtgctggttttgaccaaaggcctgaatggtaacacattgccccagacagaactcactgtaatgcgtggtaagtccgtcgtactagtgggggggctctgcctcacttaatacaacagccggaatgagcacaccgagtcaaatctgggtgtatggttccgaaccgtctaaccgtaggttccaggtaactggaggcgtcggccgttggaggc

SEQ ID NO: 1519 - DNA, 311 bp, Barns Ness breadcrumb sponge aquatic picorna-like virus 1
  isolate2
atatatatatgtataataaataaacaataaataaacaaataaaaaagaaacaacggtcttgggaagactaattaaaagcatccctctaggcgtaacctaccatgtctataataaataaccaaaaggaggctctttgtattggattaccgtgcgtgtccaactagttagtcataggacactgcataggcttgcaaagagaggcactttccccgtaaagtacccctattcaggggagtaatcgccatacagaagattaacacacgcattgtagaataagtcttctactttagcgttcataatgacttactagt

SEQ ID NO: 1520 - DNA, 311 bp, Wenzhou picorna-like virus 19
  strain WZSLuoII97616 hypothetical2
tcatattaacaagggtttttgggactaccctgcagatgcttttcctgcaattctgtcccaacgctagattgctaacgatttgccgatatcgtcgaagatctttctagcgtcgcgtgatttatattacatatatattgcccattcgtttctggggctaatgtataccggtgtagcgagccatggctgcttggttaaagtgacccgtctgtgtgtataggcataaccacagatgtattttgtctgcgaacaacaatcaaagtaatacacatggtctattgaccgaattcattgatggagcacatggcaccaca

SEQ ID NO: 1521 - DNA, 311 bp, Hubei toti-like virus 21
  strain CC64629 hypothetical protein 1 and1
actggggcaaaccaaacgttttatcccctgatgaagagtggacatatgaagattttagacaaagtatactacattacggagataaggtagcgagtggggaagaaaaagtctcatgcgaatgcgacggaagaataggatgggaaagggacctaactgaatttaaccaaaacttgaagcggttccatctaccagaagtgcacaagagatgtgcagggtgttacttgaataaaggcgcattagaagatgggctacacttactgttatacttagtgccgaaacaacagcaacacataattatagaacagtacaac

SEQ ID NO: 1522 - DNA, 311 bp, Hubei tombus-like virus 2
  strain WHSFII19265 hypothetical protein2
tgaacccacttgggattagggcggagctaccgtcaacataaagccgcagacggccctgcgataacaaacagcaattgggttgatgtacatagaggaccaaaactgtgaaccctccggggggacgcaaaatttcagtgctaaacaaaacgccaagagactgcacggctccgcgttcctctatcgttagagacaaacgtatacatcgatgtacagtccccgtttgtggttcgggggtccaagaccaaccactactttcttcaccatttccgatttaactcttaatttctacaacgccactgtcattatccgtt

SEQ ID NO: 1523 - DNA, 312 bp, Plasmopara viticola lesion associated dsRNA virus 1
  isolate2
ggaatttgttcccatgtcttcaaggttaggccatataagtgggtattagaatcgccactattggccatctcagatgaaacaagtcagctagaatgggcatatgatactgaaagtaacataactcgtgttctagctgacgggtggaacttgagacctttagctcattcagattggttgtcactttataataagactggttctttaattagtgataatgtgtcgggagcgtcgacatgggaagagaagtatccttcagaacctcctaataatttacatccatttgttccaaagtgggtgtattcattgaagctc

SEQ ID NO: 1524 - DNA, 312 bp, Linepithema humile polycipivirus 2
  putative capsid, hypothetical1
ccaaccgtttaaaaatccaacgtaaagttctttatataagaacttaacgttccggttgacggcaggatcaaacctcagtaaccaatgaacctgagttaggaactacgggagctgggcgcagctggcggcggatcaaacctggaacccccagttaggaacgaccgagagggcgaggatttttaaacggttggtgtcgttattcacccttgatggaatacaagtaaaaatattaacccttaatgttagcaagtaagttagtttttaagtttgtgtttgtccccttaggttaagtttgtaagaacgtatggcacg

SEQ ID NO: 1525 - DNA, 312 bp, Primus virus
  isolate Ferlo, complete genome.1
gaattagaccaacggggagtaggtgagttcctctcctctactagagactgatatagcccttaggtttcatcgctttgatctcagtgtgcccaaattaatagtaaccctcacatcaaaggggaaaatctgccccatctattttatcgttaacattcgcgtgtctacagaccctatactatatctatttttttagcttacattttaatccttgtgtgatttaaagagagaggtgatagaactatgagcccctcttgatttagaaaaaaccaaccatagaagacaaatataaactgcgctcacctatttcataaa

SEQ ID NO: 1526 - DNA, 312 bp, Beihai picorna-like virus 107
  strain BHZY60580 hypothetical protein1
gttacccctacgtattttgtttaacattaatgaaattgaagtgtctccgcgactttcaattttattcaaccaatgcaagttatcaacgaaagttagttagaaagacataatacacaatttagatgtattggcgcttagtcaccgcattagtgttctgtcggaatttagacactaattattatattaattccattagagcgcatgattttgtcatgtcctttatccacccgcagaattggatatgcgaggtgaggtggtttaaacactcgtccgcgatttgaaacgccagcgaagtttttccacaattaaacc

SEQ ID NO: 1527 - DNA, 313 bp, Bivalve RNA virus G3
  partial genome.1
cgaggagttatggaagtctcgtaatttaagtgaactcgaattgttcgagggtcttgaagagcctgagattaagccaattaaactcgtagaagaaaaacaagagaagaaggcttctgtattattcacttgtaatcgcgagaaacgtgttgataagatattgtctggtcatactgaactcgagataactaaatctggttatcttagatctccagaagaggtatgcggaattattaggaaaaagatcgagagcagaaagaagaaaaaggccgatcttagaagagagcgtgaaaatagatccaaagagaggggtctt

SEQ ID NO: 1528 - DNA, 314 bp, Plasmopara viticola
  lesion associated tombus-like virus 2 isolate2
tacaaaaacagattctgaaactttgtcccaagctgagcccattggaactagctgaatttccacttcagtacgtgggtaagcaacggacgaggtatcagactgccgtcgagagcttgagtgtcaagagcttgagacgcgccgatgcgtacaccagcaattttacgaaaactgaacgtacgctcaaggccaatgcagtacctagaaacatctctccgagaagttataggtacaacgcccaggtaggacggttgttaaaaccggcagaaggtgtcctacttgatggcattgcgaaagtcttaaacagcaagaccgtg

SEQ ID NO: 1529 - DNA, 314 bp, Picornavirales N_OV_080
  putative non-structural protein2
tcagctatgtgatacattttgcggtttgtatcgcatagaaccgcggctaagagtttcggaggtccccgtgaccttactatatttatagtaggaattagatgattccacaaaaccccaaaaatgagtggtttatagcattaacccacttcattcaattatagtatgctcctgacaataataataataataataaagggattaacattggccctcctaataccaatgtaaatagtcgtgttcttaagaactcgtctacctgtttgaagcaggaaacactggcgtttcatgatggatcgtcagaatggaggaattct

SEQ ID NO: 1530 - DNA, 314 bp, Wenzhou tombus-like virus 5
  strain WZFSL67420 hypothetical protein1
cgagggtttatcactaggtaggataggagccgcacctatcttttcagggaacccaccctgttagccactgttaccagcgaccttcggaaagtcgtgttggatggtggaagggacaagcggattataaacgcctagccgttagccagcattgctgggtaggaacgcaaactgctttgcagtaggaggtgtgtagacaccactcgaggacagcgacggaggggctgtccacggcccacgaccgacgggcgcacaagaatcggctttggtgtccctccctaatatgaggtgacaaatttctcccatcttctctcact

SEQ ID NO: 1531 - DNA, 315 bp, Persimmon ampelovirus
  PBs3 RNA, complete genome.1
tcagttttgtttggttgtatctcgcgggagttaatccgtaagagaataaccaaacaaaactgactttcctcttctttgctttcccgtctttatctttcacgttctcttgctgctttgcgattgcttgttcttttaggacccccgatcgctttcctttcttaaggctttcttttcgttacgtgcttctaggttttctttatcgtttcgccttgtttttcttttccttgctttttatctatttctgcgtttttctctttttacgttctgcttttattttattttaaagggcttttcccacttgcttcatgctttacc

SEQ ID NO: 1532 - DNA, 315 bp, Casuarina virus
  isolate 0071, complete genome.1
aagtaataaccccgtccgtctagcttagacgaaaaacttagcttggaaatctagccacaacagttgctataagaatctctcgagacactctcccacttaacatcttctaggaatcttgctgctacaacaatttggctagtaaacgaaaaattcatacagttgtaagagacctttggtccgtacttttgaaattttgtttctaatatatataaatttgaaaggagggggtcttagcattgtctaagcactgcctacaaccctagcgaatacatatacattagtatgaatttgttgtaatcgtcctgataagacaca

SEQ ID NO: 1533 - DNA, 315 bp, Cherry virus Trakiya
  isolate PAI 2-29, complete genome.1
cttagaatgtttcttaaaaccttgccaagcctgaggattttaccatatcgatttcgatcgctgtgataatcttctcactttccccccaccctcccatattgtaattgaagcggggagttttgattgcaattgtatagtcattcctatttaggatacggttggactttaactaatcctccccccagcctattagtctgtaatgcgaacgctaaattggctgtgtaaatttcttgcattaacaatccactacacaaacaaaatgtttctgagggtcctcaaacgaccagcccccaggatatacattcaccagacaaa

SEQ ID NO: 1534 - DNA, 315 bp, Wenling scaldfish picornavirus 2
  strain XDXMC61459 polyprotein1
gtgacaaggtggatggcatgccaccacctatgccccctgagtaaagcaattctatgaccttagactgatcttgattcaaccgtaattgtctaatccaagttaaataaccccaacgtttcgtcgacggatgtggagaaactttgaaatacaactaaactcgtcgctcttgctattttgtagcacaagagagtctagcctctggttgattatatttcaagactgcttgttgtggagaagttaagccattgggaatgggacacgtttgcgttatccctggatattgccgccctttggtgaagctcatgcttgggatgc

SEQ ID NO: 1535 - DNA, 315 bp, Hubei virga-like virus 16
  strain arthropodmix13816 hypothetical1
aaatattagccaactgaacaaaacttagaactatactataacctacaactaatcctataacttactttaattttatttcttttcttttgtttgttttgttgactttgctaatatttattgtgtgctttcttttatcccaataaccctcagcggggctctgccttaattaagtttcatgtaacttgttttatccttttgtggtgttagttttaggatcgttttattgtagtattatttttatattcattgtttcttttgtatgttcttgtggtgtttgggttctctgtgttttataggattatctactatgtaatt

SEQ ID NO: 1536 - DNA, 315 bp, Beihai picorna-like virus 43
  strain BHNXC41212 hypothetical protein2
actaaggtacgggcttacaccataaagtccgttaaaccaaaatgtggtccttgtacatagttactgttacttatttatgaatcctacaattaaaaagtaggtagagcgtggatgtacattgtaatcttacctgagcgctcctcgaaatccctatttagggatacatttttggttagagtgtaaacaattttgtaggtagttctaggaattttgagtcgtatcctagaattaacatagagacttagtgtaaataatagttttgaaagcgacgccagcgctaaaaatactggaactgtttttgatggttcagcccac

SEQ ID NO: 1537 - DNA, 316 bp, Point-Douro narna-like virus
  strain mos172gb29666, complete genome.1
ggcgcacaaacgtacaccacgacggatattcgctcttccgagcgatatctggagtgcttgcggttttgcgccagcccgtagtccggattcccctgcgaaagcaggtgcttccaaaccacatcggcgcaaccgtgccaggtcggtgcgtcaaactattcgtttgaccccggcggcactctgttgtgtcctccctcttccccactggcgagctaagctgctaaacgcaatcgatgacgcagatgcgggcgagaaagctaagaaacgtacgaaagtactgtattcgaagccaactcgcgtcaaatctgcgccaacctgt

SEQ ID NO: 1538 - DNA, 316 bp, Marmot picobirnavirus
  clone c220589_g1_i1_libraryA_2527 segment I1
gaagaaaggagaagcactatggagtgtttactaaaacatctgaaaagcctttcttcaaccacttcaaagttgcctttggagtatgttggagtagaggtagagaggaggtggaaatgtgaccaccaatcaaattgagtacaataagttactcgaaactcgcagaactaatttagctaatgaagctgaaactgcgaggtcaaacagggcgcgggaagccgaaaccactcgcgcaaatcttgcttctgaagccatacgagcccatcagaatgcgattggagaagccgcaaatgttattaattccaatcactatgcaaga

SEQ ID NO: 1539 - DNA, 316 bp, Rose spring dwarf-associated virus
  complete genome.3
atatttgcaaatcacggttttgtttcacggcaaaacccaaaacataagtaagatgggcctaactagccctgtggagaggctaccccttgaataagggtagtggttgcacgtcttggcccgacagattccggccgaccatgcttctgtggtatacactgcaccagtaagacctggtttaacaaaactttatcctacccacgatgagatgagtgggcggcgtaaactttgtggaattttacagagaaatctgtaattctgcacatgtttgcgagaggggtctccagtacccctttatagaaataagcgcttctttggg

SEQ ID NO: 1540 - DNA, 316 bp, Black queen cell virus
  isolate GS1, complete genome.2
ttttcttggcgtaattaaaaccaacaatgtgatcttgcttgcggaggcaaaaatttgcacagtataaaatctgcaagtagtgctattgttggaatcaccgtacctatttaggtttacgctccaagatcggtggatagcagccctatcaatatctaggagaactgtgctatgtttagaagattaggtagtctctaaacagaacaatttacctgctgaacaaattaatgaaaattatgaaaataaacaacaacttgttgaacagactgaaattaccacctttgaaaacgatttgatcgtgcttgaggatggaccgcaa

SEQ ID NO: 1541 - DNA, 317 bp, Sclerotinia sclerotiorum hypovirus 1
  strain SZ-150 hypothetical1
ggggtgatgggaaacttacgtttcgccaacgttaaggtactgtgattttgtacttacgactcagggtcgaccttaactggtttatactctgtcgagtttgggcaaatagctagactatctccccgggttttcaggagcccttagtgtctggctgacacggtctggaatctctttttacgtctcacttacggcaaatgtgaaatcgcctactgatttagtagaagaatgccggcccgtgtgcccgcattggcaaccgtgatgcccggttttccacttttgggatagggcttccctccgaaaacgggacgaaccaaaat

SEQ ID NO: 1542 - DNA, 317 bp, Beihai astro-like virus
  strain BHWZXX13371 putative protease,2
gtgggtgttgtcctgaccccatctgcccctacaacgcgccaacattactgtatgacatcaacaggaccaaaataaatgactatgttacgcgcgagggaaaaacacggctaccgacccaagcatatcgacctgacaaaccacctgctggattggaagtgaatcttttcttaaaaaatacaacccagtacaaaccctcttattgggatagtagggcctatgaaaaggcatgggaaaagttcacttacgccaatcctacagagctaacgcatgaagacatcgaatttgcaaagctcattctagctgatgagtatgactac

SEQ ID NO: 1543 - DNA, 319 bp, Permutotetraviridae sp.
  isolate H2_Rhizo_Litter_8_scaffold_8011
agccttaaggttgaacgggtactcctacatttaagcatgttttaatttacatgggcgggtttggaaccgtcgcagtaataatagacatgggtggatttgaaaccatcgtagtctcttgcttatctaagtagatacaggattgtggtctgtaccctagaggaatgccaccatgcggtaaaaccctactccgtgccccctgcacgaaaccaggatctgaggtctggttgggtgaggaactccaaagtgggaagtccagtagaggggatcattgcctctacatttttcagaagaaacaactcacaacaatacacatactaag

SEQ ID NO: 1544 - DNA, 319 bp, Hubei picorna-like virus 6
  strain WHBL73048 hypothetical protein 12
aactacgagggccgggtaagtgtcctcaacataggttaacaatggaaaagtttcctctataaataacgaatttccactgtggcattggttaccattcgagttcatcgctgtgtgtggaatgcgaagaggcttgtcactttatgaaccgatttttattggtagcgcagttgtatgtgagtaatgtggaaacatatataaaaattataacattgcagaaacaccaaatttaaatataaagcccacaagcgaggaagggctagttcctcgcaacctgtcagcgcccgaaaggacgttcgatattccaactctaattgacgat

SEQ ID NO: 1545 - DNA, 319 bp, Hubei tombus-like virus 38
  strain WHWG56034 hypothetical protein 1,1
tttgtcaattcatggggagttggggtcgagaattgattaaaataaagtcgtcccgacaccatgggaataaaaattatatatttaagcagatgcctatagagctatgcacaaaaacaccgagcctgtgaccattggcgatatatctgtggcgtcaccaccgccacaacaaaaacacgtcccgtgaccatgggaataaaaatttatattggtcggtatatccaaataccagcgtgatgtttcatgttcatgtatgttgggtgcggcacccggtggttggaggaatggaggaggttggttaacataattcccctatctgaca

SEQ ID NO: 1546 - DNA, 320 bp, Beauveria bassiana RNA virus 1
  complete genome.1
gttggaaaatagcccacaccccccccgccgggcgggctatttttccccggggcggcgggactagatggttgctagggccccgggcggtggtggtcgacgaccttgtggggtcgtcgacgttttcatttgtcttcatccatgcctgttctgatttccttccgttcgatttgttgttttctacagtcagcacctgttccttgctgactcgcctctcccatgggcgagttgtataaatacatgggacgtgagagaaccgtgctggatacctcacgtacacccaaagtcggtacggggatcgtaaccattacgctttttcctta

SEQ ID NO: 1547 - DNA, 320 bp, Fulton virus
  isolate CHABV1/NYC/2014/M026/0243 segment L1
agtagttaacaaacgcttcacaacaatcatcgattacttgctctctcaatatattgcaaaactgaaaaaataatatttctcagcaacctatttcaacgaatttgaaataactaataataaaaagcaagccaaagcaaagaaatctaaataattcacttctaaagcaaaggaacaaaagaaaagaaaagaaaacaaataaaggaagagaaacaaaacaagataaagtagataaacaggtagaaaaacagaacaaagaggcagaaagaggagagtaaaggctcttgtagagcattaccgcattaataaggcccacaaccaaa

SEQ ID NO: 1548 - DNA, 320 bp, Anopheles darlingi virus
  isolate MAC, complete genome.1
tacttcttttctttatttgctttttattcatactcatatatcatcgtattcaccatgcatgatgtggtgttgattagtgataggtccaatatcaatttgagaaataaggcggagatataaatatgaaaaatggaaataaaaaacataaaatgaaaaatgaataactccaaaataaaaatttatagatataagtttccaatcatgaggtatttaggcctcgctaacctcactattaagaagatttctaacctatttttaaaaacccactagtagcagattcaagtacccttctgtcaaacatcttgaaaagattattcgat

SEQ ID NO: 1549 - DNA, 320 bp, Beihai mollusks virus 2
  strain WZSLuoI86113 hypothetical protein 12
gtcagcttctcgaaagcccgccctgggggcttctaataccgggggccaccgcaactatgcgttggataagctaaaaatagttgcttgtgtttgattaacgcacaggttgtaggttctgaattacctgcaatttgtggacagctacacaagtagtcattgtatatagtcgttatttagcgacggggtgacgcccacaaaaatagcactgtcatgttgtcgattgatgcaccgctcatgatatttgtacaaattgcattacttatctacataaaattttggaggacggtaccctcaataaaaataccgaattgaacactact

SEQ ID NO: 1550 - DNA, 321 bp, Knope narna-like virus
  strain GudgCC_DN40323-16 RNA-dependent RNA1
agtatacactccactcgactaccaatgaaaggaggactattatgtcccaattcatttacactcagaacgaccttgtcgaagtcgatctgaatgaattcgatcaagggacgcttattcttgcgctccttgcaatcgaggcgcaggtgcctggcacacttgccagcatcttgcgtcaagccgcgttagctaacggggggtggagaatatcctccaacgtcagcaatccggggaagtccatcaatgatcagagggactttctcgcttggatgagaaaatttcaccaagccctgcaggaagagcaggcagaaaggagtgtctgag

SEQ ID NO: 1551 - DNA, 321 bp, Beihai picorna-like virus 7
  strain BHNXC41478 hypothetical protein2
tttctttcattatgtcctgggatgacattaaaagcatccagcctctcgtccatgtcgtgatgggttatacaagcgttatttttctacatctcttttattaaacgtgccttaacttcatggatcggttccaggtatattaacaagcctgtgggcgggtatttacccgcggccattatgattacagatgctcattcctgtatttcatataaaatcctaaaagacatgtcctgccagttttccgagtcacgaactggtttatgtatacactgactttctttttctatttctaatatcgcgcgatgcatatcgccttataaatat

SEQ ID NO: 1552 - DNA, 321 bp, Xinzhou dimarhabdovirus virus 1
  strain XZSJSC65538 hypothetical1
ctatgcccagtcctggaacgagagagttaatctatcaggatttgatagatcaaatgccctctccaacaatgttgaagggaccagacggtttaccaataaatctcagttggaaagatctgatgagtaatccggaaaataacttgagacaaatcatatccagcatcggaactgatgcatttttcaaactatcgttggaacaaaagatttttaaactgcttgatttggagcagatggcagttgacgttttagacttaatgtccgttgaatacatgtaatcggtgaaaccattgttgaaaaaaactaaaatgcaacacccctcac

SEQ ID NO: 1553 - DNA, 321 bp, Riboviria sp.
  isolate rtr167pic3 genomic sequence.1
cctataattatgataaccgcacgcaacgaacaagggcttttgatgaactgatttagttcggttcaccgacagcaagattttacgaaatggatttaacttaccacgcaaaccctcagcggaccgcaggtattttgatcgcactggactctttagatcataacgacaagattggatcatatccatgtagttaacgtagactacactaaagagattttaagcacggtaatgtaatagaaattacccgcctggtaaagcaccaaaccttcgtggcagttatggcctagtcacgattgcatcgagccatttactcaatgtatcaca

SEQ ID NO: 1554 - DNA, 321 bp, Wenzhou shrimp virus 4
  strain WZRBX43306 hypothetical protein 1 and2
ctggactaccacccgtctttcactgcagacgttaaacactgtgccgacctgagggttcaggatgtgcgagcgtgtgatcttgctcccagcgatattggacgtaaagtcgctggcagtactgctgcactcattaagcacataggtgggctatttagtccagagacgcctcgtggcagtcccacaaagtctcaccccgtcctcgggccgcagcgccactgggcagtgcgcgcagctgacatagcgatatgtcagtgtggcctagaaaagataccgcctgcacaaccaaactcaaacattcaaactcaagaccaaacccttagt

SEQ ID NO: 1555 - DNA, 321 bp, Shahe tombus-like virus 2
  strain SHWC01c3797 hypothetical protein 11
gggggcctagttgccacacatgggttcgacactgatacagctgccaatgtcagtggtctgccaattacggtgtgtgtgacatctgggaccccaaaggtgcgcaaggcattggccttgccaggattggggctgggcgtgcaatttggtgtgcacaaccagtccctcagaaatgtgctgcgcgggttggtggagagggtgttcaaggttgtcaaaaatggcaaattggtatctccacctaaacccgtggcgaacgttttcgataagttgagtggctttcgggcccggttgttacgtgtggtgggttcatgccgcccttggact

SEQ ID NO: 1556 - DNA, 322 bp, Mud crab dicistrovirus
  complete genome.1
gagctcggtacccggttttcactccgtgcacgattccattcactatctattgagcttcgatatcactctgttttgactctagttatactacactcaagcacactgatattatcgttctgatagtttgtggtttcattaaaagtgtatacatttatttatattaaatactgacactttgcgggttaaaatgtttaatactatttttcaatttgaggttgtatgagataattttgatttctatgttatcattgaataagggagtctggccctaattgatgtacgactcttctttggttgcgacccgagtcccttctacatcaag

SEQ ID NO: 1557 - DNA, 323 bp, Marmot picobirnavirus
  clone c70636_g1_i1_libraryA_2670 segment I1
ctattttctattttattctagtgttctttacctattccaaggtgaacaccaattgtagcagaaaatttacactagtagcacacttgcaagcggtgtggaattagtgtaaagagatagctacgcagcaacaaaacatccacaaatgtcacgtccaaggaggtgaaccctaagtgacaaacaaccagatacggtactgggagtatcgtgagacgggtcggcacaaccaagaaactgaacgcgagacaaatcggtccaatctagctcgggaagctgagacgaatcggtctaatctagcgagagaagctgagacgcgtcgctcaaac

SEQ ID NO: 1558 - DNA, 323 bp, Potato virus X
  mRNA for 12kDa nonstructural protein, 8kDa1
ctacttggaaacatcatttcgagttccgaggaaagtggcagatttgatagcaggctgtggtttcgatttcgagaccaattcacaagaagaagggcacttagagatcactggtatattcaaagggcccctacttgggaaggtgatagccattgacgaggagtctgagacaacactgtccaggcatggtgttgagtttgttaagccctgccaagtgactggacttgagttcaaagtagtcactattgtgtctgccgcgccaatagaggaaattggccagtccacagctttttacaacgccatcaccaggtcaaagggattgacat

SEQ ID NO: 1559 - DNA, 323 bp, Peach associated luteovirus
  isolate PaLV RP19, complete genome.1
atgggctctgtcacgcatccggttttgaatccccttttaccattttgggattaccggatatcgtggtgcgtacaggggccgtccctaggaagagtcgtagtgtaattagctacttgagtcagttttctttaggtttagacttccgggttcccaacccttctctgcacaatgcccttgttgctgtggaaaggagagtttttactgttgggaagggtactgatgttgtacttccattggtacctagtcatggcattttcaataagctcgcttatttccgtgactccataataaaagaagtagggttctgtaaggtacatagtcca

SEQ ID NO: 1560 - DNA, 323 bp, Xiamen fanray pesti-like virus
  strain XMTSYG10372 polyprotein gene,1
tgcaggccgcactagcaattttccaccactgagcgacctgaactcagaccaatttctgacgggactgtcagggcaacccctgtaaaacgaacccatacgggtcggggactaacgcctgaatggctacctgtctgggtttggcctgatcaaggaagtctagtggtgcagttagcatcaactattgccggttcggccttcgggcagaacgaccctcgggtaagacgtagggccagggcatttggatagcacaatgggtgcgggatgtgcagctggtaacagtttcccccaccgcgtttgcctgtgcataaggttcatgtgattcc

SEQ ID NO: 1561 - DNA, 323 bp, Beihai zhaovirus-like virus 2
  strain BHTSS12281 polyprotein gene,1
ctttctacaagaatatactgctattaagcttcctctcgggttttttactaaacgcgggaaagatggtatctctgcctaccataattcgactaccggcagaaatttgggttgcaggtaagaagaagaagaattgacaatcttctccttcgaacaataacctaatcaaaggtcacagaactagtgataaggagtggttgctttaaaatctacaccttaaaaccagttaacgtgagccgcattatttctaagggccactagatttggacttgggtctcgagaaataatttgactatcctaaatagctagatcgtgaaacggcaaat

SEQ ID NO: 1562 - DNA, 323 bp, Beihai picorna-like virus 124
  strain BHBJDX18598 hypothetical2
attgacattcttcatgaggtcttgccattttcctatctcctgccttttcttcttcatcctagacccttactcattaatatttactccatttaacatccctttggactttacagtgtattattgcactggcccttcaactagggtcaaacctgcctgatttgatatcatgctctaccacagggagagcaccctcgaacacgccatcagtagcagtagccgaagccggggttatacctcaatacctaggtgttgtatatgatcaagcttcggccgtagttacagtaggcgagcaaacaacaccaggaccccggggagaggctgca

SEQ ID NO: 1563 - DNA, 323 bp, Beihai picorna-like virus 31
  strain BHZC37445 hypothetical protein2
atacgtggccttgccttgggtgcaggctttaaacgcattcattcccgtgacgaggaattcaagtagtcgttacttaccgatgctgtcggtaataaagtaaaatcagctgcaacatagaaacataacggtgttccgatgtggaggtgaattgccacaatggagcatgacaggctatgattgtaaggactagggacccgagccctgaggctatttagtctccccgcattgtcctgtgggaaaaagttaccactcgcgtatgtcagtttgcacctgcgtacgatgattttgtaaatattgctaccgaaactaaacaaatttttagg

SEQ ID NO: 1564 - DNA, 323 bp, Wenzhou tombus-like virus 14
  strain WZFSL15005 hypothetical protein1
ccgatcgtttatcggtgagcagcggctcacgaaacctagatagaccaccagaacaacggtacccccccttctccaatcataagaccctcgctttttttctcgctctctaataatcgtatacggtctaggcaggtgaacgcaataaacgccctttatggcccgatcatagaggaggctttaaagcaagcagactcacatttcctgtggatatacagtagagtttgcagtggactcataaatccatgagttgttgatgcgccaacacaaaattttgccacaaaactgaaagagacagtaaacctcagtaccagctgtaaacttgg

SEQ ID NO: 1565 - DNA, 324 bp, Beihai picorna-like virus 34
  strain HOU158088 hypothetical protein1
gtcggcttctatggcccattcactggggccttgtaccggtggccaccgcaactatgcgttggataagctaaaaatagttattcacatttgattaacgcacgagttgctaggttctgcattacctagatcttgtggtcagctatgtgaatagtcatgtatatatttccattttttagtggaggggtgacgcccaataaaatagcactgttatgttgttgattgatgtaccacacataatattttataaattacattacttatctttatactttaaacgaggagagtgtcctcgataataacactgcgcctctcactaatttgaga

SEQ ID NO: 1566 - DNA, 324 bp, Hubei tetragnatha maxillosa virus 9
  strain arthropodmix140491
aaagcagtgaaaaagtttttggatctgtcttcctgggcatcacatgattggactctcattgagggtaacgtcgcggcctgggagcgctttcttgataatgtattcaagtgtgagtatgtttctgaaggtgtattggtgaaaagtggatttgatttaatttatcatggaaaaacgaaatggtctgaagacatatggaagagtatttctatcgatcttgaaatccgtccaaaatttaagttatatgaagagtgtatcaagcggtcgaggagtgttccggttaatcctagagctatttaccttgacacttgggaaattaatgaaaag

SEQ ID NO: 1567 - DNA, 325 bp, Lychnis mottle virus
  isolate Andong segment RNA2, complete1
ttgaaaagcaatctgcgaactttgttactatttgttctcctcagctagttattggacttatccaattctctccgttttcgcacttactagcactgggcttatccagatttccttttagtacactctcactttgcacttccagcacaacttaattttccttggtgcttttagtgcattcacaacgtttactttaagcaatctcgcttccccgatttgtcaagttaggggtttttgtttttcctttgttgtcacgcagcaatcttttactcttttccttttctttctaattctttgttatattctcatcccaccagcaatccaaaat

SEQ ID NO: 1568 - DNA, 325 bp, Soybean leaf-associated ssRNA virus 2
  isolate SaSSRV2-1, partial1
gaagttggaattgatgagggagacttcatcgttgcggctgcccttgcggggaatcttacgggtcgactgtccagggtcggttcgcatgggtgacctcatgtgggatttgatgttcacaccacatccagaaagcatcttggcgccacctcgtcgttagaggtaccttcacagggcggagcagaccgttacaagccaatgcaccagtggcgcctttgccgtaggtgtagataaatttacaaaagtggggggagtccaaccagtacatacactcccatcagtagtgatctgggtctggcatactgctgccactttccaattcttaatc

SEQ ID NO: 1569 - DNA, 326 bp, Black grass cryptic virus 2
  segment RNA 1.1
tacatggggagataaggctcactcgactctaagcgtcgaactctcatcaaagcctaatctcacctcgagcgccgatcttcacttctgaagctctcctcccgctcaccactcgcaatggatttacatcacaaagctcttcgcaaactcggaatcaaccccgattcagatcctggactcgtccacatctacaacgaaagccctccgccccgttttcaggtcatcctttctataaggagaattatcaatcagtcgtcattgacgcactcaaagaagtcctcccatcagaagacctagatatagtccttcacggctatttccgaagtccc

SEQ ID NO: 1570 - DNA, 326 bp, Cnidium vein yellowing virus 2
  isolate Yeongyang2 segment RNA2,1
ttgaaaagcaatctgcgaactttgttacgatttgttacttccagctagctattgggcttatccaatttctttcgtttccgcaatcactagcaccgggcttatccggatctctttttgttttctttgttacctctgttctgtgcgcgctttaattttcctttgcgttctttacagcagtcacaacgtttacattaagtaatctcgcttccccgatttgtcaagttaggggtttttgtttttcttttttcgtttcacagcaaacttttgctcttttccttttctttctgctcctctgctatatagttcttccccctttgatttctaac

SEQ ID NO: 1571 - DNA, 327 bp, Diatom colony associated dsRNA virus 16
  genomic RNA, complete1
tgattcaagcacaacatcgtagacacgatcttgtggttgaatcattttaataaaacttcgcgtaccaaaaacgcgtgtgcatacgcactaattctggctgtcgaacttcggatcggctgaaatttgtccgcacccctctgttggccgggggggtagacgtaaaaacttccagaggtgaccctacggggatcgtggctcttgcgttgtaagattcgcagtgtgttacaagcattcaacgactacacgccacgggagagaaggaatagtctggcctcatcgcgcacaaagtacgaggaagaattgggtatttccttcatcgagcagata

SEQ ID NO: 1572 - DNA, 327 bp, Unknown
  Description of Unknown: Mutant Zaire ebolavirusisolate Ebola4 sequence
gccaatctcccttccctccgaaagaggcgaataatggcagaggcttcaactgctgaactatagggtacgttacattaatgatacacttgtgagtatcagccctggataatataagtcaattaaacgaccaagataaaattgttcatatctcgctagcagcttaaaatataaatgtaataggagctatatctctgacagtattataatcaattgttattaagtaacccaaaccaaaagtgatgaagattaagaaaaacctacctcggctgagagagtgttttttcattaaccttcatcttgtaaacgttgagcaaaattgttaaaaat

SEQ ID NO: 1573 - DNA, 327 bp, Avocet picornavirus
  isolate MW13 genomic sequence.1
gggggccgcgcatctttacggagatgcgtggtccaccggcctgtttccccattcccctatccctttattttgcccatattgggcattaagatcggatttctcaggtttgacgcggattgggtaatggataaggtttggtgtattgcttaggtaatgttataccaagactgtagcagctagactagggggcacagtgtttatggactccattggatatcctgccctggtaggcactcactgtgtacgggaggttgggaagcctcgccctggccctagactgggtgatagcctggcgcttgctgagccagttgcttacagtataatcag

SEQ ID NO: 1574 - DNA, 328 bp, Picobirnavirus sp.
  Equ2 segment 1, complete sequence.1
atttgtataaatggcattctgatatgcagcgttggctgaagcgtaacctgctccagcgttagccattccagtagcataattggcttcgatttgtttacgataattactttcactggctttgtttgatcttttagtttcattttctatttaaatctcacaattctaaaagtcttagcatggagattcacatgcgacacaccaatgagtgaaattttagtacctatcaaacacaataggaactacatccagtgagatttcgtgtagcaagcgaagttaagcaggatgaacaattattatcagtgttaaaaacattcagaaaggaggaaag

SEQ ID NO: 1575 - DNA, 328 bp, Calhevirus 3
  clone V11B putative nonstructural protein,1
cgctcaaacttttacccaacaatttgaaggtcgtcgtaatgcttcgaatattgctcagtcattcgacagtggtaatcgtatccaagttaacagaaacgccaatgttgttccaacccaaacgttaagatgtgccccgagcattcctcaagatcagactgttttggccgatggtcgggttgagaggcgtgtccgggatgcggcccaacaaattgctattgtgaataacaacgttcaatttgagacttcatggaaatcgtttgtttatgtcctatgtcagaatgggtcacaacctataatcgatgcctccacttcgattgagactggtcgg

SEQ ID NO: 1576 - DNA, 328 bp, Wenzhou picorna-like virus 35
  strain WZRBX39547 hypothetical1
agggacactccctacacccaaattcataacacgcggcggattctcgtaaacccctgcatactcttagaggcttgtagcttaatagcgcgtttccttatgtgtgttatttccctttttctccccttccctttttaagttcttagtaatttattgctctgaactaaatctcgtggagattcattatcccttgtctatattatgcattgcgaagctttgataacaacagcgtcaaggtacgacgatcttgtaaatatggactttaaacttcatagctatatttatagcgagttgttgttggtagttatagtacgaatctaccagtaaaacc

SEQ ID NO: 1577 - DNA, 328 bp, Hubei orthoptera virus 1
  strain ZCM21319 hypothetical protein 1 and1
tatagagcgaatactctatatacaatatacagacctaagttggtggtattcatggtctctaaataaagcgaaaccactacgttgtgcgaataatcaaattgcggcagtgaacccagagaacggcaattctgaatattagcattcgatctcacctaagtttcagcttgtgtttcatggtgattaaataaagcgaaaaacaagcaaaatttttgttattaataagcaaccccgaagcatttttgagcgaaagaaagttattaatacgagtattatcgaagaaaccattttagctaatactccaggaaataacgtttatcgcccaacaaca

SEQ ID NO: 1578 - DNA, 328 bp, Hubei toti-like virus 12
  strain HC21305 hypothetical protein 1 and1
gagaaaggaaaaacgtgtctccctagccatggattgaattcacggaccatggttagtgtggtgaaggcgataccgtgagtcgatcctcaaccacccttcggctggtgaacctgtgggttggaagcccactgggggtggacaggtcgaagtgtaaaaaatccacaaaatttcctctaaaaatcaaagtgaagatgacgcattactcgaagtgatacgtaacagcgcagtgaaacagactcgggaaaactttgaacaggaggaggaattcactgtggcctcaggtgttgcctttttggcggcactgaatgcccgatattctgactccgta

SEQ ID NO: 1579 - DNA, 329 bp, Picornavirales N_OV_064
  putative non-structural protein2
gctgtgatgttcggcttcggccatgccaatcagcggctgtatttgatcactattgtacttaataaacatatcatacgagtatatttaacagcattacagtgtcagtgggaacagcttttcagctgtactgattcttaaccgcccatctttaagacttagcagtctaatagggtttgaatctgatatgtacgcctagcaccgggtcgaggcacccagctagatcgttttaccgccttcctaacactactacatcccagcctgccggctctacaggcaccgcatccgacaaaggtgccgaggaagttatttccgccgacaattttcaagtt

SEQ ID NO: 1580 - DNA, 330 bp, Wenzhou tombus-like virus 14
  strain WZFSL15005 hypothetical protein2
tggcgctacagaagttacttagcaacttgtcgtgatgttagaattggtaacatacaacgaccggatgttaaagtaaatgtcgactctgttggcagccataaattttctaaatactattcaatattccacagcaacaatttaccaaagtggttttattacaacaaatgtccttgcaacgaatatgaagccatattaaaacgacactgtgtttcaacatcatgcaacactactcatccacttttcctaagagcaaaggctgtatctaatgagttagcgacactagttcgggaagatttactcgattataggccattaactcataaagagctt

SEQ ID NO: 1581 - DNA, 330 bp, Changjiang tombus-like virus 19
  strain CJLX57318 hypothetical1
cttacttctgggggaaatacaacggatattttagcatgccgtttcgcgacagaagtttggcacagagtgccgttctagccgtaacgtctctgacaaacggtgaggtgcgcgtgagagcactagtggtgggcaaccgcgggtccgcaaggacttgtgtagcaaagcaacttcgacgtctcgtgtcaatctgcaatacggttgactaaagttgcgctaacccggctacacacattcataagtatctcccataacaccccggtatgaggccaattgcgataagagccaatatttttagcacgaaagcacggaggaaacggagagaaatccata

SEQ ID NO: 1582 - DNA, 331 bp, Atrpec virus 1
  replicative protein and structural protein genes,2
atccagagctaggagctctctctaatcgccgcaaggagggagcagcaaagtccggtctctggtcttcgttttagaagggcggagagtttcggctctactggctggtgtgtgccgcctaaaatccaggctaccagctcggcgcttttgaccagatccgtttaatcgagcgactgggagttagccaactcaatcgattgctacatcacaaaatcaagatttgtcccatattgggccgcaagaagacgttcagcagatcacgacattcgtcgacgattctaacatccagtcgtacgaaaagccacatatatcatctgtgactgcatggacaaaa

SEQ ID NO: 1583 - DNA, 331 bp, Lychnis mottle virus
  J genomic RNA, segment RNA2, complete1
ttgaaaagcaatctgcgaactttgttacttttttgttttccaaaactagctattgggcttatccaattctcgttacttgtttccctcactagcaccgagcttattcggattttacttggttctctttgttacttgtttttaaaaaacgcgctttaattttcctctgcgtttattacaaacagtcaccacgtttaccttaagcaatcttgcttccccgatttgtcaagttaggggattttgctttcaattttttgtctcacaacaaactcttctctttttcctctcctttttgttgctttgttatcttttgctccctcccctttattggacg

SEQ ID NO: 1584 - DNA, 331 bp, Sanxia picorna-like virus 1
  strain SXXX37713 hypothetical protein 11
cttcatcgggagcccgttgggctcctaggaggtacagccaagtgacaggctgttttgtgttttacgttgtctcaaaaacaagttctaagactatttatgcttttatgaaagcaccgtatgtgtcattgtatattttaaaaattataaaaatttcaagaaatgtgttactgatcagattagttaatcagaactatgggataatgttccccgtttttggccatttgaatgttatcaaaccccagaaggcctagatgtgcggactaggagtcactgtataaattcacagacataggacttgcccccctgtgtactagttaagcgatttattttt

SEQ ID NO: 1585 - DNA, 331 bp, Beihai noda-like virus 5
  strain BHZC36307 hypothetical protein 11
cccggatttagagcagatcgactacgccctattaatagggtgtcggttggtcttgctcatagccggagcggtgattctgtttaatttgcagcggaaagtgttgagaacgatctccatcaccaatcctgttcgacaatatgtaatcgagttgtctaagattaaacagtaccctgacgatctccgaaagaaatttcggaatctcaatgtcctcaagtatgctccgtctttgaacggtcatagccatggtgtgtgtgccgcattccgagctgcggccgatgataccatcaatacgtttatacaggaaaacggttttgaggtttactcggtcggc

SEQ ID NO: 1586 - DNA, 332 bp, Wenzhou qinvirus-like virus 2
  strain WZRBX42684 RNA-dependent RNA1
aaccactgtatcaacgtaggcatgacaactgactctacatgttgaggcaactccaattcgacgttacttatttctacctctatttttaaatcctgcagtatctcttcttcattcagtccagggggccgcaagtccaaagtgccgcgggcacggagatggccgccttgcctatggggaggagggatgcattgaaggcatagtccggagaatggtagtgccctgtcggtgtcggaggagacggagcaatcaggggaccgcgtctggcacaggcaactggccggggcgatcccgacagtagttcgctggcacaccgccgtactcgttaggtccaa

SEQ ID NO: 1587 - DNA, 332 bp, Wuhan Mosquito Virus 8
  strain XC2-7, complete genome.1
tcgaaaggtaacatcgagtacttataccatatacatgccattaactagaaagtaagtttaatagtaaggaccatccatgtaaccgcatttattagaatattaagacagttttaatccatatagtggttttattgtaaggttttgtagtacttagagagagttttaagaaagagttgaacgtggacgatagattttggatctcaccatacgagcttgcgcgaaccctaccccaactcacctcccctccccttcctatcctcaccctatcccccaatccgccttttggccttagcggattggtttaaaaacaacaagaggtggcccgagggcac

SEQ ID NO: 1588 - DNA, 332 bp, Jingmen picorna-like virus
  strain JMYJCC71227 hypothetical protein1
tgtgtttttgtcaagataattgttctgtgattaacagtgattgtggttcgtgtaatgcgacgcagtcaaatgctagttttgatgaagtgtatgagagagtggaaaacttatctcataagaagattgaagagtgtgtagatcaggctattgatcgagcttctaagcttcgtgattacaagcttaatgttcacaatggctcccgacgggaatcatctgatcctctctttatttcgccccattcgttgttatcgcttggggtatctaagtttgttgcgtttgagcagcatcacagtttcgcttcagttgagtctctgaagttgcttgctctgtct

SEQ ID NO: 1589 - DNA, 332 bp, Riboviria sp.
  isolate wpk049shi06 genomic sequence.1
gtgtataagagacagcatctctcgtttgcccgccaaaaattctggtagctagcgaccgcccctgtttcatcttcacccccgaagggtggacactaccggaggttcccacatacccacatatgggtatggactccgcctcttgtgtcaggaaaccggagagatcggctaaagctgccagcccttcggggtcattgggaacggtccttctcgacgattttactcggagaaggtccgcgcaccgtgccctcggagggcgtggtgcgtagcaatcgaggctcgtcctcctttacactctcattcaaattcgcatagatcaatacacgtataacaag

SEQ ID NO: 1590 - DNA, 332 bp, Hubei tombus-like virus 11
  strain WHSFII11317 hypothetical protein1
cggcaagtacatgcgattccttttcgccacgttagtggtttttgcttcactacccaaaacagaagtttttgttttggggccgtgctatgcacgaccattcccactaggtcaggaatggttgctatgacctaccatatagtagagagcggcacagggggggttttacggcaaagcccatatgttttgatgttttaaagaaatgtcagtaaaaaccgtgtgccccggaggttgtattggtgtatcacatagtgctctacatcggtacctcctcaggatggggcacggagttacaactccgcaatggcgacctacattaattggtcacaaacctt

SEQ ID NO: 1591 - DNA, 333 bp, Botrytis cinerea negative-stranded RNA virus 7
  isolate BCI7_Contig41R
cagggatgggagaggtgggtcttttttgaccgttcatgaggctctggccgtctacctcttccagccctgctgggtggatacagcatacctaattttgaaacatcaactggaatcttagaaaaaagtataagataaaaacggcctttatcatatcgagacctgtataccacccaaacaggtgacgatctacacgctactctatctaggaaatcatcaatcaattaggaccagaaattgttacctttaaacaaaaagtaataacgttaatcttgtatcgttcatctagcactggtataatcttataacaaactagcgaatacaggttaatttaca

SEQ ID NO: 1592 - DNA, 333 bp, Sifaka hepacivirus
  strain SifHV_H5-L75 polyprotein gene, partial1
agggtctgcgcctgtacactcccccacgggaataacaccagctccgagaaagtctgacgagtatcggtgttaaaaaggtggtgtgccctaccaacgtcataacgggtcgtgccgatgttccgaggcaaggactaccactgggtgcccgtgggaaaaaaggggcggatagggagctggggtgaaccgaacggccgtagacggccgaggtcacaggcatgggacgctttgagcctccgtagcctggttggatcttggattcccggtgtagctaccagtttactgcctgatagggtgcgggccagcgcatccgcccttctggttgttcataacgcc

SEQ ID NO: 1593 - DNA, 333 bp, Bundaberg bee virus 3
  isolate QLD-7 nonstructural polyprotein gene,1
tgtactaatgtgatcttgcaactagaagtaaataagagatgtaaaaattttagttgtattgctattagtataaagaggttggttatttaaccttacttccaggatgcctcgtgagcagccctcataatatccaggaaccatctctcgagcatacattataagtgacatgtatgctttaaattcgaaaaccttggtgcaggttcaaatgttaccaacgacaacgactcgaattaccatgaccagaaacaaattatttctttccaaaatcaaggtcaaacggtagctgatgaagctttgccaaagattgtagacttgccaaaatcatatttagac

SEQ ID NO: 1594 - DNA, 333 bp, Culex pipiens associated Tunisia virus
  strain Ayed, complete1
cctcattatagtaatattatatctcctgaatactatgtctattttgatggttatagtggaaaacctcatggtgaaactctttccgatttagatatatataaagcatatacaacatattacagatatattaaggaattttcagaattttgtaacaacgataatgattctaatactagcaatattattgaatatgagaataaggttagaaaatccacgaaggctaaggataaggatttaaaaaccaaaaactttcctgtgtttaatccagcattacaagaattgtataatacatacatcaaagataaatcggaagttaataaaaccaggttatta

SEQ ID NO: 1595 - DNA, 334 bp, Salem virus
  complete genome.3
ggcagttcatcgtgcttaggaccagtgctggatcactttctccaccttcgcccagcacccacaggcctcaccatcctatctctcattctcaaacagcaccagtagaccagtcccctcccacagaatctctccaataaagaccatccaaaatcagtctttccaccacatttgtctagtcctagaatttcaatattccattaagtatagtaattattattttaaaaaacgtagacctactaacctcttttaaaacagcactcaggacaagaaagaaaattaggagcaaagaccaaactcctgcgatctcatagatcaagttctaatttggtataca

SEQ ID NO: 1596 - DNA, 334 bp, Jingmen tick virus
  isolate JMTV/Pteropus lylei/Cambodia segment 3,1
tttaaatcactcttagactcactttacaaactcgaagataaacaggaaaagaaacaagtgagttgttcatgaacttgacatggctgccccagtggtggcggccttgagctgcgtattaggcgggctgaggcggtagcatctgctgctggcaccagaattggtgttaggaaactcaccatgagtagaaaccagttacatacagcgccatttccgtgagatactccccaccataggatggttatctctggaatatgtggcgcccatcgacatcgttctaaacgaagaagacagcccttaccaacttgacaggaaggtttacgagaaagccctagca

SEQ ID NO: 1597 - DNA, 334 bp, Ginkgo biloba picorna-like virus
  strain pt112-upi-2-NY genomic1
gtttccacgagtcatagctttatctttaattccttgcatatttattttatatcagcttaatggagttagaaagacttcatcaaccaacatatttccttctctgagaatagtgcggtaatcctccgtactatctttcagtgaatcacggctttcaaagattagaaatgctatgagaataatacttttatatatattatatcattaattataaataacaaagtttagatctaattttgtccccttgaggaaaagacagaacaataaagaccagtccacttaacccattggaaagctattttagaaatcccttggcggtggaactaattcgactaaa

SEQ ID NO: 1598 - DNA, 334 bp, Wuhan arthropod virus 1
  strain WHCC81862 hypothetical protein1
attgaattacgtacaacgttttaaattgcactgcgtataatacgtttagtgtaattggctgcgatcttattggtctgtataatacagttccaatacccaaagtcccccccgtgtagctcacggggttttattttccgtatatttacggctccccaaaatatttcgtatagcttacgaatgccaatatttttatttagtttaaatagatttttaatttggttttgttttatattatatatttgttttgctctctttgttagttttatcaacttatgtttacgttatattgtagtaagtgtcgcaggcccatttgggactgtatttgttaatttta

SEQ ID NO: 1599 - DNA, 334 bp, Wenzhou picorna-like virus 37
  strain WZSBei69579 hypothetical1
gttttgtagctttattcttcgtgtaatcgtagaagttgtgtgtagaatacttcaaatatttattgagatattcaatgcgcgatttccttctcctaaacaaactatacaatgaggtaagttgtatttttaatgttgggctccacccctatgtgaagtgtcgactcacatagtatttagacatacggttttcgttttgtagcaaattattggcgatcaagcaagagagacaaaccaattacctgtctcaaacaacgttgagttaggtggttggaacgaattggaagtatctactacacgtgagactgtagaaacttctattagtaactttaaccct

SEQ ID NO: 1600 - DNA, 334 bp, Marine RNA virus SOG
  complete genome.1
tacctgtgattccttgttgtctttgacaactaaatattcactaagagaatgatctcactagacattctcgaattgggcaagcgcctcaccatcgcttgttccacccgcgcccttgcactcatcaacgataggcagagcatcggaagctatcactcattgtttgacaattgggtgacgctcctgatgtttgtgctgcttatcaatgttgtagcgcaagttaccggacgactgcgcctcctaccgggccctcttcagcaatggattggctgcctggctgttagggttatcgtgttcgatcaactgtggagggtgttccactacttcctgccttgca

SEQ ID NO: 1601 - DNA, 335 bp, Aspergillus neoniger ourmia-like virus 1
  strain AnOlv1CBS 115656,1
ccgtttgttaacccagtttactctgggggacacgatcggaggggttcgccgggagactctctgagttcggcgtccaacgagtcgttctttggaaaggagcggcgagtggggcctgtggatttggccgtcacacacgttaacagaaacggcatcccgcaaccaactcgtaagtggtacctactcgaaggtagggggatcgcagtgtcctgttcgggggcttccccgggttcgcccggtgtcggagccacaagatctttgtggtcttacccgatcaacaccctctggcttgccggtacgcgtgtgccacaaacacaactgccattttatattttaaa

SEQ ID NO: 1602 - DNA, 335 bp, Hubei picorna-like virus 24
  strain WGML142000 hypothetical protein2
acttgctaaattacgtaaataagggagttataaagtagtttagtattgctatctctaggacactgttggctatttagtcttaatgatcaagatgcagtggagcagccctctaaaaatctaggtcacctccctagcgatagttaggatgatccacctacgtcgcgaaataccggatcgctacaattaaacaagatgaaacatctcctcaatctcaaaactatgaggaggcaccacagataacccagactgtggaacagcagcaagagttaattacttttgaccaggataaagctatagtggcagagcattatccgggagaaattaattatcctcgt

SEQ ID NO: 1603 - DNA, 335 bp, Hubei toti-like virus 2
  strain arthropodmix13450 hypothetical1
agccgtggtgggatcaggcattggggaggactgatgcagatgaaataacattattgaacacaattcctgtgcaaggtggttctcataggccaaatagcagtaataataagaataaagataaaaaaggagaatttgtgaaaactgtgaagctgaccaaagataatataccggtatggtgtagtataaggaacaataatataacggtggttgatagagctaaggctagatttgtactggtacatgtgtcgtatgaaaacacacagggagtgggtggttttggtgctcataggataggtgatgtggtcgttaatagtcatgccatacaacttgatgat

SEQ ID NO: 1604 - DNA, 335 bp, Hubei tombus-like virus 16
  strain spider58816 hypothetical protein1
tagtacccaacttgacccacgacagtaagacagtaacattcataccctacatcaatcaattcggctatgcaagtaacgtacactccagttgtgtttgcaatgaatatcgtgccttggtcgatcgccacatcacagatcgcacatacatcaagtttgatgccaaggcctggcgagaagccgcccgtcacacccttaaatactaccccgggggtgttagtaaatgtagttacacccagatcatcaatggctacacgggcgggaagaaggctatctacatcaaagccctagaaggactgcgcgcgcatggtttacgaccatccgataccagggtgcgc

SEQ ID NO: 1605 - DNA, 335 bp, Beihai levi-like virus 22
  strain BHJJX24892 hypothetical protein1
cttacggcctctaagaggaatatcctctccggctctcgccggtcacctatcttacgatggtgatatcccataaccagcaactataggagagaagatcatgaaagacaagagccttgcggagattgctgtatcttcgccatactttgacgaatacgacatcaatctctacgtcgcaatgctcgaaatctctcttggtctcatcgaacctacagacgctgtttgctcataccattatggttgtgtgctcgcagctgctgagttgttgggttttgactggtccaaccagttgaaacttctccccagtgtcccgtccgaccctcttcacggagggttcc

SEQ ID NO: 1606 - DNA, 335 bp, Beihai narna-like virus 14
  strain BHJP52694 RNA-dependent RNA1
ccggcggcacgcgtgagcgtgctgtcggtgaactcggtggcgttggtgtaaaagccacgtcccgtgcctcccgcctgtctgggctgactacccaggcaggtgtaaaaccagtttacaaatcgaatcaggattcggcgcttgctagccagggggctggagacatccagcccaaaggcaaggaaacgcggaatcctgctcgtgggaaaggcataaccccgagtgccaaacatcaacgtgtttcgcagctcagaggcttcgcaaccgtgatcaacttctggttgtctcagttgcggctccgctgtagcctgtcggaactccaggatcacttcacggaa

SEQ ID NO: 1607 - DNA, 336 bp, Culex mosquito virus 4
  isolate OTU50 RNA-dependent RNA polymerase1
agttaatatgaccggtcgaacatcaccctggaattggggaagaactaccgtacttaactaaccacactagtatataagatatatactatatacccgcatttacataggaagataaggattttaaactattttgtaagttgatgttaaggtttaatctgtaagctaacagccataacagtagaaataagtttgccatatgttgtgtttcatctctttgtttctggctcttcaatccttgggtgtactgctgatagatgctcctctttctacaatcgcgctaaactgcccctccccaatctaccttttggcctcggtggattggtttaaaaacaaact

SEQ ID NO: 1608 - DNA, 336 bp, Avian avulavirus 20
  isolate AAvV-20/great black headed4
aacatatgtatcatctcgctcatgctagccaggatattgtcataattatgtagattacatatgtttcaatcatatgtcactattgtagtgtaatcaattcgcgatggtactgaattatcatcttatattccctggacagatttccgaaattgacaacatactctcttacgccaataaacgaaaatatctgattacggtgcaatctgtattcaattctaaacagtatatacacaatcatacacaagatagcttatttggattgttttacaaattactcactcataattaagaaaaaatcaaagagaacttaccggtgggggcgaccccaaatcaata

SEQ ID NO: 1609 - DNA, 336 bp, Lasius neglectus virus 1
  isolate Cambridge-Lne, complete genome.2
ctccctttgggtttgagtcgtcaggctttgttctcgaagggtcttgatggtgattcgtcccatccccaatatagctgtgaaatgcttgagggccgagaccatgtagggaaaggtaagtcgagccgataagatttgacaacgctatatctgtgcattaaatatttatccagtaccaaaggaactcaagtgtaatgctgacctagacaagtcttaggacgcgctgcttgaatacattccttgtacgacactcggtggtgatcgtaatttggtcggagttaacctctggataatatttgcccgtgtcggagcggtgatatagtcggcggactaatttac

SEQ ID NO: 1610 - DNA, 336 bp, Ginkgoaceae-associated picorna-like virus 1
  strain pt112-dic-10,1
agattggctgtgggtagcgcataccacgttaataatatgtgctagcggaaatagaggtattttagagatgcgcacatgcttgactttgccggtgtgtctcgaacgcgcgtactactcacacgtttatggagaggagcgaagtccgaagtgcagtgattgagcatccgcacgggtttatagcttacaaaaacagaaagtgacgtcacgacacaagacgttaaatgtgaagagtttgatgggttaactttaaaccctactcctgagctacttggagtagcttcctttagcaatgaagctggtcaatgcgcggcaattaaggctacacagtactattcg

SEQ ID NO: 1611 - DNA, 336 bp, Wenzhou tombus-like virus 7
  strain WZFSL44625 hypothetical protein1
gaacaggagagtaacgaaggtggtacggccgctacagaggcgcctcaccttacaaaatctaagttcaagcagcaggcgggacggccaccccgcgaactaataactggtgttgatcacaacacaaacgctattattgagaggcaggactgcgtgtccatcgtacctgccttggcagccagtcagaagatccacgatatcggagttggaacttcggacaatgtagtcttgaggattaataacgctcggaagagaaaagtgaatactgatcctcttgactcatgtgtacaagcaacagagtccgactgtgagaatcctctaggattcaggcgggttcgg

SEQ ID NO: 1612 - DNA, 337 bp, Wenzhou Crab Virus 1
  strain RBX2 nucleocapsid (N), glycoprotein2
ctgtatgaagaatttacaaaaactgacaccatggagaaatcattcaaagagtgggaagagcttctcaaccagagacccccctcctcgacacctgcaccccttgtggagaccaggttctactgggagggtcttgtaatgggactgcttggagctgctctggtgattgcactctgtggaattctcaagcttgtgggatggaggtactgtcgcaatgtgattagtacacctctctagggctgagatgtccgggtgggtgggtgggatgggtccattgtggtgccttctcgtggcgggcctgtctagctaaaccacaactataaaaaaatgacaatacaca

SEQ ID NO: 1613 - DNA, 337 bp, Lactuca sativa marnavirus
  strain pt151-mar-12, complete genome.1
cccgatatttggcataaacctcgatgacacgtctagcgtaatggctacgctggatgcgacatgtaaggttgatcaaccgtttcaaaactaaagctgctagctgcgcacgcgcgtagtacattggcctctgctctttttgagcatgttcacctctggaccatgaatcacaagtgacagctttttaattgtttttgatcccgttgagataccccaagtctcgctccgctggacctctatctgagagtaccgagcaggtgaaagcccagctcagggaggtaaccctttattccaccgggcctcgtcccacaacagcacaagaatcagatacaaccgaaca

SEQ ID NO: 1614 - DNA, 337 bp, Bole hyalomma asiaticum virus 1
  strain tick109109 hypothetical1
gaattatagtaagattttctttgcgacttctccctgcgtttgtgattctacagtcatttctgctcaactttgttgctgcggccgctgtggacacaattttatttgcagagaatttttccttggtgaatgtttgcaattttatttagttttgtaatagactttgcttattattcattttcaggttactttgtttgtaatatttatcaattttgctctgataaagattacttgtcgcttatattttccttcttactatacactataattcttgttgctctttgtttattaagtttttgtggtgtaagttgttttatattcttattattagtgcttcatt

SEQ ID NO: 1615 - DNA, 337 bp, Wenling levi-like virus 4
  strain WLJQ103632 hypothetical protein1
cccctcccggggttctgcatccttatctattactagataggttgtcctttcggctcttcaaccacctaggaggcaatcatggaaactaatttaagatttttcttaaccatagatacatgcactctttcagaagatgaaagagagtatctaaaaattaagttaatcataaaatttcctgaatttagaaattactctttctgcaaccactttttaggcatgctacgattccgtgttttttctacgggtcgttacatgtacttaaaagaggctatacagaatttgtatcctgaattcgctgatcgcatccggtttgacttccaaacagacggggtctggc

SEQ ID NO: 1616 - DNA, 338 bp, Wilkie narna-like virus 1
  strain mosWSCP70929, complete genome.1
gcaggagtaaagttaagatcatccaagctacatacctaagggacgtagtcggtgaccgaaacaaggctttctacagactattgcctgttctgaaagccctgcaaagtgaaggagctatcgatcgatacctctaccacttaccgtccggagatctcctatcggagaagtaccgaggacagtctattaaagaccaaccttgggaccggccggaaaagttcttcacacctgatcaggctgaaggacttcgaagaatcttaacccgagatatcggattaaaaccccgagtcaccaatatcctgatctcgcgaccgcgagttcaattcaatcgaattcaggat

SEQ ID NO: 1617 - DNA, 338 bp, Sclerotinia homoeocarpa hypovirus 1
  strain ShHvLT11, complete1
gttctaattggaagttccctggtaaaggtgcacctgaaggcattcaagataaatccagttttggcgagggtgtattagagcctgccaaatccgaaggtttattttactatcatcctgatctgatttctactccagtgttcaaagtactaactgtaggcaaaggaacttgggctattggctaccttaaatgcgacgatggtttagcgccagtgcattacgatgcggacattgaatctttctatagcttttcatattctggttatacttggctcaacgattttaaatcgagtctgacatctggaactgagttgccaaaggacaatcctggacatgtgcaa

SEQ ID NO: 1618 - DNA, 339 bp, Lutzomyia reovirus 1
  isolate piaui segment hypothetical protein 11
tcttcctactacttcgtgtctgtcgtcgttcgtcggttctgttatttaacaatcttaattcatgtcattttcatcaaatctgtcgaatctttgttgtggagggaaggaggattctccacagagcaatcaatcagagaaaaatttcgatttcgtaaacgagatggatcaactgattcatggaccgacattaactcattgctagaaatcattgattatgaaacaggttcacaatatccaccagttccaaacatcccagatgcgttactacccccaaattcaacaactggcgtaaatacacataatgtcaatcatcttgttagtaatattctttgcactagt

SEQ ID NO: 1619 - DNA, 339 bp, Raspberry mottle virus
  isolate HCRL Glen Clova, complete genome.1
cgttttctccaaccatttcctgtttgtctgtcgtcgagccagccgcaaacagtttctatcaccgtcccctttatcttttcggtgaatccccttataccctaaccttcgttggttttccgcttttacccgcacgtccccttcttttcatcctttcggtgaaacccctgcaccctaactttcggtttttcgcctttttccttacgtcccctttcgcgccccccctttttctttcttctctttttctttggttttgttttgttctccccttcctgtcccctttcccactttctttttggtttctcggttcttcccccttcttctgttttggctttagccaat

SEQ ID NO: 1620 - DNA, 339 bp, Kotonkan virus
  complete genome.1
aaataagtaaataaattaaactaaataatctaacaaaacacacactaaagacttgtaaacaatgactatatactgacttctttattgttaatagttagagataagtgagacagtcgttaaagtatccaaaatttgaggtaatatgtcttaaggagaataatataatcaaagattgactaggcactgaccgtaaatacatcagaactaaagtacagggggggtgatggctgagatgaattgtaacttgcaggtatataaaaaagaaagaactataaaatgaattaaaacaactaaattaaaataaaggagaaaagtaaaagaaaaaaatcaacagacctc

SEQ ID NO: 1621 - DNA, 339 bp, Beihai picorna-like virus 22
  strain HOU126951 hypothetical protein2
cttccgctcgctctgccctcggatatggcataaaactgtcccccccgtcgatccatgggggtccggtgtatagttgaagagatccgtgttgtattggataccacgcaagtagaacggttttatcgttctttctaaacctacttgtacgaaggcttgcaacacgagggctgctcctattgaggagagcgtacccgcgcaccgagaaacaacggaccttctgggttgggtgacccaggagtgtatataatatcacctactaattcatatttcataaattttatagatagatatagtagaaatacacacccgtcacaggaagaaattgaagtggctactgcc

SEQ ID NO: 1622 - DNA, 340 bp, Rinkaby virus
  isolate OTU75 hypothetical protein, RNA-dependent RNA1
ttctatattacttttaaagtataaatggatattcgtaggtacttactccgggagttttcaaccctctcctggattgctatcgtaattttcattaacgtgattattctggttataaactatccctcaccacagtacataggcgaaggtcgcgttacttggcgtggtatagtttacacccagcaggatattacttttgtctgtcgcactagcaccaccgtttgcgtttttcaatcactcatttcactaatcattgctctgggttaccctttgtacccaattggaattgttgctgcttttatttatctgcttaacaagtggatttatttcctaaagcttcgtt

SEQ ID NO: 1623 - DNA, 340 bp, HVAC-associated RNA virus 1
  putative polyprotein genes, complete1
agcgcacaagaagagaacgataggagctttatgaaatcaccaagagttgacaaaaggtttcccaagtttggtactaggttttgtgagagctcaacaatgaaaaccgcactaggcacgttggggctggctatacgcaagtctttttgtcaactcttggtgatttcataaagctcctatcgttctcttcttgtgcgctttaagcaaaacccccttttcaggcttctccgccttctaattgagagagttataggctcctccccctactaatagtgaggaaattatatcgtatacttgggaccattgtaagtcgctaacgcttttgttagcccaggatacagcc

SEQ ID NO: 1624 - DNA, 341 bp, Diatom RNA virus 1
  Chiba4 genomic RNA, complete genome.1
tgattcaagcacacaacgaggggaccctctcgtctgtgtttggattaaataaaaacttcgccaagcaagcggtgagtgcatgtgcacatattccgggttcgatttcagtggtgttttaccatggattcgttctgtatttatccgagcctcttattgctttaggggggtttcgtacaagctgccggaggtgagtctacggattagtagtggcttttgcgttgtaaaattcgcagcaggtaataccctgtacactgaactctacgccactggaaagaagaatgagtcggccttaacacgtgcactaggtgaatacttacttagttcatcttcgagataataca

SEQ ID NO: 1625 - DNA, 342 bp, Picornavirales sp.
  isolate hbl169shi1 genomic sequence.2
tttcgtggatagcggagtttccagtctctttaaaatggtgacttcaggaaagactggaccgtgtgagtatggcagccacacggatagtgcccctcaaatgtttgatcatcatttgttgtatgggaggaaagatcctctgttggttgttgaactgcttgttatgttggacggaagcgggagggtcgagtgcgaacccaactaagctggagaaaacacagcatgccggtgatacgagcgcaagatttagtacaatttattcccgatccacaccatatttcccccgtattaatttacacatttacggcttgcgtggttaattccgcaacatagctggcaccagtc

SEQ ID NO: 1626 - DNA, 342 bp, Warroolaba Creek virus 2
  strain WRCV2 205660 hypothetical protein2
attaaaatgtgatcttgctttcttatacaattttgagaggttaataagaagaaagtagtgctattttaatatctaggttaactatttagttttactgttcaggatgcctagtggcagccccacaatatccaggacaccctctctgcttcttttatgattaggttgtcatttagaataagaaattaacctgctaactttcaaacaaatactagtaacattgaagatgaagaccggaaaattacttccgaacaaaaagagattgtacatttttctagtgaaggagttacccctagtaccactgcggtgcctgatatcgtcagcctttcaacagattatttgtca

SEQ ID NO: 1627 - DNA, 342 bp, Weivirus-like virus sp.
  isolate zftfla02pic3 genomic sequence.1
aatttaaacaagctcaaatgttttattccgacatttgggcttttaaaacaggaatagggttgcaacctatagcatagaagaagtgtatatggttacaagagaaatgttgctgtcgctattcgccgtgctttcttctatatttgagacagttacacgagttatttacgtcgactcgttgaaatttaacgcgtaacaaattttacaaataatgatcaaaattttataaaacaagaacaacaaacaatagatattattgaatctgaaggctccactcatgtagagaatcgagtggcgtctatatccacaagaacaacacaggttgctaaggctgtccctaatcaa

SEQ ID NO: 1628 - DNA, 343 bp, Magnaporthe oryzae chrysovirus 1
  A gene for hypothetical protein,1
gcaaaaaagagaataaagctttctacttttttgctccacacacgctcgactcagatggctgctcaaccaaacagaggcttcgactcattcttcgcagattactacgatcaggacggcttctcagatctcaccagcgtacgcgcgtccaccatccggccggcgaatatagtcgtagagccggaccacacggttttcgacacctaccgcacacacggcgggagccccccagactacacaaccagccaagtggcggacgcgttcggccagcgtgcttcagcaagcgacagggttcacggagtgaggagagacacagccgcttcagtgtacagcacgagaccgtacg

SEQ ID NO: 1629 - DNA, 343 bp, Solemoviridae sp.
  isolate ytb135shi04 genomic sequence.1
tccataggaagcccgcacagatcagtaaccatgccggtctcaggtaccccaccacgcatagcgtgaccaagtaatgctcacatgcaaaccgggccacaaccagcgagatggcaaacactatctcagcaaccttccagatcgctaggcaggccggtcctaaggactgggcccacgctagggtcactctgggttcaacaaagtctcgcacttggttaataccttccatctttttcttgacttgtggaacggacaagattagtacaaagaaagaaagtgatatcttcaagaatctaacactcacaaatatgtacggatcttatccgttccacaagtcaagaaaaag

SEQ ID NO: 1630 - DNA, 343 bp, Kelp fly virus
  complete genome.1
caaccctgctggaactggatcatcagaaaaaggagaagaattaacacctttcgtaccactagatcagatttcgtttatttcacgttatccccgaaaattgccctctggagtgtattctggtgctcttaagaagattaccattgaaactttctttcactggactactagtacaactaaggaacatctaggcttactattgtcactagcctcgtttgaaagttgcttgtgggaatcagaataccattcagctattacaaaggaaattgaaaatttattgtcaaaatttaaatatataagatcttttgtctatatctatgacagagaagttgtagcagactctgtc

SEQ ID NO: 1631 - DNA, 344 bp, Atrato Chu-like virus 5
  strain Psal 1739-1 segment L cRNA sequence.1
cgaaatcaattactttaaaacttatatgttgaatttataatgagtggtaaaagcgtagatctgagaaaagttcgccacatggcaactactggcaaccctgtgactaaggtcgatttggaaatgattatgaaggagttgatggagatcaagagagagatcaaatcaatacggcaactaatagagggtgcctcatccaagaggtcaattagtgaaccaactgctcctactttggccctctcagaagttccgtttcatatgagatttaaataagggaaatgaaaacaatcattcttttttaaaaaatcttgagtattttgttggtaaagcaggaatctttgtggaaa

SEQ ID NO: 1632 - DNA, 344 bp, Beihai tombus-like virus 12
  strain BHTSS17936 hypothetical protein1
gtaacgaggtcgcgctggtgtacccgccactcgccggagtccgaggagcagtacgctccctcttctccttttgcgggctctcctcgctgttcgcatggttaggttgctgggagtaccagcaaataccggtccatgtgcggctcgcctccgagctgcgatcgtctacggcgttcagcagtatatggacggcgcgaggatttgatgccacggcgctgcagttcagagtgcggcgcgcggaagctattgtgaagcgcaacgagtggaaagtaacaccgggtgtggtggaaacgacggtggccttcgtgtcggtcgaacaaccgagcgaggttgacgctgtccggttc

SEQ ID NO: 1633 - DNA, 345 bp, Wuhan insect virus 26
  strain WHZM10161 hypothetical protein 1 and1
ttagcaagaaactacgctcaagtgacagaggaaggtaggttcacgttggttaacaacagtatcgtaacagttaaacaaggagaatcttcttacaggtccgatctgtccctatcagcagacttccagtttgctggcagaaatgtaaggacaaacacgagtaacgtccacacggactactcggggtataacaacaagtacatcacgtcagatggagtcttcgatgctgggctcgcactgaccgagtttgcaagaactacagcggagagacgtctcgtaaaagaagacactttcagcttactctctcagcaaactcaagctgatagccacgaatctttcatttacaac

SEQ ID NO: 1634 - DNA, 346 bp, Marmot picobirnavirus
  clone c1336805_g1_i1_libraryA_2521 segment I1
aaacattgtagtttacaaatctgagaaaggagaaaccgcttatggttttacaagtaaacatccaatttacacacatccttagctcagccattagtggtctgagatttggagtaaatctggatgtagaaggaggtcgaatgtgacccgaaatcaaatagcttggtatgaagctagagaagggaagcgtcacaatgttgcaactgaacagctaggagttagagctcaaggtgagactgaacgatcaaatcgtgcgagagagttagaaactatacgacacaatgtgatcacagaaggtcaaacagatcgtactatccaggagcaacgcaggcataatataactggagag

SEQ ID NO: 1635 - DNA, 346 bp, Beihai picorna-like virus 105
  strain BHHK79817 hypothetical protein1
cgaggggcgaatcccctcgtattcttttcaccaattgctaggtatactgggactcttagaggcggtaccgaaactatatatcatgatagtgtgtgggactcttagaggcggcactagattttgatatgtattgcatttggcttttcttacttcttcaaatttgatgttgtgtttaacacctagttaggattgtgtctaagtaactacccgtcctttggataggctctgcttattgatacgtcaaacctgggatgcggattaagaattgtgcactctatggacatggctcgaacacgatttgttttgacgacactttgaacccacactttggtcctgcgaactatat

SEQ ID NO: 1636 - DNA, 347 bp, Beihai picorna-like virus 49
  strain BHZC36855 hypothetical protein2
ccctgtacactggtccaggcagatcggtgtgcagtaatgtaccgtctcagaggaccccatgtttggctcagaaagtacttgagccccagttgatatctgtcactggaagtacagataacttctatggaattgaccgaccatatgattttagtaggtttgaactgcagtcggaggtggttgatgatggaaccgttccaagcgtttctgaagaagaagttgtacaaacagtttcttttacggataacgctagaggcgtttctgtcgatctgccaacctcaacgaatgcagtggctgtcgtagataatacggacgatattggtttaggaacttttttgtcccgtccagtc

SEQ ID NO: 1637 - DNA, 347 bp, Beihai picorna-like virus 63
  strain BHTSS17878 hypothetical protein1
gttcctgatagaacaaaacagtttattatgaattcgtaacatccaggtcaacgagcaagaatagagtgaatgaaaagaccgattataaatgtaggtcgttcagtaattcattgatacattaaggtcgcctaacacccttgtatatctatttttcgttctagtaagttggagaaatgttatcatgaaattttaaatttgtctagttttaccgttgtagtgacggaaacccctgcagaaagaaatattttcagagaatacaggtatcaaacttattattttctatatctaaaaattttaaatattattattgcctaaattgaattgtctcaaccttaacttttaacaat

SEQ ID NO: 1638 - DNA, 347 bp, Changjiang tombus-like virus 7
  strain CJLX49320 hypothetical1
ccattgacgtcttgctcatggccttcgattgggcaagaccttggttgtaaccggccagtagggtgggtgtgcgcagcatccagcccgagtgtgcgggtgtgtggcgtgctggggagcttatgcttgtggagatttgcggtcatttagggacgaggacctaggtgcgagcaatatcctagagagccaacagcgatgacctaagagccataccttgatcactgaccagcacagggggattccaccgcggtgtggcgctcatcccggggaccggcccgtgtagagtgtatgaaccggataaaaccccacgaaccagccacaacctacgcaacacgatttgctacttcaac

SEQ ID NO: 1639 - DNA, 347 bp, Matryoshka RNA virus 1
  strain MaRNAV-1.2 RNA-dependent RNA1
accctagggatgttgtcggtgtggggtattcacccttttacgattaccttccggtactttcgacgaaagtacaaccggatgggagaagacttcgtctttacaccatcccggagggaaccatacttcaacgttctcatggcggtcaatccttaggaaagctgccatgggaggggggaggctccttctcgacgagaaggaggaaactccttagagttgtactcacaaagtccttaggcctaaggcctaccgttgtggatatcctattgacgaggtcaataaggcattttcaacggatagagggagccatcaatgccgtcgtcgacagcctagtgtgctctgaccctact

SEQ ID NO: 1640 - DNA, 348 bp, Diatom colony associated virus-Like RNA Segment 6
  genomic RNA,1
tgataaatgagtcaacgtcacaactggacacggaaacaagaaagcgattcgcaccctcgtctccagtgctggcatttacacgactcatagtatcagctgattgatcccttagctgcatactgaacgcgaaccgggcggtccgcagggtgccaaataaacgagtgggaacagctactttgaaaggttgttgtttggcgggctgcacttgaatccaatgtggtgatggttgggataatgtacactagtcactaatgcggagacgtatttaaaataatatcacagttgaaatgcgtaatatgttaagcatattaagtccgattgtaacctgaacaaggccaacttaatcgg

SEQ ID NO: 1641 - DNA, 349 bp, Chaq virus
  strain MARplus0002 hypothetical protein gene, complete1
ccttcttaagttcttaagaaagaataaaaactttccatccggttttggaataccaaaccactttctatcgttcgttgaaggtttttgtgttatcacaaaacagaacgactgctttttggaaatccaaaagctaacagcttagtcaagcatactaaaaacttggaataccagtttttgcctttaactactagatccatgcatttaaattgcacttataacatcttctacagtagttaccactgcgatttggacgattttacgatccgtgctagcagtgaagatacttggcaagtattaatttttaccacgctatttatcctgtccgcttttatattcattgtcttctata

SEQ ID NO: 1642 - DNA, 349 bp, Shahe picorna-like virus 9
  strain SHWC0209c12638 hypothetical2
gctatatacggggctaacatgtaaaaatgctaaacggcatgttagcttgaacggataaaccgaaagcgggttgtttaaccttactactcagagcttatcagagagatttagcaacttgtatgaattgggcgattcatgcatgtacatatagtctgctacaataacaaaagaaacaaattgtaatgaaatagaagggatttctaatcctactttcactgatttaacaggcactttggtctcggcaggtgttgcaccagtttgtgctgagattccttacacagtgccatcatcttttatttctacttctgaggtgtctcaggatttgagagactatttttccagaccaagg

SEQ ID NO: 1643 - DNA, 349 bp, Cylindrotheca closterium
  RNA virus 02, complete genome.2
tcactccggggactttaaatccggcccagttttaaatctgaaggtaagcaaaattaatgtatgcatatggataccaagtgtagtgtatatttgtatgttttgtaaactagcttaggctttgcatatttaagggtccgtactgcggaagagagatctgagttccccctgctcaactgtaaatatacccttccactatattgagcgtagttagtggattgtacatagttcgttcggtaataattgtaaaacttacattaacatctgtcgagatgctaaaaacgacgtcgaggtcggtactggaagccgacctttgattgaggtaaattccaacgcccatgacaaacctgaa

SEQ ID NO: 1644 - DNA, 350 bp, Soybean cyst nematode virus 5
  strain ScV5 polyprotein gene,1
aacaacgctaaaccctcaaacttttaatcaccacaaacaaacgaaacaatggcttcgaccaaagttttctgtgtgcgtgacgaggacgcgattgcggaacgtgctgccttgctgagcgacgtaggtctcaaaaccttcatgtcggcaggagcgcgcaacgctgagagggccgccgagtgccaatcggagtgcatttaccgtccaacggtcgagcctctgactgggctgtgctcaggcggtgatggtcacagtggcacccaccctaagcccactgaccaaggagaagaggcggcaaacatcgtcgtcgggagtgacccttctggcgggagtacttgcctttatggcatggc

SEQ ID NO: 1645 - DNA, 350 bp, Beihai picorna-like virus 8
  strain BHNXC41454 hypothetical protein2
ggaacttcagaccgtcatgtcttaaaactgtctggaggcctgcctaggtcgtcattactccaaggagaaaccaaaaggcgtgctatgtactggatacctgatccttcttggtttgtggttttgccaggagtgtcttgcttgcatagttgatggactgtagtggtcgaggctgtttagcttcaggtgtaaagtcgccatcagtaaaccactgaaggcagttgtgctgatccgcgcagctgaccttgagaaaaataaattggattactaacttatatacacttttcaaagagtcctgggtctctcaatacctagggaacacggacggattcttctttgacccctgtctcgag

SEQ ID NO: 1646 - DNA, 350 bp, Wenzhou picorna-like virus 52
  strain beimix75583 hypothetical1
gtcgtaaaatattttctacgttaaatttctttcttcagatttcaaacgttgctgaagacaaaaccagagtttgcacatactcttaaatcaatgtacatgctcccttaattgatccggagcttgataggattttgtggtcctattctcaaatactgtaagaacggcaacagtacacaatatgttacattatcatttaggtcagaaataccgagttgattgaagcagatatacttctgtgaaatccactattagcatttagtggtcatgtctttcaagaagacacaggcttaggtccttggcgtgccaaaaacaacagcctatattaaatagttgtttgaacgtcgtaaaca

SEQ ID NO: 1647 - DNA, 350 bp, Changjiang tombus-like virus 10
  strain CJLX21891 hypothetical1
gttatccttaaccacagcactttgtgacccttcagggggatatacctgtatcattcatccacgccgtcgaaagagggcagcacgtatctgcacagaaggccagccgtccggtggtggcgggtgcatgattacaaggccagcgggaatccgccctttgcggtaccgctggctggcaggtgcatgagcaccggtatgtgctgaccggggggccccattggggcccccccggttcattgatttgggatggcagggccccaacgcctgctccggtcacccatggtcggttatttccaatgggagctttggaaatttgggctcaccaaaccatttaacaaccatgaacagtacac

SEQ ID NO: 1648 - DNA, 351 bp, Melon necrotic spot virus
  strain SCM43651 hypothetical protein 1,1
aacaaactaatcctcggggaagaagtaaagaacgtggtgacagcgggggaaaacaaaagaactcaatggggcgaaagatagccaatgacgctatcgctgaatcgaagcaaggagttatgggtgctagcacatacattgctgataaaattaaggtgaccattaactttaatttttagtgtatggcctgttaccgttgtgactccagccccggggattactccggagcattgcttatattatttatctcatttgttttcttttatattacctcgcttagcccgcaaggaaatacttacgttcatcacttcgataattcttccgtcaaaacacaatacgttggcatctctacaa

SEQ ID NO: 1649 - DNA, 351 bp, Caledonia beadlet anemone dicistro-like virus 2
  isolate I38,2
aacaagttaagatgtgatcttcaaaattgaaataattttctcaggctaaattcattttgtatgctatcttaactcttggtgttacctatttaggtttacttccaggatgcaccgaggcagcccctcataaatccaggaaccctgagtgcttgatatttgtttaggtagacgatatcgataagaaatttacctgctgactttcaaaaaacaaactcaaactcaaatccagaaattgctaattctagcatctcgactgaacaacaagaaattgtacatttcgcaagcgaaggagttactcccacgactagcgcagtccctgatattgttaatctttcaacagattatttggat

SEQ ID NO: 1650 - DNA, 351 bp, Renmark bee virus 3
  isolate SA-4 nonstructural polyprotein and2
tgcactcctcaccacttgggcttaactcacaagtccttgcttcggcagaaaccaaaagagagtaaatatatgtagtcactgtgcgtaatgcgtttaattgtttgtcgcttcatgttgcgtaagaatggatgtatatttgttaatccgccagggcgatccctaaagtctcttttcagagaaaggttcggctgattcctagagtgcgtaaacaactcgctcccttatagttgtaaaggagggttttaaaaatcaactgcccaaaatcaaaataatccaaattggcgagatgagttccaagatctcctcgacctctcaaatgaaaaacttggcaaattagtgcgggatacgtgg

SEQ ID NO: 1651 - DNA, 351 bp, Beihai picorna-like virus 5
  strain BHNXC41415 hypothetical protein2
aaggtccctctctccggttgactcctggaggtgcttgtatatattaagctaaagagtcatgtgtatatatggttacggccactgcatgttattttgtgtcttgttgactgcttgtggaacgctttgtacataaggaattgatgggtatttacccatggtctcgccaaccaaccacaacgcaccgtgcatttatggagttaatacgctcctatgtaacgttttaaatgtattactacgcttgaaaataataacaatgtaaattcatatactttaactgtagataatcataaagagtcgatcgttgcgttccatcacgctgatgccgcctggactacgaaggtggattctatt

SEQ ID NO: 1652 - DNA, 352 bp, Picornavirales Q_sR_OV_036
  putative non-structural protein1
gaattttggaagtaagatcgattttaaactttgtagcctccgcaaagcaaaataagagaagtacccacttgttgcaaccgcaagttgaaataagagtagccatttttgtagcataccgcaaattgaaataagagtagccttttctcaaatacttatttaaaccataaagattgacaaatataaaggattgctgatactgttgtatctataccttcctcaaataacactcctattgtcttcaattgccctcctgaatacgttgagagttttcgctcaattcttttcgtaattagattacctataaccattcttagagttatcaagagatcaatagacgaaatactcgctgaat

SEQ ID NO: 1653 - DNA, 353 bp, Solenopsis invicta virus 7
  isolate Formosa, complete genome.2
atcttccgtatgatccctcacatgacggaagaatccatagcaacggtaacgttgttggaggaattcttgagggcgctggaaaaggaatcgagaaagagaaggagcaagagtggacacgagaagagcgcaaacaacatgagcagtggcagtctggagagtcatctaaagaacgtggatggcgctctggagaaaacgccgctgatcggcgctctcgtgagagagagaatgaacttgatcgtcaatggcgcaaatggcaatctgaatatgaaaatggacagatagccgagcgccagagacaaaatcaaggatggcaatccggcgagaaccaaaaaggaagggagtgggaatctcga

SEQ ID NO: 1654 - DNA, 354 bp, Sanxia picorna-like virus 1
  strain SXXX37713 hypothetical protein 12
caaagcaacatggataccaatgtgtaggaagcattaggcttatagctttgtttaataccggcatcccaaagccaatcttaagataaaaatgagtgtattatcttattatatacaacacttactaattttttaaatttatatttatcagagctgggatatgtttcccagtattgcagaaatgcaattattatagaacataatggtgtttttaattatagtaaatttgtggagcaatccgggaatttaatatctttaaatacaccattagatacaaacgtgcagcaattcacgctaggcgcccctataaacagtacggaagtaccgggagaatcggatgagacttttcacattgct

SEQ ID NO: 1655 - DNA, 354 bp, Wenling picorna-like virus 5
  strain WLJQ102796 hypothetical protein2
gattacatgttttgtgatttatgtgtttgtttaagtgttagtttatgtgttttacgcaccatggctaggggtcacaacaatgggattagagttgtgtcagcagagcccggtccatgagtgtaagcaaccagggttactttggccctatactagtgttcgggttgttaaatataggatactagatcccgagtccttttttaagagtaactcgccttactacgggactttaatgaatgagttgccgatcatcataaaactaaggaggattattaccacgacaatgtgcaagaaacttaccgtttcttgaacaacaatcaaacaacggaagcgacgcgcttagaagtacagacaccc

SEQ ID NO: 1656 - DNA, 355 bp, Culex Bunyavirus 1
  strain CBunV1/Kern, complete genome.1
agacagagtcttccatggtcttactttggcgccttgagatacttttaccttttcataggcactttaatagttgtaccactgcttgtaatggtgtataaggcaataaaaagtttgctcaacttcatgttcaaaaggaaaagagttagggcctgtcatccaaagaaagtttaggctagataactaggtgcgtggcttgattaacacaaagcagccttgagttgataagagtttaattttgatagacaaaggtgaaaactgaattattggtttctatcaaaattactttctttgcttcaaggtggggctgggaattttccctcctcctgtaaaacccttaaaggccaaagaaaacgcc

SEQ ID NO: 1657 - DNA, 356 bp, Picornavirales sp.
  isolate tou80rnanc1 genomic sequence.1
cgctaaacaagttttccgtgcgttcgactaaacgtcggctgggtggacctattaacgataagatcggcgctcatgtgctgattactgataatctcccggataaattaccacttaagtattttgatggtattaatctctcaggaaagaacatccctgggaagtattcatatattaaggtacctacgcgtgcgaatccagagatagctgaccaagagaaagactcacctgaagcattgaaacatcaagatgcgggcggacctgaccagacaactgtcgaccaatcagcacaatcagcaataacaactcagagagatgagtcagcacatgaagtccccgtagttaataaggattctggc

SEQ ID NO: 1658 - DNA, 356 bp, Picornavirales sp.
  isolate ybw202shi06 genomic sequence.2
tcctttcatttaaaactcattaatttcattatggctcaatggaggatgtgaatctctcatatatggccgcacgtaccatatatgttagataagcactatgaacttagtgttttagatcatcttcacttgtataattattttattatactaaatttgagtcatgttagatttgttgaattatcaaaatagtaaatgtagtgtattctctccaaaggagaactttagtgctatttctttgtaatatccatttattctaggaaagttccgaaagaattgtaacaatagatatacagagtgttttgatatgaaaacaaatttgacaaccccttgtaaccaacagtattattttaggcttt

SEQ ID NO: 1659 - DNA, 357 bp, Eimeria brunetti RNA virus 1
  complete genome.1
tgaatgaaaagcgcgagcgcggcgtcgtgtcgaccgcttttctgatcctgctggttgctggaccaatacccatcagtagcaggcagggggagtgcctcgagtcacagttaacgtcggctgtgtcacgacggtcagctcctagtaaattgcataggagttcaccctgtgtattcgccctgcggggtggtacactggaaccacggtcccttagcccagggatagcgccgtggggggatcgcatgagggcgtagttagggttctgctattcagacgtacgcacattaagtgtagtaggccgtcatgtggtggtaagcctaccgctggtaccggggtacagcgcctacgacctacaagctc

SEQ ID NO: 1660 - DNA, 357 bp, Unknown
  Description of Unknown: Hepatitis E virus ORF1, ORF2, ORF3,complete cds's;1
tcttttgatgccagtcagagcactatggccgccggccctttcagtctcacctatgccgcctctgctgctgggctggaggtgcgctatgtcgctgccgggcttgaccaccgggcggtttttgcccccggcgtttcaccccggtcagcccctggcgaggtcaccgccttttgttctgccctatacaggtttaatcgcgaggcccagcgcctttcgctcaccggtaatttttggttccatcctgaggggctccttggcccctttgccccgttttcccccgggcatgtttgggagtcggctaatccattctgtggagagagcacactttacacccgcacttggtcggaggttgatgctgtt

SEQ ID NO: 1661 - DNA, 357 bp, Apis rhabdovirus 1
  strain Apis/USA/A, complete genome.2
tccaccctgatctccgaaactccccaagtcagcagccggacatcaaagcaaccagagcaaccccaaaccactcagaaccaacctcactataaaaaatacatatcttttctttctcaacaataacttaagctccgcagctctcaatctctcaaccagaagaagcagctccatctgaccctagtcaacacactccgatttagcaatcaactacacccaaactcaaacaccccgttcaaacagtcctgcaaccgctgcacgcaccaccggaacacatagataggtgcatacttctgcactttagaaaggttaaaaacgctccaagtcaaagaagtcccttaaaacttaatagaagccaaa

SEQ ID NO: 1662 - DNA, 357 bp, Hubei picorna-like virus 81
  strain CJLX25805 hypothetical protein 11
tgtagggcatcatttcggattgtgggttgatgtcctgggcaacggaagccttgagatggtacgaagcatttttggaacatatgaaccctgacatggtgatattgtcgtttgacttcggttaggaccctcatgcggaccagtgaagaaaattcctattggaatgtcctgtacgcccgtctgagaccgtttaccgtggaatgaaagcgaagacttatcatgtaaagattgtgtggaaagaatttgtgggtaacatggttcattagagctccttataaaaaacaaaatgggtttcgacttcccaaacaaaaacataagaaaaataaaatgtagtgtaattagtaatttgcccctaaagag

SEQ ID NO: 1663 - DNA, 357 bp, Picornavirales sp.
  isolate H4_Bulk_46_scaffold_10 hypothetical1R
ggccggccgggtagccacaagctacccgacccatgctttaggagtcctttaggtgtattgtatatattaaacttcttgtatattattgtacttatattcgggacggtgatgtcccactcttgtcaacaggcgttgagagaactccattgcggcgttccttgcactgtgaggctgcagactgcacattgcgttgatctttctgtagtagcaaggttactggatgtagtgccagttggaggaaatacctttctagcgtccctaggaaatgttcccccctgggcccaatttggcccgagtctgataggtaattcagaccccttctcgtgtttgagcgtcacgcgagaattcagggaacag

SEQ ID NO: 1664 - DNA, 357 bp, Solenopsis invicta virus 5
  isolate formosa, complete genome.2
atgtgatattcaagaggcattctttcatggtcacccatcacataaggaaatttccaataaacttgtgtgtaaggcttgaaagaatggtcggagtactctatttagagtgaggagctccgctggcagccccagcaaatcctctattggataggaacagctatatcgggtagctatagcagtcgtacagtaacatgtgcggcgttccgaaataccatacctggcgattcaaacaaagaaaacaatactaccaacgtacataacacggagctcgcgtcgagttcccaagaaaacagtgtcgaaacggaacagattacaacctttcatgatgtggaaactccaaataggatcgataccccc

SEQ ID NO: 1665 - DNA, 357 bp, Gamboa mosquito virus
  strain GW polyprotein gene, complete cds.1
cagctctagcggtctgttattttgtttaaactttttgtttgcaaactagactttgtcgaaccccttgcttacaaaccattaaacaatttatatctcacttactgcccatattagagttagcactttgttaacttacaaagttaaatagacagttgtctatcgcttcgcaaggagcactcaccctctccctcaatcactactaagtgtgcgagagagatccaaatttttaacatttttataacttggttttgtttcatcagtctcacaatattttctgtccgacaaatccaagttattcaaatttataagtttttaaatttttatttttggaaagttgtctgacttcccccggaagcc

SEQ ID NO: 1666 - DNA, 357 bp, Beihai picorna-like virus 120
  strain BHSC167783 hypothetical1
cagggatcgaaaccctgtatatatcttagagagtttagcagtcgcgcattgtaaccaagacgggccggccctcaccaacacgtagtgattctgcggtttggtgttcggtgcagtgtaagtccctacccttgtttatcttgtgatcagagtgtaagtctactcgaccaaagaactcggtttttacataagtttctattccgaatccaaagaaactcaggagtgatcgggctccacgtacagttgcgacactgtgcgtggcgtcgtcaggtagtgtaccttgaaggttatcctagaataatttgcaaatttaggacatttgcacgtctcccaggacgttaaacggttcgaaaagacagt

SEQ ID NO: 1667 - DNA, 357 bp, Changjiang tombus-like virus 5
  strain CJLX42586 hypothetical2
gggtgcctagcgaaggtgtcgggtgtggagacaaacacccccattggtcatgtggagatcgatggtgacgttttgagatggcgtcagacaaataagctggggaggtcaaaagtgcgtgggttgtggacggtgactggcgccgggttccacaacagatatggcgtgcacaatgcgagtaaagccaacttgctgcgaggtgtttatgagagggtgctctaccgtgtggtaggtggagtagcacgcctccctccaagaccctcgggggatgtgttcaatgaacgcttgtccaagtttcgctctgccttggtggcggaaatccctgaaagtctccccataacgcgtgcccactttgtggac

SEQ ID NO: 1668 - DNA, 358 bp, Mapuera virus
  complete genome.2
taatcagacatgatcatatgccttgcaacagctgtctgctattctaaaagtttcagtaaccaccgatccaattaactggcacccatttaatccatctatttgcctttcttgactcccagctgcacactcctccgggcaactctgccatcttctggcttctatagactcacgatctgcaatccggcccccgccttcctgcatctggcattccaaagtgaggctcgatctcagcatttagaaaaaaccatataggcccgactggcaccacccacccccccgacccaaccgccagccgggaacacaaccccacaccccacagcaagcccacacccgcccaccagcggagacccagcggaga

SEQ ID NO: 1669 - DNA, 358 bp, Darwin bee virus 1
  isolate NT-5 nonstructural polyprotein gene,1
acgtgattatgtgatcttgctatactgaataaataagtgatgtaaaattagtatagtattgctataatcataagaaggtggactatttagtcttacttccaggatgccttgaaagcagccctttcgaaatccaggaaccatcactcgattatacgtcataagtgtcgcgtataatttaaaaactgcacttgccgaaacgaatacgaacgaaaaccctggtacaggtttaaatgttaccaacgatgatgattcgagatataacgaggtaaaacaagttatatcttttaataatcaaggccagacagttgctgatgatgctctagctaaacaaaaagatttgcctcagtcttatttagat

SEQ ID NO: 1670 - DNA, 359 bp, Blueberry necrotic ring blotch virus
  segment RNA4, complete1
cacaaatctgaaccactcacgctggtttgtcacctgtattattcaggtttactaccttcactacttcttcactaccatgcgcttaattgcgtgactacatgcgcttcggcgtgactagcgcttcgtgcgccttccactactgtattatgtaatatatccgtttctttcttcctcagtcaattgtgtcggattgtgattattaccaatcaaaaagcgcggttcctactacttcaccgtgtgttattggtactttttggttaataattacattctgatcaattgacactccctaaaatccaaattctttccctaaaatccaaaagtgagtgctattatacgtattagtactttataatatt

SEQ ID NO: 1671 - DNA, 359 bp, Picornavirales sp.
  isolate bfb201hbp01 genomic sequence.1
tgaatactgcagttaatacagctaggccgacgtgaagtatcataggcggagaagggaaaatccggttatgtaacgtcgttaatataaactcgtgcgttgtgtgtttggcgacatactcaacttaaaacaatgttctttggatggagttcagctaacccctgttaatttcatcgttctggagtagtttaaagtagtgaagacgagtgtatgtgaggattccagcgatggatgaaagtaaggctcccgaaaggtgcaacctcatatgtctcgttgtagtagcgaaatttatgaaactcaaggaatggaccgttgggtaaaaacactcaaaactctctcttttcttatttggtacactacat

SEQ ID NO: 1672 - DNA, 359 bp, Guangxi changeable lizard picornavirus 2
  strain GXSXC1285591
cacaaattaccttttccccctctactgattggttcactcgttatgactaggactggatgtttacgttacggaatttgcgatttcactgagtttggccagctcggaatggcaattttggcgaatgtgggttattgtgaaacgcaccgaatatactcccgaaaggaggttagtaggggcgtgtagcaccacatagctgagaccacatgcgacagagcagataggagccaggaaatacgcctcatttgttgacaagtgtaccggctctgaatgtgtggggaggggtccccacatgggttctgtactgcctgatagggttgcggctgatcagttgcaatgtggtataatcagttggaattcac

SEQ ID NO: 1673 - DNA, 359 bp, Hubei picorna-like virus 1
  strain WHSF7464 hypothetical protein 12
gtggggcacacagtagttatagtagttatatgccggacccggctggggggccctgtcactccttgacaggcagtgaacgtcactggcttatgcaaaatagcggatgcctgttggaaacatgggctgaaaacacaagaaccaacttagtattggataccactttgtatataattatgaatatactgtatatatacaagtaggcttgctaagtttagacacgtccctcgtggcgatgccatttttatggttgtatggtcgtacattccagtatattcctttctgtggtgataatcatatatcatagggagtagaacttgattgctacaaattcaaattcacagagtagcccactctataac

SEQ ID NO: 1674 - DNA, 360 bp, Firefly squid flavivirus
  isolate Wat_scin_armtip_sample_41
gttgacagctgcacaatacaattcctaccttgaaggtacgcgtgttctcggacacaaggcgtgcaagtggaccttcggtctgcgaaccccaaagcgttcaaaaacgttcacatcgttccgatctgctgtacaattcgctcttccgtatctaccactctattgatttagtatcactccttgctgttagcctttcaagaaatttagatttactcttacctctttgcacctccactgctccgcagttgtaggtgcactctctcaattcgtagttccgtcttccctaaagatattctacccgcggctcgtttacacctcgtaaaccccgttacgctccttgccacctccctcaaagaggcagtt

SEQ ID NO: 1675 - DNA, 360 bp, Sanxia picorna-like virus 2
  strain SXXX37883 hypothetical protein 12
catactgccatagcggaggaaggttgcgcgtgagatatattggatacttatggtttaatagcttgtatctcacaatttattggtggaattaaccatttcatcaaccagtatcatataatgagtgtaatatgatacttaaacgcacttactaatttaaatatttacacatcagagtgggagtatgttctcccacatgcgcataacagcattaatcaagatagtatactatatgcaagtatatcatgtatatcagagcattcatcggtagaatttaatgatacaaaagtcgaggatacgaatgtgttgcgttacgcattgggagaaaccagttataaaactgaggttcctggtaatcgtgac

SEQ ID NO: 1676 - DNA, 360 bp, Beihai levi-like virus 15
  strain HOU158632 hypothetical protein1
ccttgggggtcatctggcaatgccagggttcggatctgtagaaatacagactatggtaatccataggaaattaatctccggagtctgtctggatactgctgagacagatatgtcttaagtaggttaagtgtgctttgccagcacacgtgtcattgtgtgatatacgtgtatagtaacgttggctaacgttaccgtgctagttgttatatgatggcgcccgtgccgacacgagtacattctagtagttcagtatgcttagcatgctgttctgctggtctgtacagatgtcatacacacaaccagggctgggagtagtaactaggaccggtccttaacactgtcaaacagacaggaggactt

SEQ ID NO: 1677 - DNA, 361 bp, Changjiang picorna-like virus 8
  strain CJLX30776 hypothetical1
tatagacgtacaacttaaacagttgtcgtactagtatatatttgccgtatcaggtgcgtaaacccgggcggctggcagacgcgaagctccaaacctttagaaaacacaattttaaataaaagttatgtaagatttgtccctatcatttgatcgaactcttaaattagatcatttgagaactccctgtttgtctctattcaaactactatttgagagtagagagattcacatttcttcgttaccctttaacgttaaaagggacattcttaaagcaaatggagtttggcttacgttattgtgcgttaatcttattgctggaattgagctggattgctcttccaagcgtaatgtttgatctacg

SEQ ID NO: 1678 - DNA, 361 bp, Hubei sobemo-like virus 39
  strain mosHB229649 hypothetical protein1
aagaatcaccagcctcggcttcagttatggtggaaaagtcagaccaatccacagagatcttgctccagcaagcgagaataactacatcgctcgagcgtttgatttgtttaatggaatccaagaacttcaaccatatggagtccctgacttcacagaccagtggtccaatacaagggccgaatatagcagcttcttaaggcatgcggaaattagaagtgcgttagaggtccccactattactcaacaacaaaagaacgcactgttgaacatcgctgaggaccgatattctataatcaaacataaaatacaggatgattatcttgatcctgtaaatgtacgggatattatttgtaatttgaat

SEQ ID NO: 1679 - DNA, 362 bp, Sanxia picorna-like virus 7
  strain SXXX37313 hypothetical protein1
ggtagaaggccctgcaaggcctccctctatcttagtgaattgatgagtagatatatgtatgggtgggttgggatacgaatgatccctcccacaacacaccgtaagactacatgttggcacaaacgaccatgcttgcctctgaaacactctgcatgtgatgatgaatcactgttagccaggtggaggttttcaagaagtccgctttgtgttttcacgaatattacgttgagaatccatatgatcgaacacccgcgacaacacatgctcttatgggtacgcattaaaatataacccttctaaaccacattcgtccaaatgtggtccattgacttaggacaaccaaccccccaaaccaacacgcc

SEQ ID NO: 1680 - DNA, 362 bp, Beihai tombus-like virus 1
  strain SCJXSX39078 hypothetical protein1
gatcaaagagttcttcaccggagagaagtcgggaagggtataacaagggagcaatgaagaggaaagtggccattgatgccattgataagaatgatggttcagctattgggtcgatggtgattaacgcagatgaagtaacaatgaccatcaacttcaatttctaatggagtgtcccaaaggattcatgtgtctttaccagaggcccagggaatacgagccatcattcctgattgttttattcattgcagttctgctgttcacttgtacaatccttagtgctacacaacaccaaacaataaacaccgacaactcatctgttaagactcagtacatcggcatttctacaggttcgaaatcttaac

SEQ ID NO: 1681 - DNA, 363 bp, Mount Mabu Lophuromys virus 2
  isolate MOZ135_2, complete genome.4
tgattaaattggataaaagcttagctgcttggttatgagtgatattgtgataaataatgtgatcaattgaagatacttgattactattagtgataaatagattgttgtgtatgtctgtgattactaatgtaactgaattgttgagtttaatcagaccacaaatgctgctatattgccaatgagctattatctcatgactgatgacactatgcgagagattagtcccaacacaattgattgatataatttatttacaatagttctcaaggataattactaagaaaaacttaggcggcaggtcataatccgtcaaaagtttggatgcatgacttctgtctttaagatctgttaaatcatttttta

SEQ ID NO: 1682 - DNA, 363 bp, Botrylloides leachii nidovirus
  strain SRR2729873, complete genome.1
aaatattcatcactattagtatatacgcatacccatacccgagattataatacggtttctattaggtcgttaaacgagaccaaacagaattttcttgtgcttctttagtctatgttactatcgcataaccagattcaacaactatagtagttcctgagaaaaattccgcgaaaacgcgcacagaaacgttataaaaggtgtagtgtatcctattatacccatagttggtatacagatactagtggtgaaacattcacactcgcgacaaaagttttacattttaaaacaaaaagtaaaaacaggctcgttaataaaacaaacgatcccgctcaaaggaagtttgtttagtctcctctaagcagg

SEQ ID NO: 1683 - DNA, 365 bp, Posavirus 1
  isolate Ishi-Ya8/JPN/2015, complete genome.1
ttcccggtgtaaaaagctgggcgcggtctggctcccgtcgggtggaaaggtccaccaatggctggttgagtgtaagctccggtgctctggttgtcgcaattccagacgtcgtaataacctatattgcatctgactctaatatttgtggccctactgtatctagttcttcttctgctcaatctgactctaaaaaacaaaaactacaaaaaactgcttacaaccttgaagaattctttgatcatgatcttcctgatcctatggtctcttatcgttctaaaatttcaacaagaattcttgaaaatcaaggttgcattcactctgattctcatcttactcctcgtgtgttttcattctctactgttggc

SEQ ID NO: 1684 - DNA, 365 bp, Picornavirales sp.
  isolate H4_Rhizo_44_scaffold_11 hypothetical1R
ggacctacacaagcgttaattcgcctgttcgtcccacccctttgcggcgcatgccatcgcgtcgcggagctagctccacaccaactgaggcacacgatgatagttactgctctgaggtcctgagtgaatctgaagagagaatggatcatcatgtttctgcgcctgagcgtccctcaaagtccatttttatggaagtacccggcacaggtataaatacgctcaaggatgggttgggtttcggcgaaccttaccctggtaaacaaccgcctactaaccaaacaacatacatgtcgggagactttaaatcacacacacagattgcactgcaagtgcaatcacaagatgagtatgaggagttgttgcaa

SEQ ID NO: 1685 - DNA, 365 bp, Hubei orthoptera virus 1
  strain ZCM21319 hypothetical protein 1 and2
aacttctggttacccagcttaaaggaaatttccagtaaactttaaagtcaaggctttagttctaggtcgaggtgccctatttagggtgaggagcctcggtggcagccccatcaaatcctctattggataggagcagctacattcaggttgatgtagcagttgttaggtaacactagcagcgttccgaaacatccagacctgcccaatccaacagtacgaacaatggccctaacggcccaacgattgatacgacggacgtcaagatcaacacaacccttgcttcctcttcacaagaaaactcccttaaagaaatcgaaatcacagctttccaggatgtggaagcccccgcgcttgccctcactcca

SEQ ID NO: 1686 - DNA, 365 bp, Wenling toga-like virus
  strain WLJQ101932 hypothetical protein1
tgtggattgcttctggctccgttttgttttgacttcgttaatcgaagcttcggatatttccgagacttgactcaaaccggcgttagacgcgattggctggcgtaaccgttactgaggctagaagggacgcgtcctcgcgatcccttcgtttctcatatttggtgcagctgtacacgtccgttttctcttaagtgtaggtgataggatagggtgagaacgcgggcgccacgttttagctttttctaggacgtccccagtggtttaatacctcggagcttcggctctcgggtccttccccccccgggtggtgtagttagttgggtccccagggttgtttcatcagcgcttcgttgtttttaaaaaca

SEQ ID NO: 1687 - DNA, 365 bp, Hubei reo-like virus 6
  strain WGML611819 hypothetical protein 31
cgccattactactgtaccaagaaaacttcaaacaaacaacaactgcgacaaccctaactaatgtaaccgaaaccaccaatgcactcgaacgcggcaacgcatcgaacgtaaatccgtatctgcactcaacactcaaaaagacaccaattccaaacgatagattaggaacatatatatctggaccacagttaggtgatgcacgcattacaactggtttggtatacccactatcatttcaaaaaatatgggctaaattattttacagtttttacaaagtaaacaacaattcatactacggattagatcgtttcattcatcaattaagtaacggataccttaatgttacaggaacagaagatgatttc

SEQ ID NO: 1688 - DNA, 366 bp, Unknown
  Description of Unknown: capsid protein [Nudaurelia capensis omega virus, Genomic RNA, 24481 sequence
tttctctctcttaccaagtgcggtaaaacaaacaaagaaaggaaatcgagtgacaacggcctctacacacctcacgtccgtgaccaccggattatacgtcgcccgcgcacggcgccttttccgaccactcgtgagagtcgctggacagctgtccgtgaccacccgattgcagtcaaattactgctttcggaccactaagtttgtcctcgaacgacatacattcgttcacacactgtcttagcgagacctaaactcgccttgatagacagctcatgacagatcgttgccggcgcatctgtttcatctacctcctggctattccgttgctattatccctcccgagcaagacggctgggaacttttaga

SEQ ID NO: 1689 - DNA, 366 bp, Wuhan astro-like virus
  strain DSYS3171 hypothetical protein,1
ataacgttgagaacgtgtgtgggaatgcctttcctagactagcttgcttggtaaaaaggtaagacccatgagggtcatatttgattttgttggttccgcttttggaatttggactgttcatgtgtgtacagtgagttcatcgacacatgtttttgaggaacgcctgaattggttttcaggggtgtatcagccccctcatgagtgggtttatcccactctttgggagcttttgcagcgtgtgtgtgatgaactaaatgagcagatcttatggaaccatgatgagggcgacatagacatacaacaagaggtgtgggttgaccctgaggagtttttgaattaggctcttgagttgcggcaagctctcaa

SEQ ID NO: 1690 - DNA, 366 bp, Changjiang tombus-like virus 17
  strain CJLX30686 hypothetical1
gggagcttggtcaaacgaccaataacatgcacaggagttcatagtttagagttgaagcaccacacttggtgtgagtgctcctcgaacaagaattttaagcttcgtgttgttggcctgaccgagctcccttgcgattgcagggggtttaaggaggttgtgcacttaccccttgcaatcaagaattgtagtgagtggttctaccactgcaattgcgtgcacaatatagtcagcgcgttggtgggtcgcgttgctttgtgcgttccgtcacccaccactcatcgaattgagcaactttcaaagatatcacagtctttggctcgatcactggggcatgttctccctattagccaggaccaggttattagg

SEQ ID NO: 1691 - DNA, 366 bp, Ellsworth virus
  isolate Antarctic22 A2 maturation protein and1
gtaacactcaactgtatacccgcgacgcgtacgggtcaacttacgctaacccttcttcaccagactacactgtcaggtttaaaacccaaaaggcagttaaaaccattaacggcatccgagtgacgaacttcgtcacagagatcatcgtcaatgatctggtgggcgttgatgtcaaaggcacgagtgccgttgataacattgccatccgcatacgggtgtcgggagccgctgaggcccatgatcgcgtgaaagcgattctgaaagccttagccacccaacttcccaattggtgcgacgagaacacgttcctcggttttgaaccgaagacgcttccttccgtcgtgagctgataagaggtccaataag

SEQ ID NO: 1692 - DNA, 367 bp, Linepithema humile virus 1
  putative capsid and putative RdRp genes,1R
tttctctggttacccagctcataggaaaatgtcttttaactattgagtcaaggcttagaaattagaatggagggtcctatttaggatgaggtcctccggtggcagccccaccaaaacctccaaagactaggaacagctatatcgggttgctatagcagcatcaaatttatttgatgcgttccgaaacaccaaacctgctgataatcaaacgaacaacgagcaaacttctaccctcacaaatacaggacttagcacgacttcagaagaaaataacatcgaaacggtccaaatcacgacctttcatgatgtggaaactccaaataggtacactaccccgctggtgcagaacactgcagcaactagccgt

SEQ ID NO: 1693 - DNA, 367 bp, Micalovirus SF1
  gp1 and gp2 genes, complete cds.1
gatctccggtctggtgagaccttaaaccaccaatcaggccaatggccttcagcttagcctggcataatcgcactcgaccgtaagctgaacgaaccaaaaccggatgagtgagtgcaactcatctggacgactcatgtaccagcttgacacagctaagtacatgtaaggaaaatgtgtctctaaaaatcaaactcaaaataactatgattttgaacagttatcacaaactgttgaactcacggacattgacaacactaatgttgtgtctgcgcagtccccagaagtggaactctcttctggtgacccttttccagatataactcccacttcctttctctcacgccctgtgaagataggaacccatgtg

SEQ ID NO: 1694 - DNA, 367 bp, Penicillium brevicompactum ssRNA virus 1
  isolate MUT10971
gcccgctgtagctcggcggcattagggagttcagggtttccatatggggatttgtctgtcacacctttgataaagaaacagaatggccgcaccacatgttcgttagtatgtagctcacgcgggttggttacctaaaaccctctgcctagttggatgaaaaccagtaaggcatatatttacaaaaatgaacatctgagtgggatctcagtataactcttccccctgtccgtgggtccacggtcgatggtatgattgggggtgatgcaccatctaaacgcaagtgcagtgcggttcagtctcgcgcggcttgtcagccccccccaacccgggttcagagaccggtcttattctatttagtggtcacaac

SEQ ID NO: 1695 - DNA, 368 bp, Picornavirales sp.
  isolate nut158shi3nc genomic sequence.1
ttttgattactcccgaggtggttagcaacacatttgcaggtgttgttctaaaaaataatgcaaaaagcgaagagaaccttacagcagtggttcaaattcaaaaagaattcttagcagcagctgaattcgaaaacgaagaactcgttacagcagtcgagtgtggaagtggagctagtagcagcagcgctagcagcattgggtttacagaagtgcctgaggaaagtagtgaggaagaagaagaagagcttacagccgtgctcaccgaaaccagtgattttgatgaaatcgaagaaatcatagttggtaaacatcattacaaccaacgcccccgcaattcatatgtcgatgacttgtcctttgtgaacagc

SEQ ID NO: 1696 - DNA, 368 bp, Barley aphid RNA virus 6
  14BaA2 gene for RNA dependent RNA1
cgccgaatagacgtcatgctctacgtttccagatttctggagatgtattgtgctacgcctacgtaggtgcgttcccttcccaactccccctgctcattagagcgggcttgttgggaaaacgccgtagggacatcgattctcgtttgaggctaggcctcaaacgcgatgttctagcggtatccgatttaacaagcaaccgtctcgcggttgcttcgcagatctggtctggtatcattgcatgtaccgccggatctggcttcgtctcccttcgccttgacaaggctcaaggaagagaagctattcatggtctcgcgagactagctttgtggctagtctcgaccattcgaaactctggcgcaactcacgtc

SEQ ID NO: 1697 - DNA, 369 bp, Cryphonectria hypovirus 3
  complete genome.1
gggggttagagaaatcttgggagatttctatcgtcatagacatatgtgatgtacttacgtctctaggacgcctatgactggtttatactctgtcgagttgaacgtctggtggttcctacgtataagaactgcagtcttatgtgtgaaaccctacccctcgctaaccgagaacggttgtgtgatttgaggaacgttcgctgtttaaacttctttggaggaactttaaattgtattaattttgcatttgcaagagttagcccatctctaaaatgaggctatcgctgtgaacagccttaaagaccctctgggcaaactgattatgaattgagagttagacttctcagaaaaagtctggtcttgtcctagatt

SEQ ID NO: 1698 - DNA, 369 bp, Picornavirales sp.
  isolate H4_Rhizo_Litter_21_scaffold_1082R
tgcggtttactggtttatgtttatcattttaaagtattaaacaacgtaatggcttcatcagcaaaaactaacgaacaagctttagggactacagtagcagcacatggcactagtggccaagtgttagctgaaccaagtccaattgatcaacaaattcatgataaccctggtacgattaaggcgtcgactgcaattgaaactcttttcaaccttttgttcaaagattatatttttaaaggattgtataccatctctactgatatggctcccggacaaatcatttggaaattacctattcatccagcagtttgtaatcaatataatgatcacgtaagaaaaatgtttaatgtttggacaggaggaatgaaa

SEQ ID NO: 1699 - DNA, 369 bp, Beihai picorna-like virus 58
  strain BHBei77093 hypothetical protein1
agcctatgtgaaatagttggttttggcttaccaactagcgccactgtaatacgcgccgcacagtcagcttctgtaaataatgtaaatactgtcatcgccgagggtcaacaggttaccccggctgataaagacactaacctgacccacttcgaagatcttaacactggcggagacgccaagatctcggaggtagccattgccagttctggcaagtatactgagtccgctctgggggattggtttaagagacccatccttataagggaatttgtgtggcccgaggacactttgctccttgactcatttgacccttatttgctgtatttctcacatagtacaattaaaccgaaattgcatgggtatagtcga

SEQ ID NO: 1700 - DNA, 370 bp, Karang Sari virus
  strain JKT10701, complete genome.1
actaaagaaaattttgttttctcccataatactactactacaagtatcaaccccgtccgtctgctagagacgctaaactctagcaccaaaaatctagccacatcagttgcttaaagaaccccttgagacactctcccacttaacatcttttaggaatcttcgatgctacaacaacttggctagtaataacagcaaatccatatatttcaacagttataagaggctttatgtccttactttgaaagatttgtttactattgtcacgattactttaattaacagaggctatatttagtgctcagcacgttaacgaaagcatttgtacaatagtatgagtttgttgtaaattgtcttgatacgacaccctatc

SEQ ID NO: 1701 - DNA, 370 bp, Boghill Burn virus
  putative non-structral polyprotein and1
cataagtacctatattcagcgccccggagcatcagttccgaagaatcgataacgattatccagagcattagctacaaaacgccttacaaagtaagaagacacgatacgataacgttgagtgtatgcgaacacaaagagacgaatacttgtggcatttaaagctgataacagctttacgtggcaagattccgcgtgaggagttgagggagataattataaaatatcaagtacattttaaaataaccccatcaatatatagcagtcataataggaatatagttagacctaagttagaagaatactataggatagcatattaggataagttagattataattagtggaactttccacctaatctacctccact

SEQ ID NO: 1702 - DNA, 370 bp, Changjiang polero-like virus 1
  strain CJLX30310 hypothetical1
cgatgggccggtgcttaccccgccaccatccaagtgcccggaggtcacatgcttgacctacgaatgccccaaaccccgggcacttacctcctatcccttcaacgagctgctgcaagccgcttcgcagcgattgtggtcagacgcccagagcgtctgttcccgcttttgcgcgaagggggtagaggcctcagctattttgctgaggcaaattcgagaatgggcctccaagaccgcgtttgcagtcttgagtatactcctgtattgtgtcaccttcgtatgttgggggacgctttatggcccgtggctactcgtctcgacctacccggccgagaccctcaccgcatgcttattggccctttgcgtgcgcttt

SEQ ID NO: 1703 - DNA, 370 bp, Hubei levi-like virus 1
  strain WHWN53257 hypothetical protein1
tccgatctctcgtcgattggcagtacgatgttggagatgtaatctccaattatgcgtccttccaaggcgacggccttgtccttcgttatggctatctgatggacaccacaaggtgggacatcagtgtgtcgacgaagaacccgggtatccggggtcttccgtccacgttcgacgctcactggtggagaatccagaagcgtagaacgcgatcgactccatacggatttggctctaatcctggtgaattctcatcaggtcagtgggccattttggccgctcttggtatgaccaagacgccaagatcgctgcgataactttgtcgctccgatttacaactgaattaacaatttaataaacgaaggacaatgct

SEQ ID NO: 1704 - DNA, 371 bp, Hubei rhabdo-like virus 7
  strain QTM26925 hypothetical protein,1
aaatgaatactaatgtatatcatatgataagtattactacaactcatttcccgaaaattcaggatttttacgagttgaacgtggaatacttcaatttaataagagaaaaatatgatgcatacaagggagataaaaattctcctgaattctttgcatcaatcgacaatcaaaaacttctcttattaattgaagtatgtaactacataaattcaagacatggattattccaggtgccaatattactgttgactccacagtcaacattgaacgcatattggcagaagatcgtaaaaggcgatccaacatccctgcaagatctagttcgattttattcagctaaataatgagaaaaacccgtaagagtcaggaag

SEQ ID NO: 1705 - DNA, 371 bp, Picornavirales N_OV_001
  putative structural protein2
atagttacataaattcatattcctatgccacaaatttaaaacaaaaaattcttgcacggttaagtggctcgtgcctacatatttccaaggagccttgattcttggagtgacccttgaggtccctgcatatagtgtgatggtgtagtataacaaatctggtaataaatatctccaggttttgcttgctgtaaagtacctagtgtctggctcatgcaagcacacgggaatcccgtggttgctatttcttcatattatatgtagcctgtgtaagatcaggtcgattggtggcggtaccaccctaggtgactgagttgtgtcacacctgggaactgaggttaatcagaacaatcttaaactcttatcttttcact

SEQ ID NO: 1706 - DNA, 371 bp, Riiser virus
  isolate Antarctic79 RNA-dependent RNA polymerase and1R
gtaaaactcaacttttatcacgcgatgcatacggcgttacatatgcagatcccaacgaccccgactttactgtgcgcttcaaaaccgcacctaaagcaaagagtcttaatggggctcgcaccactaactatgtcacagaaattatcgtaaacgataatgtggctgtaacagttggtgggcaagcggcggtagatgcagtatcattacgtatacgcacctccggcacccgcgagtctatgccgcgcctgaaggcgatgctgaaaagtgttgcctcccagtgcgaaacatgggctgacgataacgttctattaggttttgaacctcctgtagggaatgaacccgacgttgttgtttaacgggagtaaacgaaa

SEQ ID NO: 1707 - DNA, 372 bp, Menangle virus
  complete genome.3
ctcagaattatctgaacatctacatcaccaacttctaacccaataaatttactgtgtggtcatcctgcaggactcacttgctattgccaccctacaagtaaaagccaattcaacaaatgcattgctttaccgcacatcaactgacctggcacttcaaattcaaggaccccgccacagcgcatgacagcagccccgaggcaaccccctccccacaacccactacacaattcctctcccatcacccaatcccctgctagtttaataaaaaattagagaggtgaaatgcacacacacaacgaccggaaaggagcacgaacaggtgcacccacacaccaccccacagcgaccaacccgccagccatccaaagcatc

SEQ ID NO: 1708 - DNA, 372 bp, Human rubulavirus 2
  complete genome.2
gaaatctatcacaagtctatatatgtccacaattgacccttaagaaccaacttccaacgattatccgttaaatttaagtataatagtttaaaaattaacattaagcctccagataccaatgaatatgaatatatctcttagaaaacctgattattatgtgatagcgtagtacaatttaagaaaaaacctaaaataagcacgaacccttaaggtgtcgtaacgtctcgtgacaccgggttcagttcaaatatcgacctctaacccaatttaacacccattcttatataagaacacagtataatttaatcacaaaagacctcaaaaactgacacagcttgatccactcaacatataattgtaagattaataata

SEQ ID NO: 1709 - DNA, 372 bp, Human parainfluenza virus 1
  complete genome.2
gtctacactcctcaataatgacacccattagctctaaatcgtaccattaatcaaatacagatcaattcgatacaatcagttcaaataagaaaaacgtagggacaaagtcctctaccaacatcaaggaagacaagagtctcaaaaagctcagcctaagcagagagaaaaacaacaacacaaagaaagaaaaggacaagatcacaaacaagaacaaaagcaaaaacaaaaacaagaacaaaaaagggaagaaaaacaaaagtatacacaaaaaccaaaaaagaaaaaaggccagagacaaaaacggaggcaagaacaaaaatttaaacaaaaacagaatttaaattcataataaacaccaagatagagacaaaa

SEQ ID NO: 1710 - DNA, 372 bp, Picornavirales sp.
  isolate H4_Bulk_47_scaffold_38 hypothetical1R
agtttagttttcacatttaaatttgtaaagactgaatttcactctgggagacttgctttctgtttcttcccccaggaaggatacgataatcctaacgcgcctgttccctcttatgcgaattctaattatgttcatagagaaattgtagatattaggttatgtaatgaagttacatttactataccattcatttcctcctcaccatggagacctactgacaacacaagttatgctagtcacaccggatatttatcagtgtatgtagttgaccaactggttgctccatctggagtatctacaacagttactattcttaaagaaatttctgctggaccagattatgaagtagcactgcctaaatcaataaattat

SEQ ID NO: 1711 - DNA, 372 bp, Sanxia tombus-like virus 6
  strain SXSSP2574 hypothetical protein 11
ccctggggcccgcccacgcgcaacaagcaagtgcagctggaggccggcttgtatgcagccctgcgactggaagccgcctttaacaacaggcgaaacggggcactcccactccagctcaaggcaaaggcgattaggcaccttgccgcgtacgacactagcgcttattctccgctagagttgacggatttgatcctcaacacggtcgtagccgccatgcgtcctagtggtcccgaacacctcctagcctcgatgttcggcaaccatcgcttccaaaaggagctcgcccgccttgaccctctttataaactagcttgaagaggccctgctaggcttgacgccacctgcgtgaagggcacccccctggggcccctc

SEQ ID NO: 1712 - DNA, 373 bp, Narnavirus sp.
  isolate H4_Bulk_Litter_23_scaffold_4 hypothetical2R
aaataagacataaggcagttcctatctcaatatctccaaaactaagaaacctacatcaagactcgctccggcaatcaagaagctcaaataccaacgttatattcttcaatcatcaataagcaatcaaacttgtttatccatcatcaagcatcagtaataatgtcaggaataccatctgagtttggaattggtgttgatatgagcaaaacgattgaaaacatgaagaaacttcaaactgccatggaaaacgacccaaattttgatccttcattgttcgatgacaagaaacctgataagaaagtgaagggtaaaggtcctatttccgacttctttcgacaatctggcgactttgttactgaaactcctatgggta

SEQ ID NO: 1713 - DNA, 373 bp, Hubei picorna-like virus 16
  strain SCM51353 hypothetical protein 11
tgaaaataaagcgctcacaattgagaacaaatatttcaaacaaattatattgaaaatttaatttaaaattttattaaaagtcttttaacagaaaggggtattttagtattgaggtattattttacgttgagtaattaaaagcagtataaatctttacttttggctagtagtgctgcggcatattaatcaagagaaagttagatcttgtcatttggtataaaatcgaggttttatattaaaccaatttctagtaaaaatccttacgaggtagttattattaaactaaaaataaattagcaaaatccttctacttgaaaaacactgtgaagtaaggtaaggtaaaacaaaattaaaataaaacaaattatataaa

SEQ ID NO: 1714 - DNA, 374 bp, Marmot picobirnavirus
  strain HT2, complete genome.1
gtaagaacagagaagtgaaggtaacgaagtcaccttcagaacagacaaacggagcctcaaagccgcagcagaagcagcagcggcgttcgagacccacaaagaaatcgttcaaagaaagagcgaaattcaacgttgacagatcacttactgaccagtcagcaacagaagtaagcgaaacactgtctaacaaaccgacatcctcttcggttttcttcccgagccataaggcatctgctctcagtgccgggaattttattgagtccgcaggtcaggaaaactttgttgaagatttttctcgagtaaaagagaaatacagaccaggacacacgttcagtattcgggctaatacacaggcaaagcgtactccaaacgct

SEQ ID NO: 1715 - DNA, 374 bp, Plasmopara viticola lesion associated tobamo-like virus 1
  isolate1
ttgtacttcgaattatctataacttactgaaatttttgttttgttttgttcgttttgttttgatttaatatttgaattatgagaataattttgtcattcgcgattttatgatccaaacttgaccacctgggtgatcacgattcgggtgcagggaatgaaacgctttccagcgcgtgtagttttgaaagtttacttgttgttatgatgtgctggactaaattaataagcacacattgtggtttgtgacggtcaaccataaatactaagattgacctaatgacgtagtcagatggcgaaattaattggtataggttttgagtatctattaggtcaatcatcgcatttcttatacaattttgcttttatttagaatc

SEQ ID NO: 1716 - DNA, 374 bp, Mivirus sp.
  isolate TTP-Pool-7, complete sequence.1
agtgaagcagagcggcacgcgggctcaggaaaaagcgcctggcttccctccacctcgctctcactggaggtagaccaaacatggccctccatgagccaagcagcctattatcaacccgtatatatcatttatgtttgtatatcttatgaggacgggtgccgttatgtactctgaagggccctcactcctccatgacggcctctctattagattttttcgccccgggaacacaggaacgagggcgttcagctattagatgagaagatcatggaggcatgtatccaaaattgtatcctcatctagccctattgtaatcctcttctcagggcaacgtttttctctgtttgtattaaaaaggatgatggaacgataca

SEQ ID NO: 1717 - DNA, 375 bp, Partitiviridae sp.
  isolate H4_Bulk_46_scaffold_395 RNA-dependent2R
caatgcgtatgtcgcccgatggggaaatccgaagaggcggtatatctgcagtatcatgggaactttgttccatgctaatgcacgtgtattctaagattttccggtttgcttggatagtattaatcaatactacttttataacctaagccggatatattaacaaagagagacttatgtcaccttggttcgcatctgctattgtccgtattctaattgcagtcgttgagatcatatcaaaagcgcctttaaaatagaactatgagacgactaattcgacaagtttactattggttgcgttatcgctacccttggtaataattttgattcgttctcctctttgacgtgattacctatttatttaacaaggattataaa

SEQ ID NO: 1718 - DNA, 375 bp, Picornavirales sp.
  isolate H2_Rhizo_Litter_49_scaffold_13612
gaagctgagtccttgacaagacgttaaactgtcgctagatgagtgtgatcttgcaaaactatataaaatccaaagtttcaaaagttttgtattgctgctcatcagttggtagggtcctatttaggattactgctcaaggtcctacgaaggcgtccccttcaatagcctagagcgctttggtacggtctcatttatgggtttatatgagtacttaaattttaacctgcttcaaactctaatattaaagtaggtggggaaactactataaaagcccaaaacagtatgcaagaagacgtcacttctggcaagttatctgatgaagttcaggaaactactgtttttaaaactgacgctaatattgtcaaagcttctatg

SEQ ID NO: 1719 - DNA, 375 bp, Beihai noda-like virus 6
  strain BHWZXX9026 hypothetical protein 11
tttttctgcaactataaagaaattatcgtgacgaccgccgctgttggcggagtcactgccatttgcgtcttagcttataagcgtgaatggtttgtttcaaaggatgccgtttatgctaaaatactcactgtatttagtacgaacgtgcagccggattatagggaaactgttcgccttgttcgctatacgccgctgaaagtgggtggagctcattcacaccccgatgctgcagctgggcgcacaagcgcaaacattttcatcgataaagtgtgtgcgagcataggtcatatcccgttctccctttcgagttcgaatcgtgatgtcagagctggaaatgacggatgccgcaatttttatttcagtaaggatttgacc

SEQ ID NO: 1720 - DNA, 377 bp, Feline morbillivirus
  strain 761U, complete genome.3
gcactgaccatatgatccactgtaataagtccaatgaaagtatcaattaataatattggtagtgcaatgagtattgattgtataatatactcctttaaactagatagtgataaagggttatagatgatttcagttattttaatataatcatatattgattttattatcttacatgactattatgtaattgaattatgtgtcatcaattaatagcttaataatatcgtttaatgtacttatattgatggatagatgtgttatattgtaatcaaggatttagtatttagaaaaggaaagagtttaatttgttgttaattagttattgtgtattcaattagaaaaaacttaggaatccatgttaataaaaatttattatc

SEQ ID NO: 1721 - DNA, 377 bp, Wenzhou picorna-like virus 42
  strain WZFSL74289 hypothetical2
tagcacctaggggaagaactcttttgttcttcctctatgtagtgtagaataatatataccagttataacatgtagactcacatggctagggaacttctacacttgaaatacatcgtggagtctcacgaaaactactgcacattgtggcgttatgtgtggtttttaattttaatgccagtaaatctcgcgataataatgatacaaattcttctctggatagctcattatccaattttaacaatgagcaactttctagctcagaggcagttggctctgacaacaacacgacgacgatcgagagtcatctatcagatattgtactccgcaccatatcgagaacagacccaatttataactcactccccaaaccatatggt

SEQ ID NO: 1722 - DNA, 378 bp, Valsa ceratosperma hypovirus 1
  complete genome.1
gggtgtagagaactcctggggagttcaatcgtaatagacatgtgtgatgtacttacgtctctaggacgcctattactggtttatactctgtcgagtttgctaggatatggtggttctacgtaaagaagctacagttctttatggacacactctaccccactttggacctctttaaaggtcaactttctttaaatttcttatttgttaaccctgatgggtgttcatttctatgcctggagcaacgttaagctggagtgaaaggcccgtgtgcctgaaacgtgagctgataacgagagtcagcgaaagagaaatcccgacgaagggtaaattttagattttaagttggagactgcgacagactgcagacacttggtcaaa

SEQ ID NO: 1723 - DNA, 378 bp, European roller astrovirus
  strain Er/SZAL5/HUN/2011, complete2
caaaacaattttaaaaattcaggactttttggacaatgccggtatggaatatcccatacttacggatgtgaattaccaggccttatggggcttataattatggtaaccaaaatattttatgtgcttaacgtgcgctatactcatgttcggaaaatcagtcaaagacgaagaagaagcaaaaagagtgctaggacaagttttaactgacgaagaaaccttgggactgttcatactatcttgtattgaacagcaagagttagaaacagaagtagtaaataaagaaggagacgaagttgactgttggttggtacccatagtcactgcactaactgcttttatacctctagctcaggatataattagatactttatatcaaa

SEQ ID NO: 1724 - DNA, 378 bp, Barns Ness breadcrumb sponge aquatic picorna-like virus 3
  isolate2
acctgtgatatgtctttaaaagatcagctcagttttaaatctgagttctacggaatagcaaaattaatgtgtgtatttggttaccatgtgattatacatttttatattattattttattgttatataggctttgcacatatgaataaacttaggtttaccctatttagggaggcgtcgttcaccaatgtaaataatgtcacccatagagttgagtcactctttgggattgtaaataccgacttactaattttaaaacacaaaataaaaacaaaaattctttacagaagtccaagaggcttcttcaacgggaaattgatctcaactatcatgttgtttttgataaaggtttcccaaccgtcttccaaattttgacgaat

SEQ ID NO: 1725 - DNA, 378 bp, Hubei picorna-like virus 54
  strain ZCM19837 hypothetical protein1
tcttaaaaacgtatatatagtttcgttaagagtttttacaactcttctcagaaactacgagcttggtttttataaccagctcaaaacgatcagtccggatagacttttcgtctcacacttgtgtttttacagcacaaaatttgtttctcgatttctcaaatcgactaagattttatatcttaggttgcaccgcaaacataaaacggtagttcatttattgaacgaaacagtgttaaagttcacttacaaaactcttaggattttatatcttaaggtcgtcccgacgaacataatcggaaaagtgttaaagttcactcacaaaactcatagaattttatattctgtggtcgtactctcgaacataaagagcgtttcacg

SEQ ID NO: 1726 - DNA, 378 bp, Hubei hepe-like virus 3
  strain WHYY20710 replicase, putative capsid1
aaattggaactatgaatttaataaatacagctgagaagattaagaaattttataataataaattaagttacttatatatcaaattcaggaaaatggagttcccaaaattctatatggatttccagacagcgactcactttaaacctagaggaggcattcaatatttagatgaagcgaaaagagaaatgtattcgatatcttttgatactaaaggggactatgaaacggttagaaaatatcttcagcaaagccaaataaccggagcaagatttgcagcacttttgaaaggacaggaaagaattattggaaatggtcaacccgaaattttaacagataactatcaagctcaatatattaaaatttaaacaaataaataaa

SEQ ID NO: 1727 - DNA, 378 bp, Riboviria sp.
  isolate cfe153shi05 genomic sequence.1
cttaactcggagatgagaggagttgacggcactgcatcgaatttctgatccgtcgtctctggttagcgacgctataggtataaagtccagcactttcttgcatgggactcgtgccacttccatgtgggattcgcccaattcgggcggcactaatctgctaagagctcccttaacggtctgctcttcagcatcgggcatatttattaatgcacgacgggctgaatcgcctaactcccgtagatacacatctccgacccaagaggggctagagaacctgggaactccacagatcttctaggttctctagcccctctttagttagggggagcagcccttgtttttgttctattcttttctcgttcgtataaaataaaaact

SEQ ID NO: 1728 - DNA, 378 bp, Changjiang tombus-like virus 5
  strain CJLX42586 hypothetical1
gacttattaagacacaaggatatccgtacattgtggtcacgaccgggggttgtcaagttcatggcgataaagcttggcgggataccctggcccatttggaggaggtggcaaatcattagtaattagtagattagtgtgcaatacgtttcgctgacggctagaacccgttgcttcggaaagcgcacatcgaacgtggaaaagacaagccacccggcctcacgcagatgcgggttgggcacaccacaatgtaggtacctgcgattcgcaagtgggtgcgcggcggcaaccttcagggcaacctgttgattgcgggacctggcgaggaacgctgactggaggggaaagacctaccaacccaaaagcaaacacacatacaca

SEQ ID NO: 1729 - DNA, 379 bp, Hepacivirus I
  complete genome.1
cagggtttcgaccctggcccggatacctatcgccttacgccgaaaggtaacgagtaggagtcgggtccccaggcccttaccgccaccaagccaggtggggaggtatgggagccggggggtgcagctggtagctccatgggggacgccccgtgagcggatgctgcatcgataccgggttagctctctgggagagcggcacttgacaccacgaatccgggaaccggacaatcgccggcgtgggacgcgttgcctccgtggccgagcaatttggcatgcccgtggtgaagagtgatggtgggggggggccccccttccagtaccgtactgcctgatagggtcttgcctcaagcccagagagtcgaggctgaaaaccgccatc

SEQ ID NO: 1730 - DNA, 379 bp, Beihai picorna-like virus 62
  strain BHBei74566 hypothetical protein1
gtaggggataaccctaccataatatagtgtgatgatttagtcatctctattgattcacgcttgtaaaaagtcgtgttatgcacgacttcccgttgatcgggtttcacagagtttatgactcttaaagaattttctatgcgtgcactgccatagtgtgtatatgtctcccttgttcaacaaatgttggacatgttacaacgtcaggagaggaagaacgtttgccgggttaccacgggagtttgccgacactccgcagtacccaatggctttcgggattagccaaactggcttttcccttttgtaggatgccgtggcgggcctccgattcgcgtgtgtttgattcggcgcacgcgtcttatctcaatggattgcttcactt

SEQ ID NO: 1731 - DNA, 380 bp, Hubei narna-like virus 8
  strain WGML132164 RNA-dependent RNA1
ggagtctgactcacgctggtgagcagtagagcatgttggaagaaacctgaaagccccgttggctgatggtaatggaccgggcgaagtccttaaactcaccattgggtctcacaatataaactacccaaaacggtgaccaatcctgtggcgtcgatcagccgtctgatttcttcggaataagatgtgtagctgaggtcagcaggtcgggtcttaatacttccgtgctaagtgtgttgaacctgtagcggtaaccccccctcctaaagtcggcgaagggtacttcgaaagtttggcactaaatgccgagagactacacgggtaggcggcgcgtgtaggaagacagagaggtctggactggcgatatatgccaggcttcttgg

SEQ ID NO: 1732 - DNA, 381 bp, Guangdong chinese water snake rubivirus
  strain LPSF323051
gaagggggttagaggacgcggcgcgatgatacccctggccatccggctgctcatctgttccgtggccctcgttctgtgtcagctgctgcgtctcacccctgaacagctgcaggcgcttgagaatttcctccaggcgatcggtgtgcccggctgcgtgttggcgctgtttcacaaccgcaccgcatgatctgggccgctctcctcctttggctgctcgcctgtgtgcttagcgccaccgtcgccagagtcacagcggtcctgttcctcgggcttgccgcgctgtacgtgctggcccgaccgtacggatcgcccctctgcaggttgttcgagctcttatgaactccgtctccaatctggtcagcggcctcatcggggtgggaa

SEQ ID NO: 1733 - DNA, 381 bp, Plasmopara viticola lesion associated mononega virus 1
  isolate1R
gtgacagtcaccttaacctcgcaaaatcttagaaaataaatccttctgaaaaactcttgagttcataattatacctaggcttaccggattatgggtgcatggttgatacttttccgcactagtattattcttgaactcgtgcaagtctgtttcgagattactaaagggctggttttatcacaagcagaaaaagaaacgcttaaagaagaacgcaagataatcaaggaaaagatcctcacttcgttgccacctagtataagagattctgctacgcattcgtcttaaggaaaaaccgagttcacaattcaatctattacaaatcactaaagctcatcttaagtgccttatttcctctgtttttcttccctcgtacgtgtcttc

SEQ ID NO: 1734 - DNA, 381 bp, Beihai hermit crab virus 3
  strain BHJJX21702 putative glycoprotein,1
agcacttgagtagacaaatgtcaaaaccaagcgctgaacactttctaagagaaatcatccgtcttgaagcggagtctcgctccatgatggaagattcgtacaaggattctcctgcggtgattttctgtcaacagcactttggtcctggtcggggtctttgcgcctgtgtattcctacgggtagccggagttcccctcctggactgtgtggccatgggggatgttgagaggtatagccttgaggcacaggagttgatcggaagaccattcgcatggaggagtgattgtccaaggtgtggaagggagtaccactgccccagccagtgagtagacccagtaaagatagctgtttaaaaagcattcttatctgatttctctctgc

SEQ ID NO: 1735 - DNA, 382 bp, Riboviria sp.
  isolate war203pic1 genomic sequence.1
ggaaccggctttcctctgattcaagaaagcgcagtgtgtgtaaagcaatagtgcgtgcaagcttacattagatgaattgttagtacctatacgaatgaggcagatattctttgttgggatcatatatggtaacatatacccttcgaaatgcgtctgaacctcaggatcatgtgcggaaaacagattcttttgtaagatcttttactagtgtttttacttttgcaaaattgattaagttcggttttacgacagtttaaagaaatgctagagtttgttataatatttctggagagactttgcggctaaagcaaaagtaagtccagatgactttggtcactttgaagaggaaagtgacaggtgtttttcccctctctttttaact

SEQ ID NO: 1736 - DNA, 383 bp, Picobirnavirus sp.
  hypothetical protein and capsid protein genes,1
gcctcttttgcaatgttagatcgatgtgcttcatcttccatagcctgattatgtctcttcagttcataattggctgcagcactctgtctttcagcttccatattgtgacgctgatcttcggctgctttgaagaaagcaatttggttacttgtcatcattcattcctcctttctgttgatgatgaaagttgtaatcatgtaatttgcgaactagtccacagcaccgaatggctgtcgctagtttacatgaaagtgtggtttttaaactgtgtaaaaccataaagtgttctcctttctgtaaactagcgacagccattcagtgctgtggactagttcgcaaattacatgattacaactttcatcatcaacagaaaggaggaatga

SEQ ID NO: 1737 - DNA, 383 bp, Mud crab dicistrovirus
  complete genome.2
ttagggaccgttgacgacagctccacgtatatgctcattacgcccactgcggaaacaatgtgatgctgtggtgtatacgtggtcaagctagcggcgtgtcccgcttattttagttttagtctatcttaggttaggttaatttagtttgtagttttcttttctccatgtctggttacctatctatcttaactacgctccagacgactaaatttagtatggctttcatggagaggtttgctattcagcgtgcgtgtaccatcggcagccccaaaaacacgcgtcaggagatctccccagccaccatgggctaggttggcagccaggttttaacttggtggggagtaaaatagcctgctccaattcaaaattctgatacttctata

SEQ ID NO: 1738 - DNA, 383 bp, Wenling scaldfish picornavirus 1
  strain XDXMC49056 polyprotein1
cagtactcagtgtatcactgcttactgtgactagatccctagtaaagattttaacacgtaatatttattttgtttatttattatttatgtgtgtaagcgactttgtgctttccacacacaacaaaccattatttagactgctggacgcgtgtagtctcgtgagagttgcgtgaaaatggcttgtcccgagggacgtagttatctggtagtttattaatgcatttgttgtgtgcccatttccttttgtgtgctggaccacggtggtgtaggtgtggtgtgcttaaatgccccacagcgaaccactttaagatttaccacggttttcgtggtattgatcggcacacctgtatttccatggtttgggtacacctaaaggcccacca

SEQ ID NO: 1739 - DNA, 383 bp, Probopyrinella latreuticola Nege-like virus
  strain PlNV1, complete1
taacctatataaaattacaagatgttgatcgtagattacctgagttggtttagcttcgcaatgagcgtagcggatgaacatctggtggtatcgcatatggcgatgattggttttgcggaaaaaccggcgaatcgtagtcggtggtcggagtgtttccaggaacatccctgctacaagcataaccttcgagaaaattgtacccacggccacttgatcgaggctaggttcggcggtgtaatgcactgccggaactgcctaccgcagacgtcggaacaacaggtcgaacatactaaacaacacgacaaatgtcggaaagaagcttacggtatcttggttacagctgccccggaccatagtaagtgcgggtatgcgttcgcttatga

SEQ ID NO: 1740 - DNA, 384 bp, Fusarium graminearum hypovirus 1
  strain FgHv1HN10, complete genome.2
atcactataaacttccatgtgaacgttttactgcagaagaaatacaaaatggacaacagggcccaattcacagaactattgttgctagtgatagggtgagccacgtaccatccaccagtggtggggtattattcttcaggtttttgacgcatggccgttgcactgatcaacgtttcgagttaacgcagatcgagcgggagtgacccgtaatagcaaaagtctatcaccatccatgcgttaagacgtggacgggtgtgaagcttggatgagcgatattgtgccttcatgctctcaggtccacttaattgtgggatgcaattcattttgtaatggtgtttatctcacctgatcatggtacggtcatccgaagactaatttcccctt

SEQ ID NO: 1741 - DNA, 384 bp, Newfield virus
  strain MARplus10845 putative RNA-dependent RNA1
agtcctagtccaccctctctccgttgttatgtttatagtgtccctatacctattttataacacagcccccctgacgaaatttgcaactacccttaacaactctactctcctgaaaccggttggaaccttcatttcatcccatttgacccagacagcgggtctgctatggttggtacccatatcattcgtagcggccaaacctgcctgggcctttctggcggcactcatcactggcatcttcacaactgagtacctccaagctcccacgaaatattgggagtatgcttttttaggagcagcgatggtgctcctactaaaagcgaggaacgtacctcagttcttcatagcattggtcgtggttatactaaccattggcgttgggct

SEQ ID NO: 1742 - DNA, 384 bp, Wenzhou tombus-like virus 10
  strain WZFSL57346 hypothetical protein1
aataactcaacatcttacaatcataacgctgtaggtaatgcggctgatagcggccccattagggtaaactacgcaacacacacaggcaccccaactatcctccacacacctcagacgccgatagaggcagagaagtgtgggcaacggttgggcagaccaatatacgtcttgtcgtatgacgacgagattttgttcaaaacttctctggagcttcacgagctctttgacaatgatctttgcgattttagtatctcaattctcggtgaagacaacgaactagttatcactcgcgtgcacacaaaattagatatatacccagagccagagaagattaccgacattcgacaacagtttgtcgcaagaccccaccaacagaccacacct

SEQ ID NO: 1743 - DNA, 385 bp, Serbia mononega-like virus 1
  complete genome.1
tccgcaaacaacaaaaccaaatcaggtcttagcctttagttgtgagccattgcggtatgacgtactggttttgccagtggacggaagtcgctgagtttttaataaaaccccgtagtctagcgtcaatgtgccatgtgcctatgtgtattgtatcaactaacgtatatgcgtgttataactaatacaaaactacagttttaagaacccagacgagtaattacagaattgaaaggcagtgatagaagagaagaaaataaaggatcgacaacgtgaaaagtacctgtggtgataaactaagcaatacaaaagattgtgaagaaaaaatagtgaaggaatcacagtgctcataaattttcaaagagaaaaagatcaataattactaaag

SEQ ID NO: 1744 - DNA, 386 bp, Magnaporthe oryzae RNA virus
  complete genome.1
gggaaaaacggttgcaacgttttgttccattcgcaggcccagtgttgtcatgggactagttatgcggatggcccacgggtgcgcgcagagcctgtgcgcgttaaaatcgttggagtcacttcgacaccccataggggctcctttggccggttggtggcgttatacactggtgatggggctccgtttcacggagctggacctgtttcgccgttatcaggtggtggtccctcgcgttcctgcatagcgagcctgctcaagcagttgggcaaatcctcgtggttctcaaggtcccgtaaaacaaggaacccgtgcgcagccccgactagaaacacgtaaactgttctacggggggtgctacctacctagtggtttcatagaattttgtg

SEQ ID NO: 1745 - DNA, 387 bp, Picornavirales sp.
  isolate H1_Rhizo_26_FD_scaffold_168 hypothetical2R
caggattatatcgttgaaccattaattaaactgcggtatttcttgaacttattatcatgagaaagtcttttctatactgttttattaactattggaattaagatagttgttgactttgttatgaataaggtggtacctcagatttggaatttcattaagggaattatatcatatatgtttccagatgttaagattaaaaattatgaagaatatgctgaatctcaaagtccaattagagaaacacctggtaagaaaggtggaagaaaagcagtaagattgatacgagcacaagacggaaataatgaatttttaaatcatgctgatagtgtaatgaggcgtaatatgtttagtttccacttgattaaagtggaaacaggaaagacacag

SEQ ID NO: 1746 - DNA, 388 bp, Picobirnavirus sp.
  hypothetical protein and capsid protein genes,1
taacgtaatccaaacccatttgcgtcatatttcttgactcctttcataagtattcgcccttttgatctgaattcgtgagataggtacattgacctaccgtgttgaatcagagaagtagtagcacacttcaatcttttgtaggaagatttaaacctaattttcgaagatgtcaatgcatctccctcctttcggtagttctagtaaatttatatttactagaactaccgaaaggagggagatgcattgacatcttcgaaaattaggtttaaatcttcctacaaaagattgaagtgtgctactacttctctgattcaacacggtaggtcaatgtacctatctcacgaattcagatcaaaagggcgaatacttaagaaaggagtcaagaaat

SEQ ID NO: 1747 - DNA, 388 bp, Aspergillus fumigatus narnavirus 2
  J-YC-2 genomic RNA, segment 3,1
gggcacacgcacccatggtgcattcggtctgctaaacagaccactggcgcaggtcggtgaggacctgcgtaaggcctttaacaaggccagggccgaggcccttaacttggctcagccaagaaccaaggggttcccccttgatcgcctgcgtaggcgattcgcagacactctaggatggagtgtcgtgttccagccgaaggctgtaaaggtcaagaccgaccttgagaacgtcccaaaatgggagccttctccagtgtggagagccgcaccaagaggtgcgatatggagatcttacaagatctcaagtctgctaacaacgatagcagtaagcggttggagagccaactgcacgcacgatctcgtgcgtcttgccataaacacatggcat

SEQ ID NO: 1748 - DNA, 388 bp, Rodent hepacvirus
  isolate RtDs-HCV/IM2014 polyprotein gene, partial1
tacctcctccataggagacacactaccctggcccacgtccgggactgggttgcttcttcccaactttccgggaagagcggcgcgtgtgtggattacatgttcgacgccaatgaagctagaccgtgcgacaccattcttcaggtctcggtgggtctgtaggctaaggcgcaagtgtatgaagcactgtggagtgctatgtgaggggggacccctctggggagaggtcaactcctaccactgacgggggaactcgtcagcttgtcggtaaagcggagtctgtggggataaagctgcacgcgtagacgctaaggcctctgatgcgcggttggtagctccacccagatgaagtgtaacggcgagtagggcatgccctgtgactagggggggg

SEQ ID NO: 1749 - DNA, 388 bp, Beihai picorna-like virus 125
  strain BHZY54174 hypothetical protein1
atatagtatatgtgtattgtctaacaagaatattgctgctcgactatgtcgaggcttattcattggtgttggacgtgcagattttgctagttgttggtggtaccttttcaaacccctatctcagattttctcttggtttagaggacagagatgtctttaaatatgtggtcatgttctggcctactactctcatcatgttttgtgattgggtgattagttaatttgaatggttctggcaaatcgtttgtcagtctcgagatatcgaggctaaataaatatgtttggtctacgagccagttgtgttatcctttaaggaaacaatgtcatcactagggtgaagtacagtgcccttgtgttgattctatttgaactgtcccgtgcgctcagg

SEQ ID NO: 1750 - DNA, 389 bp, Equine hepacivirus JPN3/JAPAN/2013
  gene for polyprotein, complete1
acctccgtgctatgcacggtgcgttgtcagcgttttgcgcttgcatgcgctacacgcgtcgtccaacgcggagggattcttccacattaccatgtgtcactccccctatggagggttccaccccgcccacacggaaataggttaaccatacctatagtacgggtgagcgggtcctcctagggcccccccggcaggtcgagggagctgaaattcgtgaatccgtgagtacacggaaatcgcggcttgaacgtcatacgtgaccttcggagccgaaatttgggcgtgccccacgaaggaaggcgggggcggtgttgggccgccgccccctttatcccacggtctgataggatgcttgcgagggcacctgccggtctcgtagaccataggac

SEQ ID NO: 1751 - DNA, 389 bp, Wenzhou picorna-like virus 14
  strain WZSLuoII97619 hypothetical2
tttccaggaaatgccaagctctgggaacttctagggcgtccgaaacgcgtcctgtttatgttcttttgagcatcaaagccaaagcacagaatttgggactatgtactcggttttagtgaccggattgatagcccagctacctaaacttggaggaatcccaaatattggtagtcatgtggatgacacttggcgaataaaggcatagcaataagtcctactcttagctatctaggttccagaccttgagtcaggcctggttctgaaactaccgacttgcaacaattataaataacgaagacaagtctagtcaagaactagataatccaccagatgtggatgaaagaaccaccacagtccaagctgtaggagacactgaaactgccgaagtt

SEQ ID NO: 1752 - DNA, 389 bp, Hubei toti-like virus 13
  strain QTM25941 hypothetical protein 1 and2
aacggagagatagaatctcatacccggtggatggcagattcccggtcacggccctccaatatcgcatcgcctatgacggctcacatcctgaaatagtggatttgagacctaacgtcgaggttgagggattgaggaggtccgaggaggggtcatccagatgggacttgggttcattctcttcacctatctcatactattatactgcactgtgccgagcgggacaactcaacgtcgcgcattgtcttgaaggaatagtaactacaatccaaaaacagatactgcaaagggcaatcagccccgaattcaaagatgatttcatacgcaaatggtttaaacatgtacacaatttcttttttacaaaaatatccgaaggactgggcaactcccta

SEQ ID NO: 1753 - DNA, 390 bp, Hubei myriapoda virus 5
  strain GCM10499 putative nucleoprotein1
gcgcgaggatagacacccccgttcccagttttcgatcatacagacagatttctgccggtaagattccgaactgagctgtattgccaggtgactgatactactaggtagtatcctttcatttagataccctgaaaaaggtttttttgtttgtttgtttatttggtttttgtttatttgcttctattactttatccaattgtttttcctattaaattttagatttagttcaatttaaatctttgtatatcaattgtttcagtgcattttgttcaaatttgattctgtatcaatccattttcacttctaaacttcttatataaccagtatatcctatacttttgattatatattcatataatattttaaaaaaaccatccagaattgtcaatc

SEQ ID NO: 1754 - DNA, 390 bp, Kummerowia striata marnavirus
  strain pt119-mar-10, complete genome.2
gggtttagaggctgactgtatatatgtaaatagctcggtgaacgtcactagaaaatagcggatgcctgtgggaaccatgggctaaaaacacaagaacccttcttgtattggataccatattttgtacattattaattagactatgtattttatataggcttgcaagaatgtagacacgccgctcgtggtgatgctgtatttacagcttagtcgcaattttgtctgattcctctgcgtagaataatgataactgcgtagttgtaacacctcattgccaacactaacaacaacaacgacggtgccgcgtcttatcaaatcggcacaactagttctaggataaattcaaatactgtaacgtttagggatggacaagagcagtgggatgctgct

SEQ ID NO: 1755 - DNA, 390 bp, Changjiang crawfish virus 7
  strain CJLX29643 hypothetical protein1
gggggaggtgtaggcccccaattatctgacggccgggaaagaccgctggcagcccggaaagacggcacccttaaatgaaaatacaacatatacgataaaccctctatgcgcgccgatggcacccctactttcgattctgctcactgctgctgtgatcactgctatcttcggactcgcttttttgttgcacgcgtgcacttatgagcgaacctacaccaacgacgtatagacatccacagcatttcgtcttatgggtcagtagagctactttcatagtagtataccttgaagttttaaccacttttcaccccggaaggggaatacgcatccagttccgtttccccagactgtacgggccctaccaagtacccaccgctccagcagcgcctg

SEQ ID NO: 1756 - DNA, 391 bp, Amazon lily mild mottle virus
  3a, 3b genes for movement protein,1
cgcatagcataagtgttgagtcaatttgcctttcgataactggtttttggattcattttcgttgttagctcaacgcttgtccgatttccggtgtgtagtgccccagcgtgttggtccacgacattgctccgcacttgttcgattggtactcgaggcctgttactagttgctctgaccctagcttgggtgagtgactttaaggctagctgctaaacccattgatcttgttgagtaaagcgtgagagttaggcccccgtttgtcaaagggctagactagcgcagcttcagatacaaggattgaggtgacatcttgaggccttggccttcaagctctctttgggtggtgtgacttacctgtttcaggtctcgtttataagcaaatcttgtaaat

SEQ ID NO: 1757 - DNA, 392 bp, Fish HDV-like virus
  complete genome
gacatttctctatttcgtcctcaatctcttcctttcttatcagcaatttcttgtattcatctccgagcttcctcctctcttgctcttctttctcctccttggggtcaggttcctctgaatccccaactcttccccgactcttagacctggatctccccccactcttctgcttctctggctctgcagcctctttccgtggaatcttggatttctccctttcgccctgcttagccctcgctagtactttctcagccatttcttggtttcttctcgagattcgggtggggggcggtctcttctggactactctccttgttttctatcaaaagaataactcgagtagagtcctttgaggcgcaccgcatcccgaggtatcgagatagagagtaaga

SEQ ID NO: 1758 - DNA, 392 bp, Marmot picobirnavirus
  clone c206723_g1_i1_libraryC_2746 segment I1
atgaaaggaggtaaaaccattgtttagatggtacaataatttacaaaaatttcaatcattattattttcacaagcaattgaaactatcactgaaatcatgacaggtcagtggtgctttcataagcaagtgaaagaaaaggaggttaacatgacacaaaatcaattaagctatcttgggttggaagaaactaagcgtaataacatagtaactagcgctgaaatcaatagacacaatttagcagatgaaggtattcgtagtgccgcgaatgctgaggctggacgtcacaatttagttactgaacagcagggggctcaatcgttgaaggaaacacagcgatctaatttagtgaaagaagcgatttcacgcgatactctgtctgaaactgctcgac

SEQ ID NO: 1759 - DNA, 392 bp, Wenling thamnaconus septentrionalis picornavirus
  strain LQMMT12081
gtcgaaaccagatttaactctggtgtagacggcatgtccactttcatatttaatttaagttattaacctcattggttgatcaataattataacaacaacttaggttagcgctgtagcaccatcatataatttatgatcggatggtgtgaggctctagcccaaagcactccgtggggctgtcactgcgacacattcccacaagtcaaaacgatagagtacgtagccacgatgcagccgaaaggtatcagcatagcattgctcactgatgtagaattattattccggcacgtggtatgtaggattgggaaatcctaccttagacgtatactccctgataggggcgcggcaggtcgatcgtatagactttaaaacctgttgaaaactctctcaac

SEQ ID NO: 1760 - DNA, 392 bp, Wenzhou picorna-like virus 21
  strain WZSBei23778 hypothetical1
tagctagactggattctagctgtgacatttgatcacttctctttttatataaacttcaggtaataaatgagaagaagctatgtcatgaaagtgggagtccctattcagggagtatgggcctaggatgccttcttaattgatgacgagtcaaataatgatccaggtcccctgaagtcgaagtgtcagtgattgagctgtcaggcactttagattagtagcttactgataacaataataatagttcatctcccggagctgggtccgaggggacaaaagattacacagaaacccagcgttcagcccatgtaaatgaaactgtacaatttcaggagggtggtccaacttacgtcgctgaaattacacatggaaatgatgttactttcgacgatgga

SEQ ID NO: 1761 - DNA, 392 bp, Shahe isopoda virus 4
  strain SHWCII5333 putative glycoprotein gene,1
cccccagtgacctctatcaaatatctgtttagttgatgtctagggctattgagagactcattctgatcactgtgctaggctgccttctcttggaaatctttgactacatacagagaaataacaaggaaagtgaagtgactgttctcgggagaggtgactgtgttatatatacagggaaaaggttttgtgaggaagggaggaagttgagctgccctggtgtctatgaggatttcttctttgtaacaggtatcctgatttcaaaaggtttttcattggctgctattgcaggttctgtagcactgctagcatttgtttacgggaaaataacccgagagttgagaaccagcgaagtgatagacagacgactggacagggaagaagttgtgtaaagt

SEQ ID NO: 1762 - DNA, 393 bp, Beihai hepe-like virus 8
  strain BHZY60925 replicase, hypothetical1
tcgttcttgctgagtgtttgttaaccccagcaagtttcaatcattgaacttttggtgttgttgcaccatttgttcatttcttttccttatggaaaatacaattgctcaggagcgtttgctttctgagtttatttctcttttaaatattcttagtgataaagctaattttgttcatcttgacgaaaggtttcgttgtttagtctgtgtaattcaatacggttctaaggttgatagcaaactttttagtgaatctgttaggtatattaagtatctttgtcataaacatcaaatttgcattgcagttttatccacaggagtttttgctaggtcaaatacacatcccaattgctcttccacagttggttattattgtttccgctgtgatccttcaat

SEQ ID NO: 1763 - DNA, 394 bp, Erysiphales narna-like virus 2
  isolate PM-A_DN17411 ORF2 and1
cctgaatcggaacataaggaaaaggctttcgccttacccatttgtgacggttaaggggcgacgggcactctgtaagagtgacccgcctcgatcgcgatgcgctgttcgtgcctacttcattgcaggctctcgcaggtcaaaacgatcaatccctagtcgtcgaattaatccgtttaccaaacagttatggaaggctgtttggtgtggtcttatctcttgtggtctcggaacacgtgctggttcttgggaattgaggaggtggttggcgcactctgttgagcgcaacggctggctctgtgttgcaaaggagttgaaggacctttgcggttggctgcgagccagggctcttaagagcactggtaagtgggattccaacacacacactcatattccc

SEQ ID NO: 1764 - DNA, 394 bp, Mount Mabu Lophuromys virus 2
  isolate MOZ135_2, complete genome.2
tagtataacaggatctgaccattaagcactccaatcttaatgcaaattaaccttgaaccaacactatcaaagtacgattatatgcattggtggatattaattgactaaccagtctaataattattatattaatctacatagcaagttcaacaaattaattcatgcaattataatcaacacacaaattggtagaaaataaggtcatgattaatgtataggataactgatggcttactgacaaatgaagtacttacgacttcaaatattcagttagaaaaaacttagggtcaaaggcgagtcaagccattaaaacagactttaaagtgtgcattatcaccggtacgataatagaagtaggcttacaatttagctagatcttgttaatgcaattaac

SEQ ID NO: 1765 - DNA, 394 bp, Mawson virus
  isolate Antarctic86 RNA-dependent RNA polymerase and1R
ccatgtctaattacaaaatccgttcaagcggcgaagccaaaactgtgttagtgaacccaacgacatataaaagtacgttggaaataactcataagtttaagcgagataccgcgctcaacgtcgatcaggtccgtattggtgtagcttcggcttataccgataatattaagacctgcaaagacgcatgtggactcgtacgccgtgaggtagtaaatcttgaaatgtccgttcttttgggcatggaagatgaatactacactcgcagaaaacaacagttagcggatacgctagctgcgggccaaaaattgttggaagcattcgacgaggtaaaactcggtctcgtcccgtcaattgaaatcgacgcgacagtctcttaaccttataaggaataatt

SEQ ID NO: 1766 - DNA, 395 bp, Picornavirales sp.
  isolate ltt163shi1 genomic sequence.1
gccacaaaaccatacaatcgttggttcttgtcttaattttgatttttgagcgccagatttcatacagtcgtcagctaataactttgcagcaggtagcagacgagcaataagatcagtatttgcgcgatttaatttaatggcagaccatcatatatgtaatctttgttgaccatgatcttgtttccattaatgattttaaatattcttccgaaattaattcaaaaatttgtttgacacaactagccgattatattggttggttctacaatcatccagaccccgataatttagattacacttctcgctatattgctgaaatcttcgcttcatttatatgttgtaacttgcatttcactaatccactcgcaatttctgagtcagagttctttagtgat

SEQ ID NO: 1767 - DNA, 395 bp, Hubei picorna-like virus 2
  strain WHBL73152 hypothetical protein 12
agaccactgaccttgaaagtcacaaaacttatcacggtgtagtagcatcgtaaagcaactacaatgtttatgtatagttactgtatatatgtgagtttttcatcctttaatttgtaagagtggatacataaataaatcctgcatgggcgttccccgaaatctgtttttacagatgatgttgctggacatcaaaaattgaaatcgcagtgagaaatgggaatattcttagctgttaaataaataaataccttcccggaaatcttttcaaaaccaaacaaaataaaaacgaggagggagtgaaatgctccacacccggttttcgtgcctactctaaggaagaatcacaaaagttcctaaatattctgatcgatgattatatcactagattagaagaa

SEQ ID NO: 1768 - DNA, 395 bp, Hubei tombus-like virus 8
  strain WHCC116238 hypothetical protein 1,1
ctggatagtggccattggcgcttatagggagcgcttagtgtacagtaccctccgccacccgggcattggctacgggtggcggcgtctgcgattgccgaaggacacgatagttcgatttagccgtggctagctgtagtggttggtggtgagtccaggtgagaaagcttggtaaccaatccgaccgcggtgacagtgaaggtgaaatcaaacaggggattccgccaaccccggacgttgtagctaggcccatattagagggtccgacgtagccagattttggatttgttctgtaaacatttccagggagctgtagcggtatactgcagctggtgtgaccgaccataaggcttagatgccgttttaaataaagtcacccctcaatttttcaatccacc

SEQ ID NO: 1769 - DNA, 396 bp, Hubei tombus-like virus 13
  strain WHYY18977 hypothetical protein 11
ggggaactggtcgagcagcctcgagttgcgtcggctggtacggagggagtcgtcccgacactccccctaaaggttgcggtggctgcagacgggtctgcagtcggcgcaccagtggtagtaacgcctgagcaatcaggagccacaaaagcgatccggaggccccggggcggttgcgccgttggtgatgatgttgcggaaaagccgtgtgggtgtagaaggaaagatggcacgccgtatcctttcgagtgtgagacctgttactttgaaagaagtcacagggagagaaagcaagagaccatcaagaaggtgaaggaggcggcgaaggttacgaagaagcataggtgcagcaccaggcattgcatctatcgagacggtgccaggaagagcaggcactgg

SEQ ID NO: 1770 - DNA, 397 bp, Tetranychus urticae-associated picorna-like virus 2
  isolate Lisbon,1
ttcgcagcagatttattgtgtggaggattactatttatttagcgtacctatcacagtgaacctaggattagtagattacgataatatagcgtacctatcaaagaacctatttttataagatgcattttacatattcaatcatatttgcttgcattttaaattcataccttgttccagtagcattcacggttagttgagaaatactggttagtgcgttgtatctacaggcatgcacagaaatcactgtaggggagatcacaaactcgattaacaatgtgcgccgaagcataccggagcgatatctgtatgcgccccccttacgttctaagttacaacctgcccacgagagttaacgatttgtcttttgaatttacaaactacaaattaaactttaaaa

SEQ ID NO: 1771 - DNA, 397 bp, Wenzhou picorna-like virus 19
  strain WZSLuoII97616 hypothetical1
cgggggggtctatacccccccgttatgaagaaaacatctacttacgtctctcactttttgaagtgttattttgcaagtttattgttcttttcgccttttggccaggcttatcacctgatactagaaacgattacacatacaactttccccattacgttacacgtcacaacttatatatattttgcagtcgttattcgaatgcgcttaagattatcggctgtatatatattcggaagaaaagttagtttggcagctgacaccccgttattatgtaacatagagatttatattgacattttatgtattcggggattcatgtgacaggagttgggctcttaattgagtccttcatttgttatattgccaacccttttataccttcctagcgaatagcgat

SEQ ID NO: 1772 - DNA, 398 bp, Borna disease virus 1
  complete genome.2
accgtaccgaccaaactcttaaaaaccctcttctcgggacagaggtctctttctgccttaaatcgagttcactcccccatcacgtacgagcattgggccagattaaagcaaagaacctggcatcctgtgactattacttgctattccgccaagttgtattgccccctgaagtatatcccattggtgtcttaataagagctgcggaggccatactaacagttatagtatcagcttggaagctggatcacatgacaaagaccctatactcctctgtgagatatgcactcaccaatccccgggtccgggcccaacttgagctccacattgcctaccagcgcatagtgggtcaggtctcgtatagccgggaagcagatatagggccaaaaaggcttgggaat

SEQ ID NO: 1773 - DNA, 398 bp, Plasmopara viticola lesion associated yadokari virus 1
  isolate1
tacattctggtttccccaacgatttgcattctgaatttcttcgtttactttataccccccaacagcttgaaaacccggacctcaacgtccgtcgtctcccgcatgtgatccgctcacaccctaagttcgactccgacttaattcttcctcaacagattcccattacttatggatctaaggaaggtcgtacttgggttaatgatcgtcgcgatccttacctgacgccattcgctgttaaaaacaaattagcttttgaattcccccgccccaacggttccacacaactaaaatctttcggccctgaccccttcgtattcgtcggttccaacacgagatacgccacttctgacaagctagcctaccggctacgcacctggcattctcgtcctaacttggac

SEQ ID NO: 1774 - DNA, 399 bp, Dicistroviridae sp.
  isolate rbu035shi1 genomic sequence.2
tcttgctaaactgaaacaaattctcggatataaattagtttagtagtgctatttctcagacaggctgggctatttagtcttacctcccaggatggcctgtggcagccccacaatatccagggtaaccgagtatatgattaagagattaagtcgtcctttttcatgaatatctgacttgcgaataacgatacaaatacgaatcaacaatctcgtattaaaactgatgatgttacttctgctcaagcatctgaactttacgagattgctcctgaaatttcaaattcagcagagcagcgtgtgcagatcacagcatttgctgatgattctgcagttttagccgaacatgtccctggtgaggctattttacctaatagggacacgacccagcatacagatagc

SEQ ID NO: 1775 - DNA, 399 bp, Hubei picorna-like virus 23
  strain spider70066 hypothetical protein1
atgtaaacaacatgtatacaatttcttgcaagactacagttggtagtacgttacaagtatttactgacttcggagtttcaaaaagatgatatgcaaaagcgtaagtgattctcgagacgatgatgaacgaaaacaacttagtcaaaaagatctgaaacccagaaattagatttaaggcgcacattaaatagtaccaactcagaaatgagagagatgatttatatacgtgcaaaattgaaaatggaattgtagaacggatttgaacaaccgcatgttagacatgtattatggcggtggaagatacagtataattaattatcactatggattaatagaactgtatatgcctggcctccgaaaggtgattgcaggcaatccgtgagggattaaaactcatca

SEQ ID NO: 1776 - DNA, 399 bp, Beihai bunya-like virus 1
  strain BHTSS17606 RNA-dependent RNA1
gccaaacaaaacccccgattacaagaacaatcgacctatctttataaccatatcgctttatatcacacagatctaaataatttggctagatgtaatactcttaacaggactgtaataagagaagaatggatctctcagtcagcaggagaactaaggaatctacctccaattactgttagtctattaacagaaagaagggcattgattaatattgagacagaaagtccagaagctaagggatctagtttgggaactgagagcacaaaccatataattggagatgagcaattaagaacctttgcccatgatttcacgttcaaaatactatctgagaagacggatgttcctcttatcaagttttttgaagcatctggacctggtgataatttaacaccagat

SEQ ID NO: 1777 - DNA, 399 bp, Beihai bunya-like virus 2
  strain BHZC35426 RNA-dependent RNA1
cctgagtcatcccaaggggggtatgtgtacattaaggatgtcaacaaatcctttttaaatgccctaacaactgaccgccccaactcaatacctagcttggatttggaatatgattatgtcgttcgtattcaacatgatcctagatctcacatcgacttgtctttcaaacctacagagcagtttgtgattgtcaatgtaaagaagagtggttccatttactttgaggatcacaagtattgtctttcaggccattctattaggaagtttccccatgattttactctccgtctcttgagtgttttgcctgagagacacatttatgaattctttcctgatttaaaatcttctcttaatgagcttagtcctgacattgttttttggtggcaggatgttttctac

SEQ ID NO: 1778 - DNA, 400 bp, Schistocephalus solidus jingchuvirus
  isolate SsJV-SsAE segment L,1
gaccccttggggacaaagatccacacaccacacactatttacctacttaactaactaccaaagcattgcctgggctttttcacaggtgtgttctcgaggttgggatttaactgggataatgtgttgactaagatgtatcctgaagaggggggataatacactatctccagtaagaaataagaggctcgacgtataccctaacaattaacatctgaacgtataccattacatcgtgacagataatcctggatgaattaacctggaaactgtatgagatatcctttgaactacccgagggagaaattaagagactcgatgtacaaaggacagttccgagggctgaattttcagaccccaaaaggtgagaaaaacatctcacaatctttaaaaactgtttgct

SEQ ID NO: 1779 - DNA, 400 bp, Guangxi houndshark hepacivirus
  strain NHJSG30635 polyprotein gene,1
catcgtgctggccttacggccggggttcgccccacgtaggtcactatgtgaccacagcgcggaagcgcacgtcaccttaacctattggtaaggcgattcactaccctctagcagctagctgcactcggaccagattctgtatccgacactacataagactagcgtacctagggctaacgtctaacgtctcaggtacggggccagtccgccggttagctcacgcgccggctgatcatgcccttaatcctgctctgctagggttagaggtgaaaaaacattgtgcaagtgaagctatgaaaccatccgtcgtcgagtgggcttgggcccccactttaacggacgatgctacagcctgatagggcgttgccactaccttgcactcttaagtggttgtaacaca

SEQ ID NO: 1780 - DNA, 400 bp, Vespa velutina associated ifla-like virus
  isolate VVAILV/144I,1
gccccttaaaatttaattttaaattggaatatcttttgatactccgactgtttatttggtaaccccaactaggcagtataaatacaaattggaatatctccggatactccgactgtttgaatagtctctatttaagcagtataaaccaaacaaaagcgattaaaataaactttaagtggcagtgtttgacttggtaattttatcactcaaactaggagaaatccgaatcccagaggacgcacttaatagtctaaatgaacaatttttcaataatagaaatcgaatctagcaattttgaaagcgacacgcgaaattttgaaaacaatccatataataataatttaatagaacgttttgaatttgttggtgaaggaagatatcttatagaagaaaatcaaca

SEQ ID NO: 1781 - DNA, 400 bp, Arivirus 1
  isolate A0197177/6176/2010 non-structural polyprotein1
aaacgaacacagagataaatactaataggactacatatagaagtgtaccctattactactcatctgaataataagaataagaatcataagaataagcgaagcacactaggatatatataatacatatatccacgaataagtataagataagtacaagaattcacaatatcacaacagcaattgcaaatccagaacgaaagttcatcacaattcaatacactattaatacataagatacaagaagtaattgatacactatttgaacaagtcgacaacgataagaaattacaatatctaatagataaagtcaattcactatatagattggttaaagattatacggattcacaaacagaaactataatagcatatataaataaagatatcgataataagaatc

SEQ ID NO: 1782 - DNA, 401 bp, Arracacha virus V
  isolate CNPH, complete genome.1
ttagtttcggtagcagtagcaagtatgatcagattaggtatagatcggcatttaataaattagtagtttaaataaagtggcggatagtggagttgtgctgctaaagtctttcctgcgttatcacagatacactaaggaggaattctttctgcttgcagacattaagggagaaagcttggtggattttcacattcgatcgagaggcaccttgagcgttgaggatttaaagaaggtagcgaacgacaatttctcacccgagaatttgagttcgacagtgaataacatcctcaatttcaaaaagctgacctgtgaagagaaggacgttctgctatttattggtccgaggattgtggagatagtgcctcccagatactccagcggtttacactacagcacttacc

SEQ ID NO: 1783 - DNA, 401 bp, Rodent hepacivirus
  isolate 05VZ-14-119 polyprotein gene, complete1
cactccccgaggggaatgcgccagccctggccttgttggacagggtagcgagagggtcactccatttttctttacctctcgccactgggctggtcaatggcacagacgtgggacgctataagcctccgtggtctggttggctgtagtctggccggtctagtgggcccccttggaatgataacctggaagagggctaacgtgaactacccggacggaactccggggcttgggattgagcgcaccagtagacgcttcggcctctgatgctgggttggtagccgcctttatggtacccaagttgggcatgcccataggaatcggggaaggcgttgggttgcctcctgcctactgcctgatagggtcgtgccgtgcgtccaggttcttacggctgtataacactt

SEQ ID NO: 1784 - DNA, 401 bp, Beihai picorna-like virus 80
  strain BHZC36213 hypothetical protein2
agaggtcttttacgtttcgaacaaagacaatgtctgcaagatgattaaagagctttctttgcatcctaagtcgacctttgatgaacattgtccgaagattttacgcgcttgtagagaaaatttgggttttattccgtacccgaatacgtatgatgagtgtcagagagacatcttgtcatccggaatctgttgggaatgatggtcgtaatcgactacaattggagtgaatttaacgtcagcactaaaagatgccttgaatatgctgagggacactcccaggtgggctatttagccttacttatcaacttacctgagcagcagtcctgctaaaaagttaggcaaacaaaaccaactcttagggattaagtggtccctaagttttaaacacacttgctgaaact

SEQ ID NO: 1785 - DNA, 402 bp, Rudphi virus 5
  replicative protein and structural protein genes,2
gtgtgcaggagctgtcactgtggagacaataaatccaccccagttttaaatctgatggcagcaaaattaatgtgtgtgtatggataccacgagtacaatatctttatatgttttgtaaacttactcgtaggcttcgcatgcagcaagggtccctaatggggaacgaaagtgagtcctccctgctcaaacggaaacatgtcgttccacatcgcttaatccagcgtgtggtctgtacataaaaggattggtaattgtaaaaccaaaattctcggcttaataaaccgacgtgaaagttgtccacccaagaagggtcacgaaagagacaacacagaagccggcgtcagctggcaagactggaatttcaaaacccagtcaggagttgaacaaaatgatgcctacatc

SEQ ID NO: 1786 - DNA, 402 bp, Hepacivirus E
  isolate RHV-339, complete genome.1
accatctacactccccgttccagggattcccagcgtgctagggtggcacgtatctgctccgtttacattatttgagcagggctggggaactgaatggcaccggtgtggcaccgctattgcgctgcgtgaccgggttggctggagtctcagtctctccatgcgggcctggacggaccacaggggaggggagagagcaactgaaagtgtatccatgagtacatggagcgctgcagcgagcgcacatctaccacgcttcggcctggctaagatggttggtagccgcctatatggtactgcagtagggtatacccgcactggaggggggatagcgttgggtcgctccctgcttactgcctgatagggtcctgccaggggcccctcccttctggctgtaaaccactt

SEQ ID NO: 1787 - DNA, 402 bp, Trichosanthes kirilowii picorna-like virus
  strain pt111-ifl-1-NW1
cagacgttagtaaggcagctctattcattatcatatgaaggtttggatacaagttagctatcgtataggatggaccaacgtatgttcccactccggtcacaacctcaatttcaatgcgaattaatcgcaccatgtggttcggattgtaaccctgcttatgtgtgacagatgaaatagcaaaagccaattcatccacccaagatgttgcaccaacatctaacatgccattacgtatattaacgtatggcgtgcgcgatgtatgcgtgcgactgttagttaatggccccaagcgaccttcgtgatcaatgttgcggtaaataacattgaagcttttaagtctcattggttcgtcagtgattttgtaagaattaactattctgaaatcaaaatcttccaagctac

SEQ ID NO: 1788 - DNA, 402 bp, Hubei unio douglasiae virus 2
  strain WHBL72658 hypothetical protein1
gacagctccacactggaggctatatgctacgggcctgttaaagagccagagctcctccccggatgtagtcacaacgttccagtctgcgagtgcaagtgttcaagagtcacaacaaaactctttgacttcataccagctattccgtcgttggtatggactcataagtcatgtgtttgtaatgaaaaggtagcactttcattgcgtcatcagattgatacaggcgatcgctatgcaaccacattagacttacgttctgtcctgaagccctggatagaacatgttagccccgtttcacctagtgttataattaggcatgctacgtcacgtaagaggctattgttggaacaagctcttgaaagtttgaaaggtgaagaattatcagttaaggacgctaaggttaga

SEQ ID NO: 1789 - DNA, 404 bp, Beihai paphia shell virus 2
  strain YYSZX17625 hypothetical protein2
ctgcaaaataactgtatataatttatttgaggtgtgtaccatgagccagtcacatcttttgtacaaaacggcttactacattgtataggtgcaaggggagcacgaagtcaatatccccctctaaatacttgggtaaaagtacgatttgccaagcggtggatgccgcgaaactaccaaccgttccaaggaaggttaagatagtgcgaactgcatcttttgatgaagtgtgtacagcatacgattcaggagatcctagggagccgatctactattctgcggaatgttctcatggtgatgttttggatgttcagtccggaactgagaaatttggagttactatcaccaaaccagctaaaggtactaaagagcagaatgtatcatttaatgatcaaaatccttctttc

SEQ ID NO: 1790 - DNA, 404 bp, Shahe picorna-like virus 6
  strain SHWC0209c11084 hypothetical1
tggagattgtgctatccacccaatgttaattctgggaaaattgcacatgtataacatagttacttagccctaaattagtcctacatgcacagtagggtgagaggatgttatgcagcgtagcttagttgccattacgttttgcgcgcgttgtatcgtaggttttcgagcaagcttcggtcggcttgtttgataaaatttgaccacctgtttctaatcataatattttgacgtttattgatgataacgtcggggaggtgcatgctgcaccttccattactgatcccacatttcatcgtggtgaggatcatgctgcccccttttctggttggttttctcgacccttgcgtgttgccagttattcttggtctgagggcactcaactggccgagggttttaatccctgg

SEQ ID NO: 1791 - DNA, 404 bp, Hubei toti-like virus 17
  strain tick107859 hypothetical protein 1,1
ggaagttccctccctggggcctcctccccttcctccaatgggttaacattggagggggtggtagggcggaggccgccctgcccgagtactactctagttggccccagttccgtcgggcacttgaggggctgcgggtcaccagtagtaggctactgctcgcgagcagggaggccgaggggaaactcttccagtggcgtagggaaaatggtctcgagtggtctcctgcgtggacgacatctgagggggtgtgggccgggggtgacccgggcccccactccctcggactcgacccccgcggagcccgcgccctctcggcgtgcaagcgcctcccggctaccattggccaggacagcgccgctgccgcccatgacgcgtgggtcttgaggccactcaccaaggatgag

SEQ ID NO: 1792 - DNA, 404 bp, Bruce virus
  isolate Antarctic42 capsid protein gene, partial cds;1R
tttatgactaacattacagttaacagcaaaactttcaaagaagtagctgaatacccagatagaaccgagtattctaactcggcggttgcgactacgtcgccagagtcaatttctattacacaaaagtggaataagaaacctaattcaaaaagatcaactacactgacttgcagaaaagttgtcccatataagaatgagaatggtattgatgttgttgaagttattcaggcatcaattcgtttaactcacctaccaggccgtctggctaatgataaactagagactattcagaatctatttaaagatctcttagctgttgcatctaattctgatgtacaggtatccctagttgctggtgagcataatttgactctttcactttagtaaaacttaaaggatttata

SEQ ID NO: 1793 - DNA, 404 bp, Ousland virus
  isolate Antarctic81 RNA-dependent RNA polymerase1R
ttaaccttcctaggagaaaatccttatgccacaagcaattgagctttatagcaatgcaaccgaagctgccttcgtacaccctgaagacgtcctcactcgtgcgcgtttcacacgcaaactaagtgaaaagactgtcaacgggcttaagactgcaaaccttcggtctgagattatcttaaaccaaacggtcggcctgcgcgtatgcgagcagacctgtgctggtgacgaggtactttccgcccgtgcttcaatatctggttcaatcaagaaccatgagaaggtcgacgcgttagtcgacaatttgattgcagcgttacaacagtggaaaacggataagggtagccgaggcttccctgttaccgacttcacgtttaacgattaacaattaaatcaacggagggtcc

SEQ ID NO: 1794 - DNA, 405 bp, Hubei leech virus 2
  strain SZmix21584 hypothetical protein 1 and1
tggctgcaagtccttttggacttgcagtcagtattgtgtttagttgcgttaaaaataagccatcgtcgtttagacgatgttttgtttgtaattatcacctttttctcggctttaaattgccggcttttgcgaaaatttaccctttctttgctacctacaactttttgtagtacactcccttgtcattttaggagagtatctagcttgatactaagaaaaacgccgtatgtgtctgggacgcgattcggctacctttatggtattgatgacaattttatcttagtttagtaaaactaagcatttcttaatgaccttagaaatgaccaaggccttttatgtacacccagcagtactttatgtgctgggtagtgaagtagcttccacgattggtgctacagttcaacc

SEQ ID NO: 1795 - DNA, 405 bp, Rymill virus
  isolate Antarctic21 RNA-dependent RNA polymerase and1R
tatgacaaataaagccatacttctccaggcaactggatcgaatcgcgtgtacgctcaccccgaagacattacgcgaactgttagccaaaaattacagctaaaagaacgcgtcgtcgacggtaaacgagtaccacatgtgagaacagaggtgatcctcggtaggcaagctccaatcgctgtgtgtgaaaacacctgcgctggttttgaaaacctcagtgtacgtctaagtctgagcggcagtttatctaattctgctgccctagacagtatgttggaggaattaaaatccatcattgaccgtgccaagagtgacaaagtcagcaagggcttcccgttaactgaaattactttcaatagttaaggaaggttaatgtgaacacacaatctcgcgcgcgagcgccgaaa

SEQ ID NO: 1796 - DNA, 406 bp, Aedes aegypti anphevirus
  strain Ab-AAF nucleoprotein (orf1),1
gttgggtgtgtttggggttgtagacgagcgatatctccaagagataagcctaattgcaccgatcagggaagacaatttcacaaattacgagttcacggaggttatctaccgaaagggggcggcctcatacttgttgaacattgggattcacaaggagacagaagaaagggctgtgccgggatacgatcaccaatccctttgcgcggcactcgggaagatctgcccatttaagggggagcgatctatccctaagggtgtatctgatgcatcagttacgatcctgaaccctcaacggattagagaactatcgcaggttcttgctgcattgcccaagataaaactcttcgatgagactggggggatcaacatctctatattgctagcactcctgcgatggattcccggt

SEQ ID NO: 1797 - DNA, 406 bp, Thrips tabaci associated dimarhabdovirus 1
  isolate Tamono1 RNA3R
gtgccagggtggatcaatcagatctgaatgtatcatatgtgtagaagtcagtgaaccctccctagaaccgaattgagtgtttcacattacgtgtcaggatgtgtacagcaccaaacgcacgattagaatagttcaattgttgacgagtcatctcaacacgctactggacttgtgaatgtccctccacttgattgcacaatttttggattttaatctatttttaagactatttttactgggctaacgggtgtgtaatagacgtcttccttgttgactgtctgggttaatgtttgaatctcgcttttaacttttggtattacatatatattaaaggcccttttgcctcatatcaatatctctgaaaaaaactaacagatttaaattgatcttaattgtgaattcagct

SEQ ID NO: 1798 - DNA, 407 bp, Mella virus
  isolate Antarctic59 RNA-dependent RNA polymerase and1R
ggagtatatcctatgcaagcacagaactttagtgtaaccgtgacagacggtgaaaagacctttgaggtcctgtcacctgccggcgcatcagcgcctgcggaattccgtttacaagacgacggagttgcgcctacgctcctcccgtacttatcaatcaaggcaggaaaaacaaatggtacggcaaagcgccgcgccagtattttgtttatcaagccgattgagaaggacgggctgcgtattgggcagaacgtttttcaaattacaggtacgattgatctaaatcaacccgcatctgtgactgaaaaggacgtcgagttgctgctcgaggtcatgaaggaggactttatgaaagaagtcctctccaagtgtatcgcccctaattaaaagggacataaccaggagaattt

SEQ ID NO: 1799 - DNA, 408 bp, Beihai hypo-like virus 1
  strain BHZC36965 polyprotein gene,1
ctgaaagatagcaaacagattataacaagtaggcatgattatgttaccctgctcgatgggagtggtaaacagtcttgtgatgctgtcaaccaggttgattcctcaacccaaaatacggatggtacggtcagcgcaagcaaggccaaatataaccaaccgcaaaacccgattaaccaaagggtacggaaaaaggtccgcgtgaagcggaatgatttgttggacttggatgataagttcatacccgaacaggccttaaaagccttaagggatcaagagagacgtggacaggcgcggtccacggcgtcaaaaagacctgcctacgtttgcaatctgtgtggacgggagtgcccccatgtatgtgattatgtatatatagaattagaagattggcaaagaatcccccaccaa

SEQ ID NO: 1800 - DNA, 410 bp, Totiviridae sp.
  isolate trb102shi2nc, partial genome.1
ctcgtatccctcggtgattgaaccattgaatgacttgtgaacgtatgctcctcgtctgacaaatcctccagctccagtagatggtaattcttcgacatgttgattcatattgttacgtatgaatttcactgtgtttggttttgttgttttgtttgtgcttcgaacagttcgtttttcttctactcgttctaatggtagagtagtttccctgttgtgtgctttgtgtttgcgtattgtaataccagtattcagaaccttctatatcgtgatatagaagccaaacaaaacacaaacacaaagcacacaacagggaaactactctaccattagaacgagtagaagaaaaacgaactgttcgaagcacaaacaaaacaacaaaaccaaacacagtgaaattcatacgtaacaat

SEQ ID NO: 1801 - DNA, 410 bp, Riboviria sp.
  isolate rfb198shi5 genomic sequence.1
ctccgcaattgagttctaaactacgagggtggtatttaattcccggattacttaacgttcccgaaggccgtagaatcttgattactttagacggaatccaaaaacgtggatttcatcctgaccagtgtgatttgtttacccgactacaagatactaacctcaaaattgctttgacagcttggtcgtttgcgaacgacggggcttcaaaatacaaatactccaacagcccaccctcggactatccccctgagggacatagagctgttcattggctagtagattctcgcacagctggcattactaaaagctggctatatatatacgattggcacaatacaactggtattataaccccaaacaactttccattcttcccggatagagacgagtttgatgtatcagctgtacgc

SEQ ID NO: 1802 - DNA, 410 bp, Hubei orthoptera virus 2
  strain ZCM20815 putative glycoprotein1
ccctgtaattttatatgatttgtagtagtaaacaccagttcctccaaactataagttacactacacaaatcatataaaattacagggtgtaaagagaagaggtactggtgactacgctgcaacagtgtttcactagcttaaagtgtgatagtgtttaagtgtgtttaattgtgtagtattattgatccagtattttagatatagttactgtttgttctcgcatcttagggtttaatatttatagtatttaataacaactgtattagtagtgtaagtttgcagtgagtgtttttatcctttagcacagcctttcctgaccaaatatagagttgttgctattgttgtttcacaagttaatctgcgtgcctgcttagattagaataacttttcaatatatcagtgttacttat

SEQ ID NO: 1803 - DNA, 411 bp, Barns Ness beadlet anemone chu-like virus 1
  isolate F99 segment1
tccacttgtaggctctccgtgtcacgactgatccatcactgtgggatgcatagtcacaccagcatggttagatcaggaatggcagactatgtggttgaactaggtcgaagtgcgtgtatggaagctgtggagactcggaggatcaagtggtcaggagtcatcctagatggattgaaactaggaggggaactacacagcttacagactatagcgggtcatgtcactgcatcaggaaaatgtgaaggatcttcatactcagaccaatttgggagctggacaggagttgtggtgcaggctgaaattaagatgttcatagacagatatgccacaacagcaaacatcagaacgggggatattacgatcagagggggcctccggtgcgaatgggagtcttagtcatgtttcgacaat

SEQ ID NO: 1804 - DNA, 411 bp, Melon yellowing-associated virus
  TGB1, TGB2, TGB3, CP, NABP genes1
tttgccggggatgacatgtgcgctaataggaagttgaggcttaagactgagcatgatggattccttagtaaactgaaattgaaagctaaagtggatttcacagtgcacccaactttttgtggctggaatctcactaagtatgggatatacaagaggccagagttggtatttgagaggttatgcatctcaaaagaaaatggaaattttagagaatgcctggacaactatgcaatagaacttagttatgcatataaacttggtgagaaggcagtaggcttgatggatagtgatgctgtgagttgttattaccaatgcattagaataataatcaagtggaagcatttacttaggagcagtgtggctatagactttgtcgctaatgtggcttaggtttcttgccataaattgaat

SEQ ID NO: 1805 - DNA, 411 bp, Hubei picorna-like virus 77
  strain WHCC115343 hypothetical protein1
ctagatcctttgaaagagttgtttggtagttatattccatacccacatcagaatcctgtctccgattttcttatcttacctagttctctcactactttcaataccaatattgatggtttagttaaagtcaatggtgagttttttgattataactggcgtggttatgtacgtatagttaccggtttttctgcaacccaaattggtttaggttatggtcttcgtatttatatagagggttctgatcctagttatcgagctggtgtaactccatgggcttcggatgaaggttttgaaaatttccgtaatccaacaagtcttaagaaacgcttttctaattggaactctactgtatggtatactaatgctttaacttctaaaacaactctttctaattctggtgctagatattgg

SEQ ID NO: 1806 - DNA, 411 bp, Neurospora discreta fusarivirus 2
  NdFV2-W683 RNA, complete genome.1
gttccataaacacaccttcgtgatgaaactggtctcacggagccgccaaaatccagtgtttgggatgtttaggttggcgaccaggggcacaaccctctgtagcttggctggaacgggtgcgtgcaacgtgagtacacgcaacatgtccgtgcaagggaacctgctagccagtggtccgttaagacagtggtgtcttgaacaggccatccatttcaacatggagaacccgagtgtaacgactgcgaagtctttaaacctacaacatgaacagtctactccccaggccttttggttattgggtggtgtgttagagccccaaagcaaccttttggaccgccggcttaggcccattgatagagctcacatcaaacgtgaagtacctcaccagtcttcacccacgatacaacactg

SEQ ID NO: 1807 - DNA, 412 bp, Potato yellowing virus
  isolate Hco-030B segment RNA3, complete1
agtaaatctacccatcttcctcccaccctagcatgacgaaaatccagaaatggagattgcctggtgcgatgtaaaacacaaaattcccggcggacttcagattccttgaggtccactcggtctttgaaggtccctgggggggagttgggaggcgaccccgtaaatttactttacgcaaccgaattcaagtctttgtgagtgtcagattgtgtcgtcgttcgtgaggtgaatgctgtcgaggaccactccaattcaactcactcgtcagtcacatagtccataagacttaggaggttgtagtagtttacacccatacacaactttgttgtaagattcaattctacgacgcgttgttagttgaggtccactcctttcaatctgtcgtaaaggcgaatatcgagcttatcttaag

SEQ ID NO: 1808 - DNA, 412 bp, Hubei picorna-like virus 44
  strain WHYY20621 hypothetical protein1
cctgggttaatattaaacccagggagcctgttttgctccatttgagctcgaagataaagcttcggctttatttagagtatcatgtagaccgcggtcattcgtgatcgcctatacatgttggagcaaagccctctgatggcgaggattttaagcctgtagttcgctgcagggccatcataaacacaaccacccaaacaaaataacctacccaaaccaatcccattccttagattgatttccgttgacaattttgctattgatttgtgacgattttaccgtgtttttactggtttttccgtaagaaataaccttgaaagattacacagatgtcggatctgtggtcaaggagacgtagcatgttttacgctactatgtactgaaatctaggggcagccccccaccaaacctttat

SEQ ID NO: 1809 - DNA, 413 bp, Gengado virus
  strain Anda 1734-1 genomic sequence.1
ttctcgggccccactccgcccctttcctgcgttctttcctttctgcctccagcctccccgtcccgttcacaaagatccatcagcataaaccttcaaacaaaagagccaaaactctcctaagcaacctccgctttggctttgatggcatcctcaaggtcaagttggctcaaggtgaaggtttggaccccgatctcctctcttcttggagtcgccgtctcacctacgcacaacccaggcaagttgaactctgcctcatccaaggctttccaggctgtggcaaatcccatcccatccaacaattgctacgcaaccgacacgactatcgtgtagcagttccaaccactcatctacgtgaagagtggaaaaacgccctccacctttcaaaagaaacttggagagtgaacacgtgggaa

SEQ ID NO: 1810 - DNA, 413 bp, Beihai octopus virus 1
  strain BHZY180716 hypothetical protein 1 and2
agttgtcaccccagtcctcgagcacgacgttaaactgctccccccgttggtccatgggggttctgtatatagttaaagagacccttgtataattggataccacgtacatgtttatgttttatcgttctttctataatatgtatatgtaggctttatatttgagagtggaccctatttagggtagtgtcctcgcacaaacaagaaacaacggccctacaacttaacccggtttgtaggatgtaaataaatgggttggtcaatgtttatattttaacaattggtttctatctaagccagggacagaaactgtagatcaaaatctggttggagctgatgctctacagaagactcaccatgaatatcagggaggtgagctagtgccacagagtggcactaccgacgatgtatctttg

SEQ ID NO: 1811 - DNA, 414 bp, Beihai picorna-like virus 27
  strain BHNXC41439 hypothetical protein2
gatcttctggtgtttgtacatatgcacatatatatgtttttatatttatatacttttatactttatgttttatttttatttgttagtgacaattgtgatttatattcacaattagtacttacgtctcgggacgttaaaggaccaagtgagctgcctctcactagaccctacggggaatgggcattgtgtatattatgatttacttttacaggaatttatttctccttttgtatttctgtaattgaccctgtatatactgtttcataaaagcttgactcgctagaggtgtataacactaaacctcattgagtataaacatagtaaagtgttggtcaatgtatatataataataaaactgaagaacctagtgtcgtttcttcaggctttacacgtaagacacaatctttaaagggt

SEQ ID NO: 1812 - DNA, 415 bp, Little cherry virus 2
  isolate LChV-2-TA, complete genome.1R
cgtggtgaacgtgtgaaatcgctaaaggatttttaaagagacaaattaacaaataaaacgacggacgcaccgcaatccatcaaagtacaacaaaaccctaaaaaccactacaagaatttacaaaactcgtcacaacccaccctagtaagggtgtttcgagaaaacctacccgactcacaggacttcaccaaccgggcggaaacagaactaggagaatctaccactaccaggagctcgtcacctgccaaagcagtcctgagagcccaaagaatatgagctaactccaggcgacgagaaatactcgcacacgagcttcatatctttgccttgctcgagctgcaagtggtgcgcgttcacaaccacgactattcgcggtgggtaagaaacccgggagacgacttaactccctaaaccg

SEQ ID NO: 1813 - DNA, 415 bp, Dongyang pangolin virus
  isolate DYCS, complete genome.1
gtatgaagataaatcaaagaggtgagagtggattaccacagcaacccgcttcatacacattggactataccaaactgatcttttaggctagattgggaaatgtgaaaagaacagcattaggggtgaagggcgaaaggatgttagccatacaccgagtagcactagccctgataatatgcgagagccccaacctgagtagatgaggaaggccgtagcagtgagtacactgtagccaacaaggttcctactggtaaggatcacccactaggtatgacctgtagttgggggcatgcccaggccatccttaatgcaaccgggggttggttgcatgaatccaatagggaaatctacacagcctgatagggtatcggcgccgatggggaaaggctctataaaatggcgtggaacatagcac

SEQ ID NO: 1814 - DNA, 415 bp, Hammarskog picorna-like virus
  strain SW13, partial genome.1
aaatacgacgcgatcgccacagctgaagcaactttatgatgtcgtccacgaggccaagaggggcagaggtaacccggacgaaaacgagtgatgtcttatctagggacttttacgatcctgaagaacagcacggacaaggtgttacggtgaggaataagatccagtatcacgtccaataacagtgtcgggaacaggggagaagtgtaaaactccggataaggcaaataaatctaattgaaaggagagctttgctagactagtaaattgtgaaagcaatccaggaaatgataacggttgaattcttatactcagcatagtatatctctgtagcagagagtacttgcgaaaacgattctttgaatcactagaccttcgcgggtcgccaactcagaaccaaaccaatttttacccaaac

SEQ ID NO: 1815 - DNA, 415 bp, Riboviria sp.
  isolate brb141rna1 genomic sequence.1
atctgggaatccgcttcctaacccacccacaggatttttcctaatctggctgggaggttacagtcgctgtaatgcgtgcaccaacgtttgcgtgctgtacgtatttagagcccgatgtttttctgagtttattgccaattttcttttttcagtattttcattttattattgtattatttttattcaagtgccttgcctcctgtggttcgtgcagctatgtgtaaggttttcaatactatttgtaagtttgatcctctttggttattagcactcggaattcgcaaaacccaaatgattttatgagcaagtagaggagatttctgatgcatgtagtagtttcaggtcagccttttggcgccccatttttgggttattacagtcgcgtgtcgcttttggtaagggcttcggatgcgcg

SEQ ID NO: 1816 - DNA, 415 bp, Hubei picorna-like virus 19
  strain SZmix17531 hypothetical protein1
aagcgatcatattacagctttatgttatagccttgtgtgtgtgagagacacactcattttcctataattattttccttagtcggcccctgtgattcgggaggtctgctatgtcgtataatcacgtagatagccggtggcaatatacgtaagaccaccatgtcggcacctgtagtgggtgatttcactttttgatactgtgagagtttccagtattctgtgttatgggcacacttccattcatcctttcaatggattccaggacacgaacgcgtgcatgaagaagcacgttagtagcgatagggtttatacggccaaacagagggtgggacattcccaccagattgaattttttccggtcttggaccacaaaacaacttacgacacagatacaacatactgatatacgaatacaat

SEQ ID NO: 1817 - DNA, 415 bp, Hubei tombus-like virus 21
  strain spider121926 hypothetical protein1
agcctattgcgccagggatctcgcttaacagaacaaaggtgttgggcaccttccgatcctactgcatgtcagcaacctccagcttacggggagtgtttagcatccgtgctgactatgatatcgctaaaaactgcaaaccagtatatgacgatgtcagaaggatggtggcgatggcccctagggatgaagcaaccatgagcattgctcgcaatgctgccatacgatcatgccgggaacacaaagttgatcctgaatgcatcccagtcgtgttggcaaaggctttgcaggtgactaaatccgaggtcaatgcagctgtgcatctcagtcgccgcaaggagcgaaaggctacgggtcttttaaactccttctaccatgtcctccgaaaatagaacctgcaacctgtgttccattaccc

SEQ ID NO: 1818 - DNA, 415 bp, Cooper virus
  isolate Antarctic61 RNA-dependent RNA polymerase gene,1R
gtatgcaagcaaaggatataaccatcaccttgacctctggtgaaaagaagtttgaggtcctttctccggccggggctgagaagcccgcggagtatcgtctagctgacgattccttaacccctactgccgcgccttacttaagtgtaaaagcgggcaatgcgggtaaggtagtgggaactcgtaaagtttccatcttactcgtcgtccctgtccttaaagacggggtacgcgttgaccagtcggtcatgcggctagagtttaaagcatctggattagctacgattgcatccattaaggaggcggtcgaaatgctcactaagttagtagagcatgatagcgtccagactgctttgaagacaacgactgctcctaactagaacagtcatttaaacttaatatcacaagaggatgtttc

SEQ ID NO: 1819 - DNA, 416 bp, Taura syndrome virus
  complete genome.1
ctttaaaagtcgtgcgtggcttcaccacgcacgatcagtactatcagttaaccactcttgaatatgctcaatgaccctattcaacactggtgtctcttagtacattattttagcacttaacgtgcatgagttttgcccatttctttcaaaaaaatgagtattcgaggagacgtcccgctccccgtcttatttcaaccgtagactcgacatctattggtggacatttaattccagtcgccgtaagttgcttctgccccgcgctatattttcttatacttatggttctataggtctggtttaaaacgtaaatagacggcccacaaactatagaacgcgtacccggaacgccaatcccggataagtccctggatatatagatgcaccgcaatataagcctgcagactgtctcatatact

SEQ ID NO: 1820 - DNA, 416 bp, Posavirus 3
  strain 10611 polyprotein gene, complete cds.1
actgttctcgcacgtgtcttttgtgtggtttgtttttgtttatcgtatcggaaccatcactctattaagcctctctattgtttggcagcttcagatggttataagaacacggtcataaatgacaaaccgatttatgaatatgaaggagaagcgatttgtgatttgcatattccatcaaaacttgcttacatttggaaaactagcatgttttctggtggtggtgttataagatcaatgacagtttcagatactagaacgtttttttatgataaccctgagtttgcagatatctggatctttttttttagaaactgagttatctgattagtgtgaacaactgtgttggtgtaaaagtccctgctcctactatttcggagtatggtgtcacctttgtttatcttgtttcccatcccaca

SEQ ID NO: 1821 - DNA, 416 bp, Wenling hoplichthys picornavirus
  strain XYXMC41402 polyprotein1
gtaaggactagatactatttaaactagagtacattttctaattttgcataaactatggcggcattgaccctggcgtaaacttcgccagcaccaccaatgtcaaatgggttatgtatgattatttcttgtattaggtttatttacttctaccgaccactccttagtttccgatgctagatgtatctggagcgcggaaaaccatttatttggttagtacgagcactggttttgtttagtattcagataggtgtatgatagaaaaagtagcaaaccctcaaacgaatggccctctttttgagtaagccggaagtgggttatcttttccgtgggggcacggttaaggagcgctatgttggatgacagtctcgcggcaggtcgttctatcagcactataaataccacctgttgaccttcac

SEQ ID NO: 1822 - DNA, 416 bp, Beihai mantis shrimp virus 5
  strain BHXG25299 hypothetical protein1
ggtttatgcgccacgcacgatttaatactaccagttagtcacacttgagtacactctattgactctactcaattctgacgtctgttagtatcattgattaaataaggcataagtgctcatagcacattagttttgttttgtctctaattaaaagacaattcactcgaggagacgtcccgctccccgttttatttcaaccattgactcgacatcaattggtggacattctctatcctccgccgtaagtagcttctgccacgcgctatattttcaacacttgtggtttcatggaagtagtttaaaacgtacctagacggcctacatgccatgaaaagcgtatccggaacgccaagcccggacaagtccctgatatatagatgcactgcaatataagcctgtaggaggacccatatatt

SEQ ID NO: 1823 - DNA, 416 bp, Wenzhou shrimp virus 7
  strain beimix73547 hypothetical protein 11
tgcaaggtttgcatcccttgcacgattcactatgagtcctctttgtggcacactagtataccctactttgaccctagcttttagctacgctcatgtacgctgtactactctgtcatttttggttagtagtgttttgagttttcctcataatttgcacctttattcggagagacgtcccgctcttcgtcttatttcaactcacggactcaacatccatgggtggacatttcttaactcccgccgtaagagctttgtgccccgcgctacatttctcatacttacaggtttgcaggttctgtttaaaacgtattagacggccagtatactgcaaatgcgtagccaggattccgaccctgggtaagtccctcagtatgtagatgcaccgccgatatagccgatagggagtacgatacatc

SEQ ID NO: 1824 - DNA, 416 bp, Beihai razor shell virus 1
  strain BHBJDX18719 hypothetical protein1
gccgggagtaaatatatgtagcgtaatgatatataataattatattttcattacgttacgtatgtttgccaggtaaggtggtttaccagccatcatttccttttttcggtccattggtgatatgaccactcacccttcccattgttgttttcaacatttcagcttacatccagccgctcttgcggctctgttccagctgtctgtaagtttaacagactataatcacctatgaagctacaattagcagagttgtagtggaggagttcggttactgaaaccaaatcaagggcattgaggattctctgccgagattagatgccttatttaagttttgcgtgctttccaatttttacgtggatcaaacgcaaggtagcttgtagtcaagccgttgacctaaacaacagtactacaccatt

SEQ ID NO: 1825 - DNA, 417 bp, Aphis glycines virus 1
  isolate North Dakota, complete genome.1
agaaaattatttggtgtgagcgattatgatgtaggctcttggattatataaaataattgacccctttgttgaaaggataaatcaacctctttcgttttgaagcgtggaatttcaattcgattgtagtagtgtcattcctatttaggatacggttggacacataaataactaatcttccgcccagctccttgaactataccatctaccactaggagttgtgtaaaattatggtggtcaaaacaacaacaacaattcttcacaatctggcggttcccagtctacctcccccgctcagattcacaatcccgataaaatggtagacaatttgtcaacagacgttcaacaggaaactaatactacgtatttcgaacaacgagcagttttcgatgagacaaccttccaggctcctctctctca

SEQ ID NO: 1826 - DNA, 417 bp, Changjiang picorna-like virus 3
  strain CJLX28786 hypothetical2
tttgtggctttgggtgtctgatatcacatccaacatacaaaccattagatatcctgacagttacatttactgcttgaatactatttcaggaaaataattatattcaagagcgtgggtgctgtcagaagaacacctgggcgtttcccgaataatctatttagattagagatgaaaataatattttaaatataggtgttactcaaatattttccaaactctggtgaactataagtgaagtcactagttttataatcacttactaaaaagaataacaatattggcgtatctcttgcccaaagagatctgacttgtggttggcagattcaatccgaacaagtgtcttatgacacaaaaaataatgatgcacaagacactattgtctcttttcatgatgcggaaattggcagtagtgttgat

SEQ ID NO: 1827 - DNA, 418 bp, Husavirus ACS178
  polyprotein gene, complete cds.1R
aggacaaggctttgcgggaaaccgtgaagcaggcaggtggagaggtgaagactgagctcgctcggcttcctaagccgagagagcttaagcagagtctttccactgtcgcccgagtcttgccgacgaaggtgcctttggcacctttggcgacgatggctcgccgagcgagacgccgacagctcaatgctgcgttgaagtcgattgtagcggtagtgagtaattggaatcgctcgtttgacgtcgctcctcagacgtgatttcgaccctctgcgcgggcagtaacaatagcgcctcctctggcagttctctggataagaactgttcccagtgcgtgggaaacaatagcgcgcgcgtcttggatgattccgctaagaatctcccaactaacatcatttgcgggtcccccgcttgcagggtg

SEQ ID NO: 1828 - DNA, 419 bp, Hainan hebius popei torovirus
  strain LPSC33749 1ab protein, spike2
gttttagtcgtagtttggttaattataatgttagtttagtgttatataatatattagttggtaaatatttagaaaaaggttataaatgggtgaatggtgttcttaaacgtagtgatgttttggttatacagtatgttcaggaggcttatgctactaatcctgtgttaatgattgtagttattgtttttgtggttgttgctttgttaagtttattgttttcatattgttgttctaggcctttacataaggttgagaaaaggttattgtaatgtttttgttagaaattatatttaaagtattagctttaattattttacaccaactgctaactttgtaccttaatggtgcaagtgcgttaccagttgtgtgtgatatatttgaacctcctttttatagttgtaggttgagagaggatagtt

SEQ ID NO: 1829 - DNA, 419 bp, Western African lungfish astro-like virus
  strain FZFYG1494061
ttaacttactaaccgcttacgtaacgaatgagcacatctacctaacttacacggggggatattggtcaatttttatctatactatcatattacgtgatgtcctagatcgtttaattttaaatggggtggttcctgttttcctaatatacaagcctagtgaaaaggatttaatccaatttaacagtgcgaagagtatcttattatctaaatatccaactgccagattcaacgtttatgacgttgttactgatattcctgtgacgagagtagctattgatccagatgactttcaagaatctaaagattttttgacgaagggaattatcaatttatggggcgaaaagaaattatggaacgaatggtacaacttcactcagaaatttattaacgagtcaaaatcgggttgtcgaaacacgcta

SEQ ID NO: 1830 - DNA, 419 bp, Mackintosh virus
  isolate Antarctic98 RNA-dependent RNA polymerase1R
ggataattcccttgattaagtatattaatactttacgtgacaaaacctcctctgagttcgttcgcattgaaccaactttcgacggtggtcagttgtctttcactgcagctgtagttaaccctatggtggcaggcgtagtcgtacctatggtacgaggcgccgtccgcattactttaccgaccgaggtggtcgtgtgtggtaatgtgtgccctcagaagattaatcaatctgtggaagtgaaattcaaccttcatcagggcgctgctgatttagcagaacttcgtgctgaagtgttacgcgcaatggatattgctattacctcgtaccaacttggtaacggtattgtcccacctaccgatgcttcttttgcttcggcctgatcttttacaagcttcctcacctcctactaaggaaaacat

SEQ ID NO: 1831 - DNA, 420 bp, Boutonnet virus
  putative polyprotein and hypothetical protein2
tgtactcgcctttgtttaaaatcaatactctttgtcaattgaattgggtgcgaacttctattataaataacactcttataaaaatgcaatcctacaatttcatgtcttctattgatagacccattatactaatccttttctctaatcttctctctttcaaagatttgcgtaacaatagtagatatcctgatgactatcctctttattgtctctcaaaagaccctttcttaacttatatatctaatattctcaggtgtcttaatattagtaaaaatgtcgatattaacgagctcatcacttttaataatcaatattcctatgctattgaaaaatttaaatatttcttaaatgtctctaattatctatacaatagagaaatctttgaaaacgaatatcatctaacttggagacaataataaa

SEQ ID NO: 1832 - DNA, 420 bp, Hubei tombus-like virus 24
  strain GCM76561 hypothetical protein 12
agacgcgagccccctctatctgtgtgccggtacggagacattttgcagccattaccggacggtgcgcggattttgagcatacccgcaaccccatgcgatcatcgtcatgtcattagtaaaatcgcatggttttccgattgggttggcttcaaacgcctttcttgttttactgggtgcctgaagaacgagctggtttcgttgcataaccgacaccttgttcgtagggtggaaccagaattcaagacagtgaagcaggttgcctccaattggttatcaaagtttcctcggttcaagaattaccatcactggactgaagaggaagtgatcagccatacaacacagagtaagcgacaaaggacgcgtgacgcttttcgcaagtaccacgaggagggtgttgcagcctcggaccgccgcattaag

SEQ ID NO: 1833 - DNA, 421 bp, Pineapple mealybug wilt-associated virus 2
  strain HTS 2, partial1
gcggctgagcacaaggcccgacccagacatttttccgccgattacgttgctacggtggacatattgaaattgttctccggggtccatatattggagaattcactacgacctgttaatggtcgaactttattgaaagtcgttagtggcagcgtgagcgttgtgggcgtaggtggcttgccgctacgacttagtcgcccgcactgacgcgtctttgttagacgtgtctcgatttagattataccaccttagggtatcgtccagcgccctggtggtagtatattcgtgcactggggttgcaacgagtaatacttcatcaaaagccccacctgctaaaatcgagaggcgtgagtctccacgggtagcggtgccagtagcagatcggcaggctatagccgatgcccgatggaaaaagtacgaagtt

SEQ ID NO: 1834 - DNA, 421 bp, Strepsipteran arli-related virus OKIAV104
  cRNA sequence.3
gcagacatacaacttctatctcaattatgcttacctctatctctcttctaatactcgggttgtcgataaagccgaattacataatttatgctatcacgactagaaaaaaccttattttcagaagattgtaattacaactctactcatgagtttattcaagaatctggaattgtaacatcagatccaacattctgaatgaattggactgttctgagtacaatgagtagagaaagcttaatctcatattggattttaaataacggaacttagaaaaactctgagatgtgcaaattgaaattatatttcaagctttcgatgtcacatcagctattattattgagacacaaggaaagttgtttgttttagaaaatactctacttctagtaaaatagcaattattagaattatatttacaagagac

SEQ ID NO: 1835 - DNA, 422 bp, Possum hepacivrus
  isolate GV, complete genome.1
taaccggatacactccaaagccaccggacaggctacctgccgtgacccgcagccgagggtctcgtagggggaagtgcgcgcttctttgcgcacagccggcggccataacctcggtgaggcaggcggagtgataagctagtgtgaatacccatcggcggggaccacaccaaaccctgtcgcccgctgcggcggtgggtcctggcaacaggaggccgcagtgagtggttcttcaggggaacgctggtgggggcttagcactagtggaaccttgcgcgctgaagccctggggcggtcgtgaggaggggtgaggaatgctgggaaggtacccgaaaggatctgatcccaggctaattgtctagcccctcccgacctttttccttttatttttcttttctgttgttgactgattacatagatacaag

SEQ ID NO: 1836 - DNA, 422 bp, Chaetoceros tenuissimus RNA virus
  genes for replicase polyprotein,2
gttttcctggtatcttgtacatatacatatttacatgttttcatatttacatatttatttgttatattttattgtgacaattgtgatttgctttcacaattagtattttcgtctcgggacgttaaaggaccaagtgagctgcctctcactagaccccacggggaatgggcgctgtatatattatgatttacttttattaaaatttatttctccttttgtatttttataattgaccctgtatatacaatccataaaagcttgactcgctagaggtgtataacactaaacctcattgagtataaacttagtaaagtgttggtcaatgtttaaaaccaaatgagttaggtgtaatctcagaaacaccaacatccggtagggatacaatttctctctattattgtgatgcagatcatattaactat

SEQ ID NO: 1837 - DNA, 422 bp, Beihai levi-like virus 8
  strain BHTSS17667 hypothetical protein1
cgattggggatctcggaaggtaccttattcgccggggacatccgtccagatggtcacctcgtgaccattctggtgcgtatgtggcctggcaatttggttggagtcctcttattagtgacctttatcgtcttgctgacttggctgatgccacggaagcgaggataaaggcactaaaggagggacatcgtgagcagaagtatggtggtaaactaccaccatccataccattctcacagtggaagtctggagtgaagaagactctagtcaatggctatcgccattgggtagagtacgagattcactttaaacgcgttgagaccaactggttcactaccagatttgagcttaacgacgagtatttaccagacttagacaacccgtcagcgaatattagaagagcccttgggcttgatctttctaat

SEQ ID NO: 1838 - DNA, 423 bp, Bat Paramyxovirus Eid_hel/GH-M74a/GHA/2009
  complete genome.1
tgatagaccgggaagacaacgacaataccacaaccaacagctcccaaaatgcggaacaaacaagccccagaaccccaaggagacagcccagacaaccaaacccggcaccccgcagatccgaacaaagccccgcattcgaccccgaagcgcaaaccaaaaaaaccaccaaatctgccacagaacagccaaccaaccccaaaggacaccaacgacgcaaaacccgcttaactataaaaaacttaggatcacaaggtacaaaagatccaacagaaagacaaccagcccgactgcacagaacccgaaaacaagccccaaaagaacaaacaaaaccccgagaggagaaacaaccaatccccacacccgaacaaccctccacacccacacatagctcgaccacttgctcccaaggagtcttttcacttc

SEQ ID NO: 1839 - DNA, 423 bp, Marine RNA virus BC-4
  non-structural polyprotein and structural1
tttttgttataatggtaaccataacgacggtttaatcaatctgttattgatttagtccgtgtcctagtttattctagggactttttggtcagcctaccagctgaccttttcactcgtcacattcttgagtgaataaattgattcttctttgtgaagatgtacaactatgcctggtttctgtttttaggcgatttaatgtattagttctttttgatttgtagcgtgtagagcgcactaattgaggtttccgtcaattcctcattagcttctcctttcggagaataacgaatcacattgaactcatgcaaatcacgtatgagaactcagtattgtatatgtgtgtaggccggtaccgtatggataaatccgaaaacctgatcacatatgttttattgcttgcagaaaactatatgactcacctag

SEQ ID NO: 1840 - DNA, 423 bp, Bundaberg bee virus 1
  isolate QLD-6 nonstructural polyprotein and1
tttttagaaacaagctgcgaaaagatttcttttaaaacaaaatttcttatattatattttaagaaactattttggttcatatttatagacagttaagtcgctactgtaagctacttcttaattgttagtttaaattgctaaagtattttctacctcaagcttttaaaaacccaatcaattttttcgtgatttttaaaattttgaaaataatatcatcaaaaattttctgcagtataaacttgatcgctcgctttttaaagatcctgtttatatttgcgcttaacatcttcaaaattatctttgttagatcgttcacgatcttatctcatttggtacttttgactctgttgatattaggcattttgaaaccaaagcaatacgcgctttttgtattggtacttcacgcatattcgttaacacaaa

SEQ ID NO: 1841 - DNA, 423 bp, Wenzhou picorna-like virus 7
  strain shrimp14504 hypothetical2
gtttcggaatttcctttaataaaaccgccccgttgacccgatggggtttatgtatacagttgaacagggttgtgtgtatatggataccgtgcaaatatttgtttttcatattttgtattatttgtataggctttgcatgcatagatgtcgtcctcgtgcgatacccgtatttacgggaggttgatcacccatcaagatatgacgtacaatgtggattgagtgtgcccattgtattgtatattgtagcttactaaaacaattaaaagaaataaaaacaggggtttccaggattaccctacgaaaaatagaaatcttggtcaagattacaaaaacattaaatgcttgaatgatttgccacatgctttagccaaacaagaccctgatggttggttgggcataaattattgtgcatcttgtaatctt

SEQ ID NO: 1842 - DNA, 423 bp, Wenzhou picorna-like virus 34
  strain WZFSL80163 hypothetical1
cctaggttaaaacctagggtagatgtagagagcaatggaacattaattaaatcttaacagagatgttccatcttttaaaatctactgaaaagtattttgccgtaaccacacgtaacgtggcgtacttatacgacaaataagagagtagcacacttagtgttagaaatttttatttaaccatgcgttagatgtgactttctatgcacctctgcagacaagaagaggcggtattccaccgatagcaggaaggtttgtttgtgtttctttagcagaatgaaacacagcgctcttgcgcgctttgatttcgtcatgagagcaagatgacgctggaacagacagctattttcttaagtgtttggacataaacacacgttgtgctacgttagtaaacgagccctctcgagagttgtaagtttaacaaat

SEQ ID NO: 1843 - DNA, 424 bp, Picornavirales sp.
  isolate wpk049shi02 genomic sequence.1
ttgattcacaatacgggatgtagttacatgcttcatttttacatcataatggggggcttggtttttaataatagttcgaacagcgttacgcgcttgtcgattttcgtaaatggcaggggcttgatttaaaatttttgttacaggagctacacttttgacttttgtatcataaaggggaccttgagtttgattagggttatattctggtaacaccggtatatctctacacccatgttgagatataccggtgttaccagaatataaccctaatcaaactcaaggtcccctttatgatacaaaagtcaaaagtgtagctcctgtaacaaaaattttaaatcaagcccctgccatttacgaaaatcgacaagcgcgtaacgctgttcgaactattattaaaaaccaagccccccattatgatgtaaaa

SEQ ID NO: 1844 - DNA, 424 bp, Dezidougou virus
  strain DEZI/Aedes africanus/SEN/DAK-AR-41524/1984,1
ctccactgtctccgttccaactgttgcagactcgtgatcgcatcttgcgtgaaggtagcgcctgattttcaggaaaactcaacagttgtcggagtttccattacacaggtttcttcctcgttcttcctgtgttgttctttgaacgagaatcggttatttcttgcccttataacccgggttttattatttttgcctaaatttctattcctataatttctttactctcactatcgcacaatttaaaaatttgaacaaagaaattcatttgaatcaacgtctttctgatagtgaaaaaacatttcactaattcaagacgataaattatttcctacattgttttatacattgccaggagatcgattggatttttctgctgtaagatttgtgaatgaataagttaaatatgctttagtcaattatcatc

SEQ ID NO: 1845 - DNA, 425 bp, Mytedu virus 1
  replicative protein and hypothetical protein genes,1
gtaaggtcagtcactttggagacgttaaatccaacccagtttcaatactgatggttagcaaaattgatatatgtatatggataccgtgtttgttttaatctttatatgttttgtagaaaattcataggctttgcatatattaacggtccctaccggggagttttgttcgagttcaccgtgctcacttgtaaatatgtcgtaccatatgagtcaatccactctatggtttgtaaataaataaatggattggtaatatctttaattataaattatgccgggatgtacaagccaacataagttttggtcccggggaagcaaacgtacacaataaatctgtgtcggagacacagtcagcagtgactgaaaattctttattgaaaatagagaaatttaagccacaatctggtccggaaggcactactgtt

SEQ ID NO: 1846 - DNA, 425 bp, Termite HDV-like virus
  complete genome
gctccccgcctccagcccaatccctgtcgttgcgggccgccagtccaacggaggaattgtcaggtccaccctggatggagcttctcttggttggaaacaggcctacccggatcgtctgacggagcccctcatacagcgggttcccgagatatcctgtgccctattgcttaccgtatgtaccaagatgttcacctgttgttcccctgctttcccaagtcttgggttgtgtttcacctgacgacctcctcttcctcccctgcccgcaacgttcccgacccctcttctgtcccgatcttcgcaaagttggacttacctgctgcggtccaacggggcgggaccaccaacttattttatctcttaagagaaaattgttgatttgggtcccagcccttcgttgaggagcagcagaaccaacacagcgaagg

SEQ ID NO: 1847 - DNA, 425 bp, Shahe bunya-like virus 2
  strain SHWC0209c12742 putative1
ctttgcataaagagatttaagtgaattgaaaagttctattaaatttgtttaatgtcaagggcagttgagagacttattttgattacagtcatcgcaacactttttgtagttatcactgattttattgttgaaaatagcaaagaaggtgaagttactattttaggtagaggagattgtataatctactctggtaagaggtactgtgaggagggtagaaaactgtcctgtcctggtgtctatgaagatttctttttcgtttcagggttacttctgtcaaagggtttcacttttgcttcaattgcaggtgccatagccttactagtctttgtatacgggaaaataacaagagaattgagaagtagtgaaatagttgattcaagatttgatttagagcaagcgagagaaaagaggcttctttgtaatct

SEQ ID NO: 1848 - DNA, 425 bp, Dundee virus
  isolate Antarctic90 hypothetical protein gene,2
attggagaaataatatggcacaagccaaagacttcacgtttaatgacggaacttccgatctgaccttcgaggtcttatcacctgcaggaccaaatagtccagcagaatttcgtcttgttgatgacagcaaggcaccaatgaccctcccatacctcagcattaaagcacgaggtgtgaacggagcattggcccggaaggcatcaatcatgtatatcgaacccatcgtgaataacgaaggggtccgtacaagtcaaaacgtatggacgctcgagtcacggattgatttgagtcaaacaaccgctactacccaaaagggtgttgctcgtttgatcaaactgctacaggaggacttcatcactgaggcccttacaaaagctgtagctcctaattaaacaaaccctaatcttacatacgaggtttattaa

SEQ ID NO: 1849 - DNA, 426 bp, Rosellinia necatrix hypovirus 1
  genomic RNA, complete genome,1
gggtgtgaaaacttacacctgctctatatactttcgtattatagaggcgcaagttcgcttcgctaagtcgggttcaaatcccacgcaattttacctgttacaggtttattgcagcttaggtacacttagacttaggagtgtacatccttcaatgtagagttccgagctggaactctcataaggctcgtagtgagcacccgggattggtcgtctcgggagtagaaaagaagactactttaggttagactatcttcctttctgactttaacggctgatgcgctaactcccacaccgcaggtgtggataggttggttatttactcagagtaaaagttggataaattgtttagtttttttaaaaatgaggtactggccatagaaccagaaactgcggctaccccgcacatatcaacaaagatatgccatc

SEQ ID NO: 1850 - DNA, 426 bp, Picornavirales N_OV_039
  putative non-structural protein2
tctgcaagcacgggaagccccgtcttggggacgttaaaacccagttttgtcaactttaaagacacgagagggtactcacgttaggcaaatactctttgttcggcaggttaccaggatttggattttataagcccgagtttgccatttccttggcaccgaacgattataaaacatcggaggagttagagtggcgttgagttatgccattctttagagctatttgctcactctatacattgacttactacatatacatatacacaattacataataaagaaatagatatagatatagagggatcttatacatcccaaaacacactagaatttttgctagtgtgcacttgttgtggaggttttgttcctcaagccgatttagcagaaggagaaatctcatccgctcaggacaacttcgcacaacagacc

SEQ ID NO: 1851 - DNA, 426 bp, Picornavirales sp.
  isolate xftphe89pic1 genomic sequence.1
ttattggattatggagatatatgatggcctggcatggaatccaggaattcttacatattggaattgtatcccacgtgaacggggatgtggcaagtcccccagtaatgctgggctctacccaatgtgtgaggaccgtgacttcaagactagttatggtcgtgtgacaagggaaagagtttcttacccgcctgtgtattaggtgtgtacgctgggaaaccataagcgatcgaaggtaaagtggtgctgaaatattgcaagctcaatgccttctatcgtgagtcggtgccgctgcatttgatacacgcccctcttttggggtaaatggctgacacgggcatccgcacttgggaatgtgcggctggaactagactgggtgatagcctgccggctggcgctgttgtcatggtatagccagttgattgccac

SEQ ID NO: 1852 - DNA, 427 bp, Plasmopara viticola lesion associated alpha-like virus 1
  isolate1
ccagcactttagatttacagccacggcgtgtaaatctccagtgtttcgagttgcgcaaagcgttttctggataaatgagcattttcgaatacccactgactgtcacatcagtcattgacgtaattttcgcaacgttcaaaaccttcgcctcttcttcacccagccttggtctcttcctgaagaccatttgcaactttccaatctgggtagcttttgcaatcggtttgatctgccttacgattgacaggatcagcaagcacaagtacattcggtatttgaatacgagacatcacatcgtagagtcaattgccgagagaggtggagtcgtgccagttcagcccaagttgagaacgcacttctcacctagacttggcgatcgggacatcacgtctgccacacccaccagtgcatcacgcaggtggaacta

SEQ ID NO: 1853 - DNA, 427 bp, Picornavirales sp.
  isolate bsk136shi16 genomic sequence.1
aagagacaggaggttcgtcgtattgtcgattttgcgtatttatatgcatatccgcactgccgcttatcgtggtttcttttaaatgacatttggaaagacaaatgaacacttgtgtttgacgtttgtgtactcactatatactagtatagtgagaatgaataaatggctcgattattatgtgaataagtgaatgaaacttcaagacttagcaactcgattgtgtttagctaagtgtgcttgaaagtaacttatttatcatatgtatcgcttgaatttattttgattgcctatggtgtctaacccacaccagcctcttcatgaccctctgtgcacgcagggattaacgtgcatgcaaagtagcgctgtttgagaacagttttaaatccacaatatgtggtctttgcattagattttactcgtgggaata

SEQ ID NO: 1854 - DNA, 428 bp, Lilac leaf chlorosis virus
  isolate LLCV-BJ segment RNA3, complete1
tcagtcgatggaaagttaatatcactcaccaagtaaatcgctctttgttagcgtgttgagttgagtactcgatttcatttcgacttcgatctggtattatccgattgttgtgtttggtggtcccaaggcagggttggcccgtttgggaattgtaaatccaagcaacaaggagagcagagagaatcgtgataagttcgatctatctcagttgtaaatccgatagagaattaggagcaaaatcaacggtatcaaagcgatacttactcttttgaggacagttgattccagggttgctccgaatttctcgacgcggtggctgatacgatttgagtatcacgaggcttaggatcttcggttggacggaagagtaagggttggccctgctttcgaaagaacgactgattcgaatctgtccagagacgagaaga

SEQ ID NO: 1855 - DNA, 428 bp, Iflaviridae sp.
  isolate dwb184ifl2 genomic sequence.1
tgacattgacaccaggtaaagagaacgagggaatccgaccctatccgttctctttacctggtgtcaatgtcaacaggctccagtggggtgtctggtaatcacccccgacaagtacagtcgttaaaatgcagaccccagtaaggtatctggtacttacctccgacccggattaatatttctgtggagtcgttaaataattagcaagaaataagccgaccactggttactccctcataggtttcagagttaaagtgggctcctaaatatgtgagtgtaccgcatttttagtgagtacatcagtacaccggtctatgtgttacaacttatgaagttatattatcgagtgacagagttaacgtgagaagctcttactgctaatcttgcatttactgcctgtaaaggtaacagtgagattaggggctgagtag

SEQ ID NO: 1856 - DNA, 428 bp, Mekrijarvi negevirus
  isolate P39, complete genome.1
gcaaagttgtcaaccagcatcctcaccagatgtaattgccgactgctaagattgaacccgaattctaaacgaatttatcaatcgctcacccttgtccggtgagtccaaccagctgcctaacccgcagaaacatttcacgcgaattaatttgacgtgaatccaattgtcccagttatctggtacaaatctccgtttaaaatttttattttaaaccttttcgtcactttcacccagtgacacttcctgcagatccttctgattctgcaaaaattgtccgctcactccggatttctttgatttgttcacatcaaatctcccccaccttcattttgaagtcctgtctcattaatagtgagactcccccttgaattgttttcttcaattctcccctttttcgttgttaagttctgtcctaatccgacattacg

SEQ ID NO: 1857 - DNA, 429 bp, Mizyes virus 1
  polyprotein gene, complete cds.1
taccccctttcagtgtttgttaaacagactcttgatttgtaacccttgttgttgaaagaactagctattcaaaactagtgccatcatttgactaacccgacttctgtcggtggaaccctgtctttgacggctcttatctgcgcattgagcccagtttgctatgtcatcaccaccaagaaccatttcacgattcgtctgcgttaacttctccgcatttccgcctgattgcccattagtttgttcgactttctcgtttgcgagacttgaacgccgcacttttatgctctgctcagcatattaatccatcgtattaaacacaaacgatcgcagatttacccctgcgttaccaatagcgtactagtgatgtcgcactagcctaaccctgatcgagaccacactcgtaaccatggattccagccaagccttaaa

SEQ ID NO: 1858 - DNA, 429 bp, Mytcor virus 1
  replicative protein gene, partial cds; and protein 21
ctacactaaggtagttttcccactaactctaggagtaggaatagcattgatagcattcaccctaacaaggcccactctccccacggtcggggattcacaacacagcctacctcacggtggctggtaccgtgacggaacgaaaacagtggcctacaactccccccactactatagtagtagtttcatccctttcttagctgtgcttggtttaacactcttaatatatgtttctagtctatgttctggtcggggtgctactaggagttgccctcattgctgtggtcaacactaacaatcctcagtgtactatagtattcaccggtcattccactactatccaggggtgtgagcggttaactaatttgcatgacatcatagcagcggttaataaccgcttaagttttagctctagttgtgaaaactaactcc

SEQ ID NO: 1859 - DNA, 429 bp, Beihai hermit crab virus 3
  strain BHJJX21702 putative glycoprotein,3
ggcatcctataacaccgggtgaggactgttcagtattgttctcctatgcatgcttagttttagggtcacaggccgataagttctctgtctggaccatctttcttagtagtttgtaagtgcctgtttcatatatagatgtactattaagggtttagtttttaagtatatttttctcataatcatttagcatcataagattgtttttctcagatgaatgacagatacttctgttccactactcaaacttcccctctttctttcagagggaaggaagacggggagttggactcccagttatccctattagtccttatctcaaacctgcaattccatcagatccaatatttttgctcctaatgttgtaattggctagtttaaaagaacacccccactgagtaaacattataacacaattacacagttccaacc

SEQ ID NO: 1860 - DNA, 429 bp, Wenzhou picorna-like virus 31
  strain WZFSL72092 hypothetical2
agaacttgtccacatatttgatgcttcgggataagtgagcctccatgttgtcgaggtgaagactactactcagtctttaaaagagaggagagcgtccagagtgtgtgtcttgagcagaccacactttagtatttgcttacagaaaatcatattaaagtggatggcaatgccactgaaaaagataattgcatagagattgaaggtatttcaatcactcctaacttagagttgacgtctggggtcaccggttttgatagtgaagccacattgtgcgctgaagtgccttctttaaataagggaactttgcgggcagatggcgacatcaatcagttgaagcattatttagcgaggccatttttatggcgtactgggacttttcttgtttcccctgggccacaagagattgcaccacttaacaatcacgcagat

SEQ ID NO: 1861 - DNA, 429 bp, Beihai picorna-like virus 9
  strain BHBJDX18814 hypothetical protein2
tttgtcaaaagcctgaccgtcaagtcgttaaactgtccggatgcggaattatctgtagtcgaaactctaaggaggaaccaaaaatattctgtatatattgattacgatgtgttatatgtgttgacaactacatatatattatagcgcttgtatactgctggttgccgtagtggcaaggagtttttactcctggagaaggaccactccaaagaagtgttgtgataggcaagtgctctgaggcgagcacttgacccgtatacatagtgccttactaatttttataatttttataatactgaagttgacagtataaacaacttatacatattatatacacctcaatcgggtacggttggggtaacagatagtgtagcccctaatgtgaggagtgaaactatcacaaattttgaagtgcagaatgcaggagaa

SEQ ID NO: 1862 - DNA, 429 bp, Shinobi tetravirus
  RNA, complete genome,strain: shinobi.1
gggcggaaggccgcctcctcgccggttatctgcctccggccaagtgactagcgcttctgctctagctctcaataaccctctcttctctacaactggataaagcaaataacatcatggacgcctccaacccagtcaaatctgcccagcgctatactctctctgagctccgtgattctcgacttgcatacaaaagacaggacctgaaagcgctgcaagctatggcggcttccgcggagaggcaactgttctcttcaggaggcccaagcaaagaagcttttcacagtcttactatggacctaaacgaagacctctcttcagtgcgcgcggcctctggcttatgacgtgaggagtgagatcgacttcctcgacaaactcccgcccgttccggtagataataccaaactcggggacaggcagatacaccccgcc

SEQ ID NO: 1863 - DNA, 429 bp, Wenzhou tombus-like virus 13
  strain WZFSL80420 hypothetical protein1
aacacatccaacatgtcttctttaattaaatcaaagatatgggatgtgttaatatttccggggccccaacttgtcagcagttgttcatcttgggatttacgtgggcgctcaaccactatggaacttccatatgtggttttaatgggttacccgccatattttaaacgccaacgcgagcgtgctcgcctttggtctttgatatgtagagtgattaaataacactctggttggttataaacatatatcatggtattaattttaaacgtcagttaacaacgggtgtcttgcgtgcaaaaacacttcttgctgaatggttattattaatatggtcatatatgcttataaatggtgattaggtaaattaataccgggtgatctgcgtgcagaatcacctcatattgagatacctgttagtcatgttatcattag

SEQ ID NO: 1864 - DNA, 430 bp, Scaldis River bee virus
  glycoprotein (G), putative nucleoprotein2
gctctcaatattacacttatttactttatttctttatctatgaatttgtccttcaattatatatatccctcatctaagctgaaagacattattactttaaaaaataacatattttgtccttctgtatagttaagtctgttctcttactccatccatcatggcacgtagacaaccacatagatcaggtttgtccgagattaattacatatatgatcactgtaatgaagcacctataaaatggttaattgatggtgtaaaattgtgtgtgaatataaagaatcattggttcttccagggggcaaacctcgcatttgcatggtatagagataatgttcatatctacttattaccattatatgattaccatatggtaaaattgatttacaatgttatgattagaggttaccctgattacatctagtgtccattg

SEQ ID NO: 1865 - DNA, 430 bp, Picornavirales sp.
  isolate H2_Rhizo_33_scaffold_45 RNA-dependent2
atttagcaacgtcagagatgacattaaatatctaaagccgcctgttagggtttctaacagcttatccgtggaagtgccacggaacataaattaagaccccgaaggtcgagcgttggtgtgatcttgcctcatcattttatttctaagcagagattatagaggtagtgctgccagcgtaattccctgcctatttaggatactaatcacacagggattaggcagcccctaaatcaaagagagatgcttagactcaggtgcaataaaagtgtaagccctgttttataaatcacttgccaataataataataataatggtccgggcgcaccaataagcgtccaacacacagaaataccttctgacatacacacaagtggttctgccacagaagcggtgccagaagacccgacagttagaggaggagagcataat

SEQ ID NO: 1866 - DNA, 430 bp, Wenling rattails picornavirus
  strain XYHYC192101 polyprotein gene,1
tccgatctcggcgctaggctcactctctgagtgccctagtggtcgttcccttttcaacaagaataaaacttgtaaaaattgaaaaactttgagtaaagtataaataccctcataactgagtaaaagtctgttatatatgtttgtttgtttgtaggcatctccgtgccttctacactactatatttgcccctgtgcgtacgcgcttgtgccgtgaggcctcacgtacgttcagatgcttatcctgagggatgtagcacaaggtgacacttatactagtacctttttccctgcccacgactggacctgggcggtgtaggtgtgtctctctcaatgtttcactccgaaccgttctataacaaggttgtactttccaacctgatatcagtgtgctataaattttctatcattgtggttagtccactacccaaac

SEQ ID NO: 1867 - DNA, 430 bp, Beihai picorna-like virus 60
  strain BHBei55726 hypothetical protein1
cagcgctttatttctaaatacccttatggtagatgacatacctcctgtgtacacttaatgagtgtacatacgagtgaggattttactgtctggttgttatgaaaggatgagttgtttcccagtccctttttcaaataagattccctttgacttttataagtcactgcaatcgtagtctggaatcgaatactacgtcgagaacaagagtttaccaaacgttaacgtgcgttcatgtgagcgttttcgtttagggcttgtttttggttaaaccgagtgtttaaatatcacgagatatatacccggaggttttcactgatccggtgtattaattttaggtgaagctaatactaatacttatgttattaagggtgtcaaagcccaaaccctggcgatttctaaccatgctaagcaggaggaagctcaagcttac

SEQ ID NO: 1868 - DNA, 430 bp, Wenzhou picorna-like virus 1
  strain WZSLuoI85940 hypothetical1
ggaaggctctttgagccctcctatggaatcttggtatgatgtaattggaaggtaaagccctcctcttggattatatataaacatttttctacgttaaattagatactacgttttaaacgttagtagtatcacccttaaacatttatagtcacgcaatgttaaaactcatgacttgtacccttaattgatccggtactgacaacttaatacgattgtcatttatagcagttgaacggcactgctagtattagttcttttgtaatgaatttcttactcctcaagaaattacatttaattgcaataacgattgcagagactacttaattgtagcccacggtgtgagcatagacgctaagctcacggtaacggttagggaagcccaaaagagacgccaacccacaagtgctcttgaaccctgtattatacaatc

SEQ ID NO: 1869 - DNA, 431 bp, San Bernardo virus
  strain CoB37dA hypothetical protein 1,1
cataaaactatacaaccgtaaagtcttgtccgcttctcttcagggagaagcaaaaacttggataccgttatataccgtattctaacttggccaacgtgcactactttggtcgtaataccggtttcagttaatctgaagctataataattgggttgtttaaaacatcccgtaaaacttacgagtttaaatactcgtttaattttctgctctttccttgagtagaataaaaattttcacacttcaccgtgtgattaacttgttttccagttaactgtgaaaaccgtcttttcgtttcctgtcaatcagggagctaattctttgagattaattatctcttttctgttctctcgtaatcgagagaactctgtctttggtcctcgcaagagaaccactaccgtctatagacttctttgtcttctcttgatcttcag

SEQ ID NO: 1870 - DNA, 431 bp, Picornavirales sp.
  isolate zftwig05rna4 genomic sequence.1
gcaattaaacgagaatattgattgttaaaaaattcaaaagtgtcactgatgcctgcgatataactgagtcaggcatcagtgacacttttgaatttttaaacaatcaatattctcgtttaattgcagagcctcaaataggtatctccattaatcatacaattgatgggagcctagatgacgctattaataaatctctatcccttttttcagaattatctaaagctctatccgataaatatcaaacaaccgttaatgattatcaacgtaaaattatcgcctcaataacgtcaatttataatttatatcgtttcacaactcacaaattatctcttcaagatttttgtgttaatctctgtggagttattggtgccgctggtcttgcctccgacatcataactcaactaataataactgttaggtctcttttctta

SEQ ID NO: 1871 - DNA, 433 bp, Marmot picobirnavirus
  clone c332668_g1_i1_libraryA_2587 segment I1
ctcttgtatagtttacaagtattctacgaagggaggtgtagcatgttgctataccaatcgcaattttatcaagcgattaacaaaaacatcctgacgttactgactagctacatgctggcatgcacagtaggtacagtcattgtaacggatctgtggaaaggaggtaatttatatcacagatattcaggttaagtactggacattgaacgaaagtaaacgtcacaatgttagtactgagacacaagcagccaatgaattggctgaaactaggcgacacaatgtgtcgactgaaactttgggacgtgacaccctaaatgaagataaacgtcacaatgtcacaactgaaacggagagtagacgccataatgtacaaactgaacgtgaggcgaagcgtcataatgttgctggtgaagtcgaaaccaaacgacataat

SEQ ID NO: 1872 - DNA, 433 bp, Bremia lactucae associated narnavirus 2
  isolate DML-A_DN379211
gaagagtcaagcacacagaatatcaaacaccgatatccaagcggagaaccttagggtccccgtaggtaccgggtttggattacgtgagacggggaagtctggtaaaaagagtatcgcagatctctttttgcccattatctatgataatgatgactatacccttccgggtcgattcgactcattacttaacttaaagtttcgtaataagcgattgcggttttcaagaaaccgagatattaagtatctcccggactcgtacgcctcgttcgttagaggtaggttagcaaccgaattgggacttagtcccctaaaatctaagattttagtcggtagatctattaccactatattaagaatagaggagttagtaagggctatcattgataaccttctattgtcatttaaaggatttttcttagaaaaaggccggaaa

SEQ ID NO: 1873 - DNA, 434 bp, Anopheles darlingi virus
  isolate MAC, complete genome.2
ttgttcagcagagttattctcttcaatttcattgtttttgtctactgtattgcatgattttattaaccaggatgactattatatacatatcatcttggtctttgccacttattttatatttgctatattaatctgtgcgttagcacttaaattaaacaatcccaggcgtgggcaactgtgaggtttctttgagcatgtacgcagatatttgagtaagatagatttcaggtctttccaccaccttggcggaatgtactcctttatgctatattatcatacacttataattttactctgtgcattggcatttgacccaaattggttagggagtgggcaactatgaggcttcctcgagcatatacgcaggtacttacacaggacaggtgtaaaaattccccatgacatttttttcaaaaaacccgctagtcagaaag

SEQ ID NO: 1874 - DNA, 434 bp, Riboviria sp.
  isolate cfe153shi03nc genomic sequence.1
tgattgaagaaccgacccatgaaggtaagctattcataaatcctgccaatgtggtccaagtttcatcagtatcaccctgaggggtgtctgcttctgcttggtccgtgataccacatcggcttgcaatggctgccaccgtcgtgtcaaccgtctgtgctgtctgtcctactgactggattgcgtccatcgtaactgtataagggttacgagggaggtaatcctgccagcctgcttctgctattgggagggtgtccaaatccgtatccgaatcgtcatcgtgtggggtgtctgcgctgggtccttgtcgaatataaatccatactgctttatcgtcaatcgtcctgtacttttccatatccttcatcatctgtattcgtgggggtcctcgaaaataattgtagtttgcgtcgtctccaagggcttggtatagtgtc

SEQ ID NO: 1875 - DNA, 435 bp, Cherry virus A
  QLD11 RNA, complete genome.1
aggagggttatttggggagtgtgattttggaaatgatagtatcttcaaagattacattaatagagtaaaaaacaaagttgaaattgatttattgaatgagagaattttgaggataaacactgagatgaatcagtttgacccaaggatatacatgatgaataagatagggtttgtcactagcacatcaatgtttgaagcaggccacattgcatcaaatgaatccaaccagtcaaaaggtcttcctccacaaacaagccggccatacgatgaggtgaaaccatacatgccattgagtttgaggaattcttatgagtcaaggacaaaaggcaacaggcttctatctatcctgagaaatcaaaaacgtttatgtgatttaggatcaggctctaccttaggtttaagagttttggagggcttgaaaatgttcaaggagga

SEQ ID NO: 1876 - DNA, 435 bp, Hantaan virus
  XAAa10091712,nucleoprotein, glycoprotein, and1
ttagtgaatgtataacccttattatgtgatcattatatactactgaatcattatcaatcatatttgcactattattatcaggggaatcatcatatcagggtatgggtacatttatgggtgggaatcattattcaaagggtgggtcagttaatccgttgtgggtgggtttaggttcaggctgccttaagtagcctttttttgtatatatggatgtagatttcatttggtccttgaactaatcttgctttctttcctctttttctggcttcctctgcttactaataacaacattctacctcaacacaaaactacctcaacctaactacctcattagctgtcgctccttgattgtctttttagggagcatcctatagtagtagacaccgcaaaagaaagcagtcaatcagcaacatggggatatggaagtggctagta

SEQ ID NO: 1877 - DNA, 436 bp, Papaya meleira virus 2
  isolate Valle_R RNA-dependent RNA polymerase1
tccgggaaggctatcagcgcgaggtggggtgggagcgtctccactggcggttcggtaacatttggtctccatctacgaagatggctagtcgcttacgtggacacttcggtgcccgcgtcccgagcgctgctaatgcagcccttggagagcactggctgttggagcagtatggtcatggactagatgcgtcccttgctgtctgcgtagcggtgaaactctggcttacgccaaccattaaggatgaggctatcgcacagtttcatccttttctggttggccggtaagttcgtttccaggtgtgtcccgtccttttgcaattccagcgggcgcaccattaaggaaattgcggggggttcataccggccctcaagtccgtgcgagtacgtctatctactcccaggtagtcggtggcttgtatagagttcatgataacaca

SEQ ID NO: 1878 - DNA, 437 bp, Cryphonectria hypovirus 2
  genome.1
tttcagtagttccgcgctaaaagcgactcctttggaatcggtgatttgccgattacatggaggctccctggagggattgcctatctgaaagataagatggctgctgcacagccgtgggcgaaacgtttgcgtttacaacgcgtaggagaggtcctaacaaacaacctctaacgtggtccaggtggtgacactctccattccgtcaaggacgaagctcgtccgtgaaacgagtgactcgcaccctgaatgagaagagagaataacggatgcttctggtagttgtggagtagtgaccctagaaactaatccccagaagacctctcgctcatggatgccggaccaggtccacacctagtttaggtgttttgatggtaaaagaaacaccgcagactctgtcttgacatgaccggttgaccccgtacgaggtccgacttata

SEQ ID NO: 1879 - DNA, 438 bp, Myrmica scabrinodis virus 1
  isolate Cambridge-Msc, complete genome.2
tgagatacccgaagaagtgagttatacgactttgcacacaaatatatataagttcataactagttgttttgcaagaagaactctacggatgccagtgagttatttaacatcaagcacgccttgcaggatgtgcatattaaatcttacgcgagttacatgctctttgatatctttgagtggccggttagaaattgtctcctgtagtgcccaattgataaaggtactattttagtccctggcaagcagattcaataacgacccaccgtcctatactctttgactcataacatggttaatcagcgagagttaatatgtgcgtgaccttacgcagaaatgcacagggtaatgacctccaagtagaactagtatgtgtttgtatccctggaattgatttgaaataatgatggatgattaaggcgaagatttattcaatgaaat

SEQ ID NO: 1880 - DNA, 438 bp, Beihai picorna-like virus 14
  strain BHHK130444 hypothetical protein2
gctggctgccttagtcttgggcagacattaaatgcatccgctgtgtcttgggcagacgaaaaatgcatccaatattgtcctgggaagacaataaaagcatccctctgggcgtaacctaccacgtctatcggaaccaaaagggggcactctgtattgggttaccacgcattcccaatatgtcagtcattgggggatgacgaaggcttgcagagtgaggcattttcctcgtaaaatacccctatttaggggagtgttcgccgcacgtaagactgacgcacgctgtactggttgagtcacctttacgagcgttaatgaagacttactacaacaaatacaaaaagatttaatgttacaattaatgaggaaaatttggagtcacaacaccaaaatgttaggtttagtgatcagactccacaatgggactacaccgtagatagt

SEQ ID NO: 1881 - DNA, 438 bp, Hubei picorna-like virus 22
  strain WHSF7472 hypothetical protein 11
ccccaaaaccccccccttaaactcaacactgtagtggattcattttccgttgcaaaacaaaacattactacccgcatttatgtaggctctgtgttttctatgcgaccgttacattaatctctactctgacccactagtttataaaaccgaagacctgaatgaaacgattttccttcttttcaacctctaacgaacctctgacggcttgagaaacctgaagttagtaattatgtttaaaagaaaggaaagtcaaacgcgatgactcttacatccctattccataccgttgctccacaatgtgagcgatgcgaggtcgggactgcagtattaggggaacgagctacatggagagttaattatctctcccctcctacgggagtctcatgtgagctgtagaaagcggttggcacctctcgttacctcgcctgtacatgatcc

SEQ ID NO: 1882 - DNA, 438 bp, Beihai astro-like virus
  strain BHWZXX13371 putative protease,1
caagtatcccatggcttttaacgattggcaggctattgactttgtattttttgacttagaaaacgaagttgtggaaatatatagaggacacggccttgccaaccctgagagctttgtgacatatacgatcgatgatatcaatttgtatcaccttcatcatcgttttatttgtgacatcattgttagcgcgtatcttgagcagtatcaagtcattgtacatccgcttgtcaacaacgctgcactgcaaagtgctcttggcgggtaaacgcttaaacaaaaaacgctttattcgcgggaaagcagttgacagacctgtacagctaataaggcgcaaacgattgaacacaatcccaaaaaaacaacaaataattgacgcaaaaaactacggaaatcaccacatctctttgcaacattacggtgactccaaagacatacaaa

SEQ ID NO: 1883 - DNA, 438 bp, Yado-kari virus 3
  genes for RNA-dependent RNA polymerase, complete1
tttcgggaaagtaggatgtatctttcaaaggaaagataagctaaatgtgcggtcgcacaaggttagatggaaggaaatgtccattggcataaactcagattgattgactttcaaatagaggaatgattcgcgtcgcgtggcgcctagtttacactgggcgcatcggccttgcatataagcaaggagcgctacgtcgtagcacgcattgaaaagtccccttaagcaagggagcctttgctctatcgattgcagatagagacggtgaacaatataccgaaccgcaacagagaaagcggtagtcaaagcttacaagtcgcaatggaaaccgtgatcgtacggatcacgtgaaccgaagttgcgcaatctgacaacttacgtgacaggattaaacgtccagaaggcccatggtccccggcatcgggaatccacagaaccaac

SEQ ID NO: 1884 - DNA, 439 bp, Hubei rhabdo-like virus 7
  strain QTM26925 hypothetical protein,2
aaattttatagaactatacaaaatatttgggttaagctggagactttctgcttgtttatggaataacatgtcacaattaattttacataaacaagccagaaggccattaaagattaatcgaaaagcattaatggcttataaaaagacccctcaaaacttagatctgacagaatctgcttaagaaaaacccgtaagagtcaggatgccaaaacctacaataacatttacttgtcctaattgcggtcatatcattagatatgaaaggagtgatctaccagccgtccctttgaaaccaggaggaagtgcttcaaaataacaggtcattaattaactttaactatgagactgtattggagataatccacatcattgattatttttaagttgttaaaattttgttttctggtagctaagattaatctcacgatgcagtacaaca

SEQ ID NO: 1885 - DNA, 439 bp, Zaire ebolavirus
  isolate Ebola2
atgagcatgtaataatgggatgatttaatcgacaaatagctaacattaaatagtcaaggaacgcaaacaggaagaatttttgatgtctaaggtgtgaattattatcacaataaaagtgattcttagttttgaatttaaagctagcttattattactagccgtttttcaaagttcaatttgagtcttaatgcaaataagcgttaagccacagttatagccataatggtaactcaatatcttagccagcgatttatctaaattaaattacattatgcttttataacttacctactagcctgcccaacatttacacgatcgttttataattaagaaaaaactaatgatgaagattaaaaccttcatcatccttacgtcaattgaattctctagcactagaagcttattgtcttcaatgtaaaagaaaagctggcctaacaag

SEQ ID NO: 1886 - DNA, 439 bp, Changping earthworm virus 1
  strain CPQY105740 hypothetical protein1
gttgcatgggggaataccccatgcaacgtttgttttagcctgtggcgacacagggaggcgtttggacagcttgctgcccagcgccttgacttatcgctcttttcttttctttttctattacactttccgcaatagttctttatttcctgcaacgaaagccgttctaaaagaagtgattagttgtacatccacttttacctttctttatttacttctctctcttgaggagttcttttcagaaaaagacatggtgtgagtaggagtgagtctgatggccgagcgtggttcacgcataactggtcagattcactctggagaagcccttgtcttggctctatattcgtttgtgtaagcccgtttaggtatgtgaaacagtttagtaatacagtattcgtagtttttgaggggaaaccttcttcttcttttacttaggctgaaa

SEQ ID NO: 1887 - DNA, 439 bp, Wenzhou picorna-like virus 42
  strain WZFSL74289 hypothetical1
atcagctcacgttatttttccataacgcttgtgtgtaagtatcgttacgttccctaacgtaggttgggtaaggtgacgcttctcgtcataccatcgttattttaacaactttaagcgagcaaagaaaatttttaatttcttattagtatttattttcagtctcatatagctatatatatgtgagggttttgccacttgccctttaaaggttaaaacaaaacactattataactagctaacgactagcctacctctgagtgttgttagagcaattgtaaaactctaacatcaacaggttcaagggcgaagtgccacagatgttataaggtgtgtggtcaattgcaccttgatgtgcggggagtgacgtcctacatacaattagtcacatacatgatggccaaaggggatgcttcggctgaactgagtagcaacacaaaat

SEQ ID NO: 1888 - DNA, 439 bp, De Gerlache virus
  isolate Antarctic85 RNA-dependent RNA polymerase1R
taatcacccgaggggtcttacccatgcaaaatgtaacactaacaatagcggacaaatcttatgcacgttttcaggaaacgccagataaaacaacttacgttgcttctggccattctgtcggcgatgtcgatttgctgctactcggccgtaccgtcccaaccacaaccagtggtaatgccaaagttcgcgccaacctcgttaatgactttacgtcaggaaccggggatgataagaccgttattggacgagcgtatgctaatgttgaaacatcggtgcctgctatggcatcagatgaagacaaagcacagctgctatctgatttacgggcctacgtggcatcagaatcttttgccgaattgtataataaacaatcgatctagtatggaattacccgtactagtttaaatagattgtaaactttaacaacaaggttaagatt

SEQ ID NO: 1889 - DNA, 439 bp, Hubei sobemo-like virus 13
  strain WHYY18840 hypothetical protein 1,1
atatccaggtggaagagcctacacgtgtagagccagtgcaacaggtatacattccagaagctccatatcaaactgaacagaaccatttaaacttgaggacggcctctgccattgcggaggccagacagttgaggcagggcgctcctgttccgccaccaaggagtgtggcgggaccagtatctttgagtttgcagaggcagacggttcgtacgggtggccaacaatcgattcctgcagtgccaagcgtagtttcgcacggcatttgcgaatcgcagcagggtcgagagttgatatcccgtggagccaggcgcaaacgctcgaagaagcagaaaccagcgttgtcgcaagacttagttgtctaaagcattatccgcaatatgcagataatgctgaagacaacctcaattggttgtttttggcggcggttttggatgttgac

SEQ ID NO: 1890 - DNA, 440 bp, Ceratobasidium virus A
  isolate Murdoch-2 hypothetical protein gene,1
attcagacctcccacccgacgacagccccacacccgactcgcgtttttttcaaaaatataaaaaccaaaaaaataaactacctttacatccaccccctgtttccaagcaccagcccgggtcgacagccgacctaaacctttacggccataagccatgggctccctactcctaccctgacccgttacacacaccttacctctctctgctaaaatacgcagcggagacaaatttacatgctcagaaccatgtcctcgccttgttactgaccatcacaaagcacaacttctctgactttcaacgactcatcgaccgaactcgcaacaaccaccttctccaactgcggaggagacaagacgctgcgttcccggatatctcttttccaccgggaccaaggaacttcccccgcttcggcaaaaaagacgagctcaacctcgacctc

SEQ ID NO: 1891 - DNA, 440 bp, Ceratobasidium virus A
  isolate Murdoch-3 hypothetical protein gene,1
attctgtcctcccacccgacaacaaccacacaaacgactcacgtttcttcttaaaatataaaaaccaaaaaaatgaaccgactctacaaccacccctgtttcacaagaaccagcccgggtcgtcagccgacctaaacctttacggccataagccatgggctccatattcgtatcccgatcccctgcacaccccttacctttccctcttgaagtacgccgccgaagtgaaccttcacgctcaagaccacgttctggccctacttctgaccatcacaaagcacaacttttctgactaccaacgcctcattgaccgtactcgtgacaaccacttgctgcaacttcgacagcggcaggaaagcgccttccctgatatctccttccctcctggacctcgcaactttccccgtttcgggaagaagactgagctcaacctcgatctc

SEQ ID NO: 1892 - DNA, 440 bp, Hubei rhabdo-like virus 5
  strain WHSFII19440 RNA-dependent RNA1
tccatctcaagtcatcagaagaggaaagtgcaggaagctctaatctaaataggtaagttgagtgatctttatatataataattttaggtaattgtattggtttttaataataaatattctctttttaggacccacgtctgaaggaattggatgcatcaagtgtcaaacaattgtcagatgttagaaatcacaaagttgaaactgtgcaatatatccccaaaggggtacaattaagtgttttgtctgaattgtattttctaggagatagcttactataaattgatcaatcaaaaaattattttgtattattgatgttagaattagctttagtgattttgagtgtgattcacaatcaaggtaatcatacacttctttaaaggactttgttataattatttattctctattgttttaagaaaaactaacaagtcaaaatcaca

SEQ ID NO: 1893 - DNA, 440 bp, Unknown
  Description of Unknown: Mutant Zaire ebolavirusisolate Ebola6
tttttctcgagattgcttcatggaaaagctcagcctcaaatcaatgaaaccaggatttaattatatggattacttgaatctaagattacttgacaaatgataatataatacactggagctttaaacatagccaatgtgattctaactcctttaaactcacagttaatcataaacaaggtttgacatcaatctagttatctctttgagaatgataaacttgatgaagattaagaaaaaggtaatctttcgattatctttaatcttcatccttgattctacaatcatgacagttgtctttagtgacaagggaaagaagcctttttattaagttgtaataatcagatctgcgaaccggtagagtttagttgcaacctaacacacataaagcattggtcaaaaagtcaatagaaatttaaacagtgagtggagacaacttttaa

SEQ ID NO: 1894 - DNA, 441 bp, Avian metaavulavirus 21
  isolate APMV/dove/Taiwan/AHRI33/2009,5
tgctgtataagcatcttatgatgacatataaaactgttgcagaaacatccaagttaatacacaaataagttatgtttcaaagggggtaatacactatcacgagacctaaattattaagtacacactaagtaccactgggtcagacagattgagtcttctaaaatgattgtcgcaaataatctctatgacactactgcacttaactattagatctgaccaatactatgataaccagtttcttgattattgatattctgattcgcagttcaatttatgtgggttaggcttatcatatattaattccgccaaagtagggggaaaggtttctcaatcagtagtgacagttccaggtctcttcacaattactgttcttataagatattaagaaaaaactaacaattcagcagggattaaacaagagacaattgggggagaattacc

SEQ ID NO: 1895 - DNA, 441 bp, Solenopsis invicta virus 8
  isolate Formosa, complete genome.1
ttaacgaattcgccctttgctacggcgggttgacggcatagttatttaatcaccagtgaatggggtgtgtaccttcacaaaattcttaaacggtttacgattctgatatacgacacaacaattttaactgatctcttatgacgacaatggaaacatttacagaatatactagcttgccatcaacaaggaattctccagacaaagttttgcggttttctattgttcttggatgcatttttatactgaccttgcttgttattatgactacgattgagattaaagaatatacagaacgaagacatcttgaaagaattttgatagagatagaaactcggcgaaattatgtagaagagtctcttttgaaatcaaaatctttcaccccgattgattctgttgatttttcacaaacatcaacagttcactctcactatattgatttta

SEQ ID NO: 1896 - DNA, 441 bp, Picornavirales sp.
  isolate ltt163pic3 genomic sequence.1
atatcgtcccggcgactagccatccaggaactgtaagtaccaaggcactcgaggttcccttcatccgatagggcataaaccctgtgatcaactttcttaccactagtcggtccagattttccgattggcttttcggggcagatactagcttcatcctcagattgggcgtcgtaataaccatccgaaacaccatcatcagaataatcctctgctggggtagaatttaggttctcgacttcttcattcatctcagcaaaggattattctgatgatggtgtttcggatggttattacgacgcccaatctgaggatgaagctagtatttgccccgaaaagccaatcggaaaatctggaccgactagtggtaagaaagttgatcacagggtttatgccctatcggatgaagggaacctcgagtgccttggtacttacagttcctgg

SEQ ID NO: 1897 - DNA, 441 bp, Hubei zhaovirus-like virus 1
  strain WHBL52766 RNA-dependent RNA2
cctggatgatactggggtgtaggtaagaggcctacacattgaacaacatattgttctaattacgtaaggtatacggtgtagtcagctctaataagaacaactggctatattcatgcacatatcagtgaaaattattattattctatatatataataaaattcaagtgcaagtacagctttaaagcacgccctaccaaggaccgactgtaagttttgctgaattaataaacttaatgtagatattttgtcgtttgtagaaataaactaccactactgactgtttagtggtaccattcattgggttgagtggaaaagacattctcagttgataataataagaacaataaaaacaaaaagcccttaaataaaagaaggcaattgaaacgagatagacgtgtggtggtctaaaaatagccatataaacgttaacgtgtggtggtg

SEQ ID NO: 1898 - DNA, 442 bp, Hubei picorna-like virus 82
  strain spider133992 hypothetical2
tctttacgaaaatttcagagatattctgggagtccgcgtgaagcttttcctgattaacatcaatatcgtggatgacaaaatacaaaaattccttgactgcgttgataggatatttttgccgtcgccgccccacgcaggaaatgggtttgtaatcgctccctcgtaaatccgaagggttgaggtagagtggtggcgcccatgtagccttacgagcagatcgatgcgtctcctttgtctaaattgacggaatttgagcgtattgaacaattcatgtaaccaaaaactttttctttatacaaattttacttatcatgtttctgaagtcacagtagcttacaagactttagttagttgttcaggatgaactttaaaccatatgggataagtggttgaaactttcccgagagtggtccaggatggactaaaaaccaataaaaatttt

SEQ ID NO: 1899 - DNA, 442 bp, Changjiang crawfish virus 1
  strain CJLX30787 hypothetical protein 11
gctgcaagtcccttttgggacttgcagtcagtattattgtttaattgcgttattgagcgtttggtcgtttagaccaacctttagtaatgtttttatgacatctttttctcggcttataaattgccggcttttgcgaaaatttacaactttttcatgccaccaacacttttacgtggtacactcccttttctgttttaggaggctaatctagcttgattagtgagaaaaacaacgtatgtatcttggatatgatccgtttactctatgagtattgacagaaactttttatcttagtttagtaaaactaagcatttctttaaaacaccttagaaatgaccacaggtccttagcatcgactattttatatagttaattttgggagttatagcccaaacactgtaaaatgaactatcagtgaaaagttagtcaaccataccccacc

SEQ ID NO: 1900 - DNA, 444 bp, Nackenback virus
  isolate OTU38 RNA-dependent RNA polymerase gene,1
agacaacccaactcaagacataagagacaccaacgaacttcaataaatctcttaaaggttgtctcacaagcaggcccaatgataagttaatttaaaaccttttgtctgcttgtgaacctgatatcatcaagaatcgagcgtctaacctgaattttgaatattttgtccctgctgttctcgttggaaaaaggtttgttgtctctatatgcttcttctctttgatttccttattgtaattaaatttaaatctgcgttatatccagattcagatgacaagtttctaattttaccgatagatattctgcataacttatcagctgaacgctcaacctttccaaacctgaattgaacattggtataatccttaagaggtatgtacatctcttaactgttcaaaatatcacatttgatggtgactaacacatatctttcatttaaacagag

SEQ ID NO: 1901 - DNA, 444 bp, Soybean leaf-associated ssRNA virus 1
  isolate SaSSRV1-1, partial1
gaaaagaaaaggaattgcactcaaagttagttcttcaaaggaagattgcaaagaaagctctagtgatggcaaagatgtagagaattttatcttgaacagagtgtgctgggaaaatttacccgatatttgcacctactaaagcaaaattcgggcgtgtagactctaacccgttcgcgggggtgagcatcctgcctccccgggggccagcatcttcctgtcatgggaagagcggtggcgagcctgcttttagaccggggtcgaaggcttcgtaacgtggcgccacttggtacacgctttgggaaatgatgccacggcttgtcattccttctgattgtcggctgggaagcttgaaatatcttcgggcctgggaaagcccttaaatttcccccttgactggggagatccgtctaacagggggtggtggccaacaccgttcatgaaact

SEQ ID NO: 1902 - DNA, 445 bp, Marmot picobirnavirus
  clone c322866_g1_i1_libraryA_2590 segment I1
acaaataaatataggaggaagtgtctatgaaaaactgctttcttaccattgtgatggcgataaaacattggattctcagcgtactgttacgtaggtacgcttgtagaaagaaacaaaataggcgaagcttcaaatcgctcacgaagcaacagaaatatataatttataaagactttagggaatcgccctctaaagcaaaaggagaacagtatgaagaaagagatcattgccactaatgttattgaagcgatggaattagttgacgaagatatgcgtcaggtcatgcagagttggtgtcgtcaagatgtgatgtttagacatacaacagctgataaacttgtatctaaaggtgagagatggatcgctacactcactattgacgctaaacgtcctaacattcaattccagtttctaactatctactatatttggaaggtgtctaaag

SEQ ID NO: 1903 - DNA, 445 bp, Beet necrotic yellow vein virus
  isolate YJZP25-5 segment RNA3,1
aaattcaaaatttaccattacatattggtatttatttaccctcagttggtgatatatgtgaggacgctagcctgttgggtttcctgaccgaccaaatccaagcgagcttaatccaagtacctcgtctcaaattgagtgtcaagtgaataagcatagtgaccccatcgtttcagggtagttgacggctattaatagacatattacagacgcttctctttatttatcaccaacatgggatgtaatgtttatgcgtgagcctatggccgcattgtaaaattagtggttttgaatttctattcttcggaatatacaaggtttaaaagaccagcatttgggttaaaaatttttaaaccttactatctttaactagtaactcgaattcgatttatattcagattttgtatatcaagttgttgtgttttctgatcatcattaagtggccgtc

SEQ ID NO: 1904 - DNA, 445 bp, Hepeviridae sp.
  isolate sbr121hep1 genomic sequence.1
ttctagtcatcatcaccgtcacgatcatagcaagcagcatttactatggccaccggcgtgcatcacgacgtttgcggtttccgcgagataaatgggcagacgcgatgcctgagctgcatggcgaagccaggcaacaatccatccccttacgggaagcatcaaccggggtgtgagtgggtggctgccatctgcatactcaccggccaaccgaccttccccgtgtgcaagctacactgtagaaaccgctacctttcaaatcaatccgtctgcacgcataccacacacacaccatccactctgtgccccatctgcagcatgaagaacagaactttaccaacagtcagcaagtgctattcagcccatcaggccttcctgggcccactccacgccaaacacaccagagtttgcttgatctgcaagcagcattcggtatgtttagtgtgtg

SEQ ID NO: 1905 - DNA, 445 bp, Scaphoideus titanus bunya-like virus 1
  isolate St_USA segment S,1
actacagctgcagcacgctgtgcctatatcgtatgatacaatacactcttgaagttaacaaaccagaagacgaagacatagttttaactgtagaggacttatcttataggttatccatttcaagtgagggtcatcccttagagacacaaatatcatattgtaattgtagttgtaattattattatagttattctagtgtgggttactgtagattatcatattttagtagagttattaatatcaatagtagtcttacaatacattattcagggagttatttagaagtgttagcatttgtaaatacaataccacaaagcccattcaagcaggagatttctcacaaagtgatattagatattcacaggtctgtaaggcatcttggtgcactttataataacaacaacacacttagattcatctgcaacaaccctttaccgtcaccacc

SEQ ID NO: 1906 - DNA, 445 bp, Unknown; identical to SEQ ID NO: 488
  Description of Unknown: Hepatitis GB virus B genomic RNA.1 sequence

SEQ ID NO: 1907 - DNA, 445 bp, Picornavirales sp.
  isolate H3_Bulk_Litter_16_1558 hypothetical1
ctcgaaatgtgagattggcggcaagagtacgaaaatgatgtttccagtgattttggattgaatcaaactggaagagctattggcaaaggagttctgtaacagcgacatcatcgccagaccgggcactagaaaggcggtatagcgaaccccggggtaaacttgaacgtgctcttccagtacatgggagaaatctccagagtcaatgtgcatgactaccgtaaaaagtacataaacctcgtgccaactgaaattttcaacttcccggactatgacctcgttgttcttcgactaccccctggatctacaggtggattgaccccacaccgttctattgaaaaatgctgcgtaagcgaagtagatgaacacggcaaaccacatccgcccaccatctgggtcaacagaaaactccggtacattaattatgacgtaaacaacaaacactgcc

SEQ ID NO: 1908 - DNA, 446 bp, Sugarcane mild mosaic virus
  isolate PSR07106, complete genome.1
tctttatctttaccggcacttccagcaaagaagtcattcctgactttctctgttgttccactatcattacgccagcgcccgcgctcccattcctgtaaccccaggctgttgtctagggttcgctcctccaccatcgccacaccagcgccctcgctctccttcctgtaaccccaaacttttgtttagggttcgtttgttctcaaacactctcacgctcaacccgttcgttttcccgtctctgtagaaactctgctctggtgtgtttgacctcagtcacgcactgtttacgcttcttctttttccaaaaacacaaaaagatttgttgtttcgtttctgtagaccagtagtagacttgctcccttttaccccttcccttcttacctttaatcctcaaaggttcttttatctcaatatcgtacatacctttcgccttctagttttccagt

SEQ ID NO: 1909 - DNA, 446 bp, Hubei noda-like virus 4
  strain WHBL72570 hypothetical protein 1 and1
cctttcgtcttttggtggtggccggcacggtcgcggccgctgccgcgtcaggcggctcgggacagacatatctcgagttcttttttggtcaagtcgggagcgccgtcgcgtacttttacgcctgcgcctcgactggccccttgtcggccatcgccaacaccatttcgaccggtggctggtttaccgccgccgcgggccttttgtgctcgcttttcgtggaactagcgatagcgctcggctggctcactgccaacgcgctgttgctcgccctgggagcggcacattggctcgccgccgccgtgcctttttcctttttctacctctcctgcaacccggtggccgcggtcgcggccgtcgggttggccgtcgccaccgcgtatgtcttgcgccactcgcaccgcgagttttacgcgcggtacgtgggccctttcgtcggagacgccgac

SEQ ID NO: 1910 - DNA, 446 bp, Hubei sobemo-like virus 16
  strain WGML146458 hypothetical protein 11
acgatctatcacccaattttctcacggaatttggctggcccgatttgcacgggattcgtgactctctttgctatcacgcaaagaaagttcatacgacccgtgcatcgacggttaagccaacggaggatgaattcaataaggtttgtttttatttggagcaagcatatgcgcctattcgctcggccaaattggttgagctgaatcgacccacgctgcgacgaataatcttaacacaactggattggacttcgacccccgggcatccatatcggtgttacggtaccaccaacagggaattgtttaaattcgacggacttgatgttgacgacgcgcgttttgaagtgatatattcggcagttgaagcacgatggcaggaactcctgactcggccttcggcagaccccattaatctcttcatcaagcgtgaacctcacaaaaccaagaaa

SEQ ID NO: 1911 - DNA, 447 bp, Hubei odonate virus 10
  strain QTM133243 hypothetical protein 1,2
taaagtaaagacagatagcaattgctgggtacaaagaatttatgcagagaatactcatcaaataataggaaagaacgagaaaagcactcaagcaggatacagcacatgttatgtactatttaattgaagatgctgtttcactttaaatcatgcaacattctggaataaggtattgatgcacatataatattcttataatgtgttctgttagacaaaactgtattataatattcgatgacacctgatactttgtgatttcctgtaatctacctatgatatgatggtagagtgaagcatttcatagttgatatacaatcaattgtaaagcaatctattaataaaaagacaagtctccaaaggatcttaaattacatcttatcagaataaggaattcctagtgattcatcaatccttgaatgcccagtcagagataaggcaactataaac

SEQ ID NO: 1912 - DNA, 447 bp, Lactuca sativa picorna-like virus
  strain pt151-pic-8 genomic2
gggatttatacgagttgcgaccatggggcaaacccccgaaaccctatttagggtggcagttggtcgagcctatccgcgtcctaggagaatattgtgagttgaaatattttccgaagacaatgactcgctgaaataaaaacaaaacaaaatttagtcacatttgttcaagatgaatatggtcagagtgccggttcaggagctatccttgctgacccaaccattattcatacagatgaaggtgattataaagattttttctctcgaccagtcaaaattgcatcatatgattggacagagggtaattctgttactggacaaattagcccgtggactttgtattttcagagtgttcccatagcagcgaaattgcgaggtttttctcgtttgcgtgctaatttgcatatacgtattttactcaatggcagtccatttcggtatggggatatc

SEQ ID NO: 1913 - DNA, 448 bp, Southern pygmy squid flavivirus
  isolate 201405, complete genome.1
ggagtcgtgccatgtgcaccagcctgtaaaatggccttctttgaagatgttcctaggttaatgaacgtctaaccgcccactctttggttgagacaaaccttctgtgtttgttctgagtaggtaaggttgtgggggtgtgtccccccttgcgaagggaaaaaaggctaatcccttgcaggcggataatggtaagccttgtgtgagcacctgaacttccatgactcgtttgctttaaggggagaggccggatttccttgagctagttaaagttttacccctcaagggatgaagactagtcgcggtagtaaccttcatcagctttaacttttcccatcgaaaaaaccgtggggaaccccaagctagcccaaaggtgcttggggaggttgccagtgaccgccagaggataacctgggcacactggtatcaaatctaattattaattctcact

SEQ ID NO: 1914 - DNA, 448 bp, Culex Iflavi-like virus 1
  strain CIVL1/Sutter, complete genome.1
acacatacttgtctagcacctgcattccaaggagtattagcgaaaacctttttcttaaaaccaattcttaattttaagtacaaccctcgcagaacttacaaatcgtgctcacgccttttgttatgtttagttaatttgtagttgaagaatttggacgaataatataacgtgcttattattcacgagaccctctaacgtttttaacgcattgatctcgtaaaatctgaagactgatcttacattgacattaaattaaacaaaagaaacgcaccacgacagtagtgtggccttactgttaaaacaactaggcctaacgagtatttctaactgtgacgttcgatgaatcattccgaactatgtactaactgatctaaatcgttgttctacaaggaccgtttcaccgcctcaatagatcctaactatagaggaaaagaaacaacaaacaaac

SEQ ID NO: 1915 - DNA, 448 bp, Bivalve RNA virus G2
  partial genome.1
aaaacccacgtttctaagtttactcgccggccaagaatggctactggaggcacgttggaagctacttatttctagcataacaagttcagtgtcgaggttctgccctatgtttgcagatttaaggtgctgggtacgcttttaggtctgaggaccaagaattacctttactactgtacaatatcaacatgttcgctccgcgttcgggagcccaccctactgtaatttcgaaaaacagtatatagggcctagcaacatcaccacgatttgcgctggtgtgagctggggtctatgttacccaggtgggaatttcattccttatttcaaggtaaggatgatcttaggggttgagataccccacgctacttgagggcatggcctatccatgacttgcgctaaaaattacgttgcgtatagtaatcacgttcccatttctctcaaaccatgaaaa

SEQ ID NO: 1916 - DNA, 448 bp, Sanxia atyid shrimp virus 3
  strain SXXX37589 hypothetical protein 12
aataccggcgtcacgagtaaggaacgtgtggacagggcggcctgtggactcgtaactatttagttttaccacctaggaccgagtttaaattgtccagggaagtggcgtcactcacgccttgttgagtcgcaaggcgtgtgtgaaatgactcgccgaaactacagaccatattaagagagtagctactgagactagcagagatgagactgaggtttgtgaggttattgaaggtctcacaataaataatgacgcccaacccactggagtgaccagcttcttgcaagaggcatgttcatcagtggaagttttgggtaaacatcacaaaccgcctcaagttttgaattatcaagaagatgttcagaacttgactgattattttaaaagaccccggttgatatccagaggggctttggctttgtcttccattgcttctcaagggcagtgggat

SEQ ID NO: 1917 - DNA, 450 bp, Wenzhou picorna-like virus 23
  strain WZFSL85852 hypothetical1
tgcccatacggcatccttgttgatagtttcacctttcgaggtgacgtcgaccgaaattcctgtttatctaggttgtaatctagtctattagtgtaattgtacatatttatttatacactatgtaaatatttgtaatatattccccagcggatttgtaatatagttagttttgttagttttccttgagaatttctttttctcaaattttagcaatcgaaccctattggatggcattttggaattgaacgacgcgaatgttcacttcttcgtagtctgaccccatttccatttttccattagttcgctggttttgcgttacgccttttgtaccttaaaaagatatgtgctgcgcactttggtctggactagacctaataaaacttgttccccgttgtgcttatgtgagtaacgcacgagtacgtaactcaaagactcacatatattttaatt

SEQ ID NO: 1918 - DNA, 451 bp, Guangdong red-banded snake picornavirus
  strain LPSG108441
ccttagggttatttttattgtaactagttggaacaatttacaacaactaagctactttacctccggtctcatgtagacatttggggtgactgtcatgcggtggaacacttcctgtccgtttgtacatggtatttggtttcactgatggctttgtcgctaccatctaaatgcttgagttctttttggatgataacaatattcttgtttcttggttggattatgtttgcctggcagaaaggtgttaaccatgcactaagtatgacatgcaattcccagccaagggcgaactgtacattgttgagtgcacgttagatgttagctagggaactagcttaaccaggatatatccgacattgatacgttggtagtgggggttgctaccatttatgcacacagcctgatagggtcttgaccagagataatgtgcagtataattggtctgtccgtataa

SEQ ID NO: 1919 - DNA, 451 bp, Beihai picorna-like virus 30
  strain BHNXC41477 hypothetical protein2
gtctggtgcggtaccgactcagcagcgcctggaactcaggcgcacagggctttgtagctgcagatgtcttctttttcctgtaactacaagcaatgtggacgaggggccacaacagcaatccaatcccccacaaggtagcgcaccggccgtgaataagccggtagagtatggatttactccacccgaaatctccaaggatcagaacgtaaaattcttggatgccgaggtaggcacgggtgatacacgtggtaccccttccgatcctctccgtgattctactttgatcggagatgccggattgggtgatttcttcaagcgacctataaagatagcgagttttgactgggccacttctgtcaaactcaatgaacgtttcaatccgtggcggttcttttgggaagatcgtagggtgattaatcgtattgccaattacaaactcctgaaggccacc

SEQ ID NO: 1920 - DNA, 452 bp, Erysiphales associated totivirus 22
  isolate PM-A_DN31210 coat1
aaaacgaagaaactacctctcacaagttgggagagaagctgtatagaaactcaccctcggtaaacattcttacggactttgaacaagagctagtttcgtacaactactcacaaaagagtgaacgcactgtcacgcatgcctggggttctaacttggttccctcaagcatacgcgtgtgtggtgggcgcgtgtatgcctcaccatttgaagatgctactcatgtctacctcagaccgtacgcaggaagggcatgggaaggcgaagacgtctggctgcatatactcggctgcagcacgcttgccactgtgataacgattgccgggcgtaagcactcctattacaagctagatcagtactgccggtattcagatccttcgattattgctgtagtatcacgacacttgacggggctgtttgagtcactaaacttcaaccagcctaatgatgatact

SEQ ID NO: 1921 - DNA, 452 bp, Bombus-associated virus Pic1
  putative structral polyprotein gene,1R
tatctcacgtcgctcgtacgcaaacgttttacaccagattcgcttggtctacaacggctacagcaggttcagtgttgtttagcgcgcccatcaccccaaacttctatcgttatactatatccgccgctcagtacgcccctacaactttagcgtataccgcagctgcttttaggcaatggagaggtggaattaatttcaattttaaatttgttaaaactaaatttcattctggtagagtaagaattatttatgtgcctggagattattcagcgggcacaacgcttcctgacagctttgatatagacgctaattattcaactgtggtcgatcttcgatcagatacagatgtggaatttaatgtaccgtatgttgctattcaacaatggttgttagtcgataatgctttccctggcacatcgcgtacgaatttgtttagtactggcaccatttat

SEQ ID NO: 1922 - DNA, 452 bp, Wenzhou tombus-like virus 1
  strain RGYQSMGReov43160 hypothetical1
tgggagtgtatgagcccttacaaaccttgtgaggatgatacgcgatcgcagtcccgacttgtctccagacgaggttagacaggaagcagtgttgcgggtccgacgggcccggacagctcctgagctagtctggggcctattcgacgctgtgaacaacgcctgggaaggcacccctggacagttcgcgagtacgtgctgggatctctccgcgcttctgcgccacatggccatcggcgccaacgggcgagtgcagacagtccggagatcagaccggtgcttagcaagagccgtccttgaaaacgcatttgggaggagcattaggcgcaacctaagccttcaccgctcctaccgccatcttcccaggaatccaaccctgcgcgaggctttcctcgctgagagattggtggcattggaacgccgaatagttcactacacggtgacctggtcggacg

SEQ ID NO: 1923 - DNA, 453 bp, Sclerotinia sclerotiorum hypovirus 2
  isolate SsHV2 RNA-dependent1
aaagatgttttcattaatcagtgaacgaaagttaggggatggtactcttagggttgatctataaagatcctaactaggaggaaacatggccctgtctcgtgatgatttctttgttcaatcactaaagcttctcttcaccaaaaaggagagagctttgagagcttagctgtttcagctatttgaaccccgaaggattcatgtcatagacatttgacttctatttgaagtcgttcattcgttcatccgaagatgtaaaactactgcgcatgtgcgtgatggtcctgaattttcagagtagaacggcagggatgattgttctgtggagtagtgccctagaagaacaaatcctcattcccactcttgaaagtggcccatggcaacccgtgatgcccggatcgtcttctggacgtaaaaggttagaggctacgagagactgtagagaccttggtcaaa

SEQ ID NO: 1924 - DNA, 453 bp, Beihai picorna-like virus 7
  strain BHNXC41478 hypothetical protein1
ctgcagggtattcaccctgcagtcttgttggaatatttgatagtatgctacttatgataattagctcgttcgggtattctaacccgtcgacttaattacatagctagtatggtattgtatgtattttgacattttaatctaccttttttgttattttattatggttaaattaaaatatcgccttttcgtcttccaaaagacacaaaactattggttctgacttcgcatgatcaggtaattaacacttcgtgtaatgcaatctccagtactttacagctgattcaaactggattaacaacttttggaatcgccgctaatacacgttacgtatatgacgtgccctttgatggtacgcaaggtgtctgtcctttttacagaacgcggtttaatgggctattatatgccggccatgcaccgaagcactatttgtgcaagcaaaacaggtacgctcct

SEQ ID NO: 1925 - DNA, 454 bp, Botrytis cinerea fusarivirus 1
  complete genome.2
gttagaagccgtctagctctcgacgttaaattgagcagacatttcgtttaagaagggggctagagaggtagcctggtgtaattcctcaccccttaaaaagttggttcgcagccatccatattcttaaacggtccagaaagtgtaaactggaacctgtgaaaattaaactaaggtggtgacttagataacctgttgtgagtggacgctcaccctcaagtgaagaaagctggatttgtacaggaaggcacttagtaagggtgtgggtgttagatgacgagtgaactgagggacccaaaaggttgcataccagctcggcatctgcccacacttctgaaacagtgagcaccccaacaaggaaggttctccaagcttgattgacagatgtgtccactgaccgggcgaaagtgccctgacggtcgtgaaagcacggcaaaacccactaacatcactcatc

SEQ ID NO: 1926 - DNA, 455 bp, Phlebiopsis gigantea mycovirus dsRNA 1
  complete genome.2
gccccttcttcgtaggcagtaaacctaatactgcctctaagttctctgtgtccggacgcgcggctgtaaaccgcgacgctgacctcgatatcctgctggcgggatgtcgtgcaacaaaaaattcaaaaatatggacggaagcggtcctgaggagacgtcacgaaacggctggtccgtcggccgcgagtgcagctgggctgtgcaatcaacaactgctggtggatagtaccccgaacccccctattagtgatgctggacccaccggtgctggcccaagagctaagctttctgcgcgagcttctcgtttgcgcgtctgcgaccccacggttggcgccaccgggaccggcggaacgaacggtgtgcacggttccctctgtccacctgttaccgcgggcgttccttgtacggaacggcctgtattcaaagccacccctgccatatcgcaggctccgtcc

SEQ ID NO: 1927 - DNA, 455 bp, Robinvale bee virus 1
  isolate VN1-10 nonstructural polyprotein and1
ctacccgcatttatgtaggctctaagagttaccttatgattggacacagtttatgagtgatttggactctttccgaatttgatatattttaaaattcttacaatttagagagaatacgaacgcgatggaccttgagaaaatcttagctagtaattgaatctttattgcgtaagaatgagatgaacggaaccttaccaatcccaacccaaatatggaggagctattgcctctttcctgagggcggaaatcagtattaaccgacgtaaacccaaacccaaacccaaaccgaaaccgctaacctgaactctgcactactctacttggaacgcaaaggaaaaatttcactagaccaatgctgttcacgacattgtgaacgcccatattttgtttatcgatttggaagacaagctgtcatcaaaacacttgatgagtgcattcttacggtcgacactccc

SEQ ID NO: 1928 - DNA, 455 bp, Wenzhou tombus-like virus 6
  strain WZFSL85189 hypothetical protein1
acgggctctgcactgcgcctggttttaaatctcctttctgtattttgggagtaccaggtatcagtgtaacggcgggagcccgattacgtaaggatagtagtaatattaggtatttaacacaaaccagcctaggactaccattccaagcccctgaagcaagcctacacaatgcgctcgttgcgatagaacgccgggttttcacagtaggaaagggctccgagataatcctcccaccacaagcacaacatggtatttttgaggaactcggctacttcagagatgaggtagtacgtcattcggggtattgtaggaaattcagcgaggtcgagctcgccaattcgtaccattctggcaaaagatcccagtactacaaagcaattgcttcattaaagactcgtccatacgaagaaaaggatagctttgtcacagcatttatcaaaaaagaaaagcactgg

SEQ ID NO: 1929 - DNA, 456 bp, Hubei coleoptera virus 3
  strain QCM109726 putative glycoprotein,1
cctacttctttatgggctattttaaaacttgagttggactaatatattttcataatgtctaatgatagggttgagtctctccatcagatcagaaacaaatctttgccaagccaaaaatacaagactccagataaaaaaccagacttagatgttgacaagcgtttggcaatcattgagtcgaagttagattctgccttggctctaatcagacaattagtccaacttaaaaatgctgaagcttcaaataataatactgttaaatcttctgcacctcctatgtatccccatcttcctcacaccacccagcctagctatgttactgcattccaattgcccaagccttattaggttagcataaaaagtttaataaaaatggctgtaaattagctattttaaaagtaatatcgcttttaccctctttattaccaaaccagctatttttcagctatctcaatc

SEQ ID NO: 1930 - DNA, 456 bp, Solenopsis invicta virus 4
  isolate Gainesville-Sin, complete1
cagcctctgaagcttttgaagctgaagaaggtattgaaagcggagttaaagttggtgagtcatttggaggaccattaggaatcggtgcaatcattcttcaatcattaggtgatgtaacaacaaacgcactaactgctggaatgaaagagactcaagctagcgattatacacagaatgcaacgcaacaaggaattggagcacagttgcaagctggtttaattgaaaagaatgaaactgccactattgatcaagtatctgctgtttctaaaggatttgatcttttgggacctgctggtgctggaattggttatgcaattggacaagcggcttttcaacctggagatccttatttgaatacagtcaactcctttaatggaatgacgaaccctcaagacactggaattgtacagtcactgaatactgatagtgcaagcggtgcaacacaacaagtagaaa

SEQ ID NO: 1931 - DNA, 456 bp, Trichosanthes kirilowii picorna-like virus
  strain pt111-pic-61
actatatgtaagggagaaagccgtggctgattcgctagaactttgttcaataggactgttcttttacgttttgtaacgtagtggaggttaggtccgcaaatgaaagctgcctttggaaatatagtaatgtaaacctttatagaagtataaagtggaggtctttatcgaactcttgttcattctcctcccattctcacatgttagtgggaaataatttaaaatggatttttctgtttgaagtttgagaaactaataatagaagtagcaactaccaccgaggtggaaaaacgtcattgagttgtgcgaaagttgtatttcgatgatttagaggtctatcaaatgaatggcagattttgaagtttcaaattactttgtgtttggaactctgttattaacataaagcgtcgaattggagacgttaaatcgaactttttcttattatttaaaccaatcaat

SEQ ID NO: 1932 - DNA, 457 bp, Partitiviridae sp.
  isolate H4_Bulk_46_scaffold_395 RNA-dependent1R
taattatacataagttctccttgttttaaataaattatatttaaaactaaatatattagttggtgttcatgtgagactcaaagaagcattaaagaagtttgacttcgtcaaacgtcttaaaatacctgagaagctatatcctacgatagtagctaatttagctgccgtacttaagggctcagacaataagtacattacacctttgggtaaaacacacgatcctatcgaattaatcgtagcttgggatgaagtattccaagctaatgcacataaactaaacgctcctttactagacattgaagcagagcaacggcgcaagtttggacctcgttcaagggctaagccatgggttgaaagaaaaccaggtttattagcctcatttcatagtcagattgataattttacgccacctttcttcaaattcgaagatggtgaacataatttatgtcctctttct

SEQ ID NO: 1933 - DNA, 457 bp, Trichosanthes kirilowii picorna-like virus
  strain pt111-pil-51
tccaaaacttatggtttggatttaggcaagttttacttgtgctttcttgatcttgtttttggcattactaggttaatagtgtattgatttagtttttatatttcaggtagttaggcgagatgctctactagcagtcctaccgtttacaagtatagaaatgatagttggttacttttagcttttagtacttagatggatgaaagatgtgtagcatattttagtatgatttatgatacacttaagttattgaaaagtaaatcttgggttccaccagtttctttgattaaataccatcggcaaaattcttagctcattaatctttcttcctgaagttcagttttaactgagcgtaacagagattgtatttaatgcaacattagtaagattttggcctgtatttgttagagaactacagcgaataaaattcctaagtgttttctttaatgacatcaggaag

SEQ ID NO: 1934 - DNA, 457 bp, Beihai picorna-like virus 69
  strain HOU158647 hypothetical protein1
aaaggatggaagattgaaaaactggaactgtatttagtgaaagagaacaactgaaaaggttgcagttttaaaccaaaatgatctcagttatgagagaaattcggtattaaatctatcacccattttcctgattgaccctagttggtgtcaactgtaatttgttttgtttatttgttgttttatgtgttaatgttactaagtttttgtgaatatgatgggaaagcaaccgctctaactccaggagatgtacctgcccgagggtaagggaacctttgtaacggttttagatgttagtaagtactatagttcacgaagattgagtatactgcgctggagtggggatggcagcgcttaattaattatcttcccccggatggcagtccgttagccactatgtggtagccgatgctttggcaaggcatcgacataccctagtacgcaatgccagtatgagtgt

SEQ ID NO: 1935 - DNA, 458 bp, Marmot picobirnavirus
  clone c329629_g1_i1_libraryA_2570 segment I1
tctttacatctatattatctttaattctttattctattccaaacaaatgttctaattcgttctctagtaaagaaatggacaagtacgtccttggagaacactaattggaacaaattacaaagaagtcttgaagcaattagtcctaggagattagtgtaggacggaaactttacttcaagcaaataacatccagaaaggagggtgatttgacacagaatcagatcaactaccaaagaacgctagaagataggcgttcacatcttgcgaacgagaaagagacgaaccgagctaacactgctcgggaaacagaagaacatcggtccaacgtagcgcgcgaatatgagaccaatcgatctaacgtcgcaagagagacagagactcatagagcaaatttggttcaagaaaatttgacgtctcgtagagaccaggaaacgcgtagatctaatctagcgcgggaa

SEQ ID NO: 1936 - DNA, 458 bp, Wuhan house centipede virus 1
  01BaA1 genes for replicase,2
cttccggttgccgacgcttccctcagttataaagattatcttaacgaaaaaatttttctcgctcctcctcaacctcctataagaaatcaaacctcggtctctccggccttaagtactactactgccgttagtgtcccgactacaacacccgagatcgttactacatctcgtccgataccatctactactagaaagtcgagaccagtccctccatcttccattcctccatacatcgattgcggatgtctcgaaccacatcagtgcggtcctcctttaggcctccctcagaatgaccctcgtatgtctcgtgattaccctagggtttattcacctaactgcaattggtctgatggaaaacctcaggacacctatataagacctcctgacactcgcaatcgtcatcaaaatcaacgatcccgcaatatttaatttgaatataatttatcaattctataaaa

SEQ ID NO: 1937 - DNA, 458 bp, Wenling narna-like virus 8
  strain WLJQ103992 RNA-dependent RNA1R
gtgtcatctgcgtgggcagaagatcttgtccacccaagtgcgaccgcaaggtcgcgcctggccgatccagggagccaaagcacgaagccctcccgtgcgggcccgggggcagagaaataacatctctctgtcagccgggactcgtattcggagagcaagcgctgaacgctcccgctagcgggaacaagggacaccgaagggagacgacccccaggcacgcccttattcgcctcaagtccgcggaacatcttgcggactctcacggcgatctggcggggggcaacccggaactcgtcgcggggctggcgctcaggtcccaggagcattctgagctcccgggccatacgagtcgtcagttgctcgacacagtccactgtgccgagctcagagcctttgccctcgaaggggactttccccctcttgcaggcaacggcgctgaccgcgagcttgtgccgggt

SEQ ID NO: 1938 - DNA, 459 bp, Colletotrichum eremochloae totivirus 1
  strain CeTv1CBS 129661,1
caaactcacaatttgggggactctgccacaccgtggatgacggcctagattgcgccgttattgacgtcgtgtatggcgttgttgtcgtcccatgcccggccggcccccccctccactcttcggtggtgtgcggtgccgcccggcgtggccggttcatccccatatacgcttcgtcaatgacgagcgccatcgtggccggctcacatcctgggcagggggtccgtcgccgctcgactcttgttgacaaagcggcaaaccgcagcgcagcggttgtgacgtcattttgcgcgcagaaccttggggtgcgcacccataggccataccatccgaacagggtggctccctggctgaaaagtggttctttggtacacggagtagggagggctacggcctccgttgatcccgtgtgtcaacgaattatctgctcgcaatcttcaccttgtttaccccccccaagcc

SEQ ID NO: 1939 - DNA, 460 bp, Chinese broad-headed pond turtle arterivirus
  strain WHWGC150683 1ab1
gtggaaaccccgcggatatctctgaggcggcagcctgtgtacaggtactgccgacccttctatagcgactccaaactcgacccgcccctagcctgacaacgtcaggaaggcaagccttgaaaagcctccgtaaccgtccaacggaggtggtcgtgctttgcagcgctcgttcttagtcagcgacccaaactcagttgaccatcgtttcagactcgagagggcgtgccctcatctgactcgacttctgagatctagctgacggtctgtgaccttcatcaacggaccattattttctacttagttgctcaccaggctaaacgcgagtgttctcgcgcactaagtatacttaaaatcctatttgctctgacgttatagagcttaggttcagtgttttatacactgatctccatcaatctccacgacatctcagtgttgtctcctgtgatcctaactactggta

SEQ ID NO: 1940 - DNA, 461 bp, Marburg marburgvirus
  isolate Marburg3
aatgatgctcaaataaaacagaagtccatctgtataaggagtatggcttaaatgggtatttgtcagattcttaagagattagtttgtattgatttaaataatgctttaaccttacattgctgctttaaatggttgattaagctgattagcttgtaatatataatctcttctgggccatcagatctgtaatgggtttactagattatatacaagacacagtaatattttataaacaattcttgctcagttttgctttgatttaataacatacatcattgtgcctttcattgctaggtcaacccaactgataatgatattccttctgaaatagtaagaaaaactaatgaagaacattaattactgggtaaaagtgattaagttctttaaatttgatcaaagtaatattttgtcagtgaatatattctcatatcacttgattaaaaacaggaaattatcctaac

SEQ ID NO: 1941 - DNA, 461 bp, Plasmopara viticola lesion associated dicistro-like virus 1
  isolate1
gcaaggtttatctcttcggagtttttacttgtatcggagacagttctggaccattcctgcggaattcgctaatgatcgtgaataacaccaacggaaaagtttgtatctctactgtagaaatctccaaccccaaaccccaacccccaattttaaactcatggacgaaggagtataactttcccaaactcatagtattgagtataactatactagtcagtaaaagactttaatccgacacacgtagtgtcgttaaatgaattctatttgtatcaaatagtcttatctccccgtaaccaacacgaaaatattgaacgtttcgtactaagttacatggatgtgatcttgctagattatactgacgacaaattctagtaatgctatccaactacaagagccctatttagggatggcctcttcgcagcagccctgcaaactgccactcgtcaacctgcttcgactct

SEQ ID NO: 1942 - DNA, 461 bp, Picornavirales sp.
  isolate rfb094shi2 genomic sequence.1
catcatggaattttggagctatcaccgataggcttaaaaattgggtgaaaagtatgagtaaagactgcattcagttttttattgattctccattcgtggctggactcctttctattattgctggaattgctcaattccttggattgtatatggttatgcctactacaagaactggaattgctgcccttgttgataagtttcagaactcaacaagaaccatgcattatgcgaggaatgggttcaaaggagtaatggattcggtaaaggactgttttgcatgttgtaaggacatgttgggcatttcaaataatgcggaacttgaaaagtttaaagaacaggtcacccaatcattggagctttgtcgtgatatgttaataacagcacagtcaaaaccaggaacatttgtaaatgattcacagagatatgtcggatgcagaaaaagagtataggagacgtcatct

SEQ ID NO: 1943 - DNA, 461 bp, Sanxia picorna-like virus 11
  strain SXXX37695 hypothetical protein1
cgtgtatattgtatagtatatgcgtaaaatttatttgcccgacttacgacggatttcgtttgacgagcaggagcgttgacttctgcacaaagtatgatacaaaagttagagtattcacgccttactattatagtgacgcttcatttatttttattttcatattatttcgttaaactttttcgttaaaagttaatttatatagtatagagagctggacttacattgtcttcgcttttatgcgtgcttagttagagctggattgctcacgacgtatgtgtttaagttgagattgtgtgtgaaattttcagtagctttatatagggggatatcaaacctccaacccaattagaatttgcgcttttaattggcacttgaaagtagtgatgtaagcaaataaccttgtgtgggatggctcccacacattgtatggcccgtcggcattgccgtcaatcgtaacacct

SEQ ID NO: 1944 - DNA, 461 bp, Hubei polero-like virus 1
  strain WHCC118254 hypothetical protein 1,1
aatccttgcggctacaagccgcgagatggctggaccgcgcccagcatgctaaaatcccctcgactgaggagcgggagcgcgtgattgctaagaccgtgagggcgttctcaaacgcacaaacaaatggccccacggcaaccagagatggacggctgacctggagaaactttctccaggatttcaaaagtgcagtgttctccctggagtttgacgccggcatcggcgtcccgtacatcgcgtacggtaagcctacccacagggggtggattgaagatccacgacttctcccagtgttagctcgcctggttttcgaccgattacagaagttgtcggaaattaggtttgaagatctttccgctgaggagctagtccaggctggactctgtgatcccattcgactatttgtcaagggggaaccacacaaacaagccaaactcgatgaggggcgctaccgcctcatc

SEQ ID NO: 1945 - DNA, 462 bp, Wenzhou picorna-like virus 17
  strain WZSBei69283 hypothetical1
ggtgaatccccccctcttcctctaacgtctattagcaggtagatgtgtcttctcttattttgaagatgaacatactgtggattctcgagtgtattgtggctacacaatatagctcaaagagctttttagcgagtgtgtattcgctagattgcacactcaaactattaagttctggatttggtgactatttcagaacatttctttgttcgtatgtattatatgtaatatattctgaatttaaggttgcactttggtggttcgtcctacgcaggaatcaccatgcaaattcaaaagttttgtcattccctatacttcgggcaaaacttcaacaatattttattgttaattatagggcggtctagtatcaatcgttatatgacctaaatatgtagtatgcacgccactacgtatttagtattttaagtgcagcacctagctcaaggttatgagcccttatataaa

SEQ ID NO: 1946 - DNA, 462 bp, Hubei dimarhabdovirus virus 4
  strain SCM46012 RNA-dependent RNA1
tgggaaatgaagatggtgtgtatttatttatttatttattaagttaatgtttaatattccaagttctatatttgtttaactgtgtgcgtttccttagatattgatctactctcttttaactttatctcagttgttcttgacaacttcattaagttgatccgagtcctgtcatatagtcaatcgtatgggaagtaccaatacccttcttaatcccaacgagtgagatgacaataacagcatttggcgttccatgctgttttagcaggaatgtcttattgactcgggaatatttacttggtaattgatgtgataaactggtcaagtgcctgcgataatgacacacgtatacaatcaaaatgaggcctaaatacggcttttaattggtgctatgcttcgaagcaatgatacaatgatataacattacatcaaattagatcctgaaaaaaactaacagacctaaag

SEQ ID NO: 1947 - DNA, 463 bp, Beihai picorna-like virus 11
  strain BHZY60905 hypothetical protein2
ttcatattgcataccgaccgtcatgtctttaaactgtccggaggcgctgcggtagtgtcgtcgttactagaatgaaaccaaagccgaactcaacattgattacagatgttatgtatggtctagcacataccatgcaagcagactgctttgttgagacaagaatgacgcgaacatgcgagtaggtatttacttacagtggtttatagccccacaaacaaaggtgtgaataggcagacacaatgatgcatgtgtctgacccgtatcaacaaatcgcattagtaattttacaaattttattacagagccaacgatctctataaaccgtacactatacaaaccccagtccggtgcactgggtactattcaagaagaaggtgttgcaaatcttacggcacaaatcactaactttgaggagcaagatgctggttggaccacatctattggcgcaggttgggattctacg

SEQ ID NO: 1948 - DNA, 464 bp, Hibiscus green spot virus 2
  isolate WAI 1-1 segment RNA3, complete1
cataaaattcaaacaattctactgaggtgatcccttggtagtcttattttgtccggcgacgaggggtttggccgttatcaccctagacgctgtagtcatcaggtactggcacctgtactggagaggggctgcacgttgccatgctcggtgtggacgcgagatagtgctatcgcatccgagagctggtgtcctggggactgcctggggcgtagctacactattatatatatatgttggatcgatctgaggcaaaagtccactgcttttcattatatacgtttggactaccggttagcgggtggtacgattagggacgcctgataacctttcgtatctgtcagtgtgataatagtgctttagggtaagtggtgccgacttgtcggttttggtcgtggtcatttggcctggatgtgtttaggtaaggttgtgtattggttgttgcatcttgtctttgggacctcgaa

SEQ ID NO: 1949 - DNA, 464 bp, Wenling fish picornavirus 1
  strain XYHYC180303 polyprotein gene,1
gggggaccatcgacttatactcgatgctttccccctctccttttcaacgtcctgggcacgatacgcccaaccctactaatcaagcttgctagatttgctggtaagacccgtttggtaacgtaattacccgtaacgaatctaagaggtttggctggacttagtacctattaagatatgccttccggttatgtctcgagctctgctgtggaacaacacttggtaacaagtgccccagcagttagtgatctatccggttgaaacagtcttattgtgggaacagtttaagtattccgattacattcggcgtgaccttacgcagtgcacggacggatagtaccctcctttaggatcgaatccgttctttaggcccctcttggcatcctagcgagtcacctctccgtgacaagatagtgctgtattggcaaatattttcactttttaccaaaaactttcatgatgacaaa

SEQ ID NO: 1950 - DNA, 464 bp, Wenzhou picorna-like virus 5
  strain BHZC35527 hypothetical protein2
gtgccttaaacctattcacccagttttgagtctgggctctacggaaaagcaaaacttcatgtgtatatatggataccaattctcgcacaaattttgtgtacttttatgtgttagaattaggctttgtacataaagacaatctgcctgcggattacccctatttaggggagagtttcgtctactcaatgtaaactacaccactcctagcactaagcaatgcctggagattgtaaataccgcttactaataatgtaaataataataataataatatatatacatcgggtattacgtacccaacaatttttgaaattttgtcagacctcaggaaatacaaaattaatccaaaccgttttgataaactatggcataaacatagatgggaattagggaaaactgtttcatcatttgatggagtggagattcctcctaaaagagtgaaccaacgcctagttaaccaggtt

SEQ ID NO: 1951 - DNA, 465 bp, Wenzhou picorna-like virus 31
  strain WZFSL72092 hypothetical1
gtgttagttcactagggttttatattaccgtagtccatgccgcgttagtgctgggcgttttgtgccatgaaacggtacttagtttgcgtttgttttgagagtgtgagctgagtgaaaatatttattctttgatgatatatacgtacgaagtactatttaagtatgtgtatagcttcgggttggcaatatacccgttacttattgattggccgatatttttaagcggttggagtaaattgcatcgcatcatgtaaacaagaaaatgttcctgtttttgtggtatttcaccgtaagactcagtgttgagcagggtcatatcatatttacagtgtttgaattattgtagatggtggcatgcatttgtagccaattgtcggttcgttattgaacccccaagcttgcgatggtagtagcaagttgagccgggataggccggtggttacactatcaaacaactcagcagtg

SEQ ID NO: 1952 - DNA, 466 bp, Leucocoprinus gammaflexivirus E
  isolate Won, partial genome.1
cccccccttcgtaaaaatttgcggcaattacctccaagctcgaccacacgaacgagctttcacgttcgtgacttatactgattccctccgaggtcacatcaaatctcaacttaaaactttcggtgacgtggagggacatcacatcaagacgtgggaactggctctgctccaaccatgcaacccaatcgtcatctttgacgacgttggtctagctcctcctttgttggacttattccttatcacccaccccaacgttaaacactttttctttaccggagaccccgcccaaccccaatacaacgcctacaagcgcttccctaatgccccctttgtacccgataaccttaccattctcgctcaatcagcttgtcgttacttccgagaaactcgccgggtcccaatcgctactgcttccgctcttgggctaaacacctcatccaccgctgagggtggccttggactctcc

SEQ ID NO: 1953 - DNA, 466 bp, Hainan oriental leaf-toed gecko picornavirus
  strain LPXYC2131221
gccacacgggggtttaattactcccgtgtggttcgctttggacagggtttttgctatgccctggggaatttcttcccgaaatagccttctgcagttcagagtagtagctggactgtgggagttcttttctttctttttcttactttatgtttgtttgtttaaggtttgatataatggttttatgtaatgtagtagccagtacgctggtgagcctacgtcaagattttattagagggccgtcctgtcctcgaatgttattgatgggtatgtcaggtgggttaaaccatttggcgggcagtcactggctaaagggcgtactagtgattctacttgtgcatgacatgatggttctgtaagtcgcagagtggagtacggacctggatgatgctgctgaccagtggggccttatcccctgccgtttttacgcaattggcggtatgggtggtagttgcagtagctcagtatt

SEQ ID NO: 1954 - DNA, 466 bp, Blacklegged tick picorna-like virus 2
  isolate RTS-11.2 hypothetical1
ggggtgtcgctgtgtgacaaaacaaccacttttttctgacttaaagctacgaaagcagcatcgaacaaagtcttagacaaagtgccaagtgctccatgtagctttaagtcagaaaaaagtggttgttttgtcacacagcgacaccccgcatgataccagtcagttcggaattcaattcttccaggatagtgtgcaggtgcatccaaaaagcgccgtgcgccatttaccagcggaaatttcacctgtgtgcaaagtttatggagtagtgggtaatcaatccacggcctattctacagtggtgacgtcacccatttctgatgcggtcgagagacactgtggtattgaacagcgttggggtcctccgaaatttcgcagtaattacccatggcaagcgagtttacagttttcatcccaacctactttaggcttacctgccgaagatttaatttatgcggtagattcctac

SEQ ID NO: 1955 - DNA, 467 bp, Wenling crossorhombus picornavirus
  strain XDXMC21480 polyprotein1
cgcggttaaacccgcgcaaccttctttcagccgcgtctgagtagcgcggttagtcctgatacacagtttcctgttgggtactgtgtcttcgggtgaatgctcttgtgtgaatgttttaggctgtttaagggaagcgtttccccgtgcgctgtgagggtttctcacgctctttcggggtgcagtctcttctgttgttcattaagatgtatggatgcactgttgtgaaggatttgtgaactggggatcgacaccccgtgaggggtgccccagtgtccataggagtttgctggagaggtgtgttgctgtagtgactatccgtgacctggcattctaaggtgttgaccccaacctgtgagggtctggatcgcagtgttgaagtgctttggagggttcaatggggtttctgtagtggatattatgtgcttgacgactactggtacgagtgtattgggggtctacatgtgtga

SEQ ID NO: 1956 - DNA, 467 bp, Picornavirales sp.
  isolate bpk205shi03 genomic sequence.1
gatgagccaaattacattacgttgtgttgctgttacggctaatggcgcaaaattcgcaaacctcgctaatccagcggagtctgttacttttaaaaccactaaccaacagcgttcacgcaatggtgtacaagccgttgtcggtcgctcttcaatcgtttggattgcaccgcacgtcgtaaaacaatgcgatgatgcttgcgctccgtcgggtgatttcaccgacttgctacgtctcgaattttctaatgcgaattcaggggaacagttgattacccgccttaatgatttggcggactggttaactgcacacccggaattccttcgaggctttggtccacagcaatcttctgacgttgttcttggaacagtatgaatattcaggtaatgttattaggtagccttgcgattatcgcaactaccatcataacggtaacaggaatcgtttcttactacatccactaacttgc

SEQ ID NO: 1957 - DNA, 467 bp, Hubei yanvirus-like virus 1
  strain WHCC105213 hypothetical protein1
gttttgccagaatgccaactgatcggaagagaaaatggcaaagtacccctttgggtggcacctcaggtgcaatggctggtcaccggcctttgtgcatacgtgccaacagggttgtgggggcggatgcgggttgtctctggcctgtcatcactgatcccactccaaccgatgggtccaattcttttgggcactactccttcctctggctttgtctggccgcgcccttctgggtgcaaacggagtttggtttgaatcgggttcctgtgtgtcgtacacacccactgagtcagacggcaccgcgccgtactgatatatcttgagggccgataggggttggcctgtcctccaggatggcttcctctgagtcattattggtgaggcaagtagtttctgctgtgcgtgcttcagtgctgcctgcatatacccatctcattcaattctgatgttgaggataatgcctaatctgg

SEQ ID NO: 1958 - DNA, 468 bp, Plasmopara viticola lesion associated narnavirus 25
  isolate1
gatgtcttgtatcaccggacggtagaactaccttccagtgcttgtggtgctagcgtgactgaaatcacggtcaccaagtatctcgagcgcaagtcgattgggaacgaacctcccctctctgtcaagcttctccgcccaccacgtctccaccgaagtgagaggcgtgtgtttggaaaactggcggacagaaggaggggggagtttcaacttcccaggtttcatggtctttggtttgcacggacgatattttcctcccgttgcccagtagcctttgtgcgctcctgtggagacgtacttgcctactgcgcgattggagacaaacgtaagtccaggtggtggagcttcactaacgagggcaggacccccgatgcgaagtcgcacctccacctccttacgcatgccttcgaaccgccgcgggtcggcgggcgcgaagaaaatatcgatacgtgcacagtactttgttgggtc

SEQ ID NO: 1959 - DNA, 469 bp, Sclerotinia sclerotiorum hypovirus 2
  strain SsHv2.HBstr-470,1
ttttggggatggtgctcttaggtttgatctttgtagatcctaactaggaggaaacattgccctgtttcgtgatgatttctatgttcaatcactgaagcttctcttcaccaaaaaggagagagcttcgagagcttagctgtttcagctatttgaaccccgaaggattcatgtctaagacatttggtttctattcagaaactattcattctttcatccgaagatgtaaaactacttcgtagtaacgagacggtcctgaaccctgacatgtggaacggcgacgacaggcattctgtggagtagtgtcctagaagaatgatcccctgttgttacctgtcagactggccccggcacaccgtgatgcccggtgaactggtccgtgagacccagatcggaatactccaggctcttttgcacgatatgcttgtcatttttcgtggattaccctggtgctcgttcccaatccgaaagt

SEQ ID NO: 1960 - DNA, 469 bp, Unknown
  Description of Unknown: Mutant Zaire ebolavirusisolate Ebola1 sequence
cggacacacaaaaagaaagaagaatttttaggatcttttgtgtgcgaataactatgaggaagattaataattttcctctcattgaaatttatatcggaatttaaattgaaattgttactgtaatcacacctggtttgtttcagagccacatcacaaagatagagaacaacctaggtctccgaagggagcaagggcatcagtgtgctcagttgaaaatcccttgtcaacacctaggtcttatcacatcacaagttccacctcagactctgcagggtgatccaacaaccttaatagaaacattattgttaaaggacagcattagttcacagtcaaacaagcaagattgagaattaaccttggttttgaacttgaacacttaggggattgaagattcaacaaccctaaagcttggggtaaaacattggaaatagttaaaagacaaattgctcggaatcacaaaattccgagt

SEQ ID NO: 1961 - DNA, 469 bp, Ginkgo biloba picorna-like virus
  strain pt112-pil-2-NY genomic1
gttttattcttctgtgttgtgagacgtgaatacgagcaacgggtgctatgtaggagtacatagcataccaccgtaagtagatagcgaaatgacaatttcttataacatagtgacaatttgatgtatcacacagtatttagaacacactaatattgtggtttactgttctctcagtagtccgtgtatgtgttaagtataaggtggagataagaaacaatagcattccgttgaatgacaaaggcatgtggccactattgtgttcttacttatatatgatttaatggattaatggataacttgagtgttgtactttggtattacgctcaattggtctcggaagactcgtttttgagctccacgtgagaacgtgactggtcagccgccagcacgatatcgccattaaaaatggtagagagctctattggttacagacaaaatttctgaggtttctgctccgttgatagcagat

SEQ ID NO: 1962 - DNA, 469 bp, Hubei permutotetra-like virus 1
  strain WZFSL84790 RdRp and1
gttcctctcctctctacctgacccggaccacgaggcggctaagctgttgttgggccgaggagtaaagagcttggacgtgaaggatcaaagtattgatctttcatgtctaaacgtgtataaagagtcatgcccaatcagtactctacaatacgaaaaggctcaaatacatccagaggccacgaaccaaaaagacggaaaagtaaccgtacgacgtaactttggtagagtaggcgcacaggacgctttgttgtcctctgcagcgctagtaaaatacccattagaaacgttggaagaactgcgcgacgcaaccgtatatacgtcaggaactccctctggtttttcaaatcgaatcaaggagcttacaacacggacgtgcaagtcggaaggaaaacccgcctggatagccaaaaacttatctaagttgctaccaacaacagaacttcctgattggcatgatgttgaggggttg

SEQ ID NO: 1963 - DNA, 470 bp, Wuhan nido-like virus 1
  strain SCM49454 1ab, hypothetical protein,1
atacttttagacgttatctaattattctgacatttcaggatagcttacgtacagaacaattagataacgtctaaaagtattggctattaacgccctattatatacacaaatttaataacggaactgaaattgaaacaacccgtatagcaagagagatttttaaaaatttagatttcaagcacttaggtgcattctttttgctatatagaccataccgataaaacacacccaaccccggggatttccccttttttgcaaagtatttatagctaaactaaagcagaggttcagatatctacttgaatctttgtagcagtggttatatttgcttattttttgccttcgggccattctaaactaagttttatcgaagttcctaacttggaggtgtcacttaggaagaatcaacaactaaaaaaggtcacatacacacattggaagattcaaagcttaatatctacttagccaag

SEQ ID NO: 1964 - DNA, 471 bp, Beihai picorna-like virus 115
  strain BHHK131520 hypothetical1
gtggggagctaccactccccaccgcttgtttacctgctagtacattttatgacggtctaaccgccattctttgtatccctcttactgatcatttgagggctctattgtacccaacagacaagaccgagtagcaagattaaacttttatttctataactatatttcccattacttagtattaaggatttttgggtatttatgtagaaatgcctagtcacgacatgacttaaaataaatagttaggactcgacatcctatactatgtcaccccttttcggtcccgccgtaagaggcttaggcccctgatggggattctgtgtaattgcgaattacagatgggtttaaaacgtagattggagaacactctccatgtagacggccccattagtttttcgtgcctgaatgtgagtcggcgccaccacagacccctgatactgccgtgacaagccctgcagggattcctcatataac

SEQ ID NO: 1965 - DNA, 471 bp, Beihai picorna-like virus 28
  strain BHZY60695 hypothetical protein2
cttatggcatcgtgctgaaatcacggtaaacttactccgttttgggaagaacgttaagctttttgatcttggaccgatgttaaaggtatcccgtcccggaaagacgttaaacttgctaagtcagttgtcctctgattagtgcccacgggcaataggacttgtatataaaagtgattatagcacagagttgattatttttcgttttgttccactctgtagtaccctatgtatataaataataaaacctacgtgtagtataccgtatgacttgaaagtatttgcacgttaaacgtagtataagtcaagaaatgtatatataatgatactgatgatggacagttaaaaccatcacttttacatattttcttttccgattcggctgaaactggtgaccaacctgttactgccaacgcggaaacagaacaagttttaacccagattggaggagatgccccacaagaaaatgagggc

SEQ ID NO: 1966 - DNA, 471 bp, Changjiang picorna-like virus 8
  strain CJLX30776 hypothetical2
gactggacttgctggggaaatacctagtgcaacccagcattttaccatcgctagccactactcaggactatccagagaggcactagacgcgtggttgttgagtttgacccacgcagtaatttaagactcgctaaaattttagaatccatagtagaagagaaagtttgtgcagagattgaaggtctttccgtgaatgcacccgatgaaacaacgggtgttactagttttgcttcggaagccggggtgtgtgccgatatccctatagaccctgttgtctcattcgccaaaggcgatgagtcttaccaggatctaaaggaatattttaggcgcccccggcttattttcaccggcacttgtgctaacactgtttccgttttggtaaactccaacgttagtcagatttcactttttcaggattggtttccgaatggtatagaacgactatcaggagttcaaggggttcgcttcgat

SEQ ID NO: 1967 - DNA, 472 bp, Bat badicivirus 1
  clone Bat/CAM/BadV-P11/2013 structural2
tcatgaactcattaattcacttaatcacaaaacttgttgaacaattagaacttcgtggttgggtttgaggtgtttaaacatggatcatgtagtaccttatctacaaatcccagttgttggtctaatccttttaaagtaatggcccggaaacaatgtagggagtagtgaggatctgtgagtaagacgtgctctggcaagccgcgggtctccaattctggactttcggaccccagaaaaggaagtcgatggcccccatcacagtgagcagtaatacatgtgaagtggacaagttccattgaaaatcattcactcattggtttgtggcaagttgtgtggcaacgaggatcaagttgtttggcaacggcaagctgtgcggcagcgtggggaatggcaagctgtgtggcagcgtggggtaaggcaagctatgcggtagcgtgcaagggcgcgaaagctctgaggagcgattctgaac

SEQ ID NO: 1968 - DNA, 472 bp, Hepacivirus C
  strain SL7 polyprotein (POLY) gene, complete cds.1
gctagtgatctcgcgggggcacgcccaaatttctgggtattgagcgggttgttccaagaaaggacccggtcaccccagcgattccggtgtactcaccggttccgcagaccactatggctctcccgggaggggggggtcctggaggctgcacgacactccaccatgaatcactcccctgtgaggaacttctgtcttcacgcggaaagcgtctagccatggcgttagtacgagtgtcgtgcagcctccaggaccccccctcccgggagagccatagtggtctgcggaaccggtgagtacaccggaatcgctggggtgaccgggtcctttcttggaacaacccgctcaatacccagaaatttgggcgtgcccccgcgagatcactagccgagtagtgttgggtcgcgaaaggccttgtggtactgcctgatagggtgcttgcgagtgccccgggaggtctcgtagaccgtgcatc

SEQ ID NO: 1969 - DNA, 473 bp, Marmot picobirnavirus
  clone c207250_g1_i1_libraryC_2509 segment I1
atcaattaattctttaatttcattcaatttccaaactaaagttctgatctagttctcaaagtaaagaaatggacaagtacgtccttggagaacatcgattggaacaaattacaaacaagtctcaatatgcacgtctgaggagatcgatgtaggacggaaaagcatagtttgagcaaataacatccagaaaggaggtagatttgacacagaatcaaatcaactaccaaagaacgctggaagataggcgttcacatcttgcatccgagaaagaaactaatcgtgcaaatctagcgcgcgaaagagaggaaaaccgctctaatctggctcgggaatatgagactaacaggtctaatgttgcaagagaagttgaggcacaccgctctaacgtatcacaagagcatcttattgcagctagagatcaagagacgcgaaggtcgaatttagctagagagattgaaaccaatcgctcaaac

SEQ ID NO: 1970 - DNA, 473 bp, Perina nuda virus
  complete genome.1
ttttaaatatcgggtacagggttttaaccctgtacccggtattcagaccttagcttttgagctattgtaagaaggtagcctagcttttaagcaatggcggtattagatcttgcttttgagctctatctagtacgtgtttacaattaattcgattagttaagattttaattagttttagtaaccagtgcttcaatcttctattgtggcactggcttggatctcccttacacatgtgattacatgatagacttattagtagtagatacatctaaattctacaacgacctagtaagtattagttatgtgaaatagaatgtggaggattttaaattgtgaataggcctttatattcggagtaggtagtattgcgtatactattaatcccacaatacgtggtctccgtcttagtatttttaatttgcgccccaatggaaatggctcttcggacttgagtacagaggggcaacccataa

SEQ ID NO: 1971 - DNA, 473 bp, Wenling brown-lined puffer picornavirus
  strain XTXMC521401
ggggacagttaacatagctaatgctagttgacatgtccctaaacccttttcaacgtctgacccacgatacgggtcacctctttatgtttgttttgttttacgtttgtttgtttgtttggtggaacgtaaccacccgtaactataactagaatgtaggctacttaaattaggtttgttttacggatagttctcgtagacctcgagctacgtctcgtgcataaacatgggtaaccatggcacttggcggttagtggtttttacttggctttcacgaactcaaattgaaataagtcagtgacatttgaccttgtaggcgtgaggcgatgtgcaccgcgatatcaggtaaccttctttaggtctgagatgttgtcccagccacaatctttgcgagctggtcgagggctttcccgaggtactgcacttaacccaaaactttctaaatcaaactcaaactattgcagacaaaattaata

SEQ ID NO: 1972 - DNA, 474 bp, Aphis glycines virus 1
  isolate North Dakota, complete genome.2
gaatttcattttataggaacattttcacctcatagcaacactcccattgttatgttgtacccctcccctttcataattgccttcctagtttatcttgtgcagtttttatcccagaagattgcattgacctgctgtgtaacaggtgttgcatggtaatgactactaggtgtccatattcacggctcgagggccacagggtgaaaatccctacattctagtgtgaagcgaaagataagctggaaattgagagaaagctattcaaggatagtgtcgtgcagctcttaggagtaaaggtgagtaacgtaatatgccttatgagctctcgacttctcaacacatttctttgcccaggtagtggatcacaacgtgaatggtcccataattaggggtattgtaggtaaaggtgcttcgacatatgtataaatgatcgaatagcgataaccggccgtgactacagggaccccctttacaaaa

SEQ ID NO: 1973 - DNA, 474 bp, Unknown
  Description of Unknown: Chicken calicivirus ChCV-052, complete genome.1 sequence
gtgggaaccctttcctcaaactccggacacggactactctccgtgtttccctcatcaaagagggcctcagctggcgcaagtcggctggggccccaagaatcacctgggtggatctctatggcgactggggtcgctttgactgtgatcccaccccactctttgctcgtgaagggtgcatcctcactgaacaccctcgggcagagatgcaagggtggaagtcgctcctgccccctggcaacatgcaggtgcccgatcccaagctcagctctgacttcctctcctgggtggtgcaacactccaaggttgatgaacaaacctggagggacctcaaggcaacctggtctctcgaggatctccggcgcatctccacagactacctcatgctcccggaacctgagaagaacactgatgcctatgatggctggctaatggtcggcgagatgttgaccttagccggtctcattggctgggagg

SEQ ID NO: 1974 - DNA, 474 bp, Riboviria sp.
  isolate sto073pic1 genomic sequence.1
tcttgctcgatgtatacaaaattatgatgtaaataaaacgttgagtattgctattgtagaaagccgtgtagatttttatctttatatcctaggaccacggaaagcagccctttattgtccaaggaaacatcattgctgtacattggttaagtagccgtgtgcttaagaaacttacttactgaacaaaattttaatgctaatcctgatgttttatccgttacgacccctgattcaaatgatactataacccttcgcgatgatggcacaagagtttccgaacgctttaccgcttgtgaaggggatttgccttcttccctgtacgattgtatcggtgaaaagagtgaccactctatctccgatttcttgagcagatatgtgattatacaacaagggacgtggtccagcacgtcggtgcgcggagacgttttgtctaatcttgttttccccaagaatttgtttaatactggccaatat

SEQ ID NO: 1975 - DNA, 474 bp, Rhizoctonia solani fusarivirus 3
  isolate BR19 RNA-dependent RNA1
agagcagccgtttggctgcctggtaccacatcataggggatcgccctagtggtgccccagttttctcccttagaccagcctatcttacggctggttgtccttattaaggatgggtttggttttcttccaaatttatagtcgcctggtgcgacttcatcttttgccccctgggccagctgatgagctggggccgaaactgctggcagtcctggcgttggaatttgtattccgactcccccctgtattgagaacacaggtggtaaattgaatctcacggtgccattgagttggtaaccagaaagcttccgtatctcgtctgagaggaaacaccggttgaaacagcttcggcgcgtttgcttgtgcgtacaacttggagggttagttgcgtttttggtgctcagtcccgtcaaatcttattcctttaaactgtttgaacgtagcaaagaccttgcagtcagtagtaacgacactgac

SEQ ID NO: 1976 - DNA, 475 bp, Morchella importuna endornavirus 2
  strain MiEv2SCYDJ1-A1, complete1
gtcgtcaacaccaacacctaccaactcacaccaaccaaccaaactacataccaccattgattacaaatctttgtccgagaacagcccctcggacaaagattaccaaaacaacccccataaattgggggccaagggctgcgactcgctagaagtcgtaaattcatctagcacaataactgaatggattcattccaagcggaacgacaaatccattcaaagatacaaatcacgcggatttacgacatgggatgctgttcacagtacgccgttcggaatatccgttgagaaagaaactgagttagctgagaaatttctcaatgaattagcaacacgcagctcagaattgaaacaatgttacaacgaacaagtggtgtgggaagaagatgaaaaacctgaaccagaaggtccggaatttgaagacctgcagccgctgaccgttggagccgccacacactgctggttgaacataccattc

SEQ ID NO: 1977 - DNA, 475 bp, RNA virus hoopoe/BBanka01/2015/HUN
  complete genome.1
aagataataaacgattaattataaataatagtacgaataaacgtaaaatgagtcatttaatatatagcgatttcattaaactaagagatgaacttcaacaatacttcacggaggcaatttcgttaccggccattcattacttcaaaccaaatcaaccagtcaccttatcagttaacatcataccatctggggaagttaatgacgaccttattagcgaactcagggccaagattcaacaacgtatcgccaagaaatccggtattaaaccgacgcttggggagacgtacccgttatatttatccatcaacagggagacgattttaaaaattcaagtgcatatgaaatatgcttataaggattttgaagcgattattgacgagatagattttgaactagtagaggcaattaaaacattgaaagacaccaaaattgatactttaactaagaaaagcgttatcgataaacttttaagaaa

SEQ ID NO: 1978 - DNA, 476 bp, Plasmopara viticola lesion associated dicistro-like virus 1
  isolate3
acatcgtgtaataaggcactagatgccccaaagcacaaaattgggtaacccgaactgaagcttgtctcaacaccaatcaatcgcagaaattggcagtggacggcccatggcgcccgaggttggactcttattgttccggctatgttataacctctgttcgcaagttatagcgtagtgctatccttggagaaatcctaaccagtgcctttggaaagcacaccaaaacaaaccttgacctggacatgtcattaaactgtccaaaacccaaagtcccttcaggacaacaatccatcgccagaatgacgaaaactcacggtcgagttcgaaccacgagtcgagtactcaaacttagatggatttctttgcgtaacgagcttcgaaactcgcgtgtaaagttgctacgatagtgcgaccctcttaggagaaggcagagcttaaccctaagttgtatcttgctcgcgttacgacaccaatct

SEQ ID NO: 1979 - DNA, 477 bp, Rice Tombus-like virus 2
  isolate FYBPH-10, complete genome.1
attttccctaccaggacataggaaggtgttactgagtcctggccggcctgtgatggccaacggctgaaaggccgtgcctgtagtcgagtagggaggtttgcggtagcagcatcctggacaaagttaggtgtacacccaccttgccaatggatgtcaggacaacgcattgctccccccggcccgtctgcgcagaaccatggtcaatggcgcttatggcctgcaatggtaaccaggttgaattccctggctgtgcttaggagtgtgacgggtgtccgcgtcgtgatttatagggcgggcttaattgggataccgagggtaggcgccatagtctgggtaaccaggctcggttctgctaacggctgcaggtgtgcgcggcgagccaggggacactcctaggccccctcgccagctctgcccgagcttaagggcattataccttgtctggggtttaacagggggtggtggccttcaccattc

SEQ ID NO: 1980 - DNA, 477 bp, Wenzhou tombus-like virus 9
  strain WZSLuoI85212 hypothetical1
atttcacccaggattcgcacatcctaaccatactcgtcgcattgttcgcgcacaacacctagggggaggtttagaccccacgcactcactctgttggagagtataatccagcaccacacactacatgtgccatataggaagacgtttgcgctgtacgcagtgttgcgcaactgagctagtgctcccacctccatgattacgggcgattgattgaatgcgcccttacaattagttagaacgcttggaggtgagagtgggaggggtatttaccccagggagcagagccgagtgcccgcttaagacggtgagagccgttcagaaagtttggctctgtgggcgatcgcgtatgcaggattaaggtatccgcatatgttaaactagcacctttcaaataataataataataaacaaaacaaaaatagagcaccattcacaaacaacaaacgcaatgtgcggcgccaacgggcgcccgttgcg

SEQ ID NO: 1981 - DNA, 478 bp, Nora virus
  isolate Umea 2007, complete genome.1
gcaaaaaggcccctgggggggggttaatgagtactggaaaaagaagcgcgagataccacttcgctgattatgctgattctggtattaaggattagtagagtatcggaagtgccgaagggaataatgctggtccgttgtaaacaggatacttatgaaacctcttaacagaaactttgagcaaacaacaaataaacgaacaaaaagagttatatattgaacttgaaaaatcaatatcttttatttagattgatttatattagtctttataatcgtagggaataattctcatctaatgatatcgatgtaaaatgtatcattctagctattcaattatattaattgagcttagcatctgattaaattactattgtaaaataatatttaatccccatctttgcaagatggaaactcttaataagtcaggagtataatggatttaaaccctcacaccgaatcatgagtataaacagattcaaat

SEQ ID NO: 1982 - DNA, 478 bp, Orycavirus sp.
  strain GUNCC_DN53589-3 polyprotein gene, complete1
ggggttaagaccccagcatattttcaccccacagcccttggggttagcctacaccttcatcaagatgatggtttaggtttgggcatggaatttgacttcgaccttgcatgtctgaccacgaatgtcatttcttcgttctggctgtagacgagactcggtattttgtattaaggactggcagggcccaagtattggcctaggagctctacatggctaccaggatattcaggccgataggatgtcccagcatctgtgtaggactgtttattacgccaatgtacctctgactctaagcactagagggagggggctgctacaggaaaaggacggcattgcctatccgattcacgtcatgagatttctctgacctctggcctgtagtggctactccgggatgggaaacccggactggcctctcactgcctgatagggtgtcggcggacacagtgcttagttttatagtccgttgtaatgggac

SEQ ID NO: 1983 - DNA, 479 bp, Beihai picorna-like virus 6
  strain BHNXC41284 hypothetical protein1
gcaaggtttatagccttgcagtctctgtttgaatagttgatagttatatgtctatgtgtttagtgttgtacgttcaattatttgaacgtgccgctctcgatacatatgtcattataggtattgattgttcaatttaaactcgtttttcgtacttttgtcgtaaaaaagttcactttttcagtctactatcaagactttaaaaggatagttggagttttcgcacgtctccgtaatttacacttcgtgtagtgcaatctccggtactttggtaatcagccggattataaatttttggatttactgagctaacagtctcctcatactgtacgtcgtgcccatagatggtacgcaaattgtaggtattcctactcatggggtttaatggtagtactgatctggtaccccggctattatagcctaaacaactcagtttttgccaggacgctgttatttataacagtagtcctggcgtatatatt

SEQ ID NO: 1984 - DNA, 480 bp, Partitiviridae sp.
  isolate H1_Bulk_29_scaffold_1403 hypothetical1
ttgctcgcattggtgctcgcaccaagttaatggttgattggatgatcggttcttgggaaaactacttacgaccgaagacgtggatggacgcactcgaacaagaacagcaggagaagtgggcagctgcgaagcgcaggtacgaccgaatgattgaccatgagaatcagaggttggcaaaggcgcgggctgaatacgatgccattgttaacgatgtttctctgaagcaggccacggctcgagaagaacttcgagacgttctgagaggatttgggttgcaagatgcaccattactttcagtcccgtctgaagatcatggccatgaaaggctcagagaggaactcagctttctggggataaattttcgtcccccagatagccagttccactaatcgtgttcaaggaacaatacgcactctcgctagacgagcacgccggttaagaatgaaagaagcagcgacacagagacatcctatagagaaa

SEQ ID NO: 1985 - DNA, 480 bp, Unknown
  Description of Unknown: Mutant Zaire ebolavirusisolate Ebola8 sequence
ctaaggtagaatacttcatattgagctaactcatatatgctgactcaatagttatcttgacatctctgctttcataatcagatatataagcacaataaataaatactcatatttcttgataatttgtttaaccacagataaatcctcactgtaagccagcttccaagttgacacccttacaaaaaccaggactcagaatccctcaaacaagagattccaagacaacatcatagaattgctttattatatgaataagcattttatcaccagaaatcctatatactaaatggttaattgtaactgaacccgcaggtcacatgtgttaggtttcacagattctatatattactaactctatactcgtaattaacattagataagtagattaagaaaaaagcctgaggaagattaagaaaaactgcttattgggtctttccgtgttttagatgaagcagttgaaattcttcctcttgatattaa

SEQ ID NO: 1986 - DNA, 481 bp, Magnaporthe oryzae botourmiavirus 5
  complete genome.1
gggggtacacaggttttggcctggttcccggggattgtgctccacctgcgctttctccgagatttagtgctccttcggctggagagtggcaccgtaacgcgcagtggcgacgggccgtggttgctgggcatcacccagtgtaaaagggatgtaggggcattgcccgtaatccggtgaggaaggtaccggtcccaaaggggggaggtaaaacgctaatcaggcgtgttctgcgactgtgcctcgcgcgcggcagttcagacccggggactaactgtcccgggcgcaaaccccggcgggttgggtggacatggttgtcacctttcccttagatctttgcagtcgtaaaagaccgggccaagggggccctgaagtctataaaggtgggcgtcaatgcccaagcttcttgtcaacacacaagcgcgaattgaaacccctccctgggtcggagtaaaaggacccgcctttaaaagtgaatgataaa

SEQ ID NO: 1987 - DNA, 481 bp, Wenzhou picorna-like virus 10
  strain WZSLuoI86114 hypothetical2
ggggacaacccagtctttactgatcacggtagacgttaaataaagagatcccggtgttgtccaatgctggaggtgttaagccaaaatcaaaatggactgctaagtaagatatacgcacagcgattaggttctgcattacctattcaatgtggtcaggctgcttagtggacttgtacatacccctttttaggggagggtttggtcacccaacaaaatagcactgttatgttgtcgattgatgtgccgcacataatatttattaaattacattactaatctttatactatttgtgagccagaatcagctcaaaatgattcacacatatcgtgcgatcctcgcacaattcatactgtcgcgtctttcgatgaagatgatgaagtcttgcaacttcgtgctcgggtcagggagctacgacaaaaacttgaccgaaagtaccgccatgttaagcagctcactaaacgaattgagcagctagaaggt

SEQ ID NO: 1988 - DNA, 482 bp, Marr virus
  isolate Antarctic64 RNA-dependent RNA polymerase and1R
tttattaatactttcagaggaaactcttatgacacagaagaatctggtccttatcgagtctaatggctcgacccaactttatgggcaccctgaaaccctcgcgaagaccgtaaaggttaagcgctcattgtctactaaggcaacgagtacgggcgtaaaggtaacgaataaccgtgttgaagtcgttatcaacgcggatgtccctgtcaccgtctgtggcgactcgtgcgccggcggctccgaggttctgtctgtacgtttgtcaacaagtggtacaccgaaaaatagtgcagagcttgatgcaatgcttgatacgttaaaaagtatcattgacaaagctaaggcttcgcgcttaacttccggctacccaatgacccaagacttagtctgggttgatgtagacgaagcgtaacagacaaccgttaataggagagcaaccagtgaaaacatggaagctagaacgccgagcacgtgatgtgcta

SEQ ID NO: 1989 - DNA, 483 bp, Sclerotinia sclerotiorum deltaflexivirus 1
  isolate AX19 polyprotein1
ttttgtatttatggtgtttgttggttgctttgctttgtttttaactcacattcttttgcactttatctctctaatcttgtttctgctccgccacactctcggcttaaattgagtggtctcgctgtaccataccagcgatatttatctatctgaaacgacttcaggtcgcaaacttgtcatcacagctaatgccatccgaggctggtccacctgtaatgggtgcatatggtgtacttggtcgtgtaagctacgataacccaagtgctgatcgtcccgatcgaggaacgggtgcaaaataggtgttcacttcatctccaccccaatctcgaggtaaccagatcttctcccaaactggtgcgttacgcatgattgccgaatcctctgcgtacgtgtctgggtttgacccccaggctctgtacagactgtacgggcgaagggcactacattccctagtgtcttaaagaaacagtcggcccccgagta

SEQ ID NO: 1990 - DNA, 483 bp, Heterosigma akashiwo RNA virus SOG263
  complete genome.1
tgatagaaagttctgcagtattctgcagaactttttaataccctttgtagagggatatctactttaattgctggtgtgcgccagctcgcttttcgatgtgattcataattaactatacacttgagcttaaaaccaattgttatgcgtaggtagcgttctttagcgtctactgtagtgtaattaatttgtttgctctagtggtgtctttgccttcaaagtactacagagtaagttcatttgcatagttgtgttgtgatcatgttgactagcttgtttgcgtgctccattaataacatcagtcccagctggcggggcaataagtaccagcctggttgttgcaagccgtgccgaaagaagcggtatcacgacccgtgtccctccatgtagtcgttaaaaacaagtgaggtaaggagttgtccatcttcgagaaaaattaataaaatggacttttgggtctttggcccccccccgcgttaggcacct

SEQ ID NO: 1991 - DNA, 483 bp, Beihai barnacle viurs 1
  strain BHGZ polyprotein gene, complete cds.1
ttgttgatgctgtagcccagtggtctccgcgggtgtggttaattgcggcataaagactttcttgcagcaggttttgttgttggttgttgagtatggcgcgtgctaggggagttggttgagagttgttctttgcttgtgttccttagtgtgtgccttgtgttgtgtacacggtcaggcgagtagcctttgctgtgtgtacagcttgtttgtgcctttcgcccaacgtggtggcgggaggtatttgtgtttaatcgtcgttgagcagtaggctctcacggcgaaacgtagcatattgtgtgttatatttgtcgtgttcggcgaggaggttttctcggcttgagcacgatatactgtgttgattaaatttaagtgtagttccttgcgctctgttgggtaagctatccctacagagcgcgagatcatattgattgaagcaaaacgtgtatagtgtatattgtaacttgttagttgtaaaaggacaaa

SEQ ID NO: 1992 - DNA, 483 bp, Yado-kari virus 2
  isolate E97-14 replicase gene, complete cds.1
tgggggtagccatccctagtgtaatttcttacggggatgcatccttgccctttcaggaaagtaggatgtatctttcaaaggaaagataagctaaatgtgcatggcacaaggttagatggaaggaaatgtccatcggcataagctcagattgatttactgtcaaatagagaaatgattcgcgtcgcttggggcccagtttacactgggcgcatcggccccatatatcatggggtgcgctacgccgtagcaagcattgagaagtccccttaagcaagggagcctttgccttatcgactgtagataaggacggtgatcaatataccgagtcacgacaaagaaagtgacacgtcaacgcttaaaagtcgcgatggatatcaccactatactagtggtgtgaaccgaaatcgcgcaaatcgacaattcatatttcgataggattaattgtccaatcggcgttccgattcacgtgagaatccgttaatc

SEQ ID NO: 1993 - DNA, 484 bp, Wenling picorna-like virus 8
  strain WLJQ103995 hypothetical protein1
cctagccgggctttacccggtttggtcgtcttttgcttatgtggtatattctccattttcgaatggacgatatatcgcataggttttctattctcttaaaaactaactatatctgttatatatttgtattgtttataaggtggtgggtttagagttttaattgtaagtaggatactctacttccccacttttgttttgtactatgtttaaggtagcacctaatgtgctattcttagtccaccgaagttttagtgaaagcaactgctttagattattttgccctgggtcttacccacttgcatttacgccgtgaggtattgtgcttgatgttggacagggatctaaataagtgacctattttgttcttggtctttgctaacgttgttagtagctattaattaggtggtactgcgcgtaagctagaacttacgacaagtgacctgggtatgtcatttaaactactcattcaaaatttacaatacat

SEQ ID NO: 1994 - DNA, 485 bp, Hubei mosquito virus 1
  strain mosHB236488 hypothetical protein1
tacaaaaatccttaaaagtcagagaacttttaaaacccccggttagcacaaactagccacaaatagtctgagtactaccaaacgcacgtattgtccgagcacaattacgtaaaccaacgctacaatcgcacgtattgtctgagtacaattacgcaaaccaacgctacgaacaataaagcccataattttggatttatttccacaatttacgctatttagacttatcgctgccctccactatagtggttgtatcatctctctcggacaactgaatacttccaaggtatagcgtcgcagtcagagcacagcgcctaaatcttggtataaacgaacgtacgcctacagaagcaacctatgagttacacttatactgctctcagctcgagcattaccgaacgagaaaacatcaacgatatcgacgacacaactgttgacccttcagcctcgttcctagtgcccgtcagcgaacaagtgtataggccaac

SEQ ID NO: 1995 - DNA, 485 bp, Hubei noda-like virus 4
  strain WHBL72570 hypothetical protein 1 and2
gcgctgcgcctgattagtccggaatgacgtaaaactaccaaactaccccttgcttgaggctaacaaagcgcgtgtcccaagggacctaaccgggggtgcgtcctataggacgataaacaggacgcccagattccagggctatccggttttcggcggtgcacccagcatcgccggcgacagtgcgtctagcgctgtcgtctggtccgcaatgacgttaaactaccacgccggcgcaccacgcgccgtcttcctgtccgcaacgacgttaaactatttagggggggttggtacggcgagctgggtcccgtccccgccaccgcccccctgcagccctcggggcgttgcagcagcatgaccgcggtcagctgccacgctcccgggggcgattgagtcagcctccaccgccccgcggggcggggtgttaagctggttcggtgtttctgcggccttactgctcgatctccaacactattcggtccgtgagg

SEQ ID NO: 1996 - DNA, 486 bp, Galbut virus
  strain MELplus21664 segment 2 orf1 gene, complete cds.1
cttattcattctgcatcatggcgtttataaataataatggtaatgctaaccagcgtggaatacccgcacaacagcaacaaagacctcaacagaggcgtccccgtcagagggattacgatcggatgttgtcctacaatcaagacagagctggtccgtcttgggcacaacaatcccaaccggtttttgagtatgagcgtgcaatggaacgcctcaaccggcaacagcaaccccgtccagtacagaagagcacgggcagtagacagcagaagaagcctgccgacagaggcccagagccgaaaccgacaacagtcgagcaggggcagcgagatgatccgatgtacgaaggtccatgtacatcaacaaccgccagtaccacattgtttggccacaatctggactacagcggatacattgccctagtccgtgagttctacatcaataccacggcactaaatccgcgtcttacacgcggagttacccttctgc

SEQ ID NO: 1997 - DNA, 486 bp, Picobirnavirus sp.
  hypothetical protein and capsid protein genes,1
aataatataggaggaagtgcgaatgaaaaagacatgcatttctaaggtgaaacgatttctcatctatctattggcgtacttgttgagcacgctttgtagagaagcaatgtgtattcacattgtgaagaatcgtcagtgttattccgtgactgtaactaacggaaaattaaataaggaggtcaagtgatatgaccaaagtacagagcgctggagagcgcaagagctatgtgatgactatcggagagtatattggtaaggctcaagggtggctcaacacgctgcagatgatgcacgcatacaacatgaatattgatgcgaaatcatcgaatatcaaaaccggtactgaacaaggtcgaccttatgttgtggctacttatagttacactatgattaagggtcctacttctgttaaccgggtggtaacttggatctgggatgatgatcatcctgatggtgagttagcttactcatgcggaggtgattaat

SEQ ID NO: 1998 - DNA, 486 bp, Acinopterus angulatus reovirus
  strain Fresno1 RNA-directed RNA1
agtttttgcttccgaagtcatatcacacttaggcggggttaggtctgaaggaagatatagcgaataaaatatatagtgtaaattaatttaatagaatattagcattcaaatttcaatggagcagacggagtggtggaacagttactaaatgatagtagaggaacggcatggtcacagtagagtttagtgaggaggataccagtaatataaacaaacaagtctgagtaatatagttaaccagccgaaattaagacgacgtgaggagattctactgagacaagagctggagggtggaccacgtttgaagaatcatagaaagatgatttggagattaggtcgaaattgatataagtgaattaaacaatacgcttagagagccaaagatattagtagtaccatgttaccatataataagactagctactaaagagggcgggtttagtgtgatcgattctttcctaaagctatcatgtctaaattttctga

SEQ ID NO: 1999 - DNA, 487 bp, Myrmica scabrinodis virus 1
  isolate Cambridge-Msc, complete genome.1
acgctgctaaatctttagctagtggtgcaggcaccgctgctaatgtagttaaaggcgttgaagcaacagcttcagcaaccccttggggtgcaattgctttagtcaactcaatgttgggtgatgcaactgctgctggaattgatgctggaaatcgttctacaattaacaaagacttccaagcaaactcgatgcaacctggatcagcttcacaatatcaagctggattaataaaggacacacaacaaattcatgcgaataatgagttagctggcgcacgaattggaggtgtttttggaccattaggagcttattttggctcacttttggctaatgcacttcaagataatgcacccagagatctctatgattcactcaagactggctattcattcgatggaaaattcaatccccaagatacaggatcagttaattcaggtacaacagcaaatttatctggagaaactaatatgcaagataatttaataac

SEQ ID NO: 2000 - DNA, 488 bp, Nanhai ghost shark hepacivirus 2
  strain NHYJG60710 polyprotein1
gaaaggaaacgtatgacaagtttgggctggaggtcccttacccgtaccaatccccgcatgctctggattttgaggcttcgagcctgccacagagcctctgcccgtgggtggcgccgccatttatgtcttctaaatctcacggcctttctttctgttaagtgtgtctggctaagaaccatttcgacccccggggcggcaagcttttcgccctgaccctgggccactcgggacacacgttctctgctgcgcgatggccgtcgcatgcgtgcgaaccatcagaattgcaagtgtgtgggaacggtttgactgtaaccagtactcttgggacaaccagcggtaacgctggcccttgggcaggcttcggcagctggtgtgaaccaatcctaggtacctgccttgcatgatcgtaaatagctgtatgtaagatcgcgccgcaggcaggagttggcggactccttaaacaccgtcaaccccaaaaaactatatat

SEQ ID NO: 2001 - DNA, 488 bp, Iflaviridae sp.
  isolate muf159ifl2 genomic sequence.1
agctggattttaacgatgagaagcttttaaattgttcatggtgatacccccctccccagtgtgattgtccatatttgtttgattgatttacgatgacgaaaattgagtaccctgtaatgattaattctttgttttatgaatataatatgacctcttatgctgactagtgtgagtgccgctagttggtggagtatgatgttatacaattgtatattaaatttagctctgagtaaaatggttgaaccccatgttgaaatgacgctatctgatatacgaatgtatgagccagaatgttgacaacacctaataatgcacaattgcaacaacttcggttggagcctcaaactgcgattggtcatgtaatttactagctttcaaactatcgacctagacaagtcttagggagtttgaaagaataggaaaccaattcgtgaatgtttgtgtacccgtgtcggagcggattattaggacggcggacgctttaaaag

SEQ ID NO: 2002 - DNA, 488 bp, Beihai hermit crab virus 1
  strain BHJJX25619 hypothetical protein 12
gcagcgaaatacaaattcctgtcgcaaaagagtgttatgaggagtcacgaggtcaaaactcccgttttgtaagtttagtgaacactttgagttcattagcggtggatgccgcgaaacattttgtacattttatattcactccaccgagtttgtatttgtatagaaaattgtatcctagttctcaggagctgaatgcagatgtacaaggtgggggcgatcaaattgccccacagattgattcaaatccggccctcacgtttgtcgatcagaacgcaggtgcagaagatggggtcgacacttatgttgaccctctgcgttccaatgctgaggagactgcccccttctcggaatggaggaagagacctgttctcttggcaacggtcccttggcagactgggacagatttggacaccgttttcaacccatgggtggaatatttttccaaccagtacatcaaagaacgctttggaaggtttcatatagcctcc

SEQ ID NO: 2003 - DNA, 488 bp, Beihai picorna-like virus 90
  strain BHWZXX14572 hypothetical2
ctgccccgtccaggcataaaacggacaccacctccctgtgtgatcttactcagtggccaataacttggtcctggaacatcactgagcatgctacagggggtagacacctaagggatggtgcggagcagccctccggaatcccatcaggacctagcagtgacgaccttgagttgagtcgtgaacaattccaatgtgaattgtgctgcgaaatacccagacttagcattcaagaaccagaattatatacaggacagactaatacgacaaccgcttcgctacctgaaatagcgacagcggcgacacaacagttgtctaccaccttggtagagaacgcaccaccacacaatgaacaacgccagattgaaccccgcgcatatacaagtacgaatgcctttaaggtagatcggccagaattactggaaacattgtccagggaggtgacagttgtcaccggcacctgggatagtagccacgtacaaatagccgac

SEQ ID NO: 2004 - DNA, 489 bp, Picornavirales sp.
  isolate zftwig05rna2nc genomic sequence.1
aaataaaatgtttaaatacaaattgtttttcgattcgattcgatttgttttgggttttggtttttgggtcaagaccgtaaaacggttcaagagaattcgtaaaacagatcgccgctagtcaaagctagttcgtacactagatcactgtcaataaattcacttttagtcgtcaatggtcaggatacttccgctttaagggcgcgtttgtatgattgcctttatatttcttttgataacacgacgtgctcatcccaccttgttagtatcccactaacctggacaaatctcgtgttttgaaaaatatattaatttatttgcgtaaattactatatttagtacttcttatacttaaattccttggagttaaattgcttattataacaatagcattttgctttttacttggatttattagtaaaagaacttacttaaccctaaccctagtttttggtgtgtacaatttatttgaaacataccaagaattcaaaa

SEQ ID NO: 2005 - DNA, 489 bp, Hubei picorna-like virus 24
  strain WGML142000 hypothetical protein1
cgtatggagaacatacgcaattattgccgtctaacgggggtgacgtaacaagaccccggatgagtccaccacgtgtggcattttcagccgaatagattcattttatgacgacagattaatggaaatgttttagtgtttaagtaaaagggtttggaaccttagagtaacctcgatagtatatttatatactcccagaacctagccatggggatgggccgttgaggcaatgttctaagaccagagattttaaagcttgacaagcgctttacctgagattcctcttttgagtttgaatatattaaagatagtctaaaaacatttatcagttaattatgttagagtagctgaagacatgtatttcgtgctctaacctctgaaatgttaaatgtttgtccaatggttcggtgatcattggaatattagcgaagttaaccttcatctttaataatcctgtgtcggagcagtggtaaagtaatcggactattaagc

SEQ ID NO: 2006 - DNA, 489 bp, Hubei tombus-like virus 1
  strain WHWN54407 hypothetical protein 1,2
gtagttgggggtggctctgatggtgtgtcaggtaccacccccgccccatccggaggtggctccgacggtgctgtgggtagcaatcccacccctacgccgaccaggacgcgttaccacgcggcctcggctacaggtgtacccgcaccctacgacttcttaggattaggcgcggtttaccaggtcacttccgatttggtataccagaggtttgacgatgtatggaagctcgccaattacactgacaagaccgtttacttccagctcaaggttgtgtaccacaatcttgcgttcgatacgtccgttaggtatggaaaccaggattcctattcttaccataccgacgtggcgtttgacaacaatggcggtaggctcgtcactgttacaggaaagctgcaacctgctgaggcctggcgttcgagcatctacattaagtggaagttcggagtcacccccccagacatttactggaccctgaagacagacatatac

SEQ ID NO: 2007 - DNA, 490 bp, Beihai picorna-like virus 123
  strain BHCL81476 hypothetical protein1
tattttaaacactaatttaagtaccttgttttattttataaaacttgcgacttaaaaatgtgtcttctttccttatcgtttttctttatgtttgtattgttagtataaaagtgagtaagtgattcatttcatgcttttcttttattcttttaaacgatattatacattcaataataagtgagtaagtactgccagtgcgctggaatgtggtagccccacttttggaaagctctaaatcttatgttgattgtattatatttgttttcggggttaataatgttccctttctaatattattattagtctgtaacactaacgtacaatgacgtgatattcgtcccagagggaaactggttaaaagcgtgcgcgctacggcgtgggttgatatgcaaccaaagacatatcgttcagccctcagcgaacatagtctgagggaagcttgtcagtgctttaaactgacaaattttattttactgctagagaaatcgac

SEQ ID NO: 2008 - DNA, 490 bp, Mayfield virus 1
  putative non-structral polyprotein gene, complete1
gtacaggcgcattcgagagaagtgttattcgcagttgtatgttccgagtacctgaatcacagattcacagaaaggtcattaactgtcataatagtgcgtaatcgaaatttactgtcaaggggaacgagagtgtaaaggtttacaacggttcgcccgaagtacttggtttttgtgcgctttacagtgagagaagcagtatttacgacgagtaacggagtaacaggagtgagaattcatcgaaaggtgcacttcacgattaaatacagtgtaattgttgtgtcacagcaacgagacgagcagtatttgtgaatttgtgtcgagtaattggatcagggacccattgaaacggcttgttgtgttaaaatacagtgtaattgctgttattacctattacaatataattaattaggataagcgaaatcgtgcattagcacatcgattatagaattaggttaattttgttagcgattgttagcgttatacccgcaaa

SEQ ID NO: 2009 - DNA, 490 bp, Sanxia atyid shrimp virus 3
  strain SXXX37589 hypothetical protein 11
cgtagaggtgttgcctctgcgtttatttttgccaccctggctgggtgcttgtcaggccgctatagacatttcatgtttgatgcatgtgtggacgtggtatctgcctaaggaaaagtcttttcattgacggttttattacttgacttactattttagagttttttgactgtgtggggagtgttattttttcgttggcagtatttcgttaaactggccgttattcttttaggtgttggagacgctcttagttaatatgctgctttctttttagttatcattgatctggattgatctgagattatattgaaagcactatgttgtctgtgaaatttgcgttagccaacactagggggatatcaagtccctagcttcttgtgagtatgtggatatctcgcagaaccagttgaaagcactggatgaaatccgcaattgctatgcaattttcatatccgctcgccgacggcggtatataaatgtcggtcatggaaac

SEQ ID NO: 2010 - DNA, 490 bp, Beihai tombus-like virus 11
  strain BHHK128439 hypothetical protein1
atcagtccattcgtcaagctgatgacttgatccatcaacaatggtggagcactaatgtcaagcaacagcccgagggattatatgtaaatgatggctggtatgttgagaaatgcaccatgcccacgacatattatccgactgatatatatcatcctcactactacctgtataacagattaatagatctgcaggagtttgtgttcggtaaaaccgaaataaaatacatccccgagctttattcacaattgaagttaagatcgttaaacctgccaagagatgatttgcatcataatcaattaaggtccgcggcagttcagattcttaaccagaagaacatcaatcccacaagggttcatgatgctctgatgggttcaattaccagagccatgatacctgatgatgatgagttatcaagtatcagaattcgcaaatccggtcctgttaaggccaggcagagcgaactttcgggggaaggagatccaagcacccg

SEQ ID NO: 2011 - DNA, 491 bp, Alternaria alternata hypovirus 1
  strain YL-3C polyprotein gene,1
gcctgtgggttcccgactcaggccgccctttcgggcgtaatcggggtgtagttactgcgctttcagcagtcaactttgtcaagatgatgtatctttgactgttggcgttctttaaactacggttgtgtctaacgacacgttctcttaattgagagtcacgctatgcgtgagcccaccaagtggggttgctgggtttccagcggttgtcgctcgcgacagtttcatagggttcacgtcgcccttgctaaacgacgaatttggttttgcttcctggttatactgtgccagccttggtggcacttaaacacttgaatgcgcacaccttgaatcgtttcgccgtcttcgccggtgtcaggatttagggccactgttctatcaagagggataagccgcgcctgtctgtgggtagttggggatgaatagacgtccgtggtgcaacgtgcacggctcccatttcaacaactacttggacgaatcagagcgtaaggtaa

SEQ ID NO: 2012 - DNA, 491 bp, Hubei tombus-like virus 34
  strain WHBL73047 hypothetical protein 1,1
gtttcggtacgccgaccgtgctcgctcagtgcgagcacaacgcgctaaacgcgctgtacaaacgccatctttctgccccacctaacctttgcacccgccccttccactcgtgtttcctcgactacattcaaactaaacttgttcctcagtttcattttgtccggcaatcctgtgaaggcgcatggaagaagaagaagacccaatctaagcttgactcgatcgaccggtccgttgtttatgaccggttcgaattccaaagagcgaagtcctttgtcaagcgcgagattagtgtcaaggttccgaagaaagcccgtttgatacagggcaatttcaatgaaacgacggcctaccacgatcctgatactttcaaggccatctcccatctttttgaagacgtgcgcttcgaagctgaaggcgtttcgttcgtattacggtacacatctgggtgtactaacgccgacatcagccgactgttctccgacgaggttgcg

SEQ ID NO: 2013 - DNA, 492 bp, Marburg marburgvirus
  isolate Marburg5
ttattgttcgaagattgacaatttgatcactttcagttttcaatttcaacccttatcgcgagatttggacacgatcttactaacttcaataactgaccccaaattcaagtttactaaaggctaagatgaaaataatcactagtttgttgtaaattactcgatcaaaatgttcttaagctatcttcaacttaatgatgcaactctgtttcatctttcttttgatttcaatgtcacagctatatccaagtgtctaattaacaacttgtacctctaaggaaaaccatgaagaacattaagaaaaaggatgttctgattcttcaactgaacttgtatatcctttattgatacccttgagagacaactgttgacgctagatcacggatcaagcatatttcaatcaaacatcctaaattttcaatcgtacacataataaccattttggtagcattgctttgcagtataggataggtggtcgtgaaaagacttccaagc

SEQ ID NO: 2014 - DNA, 494 bp, Human parainfluenza virus 4b
  strain HPIV4b/Seattle/USA/SC0496/2019,3
tcatacaaatcaatcactgatatagagttaaggaacattttatatccttccccattggatcaccattaccatcctgatatataaaaccacactacactatgcaccgtccaatatctagccgaccataagatcacaaccacattacaccaattcaatcaaggacatccctgcaaacatcaaacaatcaaaccacgactgcaacagacacagcaccacctgatcaagccagaccctcaccatgcacccaagtcacccgacacaaccgcaaactctcgactccactattcaaaacacatcctcgaacagaccacccaaaaacaccgaacaatcaatctcctggccacaacgatcattgtaaattttaagaaaaaatctaacacacaactagagccaaatacagggggggaaaaacgcatccgccgccacacgcacagatccagaactcaaggcaaccaagacccgccagattccgctccatcttcaaagaaatcaac

SEQ ID NO: 2015 - DNA, 494 bp, Human rubulavirus 4
  strain t146a296_HPIV4, complete genome.2
tcatataaatcaactattgataccaggctgagcagcatcccacatccttccccactgtactgctagcatcattcagatccatagaaccacaccacaccatgcaacaactgacattcagccaatcactaaaacacaaccacaacacaccaattcaaccaaggacatcctcataaacacaaaatgatcaaaacatgattgcagtagatacaacatcaccccatcaaatcaaaaccccatcgtatactcaattcacccgacgcaactacaaatctccgaatccgcccccagaaccacatcctcgaacagaccgcctcaaaccaccaaacaatcaatttcgcaattgcaacaatcattgtagattttaagaaaaaaacaagaacacaataaataccaaacgcagggggggaaaaacacatccaccgtcaagcacataactctaaactctgaggtgaccaatacccgtcgaaatccgctccaccaccagagaatccaac

SEQ ID NO: 2016 - DNA, 495 bp, Cryphonectria hypovirus 1
  complete genome
gcctatgggtggtctacataggtgagcatgcgttgctcgatatagaccgccattattggtaacacgcttgaagtgttctcatccggagaaagtgatttgctttcttccatgaggctccctggagggattgtccaataatggttgataattttggttgctgcacaaccggggctttgcccggggatttcatcccgttcaaggtgaggcccttgtagtaacctctccccgctgcgtgagcgaatacataagttcacccagtactgacagtgtcagcgccgcacgtgcgtgaaacgtgtgactcgcagactgaagcgacctatggtgaaaacggatgtaccatctagctgtggagtagtgaccctagaagctaatccgatggttccaccagtcgttgtttgccggcaaacgccacaaacggtttcgtgctttgcgtgaagaagcacggtctcttaagagttcattggtacggttgaccccgaacgaggtccgaacata

SEQ ID NO: 2017 - DNA, 495 bp, Gervais tombus-like virus
  strain GUNCC_DN54311-2 hypothetical1
ggcctattgctagcgtagagttctcctagataacgttttaaatttcttatggcaaaaggaggagttttaaagcagcttaaaccgttggtccaatccctggccgggagttccaggacaatgaaacgaaaccgcagacgtggtggccgtcgcggtggggtgctgaccaccaagggttcgcgtccgcgaacagttaataatccctcgtggggaaggtcgttgccggccgcttacgcttcccacgtgaggccaaggttcaatatttcaagccgtacggcaactacggctgttgtttcagggtgtgatctaatatatcccattccagcaacgctcaatcctgatagtgagaccatattttcaatatttccagctaatcccgcttactggtccggtactcgtatcgcccagttcgcgcccgcttaccaaaattataggccgctggccttcactgttagttacattcctcaagtagcagtgactcaagcggggacagttttc

SEQ ID NO: 2018 - DNA, 495 bp, Picornavirales Q_sR_OV_042
  putative non-structural protein1
cgggcaaatccctgcgcaatcaattgaccccatgctggctgtaaaccttagtgtatccgtggctgtccccacggagaataagtatgtgaaaccatggccgtagattgattgttcaaaccttttgaaccgcgtaatatttaacctttcgagaactctattaaaatctatacatcagatgcaagcgttgattgatgtatactttttgtagaactatcgcattgtaagctctttccctctcttcctttcaagctggtagcccagtaggacgcgatctccttttaagaaacacacgacggattcgaccccgctcgttggcgcacccctttaggctagtagtattggaacttcattctctttgaaggtaggcaccacgactagaactcgtggcagatagtagactcttttcaattaatttctgattaggcatgagcaaagtagctttgaataactcctcatgactggattgtacgcagatttcatccactgcactcagaa

SEQ ID NO: 2019 - DNA, 495 bp, Ribbon seal picornavirus
  isolate RsPV/WVL17251-06/USA/2005,1
cgggagagttggcctcacgctgtttagcgtgagagccggctctcctgccccttcccctgagccggggatcttggctcattcccttcttttctatcctccctcattggactttacggatgacccggcataaacttgacaaccgatgttggatttcccttgtggctgtgatggaggacataccctcgggtgtagttgtgtgcgtgtcgctctgcgacttgagcttcaaagtggtgctgaaatattgcaagcgtcgttgctcaattaacggagtgatacaatcctatgaacccaagtgcattcatgcgaaagccccggaggggtgagtagcatggactcgaatcagaagagctagagctcgcttggtacggcacgtagcattgctttgcctaaagaccaagggggtatggctataggtgggggcctatagcttgtctagtgctggttgacagactcgtgctacgcgtctggttcgagtataagtagctgcaactcact

SEQ ID NO: 2020 - DNA, 496 bp, Xincheng Mosquito Virus
  strain XC1-6 ORF1 (ORF1), ORF2 (ORF2),2
ggtaagcgacatccgagtttataaaaaccctctggttatattacaaaacaaattcattggcatctaattagtaaccgaaactatgagcaacactgtgaatagaattgtatgttggaggtgcagaacactcatcagtgtaaaagcagctgaagatgaaccattccagccttacattcgttgtaatttctgcaacagcaagaactggattgttccttctgggaattaagagtttataagtagtgttgttttcttttcttttgctagctaaatcagtatgtatttctttacatatgtatatattttctattataccttattaaatgtttctgattgagagtatcaatatttaaattctacatcgatagtgagaaacttaatttagaaaaaacctcgtggtcaaagttacacgcaacctagaaaatataactaagaaagaaagagagaggaaaccaggtacgacacctactcaattggcagaacatcattccacttcgag

SEQ ID NO: 2021 - DNA, 496 bp, Picornavirales sp.
  isolate H2_Bulk_34_6 hypothetical protein1R
agagacaatcggatgagttcttctcctttaagtaagaataggtagggtcttaacccctaggttgcggacaccttaagttccgctgctaggtttcagtgtgatcttgttagtgtatataaaatctatagttctaaaacacttaagcagtgctgctgaaacaacgaggtgggctatttagccttacttccaggaagcctggggagcagccctcccaaattccaggaaactatagtacggatttcgttagcttgagtaggctcgatttcttaaaaatttacttgctacaattaataacaattcgggtggctccgattcaaaagctaacttagctccaaacactgttgtggatggagcaggagaaaggacgatagacggtactaccgctttcgtcaacgattcggaagtagtgcaagcgtctattatagcgcctctctccgtttcaagattgctaactcaatcgagtgcagtcgaaaatatagaggatataaaaagatgg

SEQ ID NO: 2022 - DNA, 496 bp, Shahe picorna-like virus 8
  strain SHWC12398 hypothetical protein 11
atcgtatatgcgtttatacgcatatatgattagtagacgatgtctctatcgataaagaacttcaagtttagtatcccacgtgagatccttggagcgacaccccttttacaaataataccttttaaacgtattttcaggaccttgcatgacaatgattatcccccgcactgaatacaaccatacgtggattgtataagatgggaaccttgacaaacatttggtacgcgccgaaaggccatcggagacataatctccgcacctgtatgtagaccactacctggctctcaacagcttgagactttgtcttaaatcttcggattggaaacggctctatttgggtgtgctgataacccctcatcggagacgctgaggagggagattatgcctttagtgtacgccaccttgtcttgcgtaatgccttggttggtattgattctgggggccagcccagacggagctaagttgcactagagttatactggctgttcatatcgcc

SEQ ID NO: 2023 - DNA, 498 bp, Hubei picorna-like virus 49
  strain WGML112833 hypothetical protein1
tgtagtttgacaagctacatattatcttctttttcgtcttagtgtgtgctgcactgccatttgtgacagtgtagttatcacgtggacgttttcttctatgaattgtcttctttttctttcttcttttctcttctttttctttcttttctacattttcttttgaaaatgttctctttttctttctttcttttctctttcttttcttcttttcttcatgacctttgtgtctgaagtttcttcgtaatgtttagtacctttttaaaggaagtactttactcatgttgatctccctatgacgttcaaactcgcgagagttgtcttgggctgtacgcattttccttcgggagggttttgtatgtactttttaagtgggaataaccgcttatgtggttacttctttctatgaagtagagctttcgttgtttttctctttaaataacgcagtttttgaaagtttttctgtgataaaattttcatttctttttccttttcttcatt

SEQ ID NO: 2024 - DNA, 499 bp, Periconia macrospinosa ambiguivirus 1
  strain PmAv1DSE2036, complete1
cttgcaggggttgataccctatggatggacttgatggttcctggtcggtgctgccgtcccaagtccctcgggaactacgccgtaaaagtgttagtcgggccccttgccttgttataacttggggacatagcttggtgctgattgctatgccttaaattgcaccgctttctctagcacaacctgcctggcagtcaactggcaggttgtgctctcctaggcgtttgccacgctggaggttaatgcgtgacctgtgctcaaccggtgccccgccggtcttccgcttaggctaagagcaggtctcgccgcggctgctaaccgcgggttgtgttacaaccagggggggtaaactccagccctaagtgggtccggttctccggtgaatcgctggtggtggtgtcttagcacctcattgccatccgcagcccagtttgtgggtcttcccttggtgaatgggaaaccctcctccccaaattttggttttgtttactggtgatcaacg

SEQ ID NO: 2025 - DNA, 500 bp, Narnavirus sp.
  isolate H4_Bulk_Litter_23_scaffold_4 hypothetical1R
aaaatcatgaacttaaaatgcagctcaacgataccaacattcagcttcgaaagcttcaaactcaattcattgaattccaaacctcacttaaagaacagcacaaagcaatgatggcaagtatcaagcaacactctgatgcgatgaaacgtctcaaagattatgaagatctccatgaagttgatatcgaatcacttccttccgcaacttcatctcaactccgtacccgccaacgagttgaccaattcatcaataccctcccatcaggaacccagtctcctcatcctgctcccattcgtaaatccaaaattgttgatgaaccactctcattcaagtaatcgacaattcttgataagctgccccttactgtttcattgaattggtttctctatttataaaaactaggagaataatatctttatactacataacgatcaaattcttaagaactatttatcaaccacaaaaaccaactaccaacaaacaaacaaacaaccatcatc

SEQ ID NO: 2026 - DNA, 500 bp, Peach associated luteovirus
  isolate PaLV RP19, complete genome.3
aacactgagacactgtccggatataagctcgggagactcgtcacctccgtcgtatcacttgttgttagtaactacaaatagcacctaaaaatcaaaaaaacagagtgtttgtttgcttttctgctcactttcttttagaaaatccagatcccactaccacaagtgggtgaaaaatatgggtagggtcggacttagccagtcctgtcggtgaagacactggaggaataccaggtggcgtcttctagggataccgattccggattcggagcctgcttctgggtggacactgcctcggacacaaccgagtgaacaaatggagtcactaaccacgatgaaatgagtgggagggtgaatcgacctcaattacgtcgttaaactggttggagttcctaactactcggaagttggggagaaagtcatctcaaaatgatcgttcaaagtcatcgagaaactttggcggctagggcttgcaattatggacttggcttttgcctagaaac

SEQ ID NO: 2027 - DNA, 501 bp, Soybean yellow common mosaic virus
  strain spider132820 hypothetical1
ctggatctttgtacctttgtgccacctaagctggtattggtttatctcacaacgcatgtccgacacagtgattgtaaacttttcgctgatccgaactcggtgcgtggaacgctttggcgtgaattccctcccagttggaagacatttcattggttcagaggagattcctacaggcatcggtttcgttgagcggtcttttcaggtcacagcctttgggaactattcagttcctgagagaagccgagtcaggttgatagactgcccagtatcgtgcgaggggacttttaagttcgatccggtacctttgtggctatctgttatctgtcgagtttgccaatctgaggctaaccttatcatcaaccaggagttggtgcctgggtatagtgaaaacagcaagttcgtgttttgcgaccccgaagggagacctttacggattagaacacgaagaggcgtccagcccagcagattttaccaccaggaagaaaagaccatttgtcagtc

SEQ ID NO: 2028 - DNA, 502 bp, Bremia lactucae associated dsRNA virus 1
  isolate DML-A_DN43224 ORF21
aacgaggtaagactaagagatcgtccgtagggagggtcctaagtcccctctttttgtctggaaaaattcccgatccagttctaacagagggaaataacgaagatttagttctttgtttaagtggtttttcaattccatttttaaaaattgaaatgtaaggcttggacttaaagtaggtatattgatttttgataggcggtcaatataatgaaataagttgattaaagtcgcaccccgaaaaatctagggggcgcccttttactactgtactaccgactacgggacgtgccgtccgaaatcttaagacttagcgccttaatcatttattgattggggaatcgcggcgctaaccagaaatggaggtgaaccacttaaggtgaggcgacagactgcaacggtagggcttacgacattgtgtagcttgaaagagtgaatttggatcgagccgggtattaggggacagtcggagggatttttaaagcgaaagcttccttggcgcgtt

SEQ ID NO: 2029 - DNA, 502 bp, Neurospora crassa fusarivirus 1
  NcFV1-JW222 RNA, complete genome.1
actggcacgtctacttgggtagcaagggagtttgtattcaatcccacccgatgagggttccttgcgtgcgatagcatgggaagtgggcaacactgatggagggaataagtgttgtctgtaaacaagactgcgacgggcataaagtaacctaaggtcggctggctatggtgattatgctaacaggaagggcaatgcctgggctgtggacatgcaatcagaaatggttgttatgtgcccgagaggacggatgcggcagtcggtcacccaaatgatgacgttaaactgggcttatggtgcaaaccgtgtcacagaggtatgagcacaggattggggacctggttagcaaaatgtgacaccgtatccccctgtggcgccgatcaagtcttaggacacaacaaaagaaacctaaaacttgctggcaccacgaatagtgttgtctagggcacaacacactacaagcgaaacacaacatagtactcaagagtgcacacacaaaacaagg

SEQ ID NO: 2030 - DNA, 502 bp, Oyster mushroom spherical virus
  complete genome.3
tcgggaagcccgttattacctttttacctgaattttgcggctggttgcttacttcccatggtatcattaggcacccctaccttttgtatgcgaagtatcttttccataaagaaaatggcaccttggccaatgttctaatttcatattacatggaattccaacattcgctaactcttggtgacgctctttgggaatcacttccgtatgatcttttgccctaccaaggccagcttcaacttctttttaatcaagctcgttctcgcgtgccttcctttctgattcgtgagaataaacttggcgatgctcctgctgccaagctttccgctcgttatgatctctttcgtcttccagctgattttatgcgcatggactggcgccttcttccttctagtattagacgatcacttctcttggctaggggtctgtaatgcctggcagcgttgtcatttcttctaatggaccccaattcttcatccaagatcatcgctcaacttctcgctga

SEQ ID NO: 2031 - DNA, 503 bp, Jogalong virus
  isolate P1-10 polyprotein gene, complete cds.1
ttgttcgcgtaaatcccgactaggcagaaaagtgaaggagtctgcagcgtgtaacgaccaagcccggacgaccccgttgaaacaggtgtatggtcatcgcgagacccggcggttacatgggtcgaatgtcaaggtgagttgacattctaaaaataaactcagttccaaaattggtagaggtttaggcagaataggttacacaacactgtgctggaacgtcgcctctaatgcccgagttcttagggacagtagacgtaagtcggcgagttgacaaaccagtggcactctttgctgtgttgtaaccctatttctggctccctcgttccgatggcggaagcctttttttaggcagccatgcagcacaccaggcggcgtccctcacacaggcggcaagagcaaaaatccttcgggtgagctcggtgtgcacttttatttaacagcgactatgagcagtttccttttgcagcacattgtgctgtgttgttcttggtggacttccaatc

SEQ ID NO: 2032 - DNA, 504 bp, Plasmopara viticola lesion associated ourmia-like virus 20
  isolate1
gagattagacgtttggcgaggttgtctcgactcagctttgttgagtgtaggagacttctcgcccttactgaaataagaaagtggaaagaaacaaaaaaagagaaacattggcaacgttggacttccctcacgtttgtgaggggtacttgtcccccgcttgcgggcatcgttacaccgatggaaactagtaagtagagcagtggagtaggcccagaaatagtcttggcccgtgtggtccgacttagggtcgctaccttttagcggcgaaaatgctaggaaatattttttcttgcccaagtgcgtagaatcgcgtgcttggggaggtggtcgtacttttgtattgccgggttaaccctccgggggacaaactaccaaggaaagagcctgaggtaaagaaggacgtaggcgtgtgtaggcacccgaacctttgtttcgatgagacaaaaaaaaagtgtcgtcctctacaggacaacttaaattgtgaatcgctcgattcgctttttt

SEQ ID NO: 2033 - DNA, 505 bp, Rhizoctonia fumigata mycovirus
  isolate C-314 hypothetical protein1
ctcgtccaaatcgcaaccgacgctgcttccgctgccgcccgcctcgctgatgagaacctcgctgctgtcgctgcacgcgacgaggctatagccaagacgcgcgagtacaaagcggaatcggctcgtaaatacccgggagcaccttcaacgtgagaaagatcttgagactaagcatgtggctgacaaggccattcttcaggctgagatcactgctctcaccgctgagcgtgatcacttcgagctggagaatgcaggtaatgaagcacttgccgctggcctcaaagcccgcatccttgacgccgtacgtgacctcgaatctgcacgagctgaagtatccaagcttaaggcagattcggctccattgctcgcccgccttgaccgtgcacacatcttgctcggcaagtactccactggctatggattcgctcgcccgtttgaagaggtcgtccacgctgaacttgaccgctccgacgacgagttgagtgctgagcgcaatgaagggtat

SEQ ID NO: 2034 - DNA, 505 bp, Rice Picorna-like virus 2
  isolate FYBPH-9, complete genome.1
gttagccacccacgttgttttttccaccagtcacttgactgtgtgttcagttagtatgtgattacactgtatggtatttctagttgcgactagaagcagtccattttcacatgctagccggaatgcattttcgagcctggtgttttactcttcttttggctaaagaaagaaaaccagttaggtgtgtttcagcaaccactatcatagtctgacttacatcgctactattttcagtggccttcgtaattttacgggccgcgctattctttgagtaggaacgtacgcctccgttagaaggctgagctcaaggggaacagggcatagccccggcatttttgtgccgctggattgtgaccccttgtgtgtaggttgacttaggatggtcgaattcctgacacgtatatcaaaacgtggccacctatcagatagtgatacgttaggtgtgggctgtgagcgcctgtttatcactttgccggcgggctaacgctcttcttgtcgcctgggc

SEQ ID NO: 2035 - DNA, 506 bp, Epicoccum nigrum mitovirus 1
  isolate CREA-VE-34SY2, complete1
ctcacgaaacctgcacccgggaaaaatccctttcgcagacgtgaatgatgataggatagttgttctagggaacggtagagtaagtttaatttcgaacctactccacttagtacggcttacccagctagtagcgctcagaaaactgtgaaaacaggactatggccactttagtttggaagttaatggcgataaagtatctactcccccgaaagggaagaagagacttttagccctccatactcactttatgtggaaattagcagcgaaaagtcagctatgggttaacccagatgctgctctctaagctaaatccaactctcagatgtagaccgtcttaacgatatcctttacaggacccattaatctggctttgatcaggttaaagtgatggtttccagaagatacagagttcgatacggggacagtgagacactgaccgagtaccaaatgctctagcacctctgaagtttaccaggagttcaaagcctggctacctaatacttaaa

SEQ ID NO: 2036 - DNA, 506 bp, Avian metaavulavirus 21
  isolate APMV/dove/Taiwan/AHRI33/2009,2
taatcacctatgccagttggttctagcttaagccaattattcactaatcactgctaatcatccatcatatgaagtgatcaactaagagagcgcccattaatcacatgtaatataaggagaaaatcctcaacggacaaacgaatcgtttaagggcttgaaccacaatcagatatcaagctacagtatgtcaaatcctatatatacattgtccatattgctacgtgagtccacactctattagctgccagaattcttactcctataataataccaagtcattataaatctgcctgtcaagatgatcgctcagataccacttaggttaactgtcaagttatcaaagtctataacaagcctgtctggatctgatacaaaaagagcacagattgtgatcttaatcccatcccttgacaacataaatctgattaactatgcatattcaagagaaattaagaaaaaacgggggggaatttatacgaattgcggtcacaaaagtataaccgagc

SEQ ID NO: 2037 - DNA, 507 bp, Agaricus bisporus virus 15
  isolate AbV15-003, partial sequence.1
ggttaccctgcggaagggtggtaaaagactacgggtcggcagactaagcatctgtaccgtacgacgccttcgtaccgtgttcgaaaagagggtggaactggatcttaatctctgagagaatccatgtcctcttagtagtaggtgcggaatatgccaagctctcctgacgtggagcagcaggagtggttaccctgttagggataagggatctgtgcgacccccccggcataatcgtttagagctagccaccgtgctacggaatgacgcaaagccattcatctctctatccgaagaaaaccacaaggttctcatttttatgaggcaacgacgtacctgagttcagtcctaggacaatctaatccacgtttggtgcagataagactgactcgaaactaagttgaacccactcgccgagctcttcaatgggcggcctaaattgatccagcctaggatcattttagtagtttaggcactacctccatcaacggtcgttttgccaagacctta

SEQ ID NO: 2038 - DNA, 507 bp, Hubei odonate virus 11
  strain QTM161788 RNA-dependent RNA1
catccataacatgttatatattctttaattatcatatatactcattagcattattacttgattgtatataaccatgtttttgtaactacataactctaaacctaaccaccattgtagctggtattgattcttgtattaaaagttcattaatttgatgtgtgtcttttattgttcacgctgttatgcaagactctgacaacgaggtaatggtctaaatgtgtacaaacttgatatatactgttcctcgtgtatctaaataattaaactaattcattatttccatttatgttgtattctctttagagtgtcaagtcattcaagtcaagcggtagcgggaagagatcaaagtcctctaaaactgtaaaatcagggaaaaagcagaagcaagagggaactccccaaagggttaccagatcaaacaaatttgcggaaagtgcaagtgttctaagtacacttgaaacgttatctatcgcagaacctcctgtatctgccgcgcaacctcaaata

SEQ ID NO: 2039 - DNA, 507 bp, Trichosanthes kirilowii picorna-like virus
  strain pt111-pic-51
ttttctctcatggaatagatgtgtagctctgagtagtggcatcgaaacccttgccgtaagttacatgataatttgaggctgtggctgataatagtgcagacctcttttaagtgtggactcgcaagacgatttcatgggcttatgcttaagagtagctcctgtagtagtgctctgactagccattgatgaaaccgatcaattattggggttgtgtactttacccacttaaggtacctgtggtaaggattagatggtggatcactaccggtcacgcctggcgagtaccaggtgctcattggagcataagaaagttgataggctctgtgaagcttgaaatcaaacccactgtgtagtgtagacaatatgtgttgattttgattatgatcagacatttaatctgtgaccgttgatacttcctacccactctaacggccttatgaactatatatagggttcgcaatcattcataaggttttatatattggattggctaccctacgatgcaac

SEQ ID NO: 2040 - DNA, 508 bp, Mytgal virus 2
  replicative protein gene, partial cds; and1
aggagcatcgagcttgagcgagctcgttaaatatacgctcacgggtggttccgtgcacggattctctgaattgtgcttcagacccttttgaagttccgatctttgtatttagtggctgtttgtatattatgcgttcttcaattgttatagccatatgttgtgctagtgctagatgttaggtcaaatttagcactttatcttatgaccagcaagtttaacagatttagaaacgactgctgacgttcaaattcagcagacttttgcttttgatgatagtgagaagcaatttattactaccgttagagacggtgaggacccaactcatgattggggttcgtactctgatgttgatttggccagatggcttgagaggcctattttagcatcgactcatatttgggaggtcggacaaccctttcctcagatttatttcaatccttggtcagcgtttcttgacagccctagtgtggctcaaaaactatcaaatttttatttgctccgttgcaag

SEQ ID NO: 2041 - DNA, 508 bp, Drosophila immigrans Nora virus
  complete genome.1
ctaggcacctgggcgggggttaatgagcactggaaataagaaacgcgagacaacgctttgctgattacgtataagtggagtatcggggagtaaaatcctgctgattacggttatatggagtatcggaagtggcaattgctataaactgggtccggagtaaacaggctgtttattaattttacgttcaaacctattgcaacaattccttacaacaacaaaaagttaaataggaaacttgaaaaattcctatcttaataaagtatattttgttttgttatcactacccgttttaattaataggctctgtaacattcataatagaaatatttcgtaatgataattctcatcaaaagatatcgatgtaaaatgtatctgtagctattcaattatattaattgagcttagcaatcgttaaattattataatttaaataataatttaatctcaatctagcagattgaaaaacacaaaagcataagtgtataaatatgcaaacgatggaagaaga

SEQ ID NO: 2042 - DNA, 508 bp, Hubei picorna-like virus 21
  strain WHBL73090 hypothetical protein 12
agctatatacgcacaagttcttttaaatgatttaaacgctcaatttggactagtggacaggatgctctatgcaacaagttgttactactcaggactttaaaaccagagaagagtgtttacacatgtagcttttgaacgggcgcatgtgaataaaagttcagcttctaatcaatctaacaatgtcataccagagagggatgctctggaagtatgtgacaatattacatcccttgctattgacggcgtagagaccacaggcgttactacgttcgctcaagaggcttgtgagcaagttgacgttttgggaaagttctatgttcctactagcgtagccactttgcagccggagttgcaggaccttaaagaatattttcgtcgtcctcgcgttattgcccagggtccttttacgcttaacacgcgtaataatccagttcagttgaatttttcagattctaatttcgagacgttctttccaggtgcacgtacgcgacttttaggggtttatggc

SEQ ID NO: 2043 - DNA, 508 bp, Wenzhou picorna-like virus 26
  strain WZSLuoII93478 hypothetical1
tgtgtatgctacaacatacacactcagtttaacggatctatccgttaaatagtttgcccacttctagtggtcgcttttcaccaggacttgatcctgtcgctttttaaacaacaaaccaatactgttttataatgacgatttgatattgtgttttagttagacctgcgtggttcattagtactgccttgcgaggaactggaaaatgaattactagtcggaccttttattaaccgctgcatgcaagttatagatcctaacacacaatatgcgagaaggaccaatctttggattatgacactgattagactgctggaacgcgtttcaggctctccgaaagatatagtacggagctagtgaaacaagtctttgtggagcgaaattatctctcactgggattggcactctcagaagcgtgagttcctttcacataagacgtatatctgggaagaaaagagcatcgataattggctctgagtttattaccagacgaaacactttttctgctatc

SEQ ID NO: 2044 - DNA, 508 bp, Beihai picorna-like virus 70
  strain BHBei76899 hypothetical protein1
tccgatctgcaacaacatacacactcagtttgacggacctatccgataaatagcttacccacttattagtggtcgctcttttaccaggacttgatcctgtcgcaagtacaaaatattattacctacgtcttacgatgatgatttggtattgtgttttagttagacctatatgatttgttagtactgccttgcgaggagctggaacgcttatcattagtcggaccttttattaaccgctgcaagcaagttatagatcctattgcacaatatgcgagaatgaccaatgactttggaatatgacgctgataagattgctatggccccgttctaggcccccgaaaagttacagtacggggctaatggaacaagtctttgtggagtgaaattacctctctctgaaattagcgacttcagctgcgtgagttctcttcacattgtacgtatatctaggaataagggctttataggccctgacgtagtactagacgaaaaactttacattgctacc

SEQ ID NO: 2045 - DNA, 509 bp, Aspergillus foetidus slow virus 2
  RdRp, gene for RNA dependent RNA1
gggatttttgaccgcccagatgagttttcatcgaaagtttgtcacacatgtttgatgggacacaatccatccccttatagttgactatgtactacagtcgtaattctataagagtcttgcctgctagtgggttcacactagttccgttgtagagtttctgggatcttcggattaaaaccccatacccctcgtaagtcaaaatagtttagtctcagccaagaaagaagctagatatactattagaccactgcgtgcggcactgaaactttgcagacaagatagtctgttttaaatcgacttattagagtcagagacgcctccgttttggcctctatgggtgatgtgccctgacacctccgtctagtcaacgagagtacaatcgcatcaattttcttacacataacttgcctgtttctgggctgccctctctcacgggccgaatatcatgtattcgaagtcttgtgtttgccgggtcaccaaaaccggctaggatttaactccgaaaagtt

SEQ ID NO: 2046 - DNA, 510 bp, Barns Ness breadcrumb sponge narna-like virus 6
  isolate L14,1
ttgaggaagagtggaagggtgaaccgaaagtttttacaaggttcaccccgtccttcttcttcctgcccgtggtcgtcagtcttggcagctggagtcacaacaaatgttgactccagtctggactggccacgctgcaccaatggtcgggacaggaagcacaattgtgctaccgtcttcgatgagctgtgcggcagcctcacccgtgatggcacgggagagggcaaattcaaccttcagaagctgagggctgctggcatccgtcttcaagacgttccagcctcccttagcaaggttgcatttgctctgactgcgcagaagaaatgtgtatgtcagcatgagtacgactcactcacagactcgctttactttttgcgggctctatgtgagaatcttcttgatgctgattcaatatttcttcgtgctaagacatccgatttcgacattttcttatccacactcttgaagttgaacaacgtggaaagagtcgcagccattaagtattggactgcg

SEQ ID NO: 2047 - DNA, 510 bp, Teucrium fruticans picorna-like virus
  strain pt181-pic-9 genomic1
tagcgcagacgcaaacatagagtgtgcaagtttattacttgcacactctatgtttgcgtctgcgctattcgaatctttgtaagagacccttattctggtttggaaacgcctgggcgtctgcatagatgtgcagtcccttttatggagcactcttatttattgcagcttaattctatgattaaatgccatcaagtctaactatggcattttacaactacccgtctttattgataggctcttggttatagaattaattaggcctcttttgatgaaagaataaatcatccgctatttataggaagcgaagaattttctatttatagttgtagtgtcattcctatttaggatacggttggacacataaataactaatcttcttcccagcactttggtctataccatctaccccttagtgttgtgtaaaattatggtggtcaaaataacatcaacaataaagaatctgatggttcccagtctacctctccatcacagattcacaatcccgataaa

SEQ ID NO: 2048 - DNA, 511 bp, Plasmopara viticola lesion associated dsRNA virus 1
  isolate1
aatacgttgataatagatactttctatgaaagtctccctcttttgcattagccctttcgtaactgatcggtctaaggcctgttcaaggctcattgagatctaaggataaaaattcttagaaatattaaagattatcgggggaagattgcgaggacaagtgcctaggaaacacttgaaacaatccttgcaataagaaacctacaaagctgtctataggtatgtgctcagactatagactaaagtataacactgctccctgagacggggggtgtgtccatatgggtaactgtatgtgatgctaacgaagccctatgcggattgcttgaagcagaagcgatatgatggatggtgcaaacgtgccgaaagcaaaattatttagttttgttattaggtgtaacgatcgcgtgtatactgaagagaagctctagccggtacgatctccttggacactaatgcctttaaataagttaggtgggggcgagcccctttggtactgaggccgcatgtaatc

SEQ ID NO: 2049 - DNA, 511 bp, Beihai rhabdo-like virus 5
  strain BHJP63888 putative nucleoprotein,2
aggcccagccttgcggcagggggtgctggcaccgcgggtattgctcttgctcattgttgaaaccctgccccaacccgctatcaaactgagtctcgtgaacttacctaggcaagcgagtaattccactatataattgtttagaaaatgtatatgtctctcacaagcttattgatgattgtattagagagacagttaggattgattatgtgaaattgagagcctgagatggcatatgagtcatctatatttggaaatgtattatattatcgcggttcttataactagtaggctgtagtgtactgtaaaatgtatgtttgtaggtctgtagcgaattgaagtgaatcaaattatgatctaaaaagccacttaccttattaatactggcatgaccacgtagaatgtagaacacatcatgtatatccataatgtatattagtacttaccttctgttgcttagaaaaaatcgacaaacacaacaacgtctcttaaccagactcacaggtgtcacatt

SEQ ID NO: 2050 - DNA, 511 bp, Harbor seal picornavirus
  isolate HsPV/WVL19023-02/USA/2008,1
cggggtggttggaactcacctgtacggtgagtgtctagctgccctgccccttcccctgagccggggttctttggctcgtccctgatctttttctatctcccctacttgtttgattctccccgactacggagctttttggcataaacttgttatcgatgttggattgtccgttaactgacttgatgggggacatagccccgggtgacctatgtcttgaagcgtttcctcacatggattcaaagtggtgctgaaatattgcaagcgtcgtttccatgtgtgtagacgtgaataggcatagttagcccaactgcaatcacctgaaagcccctgaggggttattaaggtggactcacaactgaagagctggagtgggcgctttacggtacatagcattgctctacctataggaagtgtctacatggctaagggtgggggcccttagcttgtccagtgctgggtgacagcctcgtgccgcgcgtcagtttgtgagtataagcggctgtaaaccgcc

SEQ ID NO: 2051 - DNA, 511 bp, Beihai picorna-like virus 119
  strain BHJP60437 hypothetical protein2
agaatgatgagcgcggaaaaataaaaatattgacatatccaacgtgtacgcagtaccattcgaaaactcgactctaaagttagaagacataccacgaccacgaccacgattttgccactattttcttttacaagcagcgtaatctagctttgcatttttattactattattgcttcaaattaagccattagaaagtaaatatttagaattattgtatctcaactctatacatggaaggagctggaattgttcaatactatcaggaaaccaaaattcattccatctctccagcccaggccacaagtctacaaaacgcgctagagggtttgacaagtaacagatcaattagggttagggtcaattctgacctcgacaaatacattactaatttcttaggaactcccagtccgggagtaaatcagtcaactgtgtcaaaggttaacgccagagcaagagcagaacttgctttgaactacgacccagttaggtggatcagctcctacgaggcgct

SEQ ID NO: 2052 - DNA, 512 bp, Marburg marburgvirus
  isolate Marburg6
gtggcttaaactagcatgagtatttccaggtcaaccacataataatgttggaggcacagtacattatagttgattatcctgtataataaaggatatacttaccctgatttatatttactggtataaaatagtagcatcatcttatcaactagttgtcatacaataggctgttcctataatctgatggtgaaagtataagcttgtagagttaccatgagtcacaactgttgtatattgtccaaaatatatcttgtgcaagtagtgtgtgcttgaatatgctgatgtaatacacactaataatgattgattaagaaaaatcaatgatggatattaaatgtccatcaagcaggtgtcgtaaaatattaggggtttcaaatgctgccagacttactaaattttacataggattatataattctcttcgatatacgttatatctttagcaaagtaatgaaaacagctttatcatgttagacgccaattattcatcttaagtgaatcctttcttcaat

SEQ ID NO: 2053 - DNA, 512 bp, Flen picorna-like virus
  strain SW9, partial genome.1
tttttttgttgctcgaccgcctaaacgaaggcaaagtgctcgaccctattgcggttgagtatattgactcagtgctagagcgccactttttgcgctacttgaaccgtctcaaccttacgaggtatgagaaactcgtgtggtccggatcatatccgtcctgcacgatcgagtacttgttcctcaaggctcgagcgaaattctatcatgacaatgatagagtctcgttctacgaggactgtcttcgccgattggaatcggctaacgtctactccgtcctgcatgacgaagaatgctctcatgagcccaccgttgacgtcattgagacgtgtgccgcgcacaatgttgtgcgtgttaaacgagtccgtcccgctatttgggatgatttcactcgtttagtggaagaacatcccgttcgagctcctgctcctattcgggatgctacgttgctgcgccgtctgcgtagtatcattagtggtctggtcgcccaccgcactaatgatgtttatgagggc

SEQ ID NO: 2054 - DNA, 512 bp, Guangdong spotted longbarbel catfish picornavirus
  strain1
gggggttgtgaccttcccttggttctctttggacgtaagctatacgatacatgcgctctttgttgtctggttttgtcacttttgttttgtgttatgtttccttctttctgggtgttctagcaccacccaagtcttagcgggttttccgattctatattaagacagatgctagctggctccgtattcaatccatctgagcctgtgtaaagttcttttgatttcttgggcttgcttacaccttgccaaaggtttgttttgagtggcggtggtttggccacgtggtgacacgtgcccccggacgtactatcgctatagtgcggaatctcattaaccaggaatagattgaatgttaagcaggaggtgatgttttgatgcgtagttgggcagctctttggacactagggaggtaccccttatgggatctgactctagggctatgaccatgatgctgcaaaaatttgtttccctttttaaaaacacacgaacacaacttaatgaaataacgatttgaa

SEQ ID NO: 2055 - DNA, 512 bp, Hubei toti-like virus 9
  strain QTM27092 hypothetical protein gene,1
gcaaataagaaacctacggcctacataaatattaatgcatatctacaacataatagacatcgcacagttgcgcttaagttccaggtctttgcgcgtgtggctaggggtcataatatgataggcattgagacagtccaccaacctatgtttgatatggaacgattccctatggtgaagtttggaacggtggttgagtatatttgggatagacatgttatacgagcagcggtgatagacaaaaatgattttgtcaatgagaacgacttcaatactatgcggcattgtgctatacaaagaagtcagtgggcaggaatttgtttgcccaataggtattatgctgtaaacatgaattttgatatgttgcctattttcgcagaactagatgcacatcgtactcgtgaagtacctaaaaatgacgcagcacaaccaccagctccagctgttgcagtggcagataatgctgaaacagcagaaatagaacagaaagcggaaaactaatttgggctaatgtc

SEQ ID NO: 2056 - DNA, 513 bp, Serbia mononega-like virus 1
  complete genome.2
tatgttcaatatatataatagcgcaagtgcctctctcttttaagaaaacccgccagtcatacatcaccagtgaatgctgataattgcaaggatgaataattccatagtagttttcagcattgtcctcattgtaggtttactcactggaggggtctttatcatgggtcggattacatccgcaggactccagttgtcttacacccctggctcactcttttattttgtattccctaatttttcgactatggccatagaggcttcattagtttacaaagtccttatatttttcgtatcaatattgatcctctctctcctgtcgatcatctatctgatgcacaaggagataatatctacgataagatgggctagtgaaacatatagagagtcaaggatgtttttgcaagcagcagcaaggtcagggcagtcaaggggaccactgcctgatttaatgagaccctaagtgtatggctcagtaatcttttatttacaaaaacccgctagtcaaccatcata

SEQ ID NO: 2057 - DNA, 513 bp, Tetranychus urticae-associated picorna-like virus 1
  isolate PK13,1
tttaaataagagtgtgcaagtaatacacttgcacactctaagttttcacatgagatgaccgattgtttggaattatatttcactcaattggaaacactcttgtgtgtctgcttagatgtgcagtcccttttatgaacacctcttatttaaagtattcatttgttagaatttatacatgcgccatcaagtctaaccatggcgtttgttacaactacccgtttgttaaataggctcttggttttaacatttgaatgacccctttgttgaaaggataaatcaacctctttcgtcttgaagcgtggagtttcaagtgaatgtagtagtgtcattcctattcaggatacggttggacacgtaaataactaatcctccacccagctctttgaactataccatctaccactaagggctgtgtaaattcatggtggtcaaaatgataatgaaaataataataatcatgattcgaatggttcccagtctacctctccaagttcgattcataaccccgataaa

SEQ ID NO: 2058 - DNA, 513 bp, Beihai picorna-like virus 18
  strain BHSC157282 hypothetical protein1
cgcaagacgcatgttcagtattgtttttgtatttgtattgtaggtctaagtccttggactttgagttataattttataatgcaaaatctttttacgggtgagtaaacacctcctttttggtaaaaaatcaatcatatttaatgatttaatttagtcaccttttaggcgatactgcatattgttccagcaggatagtattactattgatagtaatagttctactattgtcgaaatgaccgtatgtatagtacacatcactataagaaccggtaacctttatggtaagggaacacaggaataccgtttggtacccatattccacgcattgaagacaacctcattatctgatgatatgcgtgtaggagtttttctttcctccttgtttataaaaacctcactgagtcagttccacatctgttaaaaatgtgggcacaactaaagaccgagttgtgtagttaggccttttattttatttttattggaagcaatagagcttcccagacaaattttaag

SEQ ID NO: 2059 - DNA, 513 bp, Wenzhou narna-like virus 7
  strain WZFSL82100 RNA-dependent RNA1
gggaataaatattccttacacaggccttaagccttctagtttatattgtactagatctattccggtatagtatagactttaggtatgatagcgaaacccgtgagggtacgtttaatatcatagaggtctatcttcagatactacgccacgtatttggaggctcataagttcttagggcttacaaccctacggtctttggcatacattgtaaaattacaacataagcttagatcgcagttaccagcgatatctcttcggagaaaaggtaacagaactgtggtgaacgatgttaacaacgtagttaacaacgatgtcctttataaagagttcgtaagatcctttggtaagatcttacgactttataaagattggaagtttgtccaaaaatttgctcgtcggattgaaaagaattacttctctacaaccgattacaaattgaattttggacagatcccaagcgaccgagccattaagcgtgtgaagaacacgctgtgttggtgcttttcatatatt

SEQ ID NO: 2060 - DNA, 514 bp, Fusarium graminearum hypovirus 1
  strain FgHv1HN10, complete genome.1
cacagcctgttaaatccttcaggtggccccgtggggtctaaaggagtggatcgtcctacactttcagtaggcttcaaattagacgtgttactgtctattgaaggtgggtaatttaccgatccggggctatgcccgcgagctttgctcgagacaattgtcgtgcgttccgtgcgtgaggtttcctcgtgctttagagcgtgactttgtcatgttataatagtcaagttgtgttacgcatattaatattaacacaagatgagtcccattctagcagtcatgggaagcgcatttcaaaagaatgctgtctaggctggaatggaagaggccagttggggtcttgacttgggctgtacccaagaactaaccaggattgatagggtcaggagtagggtgtgttctaaccaacatcatctcctatctagtcaccttgaattgagtgggtaaaggtgacgaataaattccactctccaaaacaaatagtttgaaggagttacctgccgtctcccaaaaaggc

SEQ ID NO: 2061 - DNA, 514 bp, Botrytis cinerea fusarivirus 1-S2
  complete genome.1
tttggtgtgacaaatcaaccctgaaatagggttgacgactcgacacgacaacagtttcttctaagttgtcatgatttagtaagtctaaaactgttccacaccgaatttcaaagaaattttgaaaaacgatacggaaagttcttgaattggacaaggcttttcctgtcataaggcaagattgtgcttgtgtgcgctctgaccgaaccggtgggcaaggactggagcataggaaggaccatttagtatgggcttagtcgggcacaagtgaaccgtggggtccaaaagactgcttaccggcttgtgcttagggcttagtcctgaaatttgcgtagtaccccagcttctgttcttacctacttaaagggaaatagacgtggacactagactacatggaaagacatgttgacacagaatgaatagtattctacaaccaacaaaactcaacatttatgaagacaccagacaaacctgaacaagtaattatccgacacccatttagtaattttagtgaaag

SEQ ID NO: 2062 - DNA, 515 bp, Lentinus edodes dsRNA virus
  RNA-dependent RNA polymerase gene,1
ctaaggcaaagtccaggcacaaaaagcaaaagccgagagctcatcaactgaacaatagatgcttggattccctttttgaacatgaatgtatattgtgcactgatcagatccttgttgggccaaaccaaattgtgattgaccaggataatcacctattccgtcgacctattccatcgacctattcgttttgctcattgttcattctgatcgaggctcccgcgtaccgcgttgtttgtatcggtgtacgcgtccgtgacaatgacggtcaagcaaagcgggccttctataaatggtacttgagcgtactttttccctctttgaaacccacgaacgtgactgagacgacgagcaaacggtgcacttacctctagtcgctccagtgcatttgtgctttcactagacgttcctcttcttcctacgcgctatcttacgggcttcttcgcaatggatcacttccaggctcatgcgccctgcgttgggagctcttccgataacatccagcaagccgatgtgga

SEQ ID NO: 2063 - DNA, 516 bp, Wenzhou picorna-like virus 2
  strain beimix73672 hypothetical1
gtgtgcatagctatttacttagctatgcacactacattggtatttgtcagtttaatgctgacacattatgcaactacacagtcgcctttatgatatttatcgtttatcagggctactacatagtcgccttataaacttcaatgtttatcatattgtatgtttaattactgatacttttaccggcttaaaagagccgccgacatttatttgtccgaaatcttttttcttttttggtacgcctgttgaggcatttaataccaaaaccattttcaaagagaggtacgacagttctctgctgtcttactctataaaagcctaccccaaagagtagaacttgagggatgatatgagttttgcgctacttgactgcgcttattattaaagcgtcaagccacaacctacctgtcagttaattttcatgaaattattcggcagggaaccgtagagtcgcgggtgccacgacttgaaaggacttgtccttagcatgcaccgtacaccgatgaaccttacgaggtg

SEQ ID NO: 2064 - DNA, 516 bp, Hubei tombus-like virus 1
  strain SCM51273 hypothetical protein 1,1
gggtactagacccgatgacggaatttcgctcatgccggccctggccggggggggcagacttcggcgcacgtagacttcggtcgcggactggtgatatgcgcaagagatattctagttaagtcctagtggcaatattgtcccgggtgctgccctgattatagcagccgagtaacctgctcgatcgttaagagaaatataaggaccggaccgcaagtaggggtcatgcataccgtcgttggatatgcatcagcccccacgtaggctcgacggcgcaccacgctttaaaatggtctcctagctggagtgtacgctagtggcagcttgtgtaggcttgttgtcgcgaccacataccctggtccttggtacaccgatggacccctggccgaggttaatggcggccccgcagggcagttaaatatatgcaggtaagctccagccttgagtgggccggtctgacatacgtgagtccgttcgtgcaccagcgttaggtgtacactacccccctacaattacatc

SEQ ID NO: 2065 - DNA, 517 bp, Mayfield virus 2
  putative non-structral polyprotein gene, complete1
gtacaggcgcatctgagagaagtgttattcgcagttttacgtactgattacctggatcacagattcacggaaaggtcgttgctgtcataatagtgcataatcagagtttattgcaaggggaacgagagtgtaaaggtttacaacggttcgcccgaggtgctttagttttgtgtgatacacgctgagagaagctacatcagtgacgagttacggagtaactggacgagtattcattgaaacggctatatcacggtaaaatacggtgtaattgttgtgtccattgtggaccatcgagaaaagcggtatttgtgataggtcacggagtaaccggatcggtgtccaccgaaacggctgcgttgcgtagtatatagtgtaatcgtgtgttagtgtttattgtttatcattattattttgacaatattcattcattatttagataagcgttatcgtgcattagtatatcgattttagaattattttatattttataggcgattacgagcgttaagcccgcaaa

SEQ ID NO: 2066 - DNA, 519 bp, Yili teratoscincus roborowskii picornavirus 2
  strain LPWC2102151
ggtcggggagatgtgttcatgatcggttaacaccatcatggatcatctctccccgacctctttttgacccagctatgggttaaatagtacttttcttttctcttttgctttcttttgtgttttgtttgttttgcaacatataacaagcattttatcagtattagtgtctgcaactgtataacaagcaaggtggagcaatcatgcgagtatatctcaattgaattgtgacacacaagtgtgcactatgtggaataaatgccattttggccaaacctggttagccagaccagtagtaggacaatttggcacccttagtgggcgcgacctagatgctagggatgagcaaacctatttcccctgagtacaggggctctccttcacctctacattttggacctctttttgagtatcctcgatagaaggtgaagtgacggtgtaccggatggttaattgatctcattgctgggtgacagcccgctaggaccaggcagcatctttgtatggacctgtacatgtaac

SEQ ID NO: 2067 - DNA, 520 bp, Wuhan insect virus 14
  strain WHZM10168 polyprotein gene, complete1
gttgaaatccttacaggtgaacccgtctgggtcctaaggagtgagttaccacgctttcagtggtttgcatttgcggtagtgatgtgctactcgctgcaagcggttatttcttttaactcgtgcccttctcgtgggcgtggaagttatcttccgtgatcttttggatcgtggtttcgtttgaaaccgtagctacttttgtgtagctgtgacctacttcaggttgttaatttgtggttcgcctaccacgtagtgctacggcactgtacattctttactccgaagagtttaaactactatgcgtgttggtactcgtgatgacactgatggccgtgaccgtgtgtcaattagaggcttggtctatatctgttgtaaggaagtacctacgaacagattctgtctcggaagacctttattataaatttaagaccttcaaaaccataggcttaaaccatcgacccaaagacgctttcgaatgtgtaccacttcaagtcaatctttggtagggaggttataaatccac

SEQ ID NO: 2068 - DNA, 520 bp, Lasius neglectus virus 1
  isolate Cambridge-Lne, complete genome.1
atcctgctgctggaattcaggcagctacagcttctacagctgaggctggtgctgttgcaaataaagcggctgatataacaactggagttgtacaaacagcagagggagtggcaggagctactcctgttggaatgatagcgttgattaactcaatgcttggggatgcaactgcagctggtattaatgcttcaaaccaaaatgcaatttcaaaaaattatatacagaattctatggcaaagggatctcaatctggttttcaggctggacttattaaagaatctgagttagctcatgcatctgtaactaatgcaggagctaaaataggaggcatagcaggcccattaggtgcttggtttggctctttgatagctaatgcaattcaagattcaactcctaaggatgattataataatttcaaaacaggatattcctttgatggcaaagttaatccgcaagatactggtttggttggctcaggaactactgctgacctctctggtgaaactaacatgacaacatt

SEQ ID NO: 2069 - DNA, 520 bp, Wenzhou picorna-like virus 22
  strain WZFSL83961 hypothetical1
atcccgctctttagtgttagtacttgttacacactaaatcctattatctaaggtcaatgtgaacatgtttatatgaatgtgtttgtgttgcaaagtgtttgtcttaatatgatgaacattttgtgattattattgattattagttagttattgttagtttatataaacaaacattaggtttgttagttagtgttagctttgttttgagctgctcatggggctcacattcgtctaatgccgctatttaagtttgaggtacgttgatcgtcacctgtcaaccgctgcctattattacttctacacatgcgagaatagcgtttcccgagtagtgttgacgtatgtttgtttgtatactaacgatgttttttattttgttttctagtcctggtgtgtacaggaattcatcgcaactgtatctttgttaagggtacagcaatatatattatagtcaacttccgtaagaaaaccaacttcagcacatcccaattgtgctgtcgtaattttggaggaacactctaac

SEQ ID NO: 2070 - DNA, 520 bp, Wenzhou sobemo-like virus 3
  17CxIT-T2-F3 genes for hypothetical1
actggaatgacgaagttagctactcccgagaatccatgtcttatccagaccatggcccggtagagcggcctgctgacgttatacgtcagcaagggacagctcccgtgtcaacgtcacctacagcacaggccactcctatggccccagcgacatccgcgcccgcagcgccagcttcgccaaccccttcccagccggagggaaacgcgagcagggcctctgcaggtgcggaggcccgtggcaacgccagtctgcaaggaaatgcacagagcggaaacgcttcagtaagccccgcgtcagcaattcctttggaacagcaggcgacagctaccaatggcccgacatcgatgcctgctccgcgaagcgtagcttccgtctccacgtcgaccgatttttcgcggcgcaagcaaaccgcaaagctggtccgattggaacccggagcatcgaccgcgttgagaagagatgccgtagctggaagtgctcagtaacccgctacaaagattttgaagaaaactttgaaatc

SEQ ID NO: 2071 - DNA, 521 bp, Ruddy turnstone calicivirus A
  isolate MW19 genomic sequence.1
catagctgttatgctatgtcaaatcgaacctttaacatctagttctcactatctcgccttgggatatggcttcggccctctatctcacggttaggtagttctgactgattttttgtttacgactttcttggcttttgtctttaaaaaccatgtgtaactgtaagtgcccttatcgacaggacgcgccccacgtggaattggggaaatctggatcatgggattccgcctgcagtacggaaaagtaccgagtacttagtatgttctgtagtgccccatgtgaagggaccgcctgagctagagctacgggcttggaaggtaaggtaggacgcctttttggctatcctacgatcgtccggcgccgattgcgtggcctcgtgcccctctccggttccgccccgatgatgcaggatttccgctaggggtttgtgacgcctccaggtacgtgaggatgggaagcctcaccaatgcgtagtgctgggtgacagcctgccggctggcgcagttcagtgtggtatagccag

SEQ ID NO: 2072 - DNA, 522 bp, Marmot picobirnavirus
  clone c207479_g1_i1_libraryC_2529 segment I1
atttattaatttatcaacacagaaaggaggaatctattgtggtttgtaaaatcattaattcaaaaccacatagtcactcagtaatcgccaaatcacagtggatgctgtgtactttagcggttgagtgcagaaaggaggtatatcttgacagatatacaaattaagtactggggtctcaaagaaaccggtcgtcacaatctcgctggagaaagacaagcggctaatgaactgaaagagactcacagacacaatgtcactggtgagaaagaaaccaaacgacataatcaaacctttgagggtgagacaaagagacataatgttgctggcgaaagagaaacgcataggcatagtgtcgtgctcgaaggtattgagaaaggtaaactcaaagaggttactcgacataacgtagcttctgagagaattgattctggtaaattgtccgaatccaaaagacataataaggttaccgaatcaatccagcagcaagatgcaaatacaaggcttcaagttgcttatacccaa

SEQ ID NO: 2073 - DNA, 522 bp, Swine hepatitis E virus
  strain HB-S3, complete genome.1
gcccggcactctattgtggaacaccgtttggaacatggctgtcatagcacactgttatgagttccgcgacctcagagtcgcagcatttaaaggggatgattccgttgtgctctgtagcgattatcggcagagccgcgacgctgctgccttgattgctggttgtgggttgaagcttaaagtggattttagacctattgggttgtatgctggtgtggttgtggccccgggcctcgggactctgcctgatgttgttaggtttgctggccggctctcggagaagaactgggggccaggcccggagagggcggagcagctccggctggccgtttgtgattttctgcgaaagttaacgaatgtggctcaggtttgtgtggatgttgtttcgcaggtttacggtgttagccccggtttggtacataacctgatcgggatgcttcagaccattgctgatggcaaggcacactttaccgagacaatcaaaccggttcttgaccttactagctccattatatatcgggtgga

SEQ ID NO: 2074 - DNA, 522 bp, Blattodean phenui-related virus OKIAV267
  segment S cRNA sequence.1
gccttctcatttatataagaactcttcagtgatcaaaagatgtcagcatctgtgtgatatagcagttggactggaatcatttgctggttcagcaaaggagacgaatccagtttttaaagattaccatggtctttttcacataaataaattacctgctatcaacagcctggcatctcatgttccagagagtatcgaccttgctttcaaactaaaacggaggaaatttattatagagaaacttcatttgccaccagaacttcaagagacaacacaaagagagcaagatgatatgccttctgctagagcagttagttgtggtgttggtggtgggacaagaaatctggatttttaatattcttgagttgtctggtctggcattggttgtactgggtgccatactgctaactgatgtccccagagtgctgttgtcccgacttttaggctccaatcacacatagacggagaccacatttgaaaaataattactaatctcgtgtgaaattgtaattagcaatcatcaag

SEQ ID NO: 2075 - DNA, 522 bp, Wenling picorna-like virus 9
  strain WLJQ104209 hypothetical protein1
ggggaacactttcccccatgctctattttaacctcatatacgactttgtatttattaaaggatttggatcgcaacggtcctcttcttttcttactacaaaactcgtatatgttgtatcatcaatcttatcttttcattacaactttacttatcactttatcacaaatttatttgaatgttaacttctcgaaggtatggcaaacaagaatgtgtgagtgtggtttcacgaataaagggtattaggtgcaagaatagcttaaagtatatgcttttaaaacggcctctatacacctagtatactggagtatttaagtatcaaagggatatctatgattataggaaatcgatatcaactggtgctgcttacttactttacgtaatagacttggtaactctattataggtaaaactcacggaacgctggatttcttaatggattcgagaacggacacatgatagtatttaacatcgatatgagacatgaattacctcatatcatcataattttcacttgaacaaacc

SEQ ID NO: 2076 - DNA, 524 bp, Wenzhou picorna-like virus 28
  strain WZRBX42853 hypothetical1
atacaactgaaagcagttaaccccgattgaacgtcttgtccacgatacgtgacctgtgaccgagagaattctactactttgttttcgcattccgtcgctattattttcctatttaaagtaagaggttgcctagagcatttaccaggactctgttaaatagatgagattttgtgtgttgtctaacaaaacactcagggccaagtattccctctaaaatactaaaccgtcttaagtagtgagctatctttgattgtattgttgattatcaaccaacttccgcctttgattttagcccgcaatctgaaaggttatcagttataaaacctccgcgatcgacgactcaagacttgttcctctgttggtactcgattcgccgcccctattgcgagaattagaagagatagtcccaagctaatctactttgaagaatcattgtgatctccacctgtacttgataactaccagtgtattttgctttgattgccatagttgtttatcgattaaagtcctttaggtactcaacc

SEQ ID NO: 2077 - DNA, 525 bp, Changjiang picorna-like virus 13
  strain CJLX40994 hypothetical1
agcgtgcttaacagcacgttgaaagtaaattgttcgaccagagcatgcgtaaaactgatgcctcttttgaggaccacaatctggcgaagagtcatattgaagtacctctaatcagtgggaggagcccaatagcgattctttttagataattgaaaatggactttttatctcgcttcttcgcgcgagtaataaacacgaagaaaccaaaattataaaatttttaaaaatagggtcgcaggcttgttacctgcaaacacattatttagaccccccaaaaatagaagctccgtagtttgtccgaattgcggctcacttggtcattaagaagattccctgaaactccgccaaaagcgattgtaacgtaaaggaattatttcgagaaaccgagttgaggtgtgagataacgatattctatgccttccttcttttcccaacaagaagataaacatgttgaggaccttctgaagtggttatcttcagtgacagggtgaaagcacccaatccaaatttaacattttcttaatc

SEQ ID NO: 2078 - DNA, 526 bp, Bole Tick Virus 3
  strain 15-CYL glycoprotein and nucleoprotein1
cgttagagatgagttagacggggttcttcagaaggattcagagaaatttgcgtatgatactctgactcatgtgctccacatagtgcatagattagcaaccatcgaaggattccttcttattgtaacacttgttcaaaaaggtgaagtaagcgttacagccaaacactgtaatgacggctataggagcttcatccatagcatagctcagcgagttgatctgagagccaacatggcagaacatcctcagggtgcctttgagtacaagggagagaccatacatcctttcaagcattggaaagtagggatgagatggggtgtccaagcaatgactatttcacgtcgcttgtgaggatactgatgtatatatgtaaatatatttagcattagctctgtaatcatcttatcttatatccatgtagtcaatattttatgcatatctcgttcatattcactcactgtattaaaaatggagacaggattcaattgatcgatttttgagcagatacactcttcctcagagatcatc

SEQ ID NO: 2079 - DNA, 526 bp, Beihai razor shell virus 2
  strain BHBei76898 hypothetical protein 12
gggcgtgacctacgtcctggtcttcattgaccgcaccaaaaggatctatatattgatctttcacgaatatgacggtaattgtgaagtgctatatatagtaaagttattagcgccatgtgtaggcgtgaacgcgaccgtcaataacacttcagcgtgcttgagcaggcatgctgtcgtacatagattgctcgccgctatcaataacaataataacaatgacaatacgcttgttggaaatcgttctgccttagaaactgaacagaataccacatttgtagaagacgcacctcttaccattacaccaaatgttgtagtgacagattccacttttaatgacggcgctgttgacaacgtggctttgggcgactggttctccagacccgtacatgttgccacatatgtttggaatgagggtgcactcttggatgaagttctattgccttggtatgagttttttaacattttaaccatcaggaataagctttttggatattcacgtttgaggtgcaaccttcatgctaagttc

SEQ ID NO: 2080 - DNA, 526 bp, Hubei tombus-like virus 18
  strain QTM27278 hypothetical protein 1,1
cggaaatgcaattgatcaggactgccgagtatataccaacgcaatatcggttggataggtttaatgagtttttcaggactggggacagcagctccagcgcggctactggccccaagaactcactaaacaaagtgaatgttgtgcgcaagtgcctctcaaaacgttggatagtaggcataggattattagccatggcaagcctggtcattttgcgaaaaccgcagttaccgttacatatcccaacattatcgcgtatcatgtaaatactcatagtagttgttattgtaatgaattagttagtatatataatagacatttagttgataggagttatattaaatatgataagttagctataagtaagggctttgggttagttgataagttttatagcaatgttaaggtacataaacttagttataatgatatcataggggaatatactggtagtaaacgtaggttttataagcaagcattatataagttaattaatgagggttttcagcgtaagtttagctatgtgact

SEQ ID NO: 2081 - DNA, 527 bp, Trichoderma atroviride mycovirus
  complete genome.1
tttggaactcagctaatacactggtggctgagctgaggttccaccatctaattaaactactcaaatataccttcactaggaataataaattatatatatccctcgtggacgtgattaacgaagtagcaggccacacctttaaattgagctatttagatgataaacagaacttaaataaaccgaagtttttctttgattacgatactgttgcgcgtaaacacaactttaataatgaacctactgaaataaatggcgcaatattacgctggatcttcctacatcccactcctccaagtgtatatgactacttaccaaattttaatgaagatatcagattagaggattccattcaagttcttccagcacgatcataccttaatctagcaagtgtgccgtatgttccaccagaacgtttaggtgacactgactctaaaaatgagtatatagaacttgaccctcacactgtgggcatagccgttaagaaacagaattcagtactcatagaagaatggaatttttatcataat

SEQ ID NO: 2082 - DNA, 528 bp, Venezuelan equine encephalitis virus
  strain 69Z1 structural1
gatcgcaagcagagtgttgagagaacggctaaccggatcaccatgtgcagcattcattggagatgacaatatcgtgaaaggagtcaaatcggacaaattaatggcagacaggtgcgccacttggttgaatatggaagtcaagattatagatgctgtggtgggcgagaaagcgccctatttctgtggagggtttattttgtgtgactccgtgaccggcacagcgtgccgtgtggcagaccccctaaaaaggctgtttaagcttggcaaacctctggcagcagacgatgaacatgatgatgacaggagaagggcattgcatgaagagtcaacacgctggaaccgagtgggtattctttcagagctgtgcaaggcagtagaatcaaggtatgaaaccgtaggaacttccatcatagttatggccatgactactctagctagcagtgttaaatcattcagctacctgagaggggcccctataactctctacggctaacctgaatggactacgacatagtctagtccgccaag

SEQ ID NO: 2083 - DNA, 528 bp, Yongsan picorna-like virus 1
  strain 16-0061/ROK/2016 putative1
ccagtaggtctctaatccgatccaatattaccgcgcacaaagtcgaaaacagccttataacaagactccaagcacttcttcttcgagggtccaacttgttttatatgaaacaattgtacctttccgacgcgccaggtcgaattcggttattcaggaaactactacaccaccgtcaccgtgttcaagcgagtcggaaaggtacaattgtttcatataaaacaagttggaccctcgaagaagaagtgcttggagtcttgttataaggctgttttcgactttgtgcgcggtaatattggatcagattggaagacgcaaggactggactccaataagagcagtgatttgaatgctgatgtcgaggataatgtgcaagaggtttcgaaggaagagaatgttatcattgagggagcagaagtgagtactgttgcaagtgttccccgatcccaattgcgtgaccttgtggctttgtcaacaacagagaaagtttacacatttgctgattcttcttcatctgtagttggaagatgg

SEQ ID NO: 2084 - DNA, 529 bp, Unknown
  Description of Unknown: Bat dicibavirus clone Bat/CAM/DicV-P2/2013 non-structural1 sequence
acgcatccctccatgcggggtcgatctgcatgtaaaaccaaatccggctatgtttgtatggttacgcacgccaatagaaaagtttgttcatttatcttttctggtttgacgcttcttacataagactgttgtatggcaatccttatttagggatgggtagtcgcccgcaacaaatgatcataaattgtaagattgagggatcttgcgatatattatttatccccttgctcaaattacaaatgtaacgctcaccgagggagcgcataaatctcgggaccaaacagtgttgtataacgattatgcaaataattgggagtacggcgtcgacgcagcgcaagacccaacgtactcattgacggatctcaatgatgcatcacttgaacattttttctcacgcccagttaagatagcttcttataactgggctacagggactgctttatttcagtccgttaacccgtggactacgttttttaataatcctcgggttataaatcgcatttctaattttaaccttattaggtgtaaa

SEQ ID NO: 2085 - DNA, 530 bp, Robinvale bee virus 6
  isolate VN1-8 structural polyprotein and1
ataaggtaagttaattataccttgtactttattgattatttgtatactatctccattttaaattattgatatgttgtgtgtgaacccatattgatatttaaataataaggatagatatactataattgatactgtatgtaagatttaacgtttaaaattatacttatcttttaaaacacccaaaacttgtatgaaacgcaagtcaatcattcaattagcaaactacccgtatttaatataggctctttgttgattgagtaattgttgttcaaatgaacacctatttaagggttgattaatttcttaatgtgcgtggtggcacctttaaatagtagatttccgtctttctctattcagagtacttttggacgttaactaatgctccatccagtcttgaatgtatgataattaaactcaagattgtgtaaatttatcttatcgcaagtacatcaaataaaatttatgaagaaccagcaaaactcgacgataatttcgcccctgatcttagtaatgtaacaaatactaatttt

SEQ ID NO: 2086 - DNA, 530 bp, Picoa juniperi megatotivirus 1
  isolate ANK_VIR-88, complete genome.1
acaaaaccgtcattccaaagaggaagacaacctcactaaaaaattacaagttttttagtttgttcgagaaacataccggcgaaagaaagttgggaaagtttctacttgaacagacggaaaacacatataataataaacgtaaattaccagatgcgattgactgtttcaaaactattcaagagatattacaatctgttgatcagcgaagaatcggtattaatccaactcaactggaatattacaaatcaaccttaagacaaaaattgaacggctcattgaaccgaccatttatcgtagcccatagtggtttcggtaagacgacgctagctaaggaaaaatggattttggatatagatgattacatcccaaaagaagtatttactgtgcaaaactcgtcaacttcggcgcctgagttgattcttcaaaacgaatatatttttaactacatatgtgcatcatctggtgtaggtaaatctcacgttacaaagtttcacaatcaaactaatgtctttatcgatatcgatgaagtc

SEQ ID NO: 2087 - DNA, 530 bp, Hubei picorna-like virus 73
  strain WGML140238 hypothetical protein1
tgatatcatggcagtggctgcggcagcaatgtttggaggtaatgtgttgcaaggtttaatgaactggggtatgcagaaagatgttaatgcacaacaatttggatataatacacaactcattaatcaacaaattaaaggtcaaatggcagtgaatgcagttaattatcaaaatttagctaattatcaacaaacaatggcgagatcatctggtgctccagcttatatgtttggaggaatgtctagtgggatgactcccaatattgggggttatcatgtaatgaatacaggtggtggtgcaaattttatgactggtaattttgcgtggacaatgcctgttggaggtatttctggttatacaggacaaggacgagcaccatcaactgcagatgttggtacccaaatgggtggtatgacggcgtcaactggaacaaatccaatagaacaccaagattaaaattagtctacctatggttcctaattcgataatagatggcagcaaataaacaagaaatcccaaaaagttatttatc

SEQ ID NO: 2088 - DNA, 531 bp, Sour cherry green ring mottle virus
  complete genome.1
atgagccttaggcctccaacggattttggcaagccattactgtttgcggctgccggcgtctctttggccctgctcattgcagcttacaaaagtcactacttaccacccgtaggcgacaacattcattctctaccacatggtggtcactactcagatgggactaaaagcataagctacaacggtttgaattgccaacagaatcacagccagaacctcttatcaagcaccagcaagttgatcccgcttaccttagttttcgttgtgagctttttgatttatgtctccagtaaatttggcaataggtctcctagcattcagcattactgcattcatcatcgctagtttcaattcaagtcctagtaatagttgcatggttttgattactggcgagagagcgttagtcaccggttgtgaaataacaccagacttgtctgatcttgtcaaacagttgaagcctcattcacatagcttaggtttttagcactaatactgatttgtatttgtgtgtgattagactacaattcattttaa

SEQ ID NO: 2089 - DNA, 532 bp, Carnation necrotic fleck virus
  Dc genomic RNA, complete genome.1
aacgttgcaatcaagtattgtataccccgattcttctttcgtgtttgcagatggtagctcactttcacccagtcaaatgcgcgcttctccttctcaaagcgctgaaagagagtttgcttaccttctacacagcgaaacgctttttaaatggtgcgcaacctgcgggccttcaatgcggtctgctctcagtgaaattaaccaactcggcaaatacagagaggatgcgaatatcgaagtcgatcttaaaactgtcgggtgtaagtatacaatcgatcgaattagagatttccttaagaatagcaacgactcctcgaacgacgcggttgaacacagctggagtttatctaactcttgcggtgaattagttgatcccagtgacatttcgcgttttaagaagctggttttcggaacgtcatcgtctgttgacaacgatgaattcactgctgtaacccatattcgggattatctagcttactgtttatctttagtcgataggtttaatttaccctcgcttaagggtgagaaagaacta

SEQ ID NO: 2090 - DNA, 533 bp, Le Blanc nodavirus
  strain JU1498 RNA-dependent RNA polymerase gene,1
tgtaaagcgccacggcttcgccgtttagctttccccttttggttagagcgatgtctatagcttgttcccttggttgcgggtaacgtagtgatggcaaagttggccaactgggattactggcgtacgatgtaacagctggatcgtactgggctctgggatcgaccgtctctcttgaggatgctgcacgcttcgcgcgttagggctagagagagcagctcgtctagtattgtgcaatggtcttgccttgctagctaaaaccaacccgaatttgatagtacgtgaacgcccgcccattcatagcgacaatgataaactttcaagccctaatcactcttcttcttcgttttgtttccttggtttttgatttggcattcttagtgcttcgttatagttttaaggctcttatagcccttattaggcttggttggctccttttgcgcctaccccttcaagtttgtctggccgtagctcttttggctttggccgcagtgatctcattagcaaccgcccagcataataccagctggactgac

SEQ ID NO: 2091 - DNA, 533 bp, Drosophila unispina virus 1
  ORF1, ORF2, ORF3, glycoprotein (G), and2
ccttaaaaacaagtataaaatatcagcctattaattacctatataaaaattataactaaaacattatattatcagcaatattaaccccaagaattaataatcttaaatcgtaaacatataatcttaataaaacccgttgagtctagtcacatatctgtaataatacccaaaattaaatactatattaagaaaagagaatgtatgagactaaaatcatgtgtccctattgtggaatgatgatcaatgttaggataagtactaaaactgatagtaatttttcaaaaacattagtcaattgtaggttttgtaaagaagaagtaaatatagaattagtcacaactgggaccatagacagtaaagagccagttggttcaaacaaaacagacaggtaagaatcactcctacattatggtataaaagatgctactagaattccatccattttcttataaaatctttaatcaataaaattataatcaagttaatactaaatctttgagtcttgtcacttacgaatagaaaaacccgttaag

SEQ ID NO: 2092 - DNA, 534 bp, Cymbidium mosaic virus
  gene for coat protein.1
ctaaggccactcagcaccttcatcgctctcacccgcgccaagggcaacctcaccatcttcgatttcaatgccaggtttagttccaccgcctgaccactccaagtcactcttcgtccttgctattggtataactgtggtctccgcactatttgtgctgaagtcccacacgtttccaattgcaggagacaatattcaccgcttcccctccggcggccaatataaagacggtaccaagcagataaatactgtccacctactcatgctaggtacccgaaataccctgactacaatgcttgccgccactgccgccatcgtcatcctctctgcctatatatttcctaccatcctggcaataatattcgccgtatttgcccttgttgcaatacatatcaccacccctgagcccttctgtaccatacacatagacggggcgtctattactatcactaactgccccgatcctgcagctatattaaataaagtagctataggcccctggcgagggttaagttaccacaataacttgaaataatc

SEQ ID NO: 2093 - DNA, 537 bp, Lasius niger virus 1
  isolate Cambridge-Lni, complete genome.1
tagatgatgatcaaaaagcacttgatgattatgatgcatcaaaatctgacccatcgtttaattatggacctggtgaagaatctgctgcaatcgatactgatattcctattgaaacaggcattgccgagggagctgagatcgcttccgctggaaccccttggggtttggcagcccttataaaccaacaagtaggacaatcagttaattcagctataacaactggacaagaaaatatttcatctcaagattatatgtccaatatcaatcaacatggagtaaatgttggcttgaatgcttcccttattcaaaatcaacaacagcaaacaattaaagctggctccgctggaggaggaattggatctatattcggaccccttggcgctcttataggacatgccgttgctggaacagtacaagcgaatcctgatttattcaatactgctgcttcttcaagtggatggattaatcccactgatacaacagctgcaaattctgcttctgctgctgccccaactggtgactctacaatgcaagaca

SEQ ID NO: 2094 - DNA, 538 bp, Penicillium aurantiogriseum foetidus-like virus
  115 kDa protein1
gggattttaaccgcccgttgtattcttacacaaaagtttgttacgcatgtcttgaactgacacaatagttcccctaaaagctatcacgctcccttgtgatgtaactcttttagagtcttgcctactagttggtacaaactagttccattttaacaccaaacacatcaatggattaaacccgtgttccctccccgacagatctacaactcttagcttacagccaataaagaagcttaagtcacgttgttaactcgtcctggagctttcgtgttattgacaattccccctccccctcttttggactgattgtctaaaccccccgacttatatagacagagacgcctctatggcctctatgggtaatgtgccctgtcaacttcctgttagtcactgaagtacaatcgcattcacacacacaaactaccgcttgctcgttttacgggttgccctcattcacgggccgaatatcatgtattcgcaaagtagtgtttgctgggtcaccaaaaccggctagagtcctactactcgataaataagt

SEQ ID NO: 2095 - DNA, 538 bp, Partitiviridae sp.
  isolate H1_Bulk_30_scaffold_1057 RNA-dependent1R
catcccttttggggcaaaaggtttgacaggggattggtcaccctacaaacttctggataggaccaccctacttgcgacggtagcccgccttacccgcaagtggagagcagtgagggcggatgtttgggctagaaccccttgcgataacgagtactcgatggtacggtcacagagcaaactgtactggcaaagtcgggtcaaggagtcgctgcgacacccagacattaggttaagagtcagttctatggatgcaggggaggcattcaagctggcgcacaaacatttgcaacgcagattgcgagtaactgaagaggcggtcaaggagaagaacttacctccgctgcatcttcagcacttgcgcgctctcattgtcgcgttaaaggattggcactattctccggatagggtgtcgattcttgcgacatgtgagttggcgcgaggctcctccccccctgaaaggcctccccgcattgaacagcggtgggtgggaggggttccaaggccattcgcaataaaggaggagataccaccctcgaag

SEQ ID NO: 2096 - DNA, 538 bp, Solenopsis invicta virus 9
  isolate Formosa, complete genome.2
ggcaaacgtgtgatccctgcattaactcaacaaatatctgatgtaaataaagagtttttgtaacgctgcgtttgtaactacctgggctatttagtcttacctcccaggatgggtagtggcagccccacaatatccagggaaccatcagtatatactacatggttaagtggcctgtagtacgaataattcacttgctacaaaacaagaaaataattcaatagctcaagctgaggtagcgcctcaggaaggacagaatgctcaggagcaacaggaaataacatcatttaatgatgatcttgctgttattcctgagggagtacccggagagacaccagtcccgtcttttcggcatgatcaattcacggacttttcagaccattctattatttcgtttttagagaggtctcagcttcagtcgtcgtttcagtgggaattcgcgcaatcgggcggtgcttcggggttgaattcgattggttacgatctgttgaaaacgaacgactcgccagggttgttagtaccttcacagatattcaagccc

SEQ ID NO: 2097 - DNA, 538 bp, Wenling bighead beaked sandfish picornavirus
  strain XQTMC456881
gattgcgatcctttcactgagcactatttacagctggtttgctgggaagaaaacccgcttacgagagcgttatttcggaaccttgatgcaacaagttaaatgcaatttttattactaagttaatttggaatgttgtttatttaaacttttgttcttttagtttgttagtttatactcctatttactttagttttaacctaccattagtttattatgtttatttagttttgtttactttgaagtttcttacctggtgcattggagcgaagtagcttttgtgaaaagtccgatgttcctgaactccattgggaacctatgcggcctctgacgggtgtctttggcggaaacatggataactggtgggaatctctacacatagaggacaagcaccaacttcagacgctttgtattacaaagccgggctgtaccctgattttggtgtatggatacccatggggatggggtctgttttgtctactgcctgatagggtttttgcaaacaaatgtgtaagattataagatttgctgtagttatttt

SEQ ID NO: 2098 - DNA, 538 bp, Beihai picorna-like virus 93
  strain BHBJDX18546 hypothetical2
acctctgaactccctctgaagtttgtgctaaacaaccttgatatggtaccgctagaggttttcggacctttggcggcaatttcgctctgtgatgtcacttgacaagcaaggaatctgtcagcaacaatgacagtgtaaaattccccaagaactggcgacgatcctgaggcaaagcctataagacctcgtggtgaccctccagtgtcatgaatttcactttgcgaaaatcactgcacttactaaagaggtatgtgacatttcctctttcctttctctccttcctttcctggtacacattggttacgcaacgggcataactactcctcagacaactactgtccgtatcgctttgtgtactttggcttgctatttagcgtgcgtgtgccttgggcagccccctaaacacgtgtcagaggaccgctccagcctagttgggttactacggcagccacgcttgcgtggtggagtgtaaaactaacctgctcctacttcttcttctccttcttcctctacttctcctcctccttctactaactct

SEQ ID NO: 2099 - DNA, 538 bp, Wenzhou sobemo-like virus 3
  strain mosZJ35256 hypothetical protein1
attactcccgagaatccatggcttatccagaccatggcccggttgagcggcctgccgatgtaattcggcagcaagaaaacgctcccgcgccaccaacacccccagcaccagcaacttcggttgctccagctcaaaccacgccagcagttcctggcccttcagcccctcccactgtggccgcagatgtgacaactccctgtgtagaacagccggagggaaacgcgaacagggcctctgcaggtgtggaggcccgtggcaacgtcagccagcaaggaagtgcactgaacgtaagcgtttcagtaaaccccgtgtccaaaactcttttggaacagccggcgacagctaccaatggccagacatcgacgcctgctccgcgaagcgtagcttccgtctccacgtcgaccgatttttcgcggcgcaagcaaaccgcaaagctggtccgattggaacccggagcatcgaccgcgttgagaagagatgcagtagctggaagtgcacagtaacccgctttaaggattttgaagaaaatttcgaaatt

SEQ ID NO: 2100 - DNA, 539 bp, Ustilago maydis virus
  UmVH1 cap-pol fusion protein gene, complete1
gaaaaactatccccgctggtcggtgggccgatacccaatcggtctatggagggaattcaaatagggctctggtagtccgctcgccatcgccttcggtctttccgttatggaaggtttgcttacggtccacgtaggttctccgaccttgcgaggaaagattgcgctgctttgcagttcccttaactggggcgggttaggacgtcggtagggtgcctgtggccctgcggcaggcggatctagcacgtaacgtatcccttgccagggagagcgtgccgaattgctatgggttggtgtaggtcctcggttgtgtacggctcctcgtccacctacatcacacatgagaaactgatgacgacacaggcgtgtctaggactcatgcgtaactgctccgatgggatattaggtgtaacgactgcctgtaaagttaaagagttagcaactcgggctgaccagtctgccctttgcgtggggtgtggcatacgctaggacgtggacaaaaacaacaaactaacaacaacaacaccaagccaaaaagaaag

SEQ ID NO: 2101 - DNA, 539 bp, Picornavirales sp.
  isolate H2_Rhizo_33_scaffold_45 RNA-dependent1
ctaggaaggcctttttgtaattattcgtagttgcgattattaaatatatagctatatctcttgattgagaaatagtattctgtacttttgtatttcatttgattatgattaatttatacaaatagtagctatatacttgacaatcgtctcttgtagtttaattttaaattcctagaacaccttaacccttacaaaacacacatatcattaattttaacatttaacatatacgcgcatatcttaaaaatttaaaaataacttagtgggaactacttaaatatataaggttaatgttatatagatcgaagatttatacaaatcacgaaacctcgcaagggttgcttctattttagcattaacaaactgtattttcttaaagtaccttttgtatcaaaaacaaaaccgaccacacttaaacatgacctctgaacaataagtttcagaagcgatcggaaatgatctatcacatacgtagttgtgatagcagtttgggtgatctgacttcacccacccccccctaaaaactttttacaaatatg

SEQ ID NO: 2102 - DNA, 540 bp, Beihai picorna-like virus 105
  strain BHHK79817 hypothetical protein2
tcgcattgttgtggatatttggtgtctctatggtttgttcactactattaacgtgtcttttaggttattattttataagactagttaggaggacatacagttatgcatgcagaaaaatccaaaaacatgatagtagtgtagatgccttagagttagtgactgtatatcgatctactgttgactctcttcctatgcctgtacctttatcctgaccctcagtaccgcaagcaactcgaacaatctaaccaactgtgtggggtgcgaggttaaagtatggtaacatactctctcactatgaagccagggggagatttagtagagccaccgcccgccactagtgcggaacctgtccgtaggttgggaacctggagatcagcgtgccgaggtccataacctctcccagtgtatttctgtgtgaggcattggcaaagttatgggtagccttgctggttctgcctggggagctggaagtcttcgagcccagggggtatcgtcaccgcccaatcttgtgacgtctttttcaaacatttgtattctatc

SEQ ID NO: 2103 - DNA, 542 bp, Wenzhou picorna-like virus 2
  strain beimix73672 hypothetical2
gcatttgcatcactttgacctggcgaggtcagtaaatatacgctttttacccccggtgcagggttacattgtaccaccttatcgcagttgattacggcagagtcgaaatgatttgcttgttttattttcaattctgacgctctgcgatttgcatattattgtacataaacatgcgtctgtggagtgctgagtcgcacccatagtactattatagacttgctacaacattaaatcaaaattttacggtagaaaccgccaattcatctttgaaggaacagaatgtgtcttttaatgaccaatctgcgggctatgttcattcccttaattctgttattgattctacgagaaccaatgtggatgcatatgatgtggaattggggaattttttcgaacgtccattaaaaatagcttcgtatgagtggtcaacaaccattactttctttcaagattttaacccgtggtcattgtatttagagaatcctcgtgtagcgaatcgcatttccaattataagttgcttaaaggcaaacttcacgttaagttt

SEQ ID NO: 2104 - DNA, 544 bp, Riboviria sp.
  isolate ybw202shi01 genomic sequence.1
cttaaataagtataacgtaaaagccactacagttgatgacttgattcaggatatgactagacaagcatgtaaggcttttacgttatacttatttaagtgattgatggttgctggttgctgtgctgtaggggtcaacacctccaaagtaagatgagagaaatcaggcattctatgcccgttctcactgtatcttccttggaactgtttatcagtaactctcacacgcacaagacgcgaaaatagatctcacggaaatgaatcctttggtatatataacgaatttgctaattctactggtgttgatgatcaagttaaatcattaaactcaattatttcatcagatccatacagttttgaatctgcatttgttaaagaacaaccgtgtaaattgcgagttgtatcattgacttcaaaccagaaagattactcaaatttgttgaaaaccttaccggaagccaccttgtgtgctctattttcgcgtcttgtgcgtgtgagagttactgataaacagttccaaggaagatacagtgagaacgggcataga

SEQ ID NO: 2105 - DNA, 545 bp, Yongsan picorna-like virus 3
  strain YPLV3/16-0052/ROK/20161
tgtcaattcatttttgttgaataatcccacgtctttcggacaggtcagaccgaccttttctaatagttcaattctattaaatggaaattacaataaggctcatgattttatgaatgcgaatgccctaaacacgcttcagtatcctaatgtaccaccgcctccttatgttaaggattcaccctctctgctttcctctgcagaaaaagcaggtggattaggggagatgtcaacaatgggtataggaatgggcgtaggagcgatggactcagcactcaatgattacactaatatgaaaattgagaatcaagtgaggacgggaacagggcctgacggtcatgcgtttgatgccgtacagcatgcacaaaatcaagtggcgtcaaataatgctcattcagcattcagatcttcagcattgatgctaggatcagctctaggtccagaaggattaataggagctggagttctttcagcagcagattatgctctgcaagctgtaacacaaccctcagagaataccaccaatagcactagtggcgatttggtaa

SEQ ID NO: 2106 - DNA, 545 bp, Shahe picorna-like virus 4
  strain SHWC13603 hypothetical protein1
cgtgcatataatgtcttctacgacattatatgcacttattaggaaatctttgtacgcttaccgcctacgtgattttcgaacacgtaacgttaggatttgcttagcatttacctggagtactgtaattagttttgacactatgcatgctgtttctacccccgtcttggttactacaccaagcagccggccttttagggcggttaccgttattatacgggctcttttgagtatgaaatttttgaagatttttaatggatgaaaaatcagctggcgggcatgccccgctaggacaagacgctctagctattgagcgcctggctatgaatgccggaatgaggtacattgtttgtaccaagaggttttttagatgttgtttgttagcgataattatgctttcgaaatcagacatcctgacggtgcgaagccgtacgatacaacctcaaggggtgcgtgtcggtgtccattgtattgaacatggacatacttgtttccgggaaacaagtgtcgaggactatctcccctcgagctagcttgctagtaatgtg

SEQ ID NO: 2107 - DNA, 545 bp, Cylindrotheca closterium
  RNA virus 03, complete genome.1
aggttaaagactccctgggggtataccccagggagtctgaagatatttgagcctcgatcggctcagatttagtgtgttaaacacttttataaggttatcaatttaccaagtatgagtgttatacactctgcattggtattaattggaccttttaatcttttcaacaacctaagtatcgactgtgctaaactagcagtcaaactatatgttattataaagacccataatgtctataaacttagaattataaacaattattgtgttgggactttgttggtcccattgtaaaattatttcatttgacggaggtataataagcctaccagtgctccgtctacagctttaaactttgacgcgtattttatctaattctgcgcaagattgagtcaacgtacttttatttgtattaaatttgtaaaaatgctttgatcgaatcgatcttcgtgcagcatttgtgtaaaagcacgcgccgttaaaactctacgagtcattttggaactcttgactatatgcaaggcaagctgaggtcataaaattccaataca

SEQ ID NO: 2108 - DNA, 546 bp, Bipolaris maydis botybirnavirus 1
  strain JZ11 segment 1, complete1
gcaataaaaggcgaagccgggaggcttctattttattgcccagtttttcatctggtcaaaatgaagtcggctatctagctagcggagagtggaactggtcctcttcgtacgaaaccaaaccgagcccccacccggtgaggtaatccagtggcaatgcgtgggggagacctcggcctcggccgagtgattgtgcagaacgggtggtgatgtcagcaatgctcaccgtacatgtccgtgctagggagaatgtcctgtatccagcaggaagatatcccgcgtgtaacgactgcaagcactttgtctcctacgtagaacagtctatcacctagcggcgctgatcggccgatacagtaggtggtgtgtaggcttgccagcccaacccccgccacagacatagcttccaaacaattacacacacacaatatagcagagtgagctaatccagcagctatattaacacactacagtagatcaacttttgaatactgttatcgatcaaacacaagaatccatataccaatctcacaaattacaaaacacaaaaaa

SEQ ID NO: 2109 - DNA, 546 bp, Beihai conger picornavirus
  strain BHFishC188617 polyprotein gene,1
gggacaaccccacagctggtacaaccattgtgggttggtctccaccctttttcaaccgtggcaacttcggttaaagttgcaaatcccccctctccctattccacctcccttactttcactccccatatatggtcccagattttattctacctctttatatttttatttagtacagtggtggtgaattactcccagcataaactttgctggatcagtgttcatcaagcatactaattactaatgtactgagctatactattatctggcatctcacctggataaccggtgtgaccatatttcctaggttgcctccctatgtattttgtagcacctgtgcatctgcacgttggggcgacaaattgtaggtttcctggcacgggtaagaattgtggaaagctagtatgcagttaatgcaagggcgcgtttttcgctaccccgacactgctaaagtttttgggaggggtcccttaaacatttctagtattgagtgatagctttgcggcaggtcaccacaaccttactataaataaacctgttgaatctcac

SEQ ID NO: 2110 - DNA, 546 bp, Changjiang picorna-like virus 12
  strain CJLX29956 hypothetical1
aaggggtcttaaccccctggttcttttgataaaatagcaataatgcacaattatagttgttgcaagattgttgagaaaaacattttattcaattcagtcttaattggcggataggttggcatcccgtcatgcatttaaatgcagatatgctttccacattttaaagtgtggaaccgatactgtgctcttgaaaaatggtgtagagccgcgcttacatttgcaggtgtagcgtgaaggaacacggaccaccatccttagcgttttaacgctgaggcgaccgcggccctgaattaatcagtgtgggctagattatgccactgtacaacacatttacaaataaatacaataaaaagaaaatttgaggtccaattagaggacactaaaaaatatttgtttatttaatttaaataaaccaacccccacttaaacctttgtgggaagggaagcttctgcttgagttgagatacctttctcatttaaaaaaggcgcttttattttggacatttttgcgacacaaaaagaaatccattttatgaaaacacatca

SEQ ID NO: 2111 - DNA, 547 bp, Wenling lepidotrigla picornavirus
  strain YXMC111438 polyprotein1
ccttcgtgggcaacgatcagcacacattgtgtctgatcttggcctacggagtttacctttttgacgtttgatagtacgacaactattcattgtatttgttactttgttcaccttacctattgtttcattccctgtatatgaatatgaatttatcttaaacggttattccatttgtttcaaaggaggatggaggctatcgagcttgcatggaattgcaagcagtactttagtcaagccacttggaacgaatggtttttattgtttaatatttatttatatgttagtatacactcctagagttctacattgtttgtatgaagaatgggggaaagctacttgttagttagtaccacagtctttttaagcaattccagtagactggtatttttgaggaaaggtggtatggactgaattaatgggcgcattttttgccaacccggagagtcctaaagttatttgggggggcccttataacatttccactattgagtgatagctttgcggcaggtcacctcaaatctactataaataacctgttgattttcac

SEQ ID NO: 2112 - DNA, 548 bp, Picornavirales sp.
  isolate H2_Rhizo_Litter_8_scaffold_2011
gtttttagattttataaaaaatttcgaaacccgcgacgtttttgacgagatatgtgatttaagacacttactaaagggtttaaagttacaagatttaattttaaaaaaaaacttaaaaaacgtcgtttaaggtcacgaaaaccatctcgtttaaaaattttaaaacaatcacaaaaataaaacaaaattaataaaacaatctcaaaaacaatataaaatatcactcttgtagagtgtaaaaatgtaagtcggtactttaccgaattgtggatatcaatcttatccaaggtgtatttaaacacgtggcttttgggttttgtcgccctagttgtcgtccgtgcgttccaccttattcaaaccgagtaacaagttagttcttgtaagggctagttaatacctcctccaaaagagtttgtagtaacttgctagtacctgcttgagccgtatcgtgtaaaaggcttgtttgaatgtattcaccaatcgtaagatttatttctgattggtagataaaccccagaccgtttccaatttaatattaacccaatatg

SEQ ID NO: 2113 - DNA, 549 bp, Avian metaavulavirus 21
  isolate APMV/dove/Taiwan/AHRI33/2009,3
ggataggtgatccacctggaattaagctggttgattaagaatgtctgatacaacagagatcaaattagttaatctaaatgtgctagggagatagtgcaccaaagctataaagttgcgtattttatcgactcgcacttaattaacctgaaaccaggaatctatctttaagctatgaaattatgtgtcaaaaaaactaatatcaaattaaggagtatatccccatacacaacaagcattaataataatcatcactaagtatatagaaatcgggatcaacaatttgatcttcgtgagacttaactatacacaagattaatattaattcatgagttgactactcagtgttgattaactcttttggtcaaatttaggtgaagaatcaatataagacagtaggaactagattacaaaaaaatgggggagaacgtttgacagggcgcgtaatcagacatagcttgtctgtgtaagttttaagagatacgcggtcgctcaggagtacaagagtcaaagtagaaacagtttaaaggacaggacacggaaagcagaaca

SEQ ID NO: 2114 - DNA, 549 bp, Astroviridae sp.
  isolate ytb090ast01, complete genome.1
ttttgcattctgcaaacttcatcctcggggtcagggtttcccggcaccactcctccacccattgagtgtgtccttttggtgataacgccgccatttggttctcacactgtaggaggaggtctgtcatattgacaccgtgtgctgataggattgttcgagttttcccatagcacatgtgttgaatttcagtgtaagtaagttccctggttgatggtttaaagatgtcaaagtagcatccctcaatctgcgccgtgcagtcagtctcaagagcacgcgtttctccagctaggaacccaagcaagagaaagagaagtagcatgcaggcaaaggtccaggtccttgatgatgcgcgcacagccactgacacggcatttttgctatcgatgatggcatttctaaggagttttacctcctgctgatggtgccgtatcactctgtctttttcctgcagctctttctccctttccttcaagagctcacgcaaccgcatgttttcctctgtcttctgggatgattgtgcagcaaagagccttatcctaagctggttgg

SEQ ID NO: 2115 - DNA, 551 bp, Feline morbillivirus
  strain 761U, complete genome.2
actataacaataataaacagctactaaatagtattatgtatttaagtgtacactgataattgcgaataaaatacaccagattaataacagtatagagttaagatctaattgatatgtgggttggtactcgatcatttattagctctactgattatctatatcttgaatcaccaaatgtaagagcatcaacaggtaataagttttggattgctagattgacacttaattctcagaactagaatacccagattgtcaaacctataaccttgttagattcattaaagttagattcttgtaatgttgatcaattatcacttgagcaattataaaaaactaaggacctaatgtaataggaacccaaactccatccagtgagctctaaatcgccatgcttgaatattaatttatctagggcctgtctaactcagaacaaagatcacaactagagtctaaaggagtgggtcaagtctgaacaattatcaagagccgagattcaaaactgattcctccttaaactcagaaccctaacaatatatcatccactcaacatc

SEQ ID NO: 2116 - DNA, 551 bp, Eel picornavirus
  Eel/31945 RNA, complete genome.1
cccctggggactggcgcttacgcgttagtttccaggatggtcttttcaacccagctatgggttaaatagcaacttttttatttttccagtttcactggactgtgtattggacactacacagtataataaaaggtgagtctttctcaccactttcgtgtctagcggttcaactcatttaggcatgtttgtcaatgtatcaatattagttgaagtgaagatttggaatcacaccacaaccccagtggtgcccaccataactctgcctcggatttcctccatagtaatatggaccttggtagttacacggtgttgtttatacatgagtcttcatggatcttttattgccgattgccgaacccctctatgaccactgttccgttaaggttttgtaagtctgctcccatgtaaaagccttggtcgtgcttaaatgccttcccgggtgagaggaaaggcctacttagctcacgcggtaggaacacctgtcatgctccgacacagggacttatattgccgaaacccattttccattttaaaccaactactctctcact

SEQ ID NO: 2117 - DNA, 551 bp, Beihai levi-like virus 29
  strain BHZY57867 hypothetical protein1
ccctgaccgggggcaagaacgcaagttcacctctggaaacacccttacaaaggggtcgtcagtgtttggcgctcttctgtgcggccaggggtccaattaacagctatttactgttagacacatttcagtgtcggcatgtggatggcattcgcgatcgcacttagcctaaggaggttacacctgtgcgtatttcacacaagtataatcaacctctttggttggagtgtcggtccgataaaaacggcccgctcgagtacgctcagttacctattattggcgacggcgcagtacctgatagacttctgccgtacaaggttgcgaaaccttatactcgtgcagatgtccgtctggatcacttagttcccgcacctattcccgctggagttagcttaattgagcttcctacagcagaacaggttgtaagttctttgttatcgagtcggcccacgttggcatcgtcagtatttcaacctttcgttgatacagctggaatccagaactcagcattacaaaatgctattgagtatggaaatatcttgttactcgtctct

SEQ ID NO: 2118 - DNA, 553 bp, Wuhan arthropod virus 2
  strain WHSF0 hypothetical protein 1 and1
tacggttttaaaaccgtacgcaatatttgccatctagctcctgatgtaaaattgagcattaatcaagtttagctctctactataaattgagtaattgttcgtgatgaaatattcatgggcgactctagctctctagtataaattgagcaatcttttatttagtgcttattgttttattgaagacgactgatggcatacggaattgtacttttaattaagggttagtatcctaatagtaaccatgataccgaataaagtaggtccaaagcaaagtgaaatttgtggaggccgtcatggcaatgctattagaactgaggatttaatgcttgacaagcgcaatatctgagcagatagtgtaaaaaatagcaacaatagttaaattattttacgatatgttatgaatatgttagacatgtattatgattcataacctctattcttaatttaactatatccaagtctcggtggatattggattctgttcgcagttaaccgtatttttacattgcccgagtcggagcggtgatattgtatccggactacttaatacaaa

SEQ ID NO: 2119 - DNA, 555 bp, Miniopterus picornavirus 1
  strain Henan-Ms56-1 polyprotein gene,1
cgccttttaggctgtttttccacggctgaaggtgaaagaagtcgttacccgcctgcctacttcgggccgggctagtaacatggatactaccctaagtgtgtgatccgggtgaggttccccccctccccagaaacttgtgatgagggtcaccatcccgcatacggcgacgtatgggtgtccctgcgctggcacaaggcctgctcctgaaagggacaggcgcgcttaggatgttgaagtgtgaagacccggactgagctaggtatggagtcctccgccccctgaatgcggctaaccctaaccccggatctgtcgcaggcaatccagcctgaaggcagtcgtaacgcgtaagtctgggatgggaccgactactttggggtagcgtgtttcctttttattttattatggcgtgtatggtgacaacaatagggcattgttgttatcatacgttcagcgccttcctagctcttctacagtggttgataaccgctgtttcactgatccccagtggaatttcttggatttttctcggcttatttttaggaggatttgcttaca

SEQ ID NO: 2120 - DNA, 556 bp, Shahe narna-like virus 3
  strain SHWC01c3372 RNA-dependent RNA1
gtcagcaattccctctaatagggccgaaaccttattagactacttagtggaacagtacaactcttgcaagttgctgtaaagctgagttctcctgattttcaatcaacagaaaagagcctcattggaacgacatacaaagcgtaatcgttcgaatcaatgtcctattttcgacaggagacgtgtaagtgataacacgtgccagtcacgaccatccggtaacgacagagagctattacaaacgaaatgtattacaaatagtataattaaatctattgatacattcttagcactccatcatcttcacatagatgacgtaaattttaattcatactctaaaaaaattaacgagtatgttgatgataacggtataaaaccgttaatagacagttttaaatatttctgtttttacaggttcaataagtttattggggatcttgatacataccccaagcctgataattatttagacctccaccctaataggcatttggagaaatatctaaacagaaaactgtcaagtaaaacacctaggaactataaatttttagtgtcatta

SEQ ID NO: 2121 - DNA, 557 bp, Tacheng Tick Virus 4
  strain TCRP-1, complete genome.1
gtaaccaacatcatgagaggcaccccacctacccatgcggcatcattctctcattggcaccctaatctgctcgcttagcattttgtgtacctcgccattctaaaccatactcattggggcttcattggtttaaaaccatgccgacacaaaaattccatttttgaggtctggactctctcccctcctcaccccaagagactatctgactaccgcatcatgtccagccgtctccccccgggtcggtatcgtcggcagacgccaggggttggccgcggtagacgcccggatgcttcgtcggatagcacggagtttttaggggccgggggtgacatagagcaactacgcattgcggtacaaagcctgtcggaacaattgcagagtatagaagcccgcctcgtcacggtggagaccaaactggtgcatctttacgacgttgccgtgttcccacagcggcgcaccaggccggatgtggggaatcagttaccaatgggcatgtagccgacacaaaaaacctccaattggtttaaaacatcaggatctgtcctgatgtttagacc

SEQ ID NO: 2122 - DNA, 557 bp, Hepacivirus J
  isolate Hepacivirus/RMU10-3382/GER/2010 polyprotein1
gccgctcccgaaagggagtccggcgcgtcatcccactccgaggagtggggtggcgtccccgtgtgccggggaaccatgaagcctaagggcatccacattttagaatgaacttgaagcttcgtttcgctggccggaaagtcctgggttcccatggccagggttccgcaggtgggtaaatcccggtggggttccatccaggatatacggcaggcgggcgtagtccggcggttcggacgacgtgtgggtcgcctacggtggattgttcacaggatgggcactccggtgtgaataggccccgtcagggtgcgctgacgttaaactcaggccttgcctggtgttcggggaggattgcagggccacgccgcctctaagggccgtatggcacagtacttcttcgggcgggttgtcaaggccctccaacgcgacaccagtgcctcggcaggcatggggccacccagctcggcgtcccgcacacagacggcgtaggggaaaatcagcaatgtgaccccgggtggcattttccttctctctacttccatgcatgatcaaccgcaatc

SEQ ID NO: 2123 - DNA, 558 bp, Beihai picorna-like virus 55
  strain BHBei68636 hypothetical protein1
tgggtgatgagcccggtgaagatattatattgctttttagttttattaggtagttcagttagtttttctaactgttcttaacttttactctaataagtagtatctatcttcattagcaattcatgaagtgatgtttaactcctaccacctttggtgttagagggggattcttactatcctctttaattagtaagtttgtttgggttcaagccccaactgtgaaattagcttgtagtacaatatattgaggcgtgtgactgaagaatcacacaactcgggaagtgaatacttccctctgataggagtagcagcctaccagagtattgcttatatagtttgcacgacttgaaatttccttttcctgatcgttcccgaaacgattcattaactatgagggacgtggtcctagagggactaccgtatggtaagacgatagaacgttaatctaaaaccttcccacgttaagaccaatgaggtattgttcctataccgtgacattgagtctttgacgtgtaataaaagtagttattttctaaagaggaaccgtggagacacatt

SEQ ID NO: 2124 - DNA, 559 bp, Plasmopara viticola lesion associated narnavirus 39
  isolate1
gcctcaaaagacgaaatcgcacgacaaccctagggttgacgtgtggtggaacgcttgcgaggcggtacacgggagtcggggtgccatccgtcctaagggacgtggggccacccgacaggtactccctcgcaacacgcggcagcgtgttgcgttcctaaagttatcccccccctctgctgcccacgccaagttgttaaacttggtgtgggaggccctcctcggtgtcgcggccgcctaccgccctttgcctacctgggggagtcgtttcggtaacaagcgttgcttggaacttcaacggctcgccctgtggttagtaagggcggcagacggtcaagggatcggagcgacgatcgcgtggctaaaaggcgcggccagtggcgcccgcaacacttgtgttacaggcgcggccttgctgccttccacgcgatttctcgtcaggaagttgctgatcggcgatactcgcaatgagtcgctggaccagctgtccttcctttcccgatcccttccggaaggggactctgttgttgagtccaggacacttgtcgctcaccgcgacaat

SEQ ID NO: 2125 - DNA, 559 bp, Totiviridae sp.
  isolate ltt164upi1 genomic sequence.1
tattcatcaaatatatcaatcgaatccaatactttatgttcggttacaggcggtgaaacttgtaaaccttgataaaatacagaaccagattgtatattacaccacttccgttttggtggtaaaggaggtggagttggaatatacatcttaccaagattatgtttagacattttagctggttgggcagaaatgaatgtatatgtcggagcatagcagcggaccactatacacaaacatcgtatattgaggtttttctctagtttatcgttgatatgagagctcttgcgtcatacgtggcgtctgggtagctcgtactcatgttaaattaggaatcgttcaccaaaaccaaccctctttttaaacccttggaaattttatctgattctaagtaaggaacttagttaccaatgatcttagctgataataaattttccacaagcatttagtttagtgcaatcgcttatctgggatagcaacccgttagcactcaacttccaattctcctatttctggtttaaagccagcatgatccctaagcgggagatgattgtagaaatag

SEQ ID NO: 2126 - DNA, 562 bp, Sclerotinia sclerotiorum umbra-like virus 3
  isolate BCS17_DN251
ggggaatctggctcgccaccagcctcaagctcttcccacaaacttaaataaaatttaaatttaaactaggcttaaactgaaacttaaacttagacttacacttaaatttaaattttcacggtgagactcacactacctcacgtaaaacaaagttgtggcgatgtgcgtgtacagtgcacgcctagttaaatcactgggggacgtacgagctgcttgtagacacccggcagcgaaataagggtgtagcgcagctggcgcaacgatttgttaaggatctgacactggaaagacagactctcatctaattcttatccgtatgctgtgctcaccctggcgggggtttgacgcgtttgcttagagcaacatgtggacgggttttcgtggacccaggcgccgtgggcgcaagcaaggtaagcttctgccttaagagggcccccccgcccggggggtgatttagtacacacggtgtgtcttcacaaccgcggcgtgtggcacgtccagttttcaggccagggtacttttccttgatagatggaaaaaccctccactcccagcacacacg

SEQ ID NO: 2127 - DNA, 562 bp, Yancheng osbecks grenadier anchovy picornavirus
  strain XFXMC154601
ccttagggtctggaatgcgtcctttctgggcacttccacaatcctaaggtaattttcaacgccagcgatggagcgatatccaaagaacctttatgttttagttcgtcttgtatgtttataaaatataaaattgggattagcaacccacaaaaacatttttgttattctcaccacatgagagggtggttaaacctcttcgtaacctatcttgcttgattggctacttgggctagatttaggacaacctctttagcaagcctaaattactcctcgtacttgcacctggtaacaggcgtacctggaggttacggtggcgctaacttggacttctcgttaattcgtgcaagtttaaatgatgcctattttgaatacaagaaagtatgatagtaacttagggcgtgaagttccgcttaacataaggcagtataagtactaagataaggtgtaagacctaccttaataactgttgtcttttctcatggtctttccgtgggagcccttgctaggggtaaagttaagtattctcaaataatttttcattcaaactctttctctctgtttt

SEQ ID NO: 2128 - DNA, 562 bp, Beihai weivirus-like virus 17
  strain BHZC37426 RNA-dependent RNA1
cgcgtaataccttgtttcacccccggccgctgccgggattttaataagcgtgtttaagcacctacgtcccaccttcgggtgtaaattacctgcgatctgcgacacaggggcgcagggtcgtgcactagtcgatcggtttgggcgggccggtcgtcgacgacggagtgctgccggtgcacgataagatggtccaggttgcaatgatccacgcgcctggtaggggacgcgggggggggttttctttatatcgactccacacgacccccccttggccgggactgtccctaactccacccttatgcctgagtagccggggctagtccggtgaacagcctgggaacgctgggaagcgatacggtgagggcgctaccgctacccgtctgcagcggtttctgttgtgtgggcgacagagtaaagtggtagtttgcgcatgtgagggtcccgaagcggagcggcctgcgagtgcagggtttagccttacctgcatgaatgtgggcttagctccgtggatgttccgtttggctcgcacggccaggtggataatagaccgcaaggtcttggc

SEQ ID NO: 2129 - DNA, 563 bp, Picornavirales sp.
  isolate dwb062shi1 genomic sequence.1
tggcgagcaattgattaactcgcccgcactatcacgcggattgtaagttcaaacggattgactattatgcggacctctagttcaaactttttgaagcggactattggttcaaacagatattatttcacgcggatttacagttcaaacggataagtgtgcttagatcaccttgacagctggaaagacagcaaacaacaacctttacattacttgatgcttattcagtaatggcgatgagaaatctcgtaatgactttatagagtaaagggcggaaacgtgttttactactaggagaatacatgcgagtaggttacattaggagttgattgataacgagtcctttgatggcactagtttatttcgtgcaaacccttaggataacacatggtaacatgtgcctttgggcagagctgattagactggtgaataccacaaagtgaattgtgcgtcgagccttttattgtaatatcggttactagcgttaacgaatgctagagtttgttgtataacactgcattgcggctaaagtaagtgtgagtgtttgactttagagtagtttcaag

SEQ ID NO: 2130 - DNA, 563 bp, Wenling jack mackerels picornavirus
  strain LXMC375591 polyprotein1
gcacggggtttatagccccgtgcattgatttcgacggcaagttattgtcgatagagtattacatacgttggatattaccattccttctaaggaggtctggtgttgtctttcatatgttttatgtcaaatagcaaaattttccaattaccttttacccacattttatgtttgtcttttacggttctctccgtaacacataattgtctaagtgtgtgtaaaccttttatcaggaaatagagaacttttgattgcctactttatattaatatttagcgaaatatttgcagttaggaatagttcgtcaattagtactgctccccgtaaggtgaactttttggcatgcaagtgtgagcagcaccttgtccttaactgtatttatagtagttatctaaattgatgtttggtaaggttgtcttaaggagatctgattataaggcgattggttgacgttacaactaacccccctttttctcatagcacaatttacaggagtatcacgtgcgctaccttttacctattgttcgttgtttttcatattgccgcgaggtgcaagacttcctaat

SEQ ID NO: 2131 - DNA, 563 bp, Beihai picorna-like virus 24
  strain BHZY60459 hypothetical protein2
tttcttctttttggactggaagaaattttgtgtacatatttataagtcctttttgactgccgatgtctataaaagcctggcgctagctgcatctagttgttacctaagtaggaatgtgcctttatatattagtgatttagtgaatttcatatatatttatcgttttgcatatgttttcataccctgtatatatttgtatttataaaaccttactctcattgcgtcattgcttcacgcgcaatttggagtctaaacatagctgataagcaggtaaaacattttcaattattacggacagattattgccatgtcttaaacaggcaattagtgggggagagcctcgaaccacccacattgagaggacacctaccgttcatgttcatcagacaagggacggttccttggaacttgatatagggagacatcctattgatttttccaaatcagacatagacgctatttcgcaaacaggaccagtagatagattggtaggattgaccgggaagtacacaccaacctgggcagtgcaaaaacctcctgatgttgtagttgatgtcagttac

SEQ ID NO: 2132 - DNA, 565 bp, Rudphi virus 5
  replicative protein and structural protein genes,1
actgcgtacgggaattccccgtacgcagtgtttgcaagtagtttggcatcaaatatgcccttatgtagcagagaaccttctctcacgaactacgtgttcgtgttatttagctcactccctatgtttgtctatcttcaaaaccatattctaagtatgtgaattactaactcacaccccctttatgtatttttaatggaaaagcaaaacgacggttatctagcatgttgctagacactccgtggcctattgtctctcgagactctaggcaacaacagctatgaggtcgccccctcttagctaaccttatttttattaggatggtaagtcctttgtttatgtaccttttaaacatcaatttaccgattactgattcgtccttgacgatcactctcacgagtgtcagaattatacattcagaactaagctctaatcaagagcaaaattcaactatacaggcttttagttgtcttattttataagcgatcagtgaaatatcttttcaggttttagtatggcctttagttaatacgtttcacacgttaagaactataaaacattaccaacc

SEQ ID NO: 2133 - DNA, 565 bp, Plasmopara viticola
  lesion associated mycoophiovirus 5,isolate1R
caaaaaacttgactaaatatcgctaatcctaaaaatgactcgagtgattgaatttactattgagtttcatgaggatgacattggagatatcagactactctcttactactttccagatgaaactgactctccaatcacactgactccagagatgattataaaatcagttgaagacaaataccctaacatttgcatcgaacaaacactgagatatgaactaatgcagtcaggtgatctcgtagatgcgagagcagacgatgaatttgaattccacgaagatcatgtgatctttaaaggtgaggaattcagttctattatgttgtatctatatgtctctattgatgaagaacaggaatatgttgactatgaaagacgcttgaataccatttgaatccttattgacaactttatgttttatttttatttatgttctagcagtatgagcatcatttgaaaaaatttgattaaacattttgattaaaaaaacctatttgatctaagaaataaagatttaagtttcccaaactttgaacacaaagcattttacaaccccaattcttcaatc

SEQ ID NO: 2134 - DNA, 566 bp, Beihai picorna-like virus 20
  strain BHJJX25607 hypothetical protein2
tcctcataaaactagaaacccagttatgattctgggtgctacggcgtagcaaaaatcatgtgtatatatggataccaagtattatatgtttttgtatgtttgtgcttattgtgcttaggctttatacatatcggcattccacaaaaggaatacacctttttaggtgaggtttcgccagccaatgtaaaatataccactcatggcactgagcaatgctttgagattgtaaaatatcgcttactattaataatttgtataataaaaatgtgagagtaaatggatgtgaaattacctatgagcagccaaccattctcgagattttatcagatcttaaaaagtttggaataaatcccaaccgatttgataagttgtggcgtaaaaaccgcaaacatttaggtaaacgggtcgaatcttttgatggtgtaaccattccttcacaaaggattgtttatactaccgatatttctaccttagagccgcatagtgggactgaagcaacagtttcaacagcggacgctgaaacaaagactgccaacttgcaattcgttgatgatgttagtccacat

SEQ ID NO: 2135 - DNA, 567 bp, Plasmopara viticola
  lesion associated ambiguivirus 1,isolate1
gtttgggttcgtcagttggaggctgttttgggctcggcccctggcatagtcggggctttcgttaaagggcggtggacaccagacctcccctctagcgatcgctccgtcggtgctaaccttgccctcagccatccgacaggtggtgcaaagatccttggtgggggatctgtccgtggcggcactgcaggacaaccgcgtagggaaacctacattgttgtggagctatctgatggctccagggaaactgttttccctgaactgctgggtcgtttggcatcttattctcttctcagagagagaaacgccgatcttgtttctgcccttcgccttcgggcgcaggagtggtgcaagaatgctgggctttcgagcacagtgtcttggtgggctgtttgttcagccatcaagttggcgtggcccgtgtcggagttggaaacctcggtttccgacgtcgtaggggtcgggatgtcaaccacttcttttcctggtctggcttaggccagatcctttgaccttaaggggctttgctttggtgaatgtcccggccctcttcttgagggttccaccctg

SEQ ID NO: 2136 - DNA, 571 bp, Picornavirales Q_sR_OV_022
  putative polyprotein (Q_sR_OV_022_gene1)1
gcgaggataccctcaccggtatcttcgcagactctaaacaatctatacagcgtgtgtatacacgtttgtttgatatgattgttcatttgatttaataatgttttattgcctcagagtgaaatctgaggtttggaagcttacatgcttttaaaatattcattgccaccatggtttacgcaccataggtggtttgtttcattgaatagttgttgatttctcgtataaaaacacacaccctccaaagttggaggtctggtttctaagtgcataagcttggaagttaattgtgtggattgtggccgagaagctgctattgatcttgtttaagatggctcgatcgtaattgtaaaatcatctctctatgtaaatagtgaaaattgccaaaacgcacgtaaaacacattgtcgtgttagtcgtggtctacagagtattgtaggaaagataggtttgctcagcctttaaatgagatgatggtgtaaacaccccctgtctgacacagaggaagaaatgtcaaccgtttagtgtagttcgagcacttattatcgaatcggtaggtccaccgtaaggacat

SEQ ID NO: 2137 - DNA, 571 bp, Clownfish picornavirus
  isolate CFPV-2015, complete genome.1
tagtgacccaggggggggacttgcgagtccacctctgaggaatctatttaacgccctggactagcgtatagtccatgctgtcgttttgcacaaaaacgtttaaatgtttgtttgttattacatttgcacacatgtaactccaacacaccctatcctaagtacattacctcgtggtattatgatactggcagaaacagaagttgttggagtgaccttttagacaacagtttagaaagtggcgggagtatcgaacccaagcgctagattgttgtatattagctcaattcattcaattatgtgactgtacatgacaaataccattagaaatcttatcaccaccactggttagcaacccagatgtctttggcattgcacggtctgctataaggtggaaccatggggtaagcttcgcaagactaagatactaagtccaagagtaagggttaagaatttcttccctgtggcagtaccactcaaggatgaatggtcataaggaggggtcctatgactgaggtattataggtgatgaaccagcgcgcatggctgtcttctagcgaagtaaaataaatat

SEQ ID NO: 2138 - DNA, 572 bp, Hubei odonate virus 2
  strain QTM74832 hypothetical protein gene,1
gtgcgcagggtttttatccctgcgcacagctttactgatcatggtgattttcttgaggcatatatcggcacctatgtagtcactgaacttttgtgttaagagagtggctttatcacaatgagtttatctgcatatttgtcgttattatgtcttccttttgcaccaagatcatttctagtgtgaatgaattatgtatgaatgtgaacaaaaatatagataacctaccggttctttcaatttcgtattctttatacattacatacttgtacctttgctactattttgagccttcggaaagctctttgagtgggtagtagtatatgttaccttaatgctaatatgtacgggacgatgtatgtccttacagtgcttgattagatgatagtgatgatagatatcactgcgtgattcgttggtagagcaatactgtattgcatatgatcccctaggcggatgagcattatgtcgtagtatgatagatctttattttcttttgaagttttatacgtttaagggttttacgttaaaacctcagagttcattgcttatattttatattgttcattataaac

SEQ ID NO: 2139 - DNA, 573 bp, Hubei picorna-like virus 78
  strain WHSF6879 hypothetical protein 11
ctgtaaggttactcccttacaggttctttgataatatattacagctgatttgatatcttacttgtgaacattcagatctgttttaaaacacttttctgaaatgcttagcttgtattttattattttcagtgtaactatcatctttatctggtgatgttgctctcaaattttgttaaatttgttagttcagcatgctttttatcgtatggtttttacagtaatatatttgatgagaaaccttttggaaaaaacgtttactttaatgtaaacagtttaattcatattcatttattaatattttcattttcttgtactttgtacattcattttcatattgtcccttggatttaaaggacttcttaattgagaaacagctctctgcggagagtgtaaataacttatctggggtagtaacccgttaacagtttcaatacattttgaatatccttaaagtcttcccttcccgtatttaagctataagactcggcgagttccgacgatggcaattttgttttatcttttcttacggagtatgattatttgctttttaatgatagtagtaacttcggttca

SEQ ID NO: 2140 - DNA, 573 bp, Cucumber mosaic virus RNA3
  strain fly60335 protein 3 and coat1
gtgtgtgtgtgtgtgtgcgtgtgttagtcagagttctttgggggccacaagttctcggtcacgacagccgaccggccttctattggcaggccggcggtcagggacgtagcatatcaggggcatcatctcccgctcgctcgccccagaggtcaacccgcctgacggcggaatcggctcaacggggcgatcgggacgattagggtaggtagctctgcttccgctggactcgcgtgccgcagaaggcgaagagggggcaaacaacgacctatgcaccgaccatatccgaccaattcacatcccgggtacgcgactccgggaactcggtccacaaaatagaatttcacgctcgtccctagcgactttctgaaaaccgaaagtcttccgctgggatcgtgcgggggcgtgtaagtggggcggtgcgtgttcttaagttggtgttaacagctgcgccgcgactatatgtaggtgtgtgtgcgtgtgtgtgtgtgtcgcgtcgtgtcgagtcgtgttgtccgcacatttgagtcgtgctgtccgcaccttttcttttcagtgtgttagaatacccgaggc

SEQ ID NO: 2141 - DNA, 574 bp, Wenzhou picorna-like virus 7
  strain shrimp14504 hypothetical1
gattaagttactttaaatggatttatcaaccattgtatttttagtatctttcctccttgttgggaggtaaaatttgtggacttgatttagttagtatttagaaagttttcgtccaacttttgtttgatatactgtgccgtcatattcttggcacaattaagggttgacaccccggtaattgctcatgaattgataattctgagcaactttgtttgatctcttatgtaagagttatttactccatagaagagtttcatgttggtgatacgtatgattgtggacccgtctcgtagggttattttaaacacatgattttaacccagtttgttccggctgggagtacaaaacaagacttctgagggtggcaccgatgaagagtcttgagccataattgaaataaatctatgtgaggctttgtttggattgtttagtaatctgtacgcgacgtttaaggtattcaaaaaccttggcttcggccgtaagacgtgcatgatcgctttacatgaatttcattgttaatttcgcattagagtgatgctttgttgttgagcacgcacttttattctttatcgct

SEQ ID NO: 2142 - DNA, 575 bp, Ginkgo biloba picorna-like virus
  strain pt112-upi-3 genomic1
cccagcctgggcacctttttaggtttatggttagcgtttccctttaacgcgaattctagtataaggttcgctggctttgccgcaccttatattctctctttcctcttattatcccatctagttttcaatcttttcttcaactagtcactctttctaatttttcccttctattttgggggcagagtaagtctgttacctgagtggatagaggtacacctctcgagtccaaaccttttctttttgatagtttgatcgcttcggtgggcacatagtgatgagaagtaagcggtcacaggaggatacaagtctagtttccatggtagttgagaagttttgagatcgttgtgatacgtgccctacagctgggtaggatgtccgagtggacaccatctcgtggtgacttcaatacattgcttctggaggacttggcttatggtgttggctaacaccggaaaatagcatatttgttgggtagaaacttgactagtgttagggtggtggtaacgaacaaaccctttgccagtactatatgtccgtgcataaataccgatttttgcccccaaaaccgctttttc

SEQ ID NO: 2143 - DNA, 575 bp, Diaporthe ambigua RNA virus 1
  complete genome.1
gggaaatttgtgagattatcgccctaaaggataactctcatgcgggtccgagtcccgcctgggaacgatatgtcacgtcaaatggtggtagggaaaccgttgaaccaccagaccaccctggtccggcttgtaggctgcgtgggctgacggaacagcagttggcgaggagctgcgctatgtaataacgggtggcccgttcctagtcatcgtcgaggggcaaataatcgctcccacttcggtgtcctcgatgtgaaaacaaactcggttttctcgcgggttggttacctgctccagtgagtcgattaaatggggattagtgctgtagggccccagccacaggttcggcactggtgtaacaaccgtcacccaggccagggtgtatgttttggccaaagacacctctagttccctgccattccggggaaggcggttttccgctaggtggagaaccaggctattctgtttgcagattggtgcgtgttagcctggactgtgggtgtcagtcaactcacctgtgagagatggtcatagatgcctcagtttaatcttagccttgaccgggtcagcgctccctt

SEQ ID NO: 2144 - DNA, 578 bp, Agaricus bisporus virus 9
  isolate AbV9-003, partial sequence.1
tatcttcctcccccccgcccggcatggcttaaaagttccagaatgcaacaatgaaggttacgttatgagtaaacggtcttggtggtccactttactgtgggtcaccctgcactgtctctaagcttgcactgctgtgccaatcatgagcgtttgttagttaagctgcatccacttcactgtggatgaagaagtcgttctccgtcttcactttcagcatatcggagcctcagtgcgttctgacattaatttgttggacccctgttgagtgatatggaatgacccggcagtaatgtcgttaggtagggccccggtgcgcttcgctgcgtgcacccctactgtatgcaacctgtgatccattacaccattggcccattaggctaggttgctgtccgagccgatcgtcctaattagacgagcatcgtgagcacataactcactacgtcgctgtgttacgttggtccccaccctccgtagactcacccacagcccgtgaaggaatacaaggtgtccttctgtgtagagactgcacgctcggcggtctagttgccacactaggctgaaaggaacagtccacccac

SEQ ID NO: 2145 - DNA, 578 bp, Trichosanthes kirilowii picorna-like virus
  strain pt111-pil-1-NW1
ataactccttaaagagaacaatacttataggcaataacaacaatgcaacaatggaagttaacacaggaggattagaggttattacagtctctaactcaaatataacgatcatacctaaagaattttcattaacatttacatcttacaatgcccagcaaacgttgtcactattcccatttcaaccattaccactaaataatttacccgaatatttaacttttgacagaaaatataaaactaccactccttttactttaacgtttccaactgaaatgtctcaggttgtgatggatatatttgggttagttataccagcaaattcccttagtggattaacaattaattatgtcattcaagattcagatgcttttgtgtttcaaccccagatttacccgaatcttatagttaaatctaagtcaaattcagtgaaccgctcagacgttatttctccaagcactcgtctggtttatcccaatggtttcaatggggatataattttatccttcgaaaccttgcgaggcacgccacttttatctgattctcccttggtatttattgttagtttgagttaaggaggc

SEQ ID NO: 2146 - DNA, 578 bp, Beihai paphia shell virus 2
  strain BWBFG38484 hypothetical protein1
cctcgtacggacgttaaccgtccgtacgagatatagtctagttggcagcttaaacccgctgcccaggttctacctgtattttaggtactgttctggtttgctctggaatgggatcgcatcgtacatggaagaaccatgacgatgtcccactgtagagtgtaccacactgttactgctacgattgacagctatataaaagtttttaatggagggggagttaacctctgtaaaaaatcataaacccttataaagtgtttttcatactgattcaaaggcttgcacttgataaagcctcaagatctaaccccataatcaatgggattactgtgcatacggaagtaccggagccagttcttatgatggtattcgcttatatgccgaaaataaagcccccgtcctaacaaaacaaggtgggcaccctacacgggtggacaccgagccgtagagtcacgggaagtgtagatttgaaagagcttgctcttagtctgcttctatacgcttgacagagatttgagttttgcacttgtgtatatagcgtctcatttgtcttgttaaaacgtgtctcgatttgttgtcga

SEQ ID NO: 2147 - DNA, 579 bp, Shahe picorna-like virus 8
  strain SHWC12398 hypothetical protein 12
actcacccttttacaataaaatttctactagtaaaagtaaaaggatgcttaaccgttaaatgctatcacactaaccgcgtgctctatttagagttatatcctaggatgcgcgaagagcaaacctcttaatatccaaggaactagtagtcgagtaaatgcactaagttatgctttactttaaataaataacttgcgaatcaacaaaataataataatgaaataaataatgtagcaccccctagttttaatgacgcaccagatgcatctttgcttcctaccgaacagatatcttcacttgtaacgcacgatgatggaggaactcctcatgaatattattcttctaaacctattcacgaactatcacaaattgaacaagcgactggtaacgagtttactaaatctttggataatttcctttctacacccattagggtagcagctggtacttggactactacacagacggcaaatactgacctgcaaaccttaaattttccggatgtcttgcttaacaaaacattgattgcaaacaaattagatggttttgctttcttgcatgctcgtgttaagtttcaggtg

SEQ ID NO: 2148 - DNA, 580 bp, Unknown
  Description of Unknown: Mutant Zaire ebolavirus isolate Ebola5 sequence
ttgcaataattgactcagatccagttttatagaatcttctcagggatagtgataacatctatttagtaatccgtccattagaggagacacttttaattgatcaatatactaaaggtgctttacaccattgtcttttttctctcctaaatgtagaacttaacaaaagactcataatatacttgtttttaaaggattgattgatgaaagatcataactaataacattacaaataatcctactataatcaatacggtgattcaaatgttaatctttctcattgcacatactttttgcccttatcctcaaattgcctgcatgcttacatctgaggatagccagtgtgacttggattggaaatgtggagaaaaaatcgggacccatttctaggttgttcacaatccaagtacagacattgcccttctaattaagaaaaaatcggcgatgaagattaagccgacagtgagcgtaatcttcatctctcttagattatttgttttccagagtaggggtcgtcaggtccttttcaatcgtgtaaccaaaataaactccactagaaggatattgtggggctagcaacaca

SEQ ID NO: 2149 - DNA, 582 bp, Lothians earthworm picorna-like virus 1
  isolate Q48, partial1
gcatgatacattttaaaattcccattttgggacgttgattattgcgtgatataatcattttcctttggacgttgactgttgcgtgattcagtcgtctttttcctcttgtgttattttctctatttaataaatccaaaaacaaatagagtttagtttccattttatattatttcgggcatcgttttggtcaagcgatgtagatcatatgtatgatcatttgttagcttatgtttaggaaagcattacgaatattcttaagatacaggagttttgcttgcggcgtggtacccgtaagacctcacaccagaaaattagttattttaatttgttgtctcactgccttgacccgttgcgattagaaagtaccaggattggtgccatgtgcttccgttatatcctgcgaaatcgataatgtcgactgcggctggatgggctttgtttcagggcaacattgagaaataccaaaaatatgtttatgtgtgagtggctcccgaggtcggggatattcactgtgatgggcttctgaacataagagtactaacatgtgtgagtacttgtgatgtgaccacctttttaaacatt

SEQ ID NO: 2150 - DNA, 583 bp, Populus tomentosa Cucumovirus
  segment RNA3,isolate pt120-lat-16,1
tttggtgtctttccaaccgacgtatgattgtcctatggaaagacaccaaagcgggaagatcatggttatgtaacgaaacgcattgcccatctataggagacaactccttgtcgcctagatcagctaagtaaattctcaaagacccttcagcatcagtggaaactgttcgagtaacagcacataatacctgggggacgctcatatatccttttgagcacaattcaccaacatcatatccagacttaaagaaggaagcaatacgaccgtgggtcatctcgggaacgaggggccggactgaaatagcattatcagcacgcatccaatgatgccggcctaggtcacactcagtagccattttcttaatggcttcagggctaaataatatcttttgaagatcgtcagacgtagccgctgaggactgttgagttaaagtcctactggtaccttggaaagccatgcctcggtaatcttaccactgtgtgtgtgcgtgtgtgtgtgtcgagtcgtgttgtccgcacatttgagtcgtgctgtccgcacatatattttatctttctttttcagtgtgttagattcccgaggc

SEQ ID NO: 2151 - DNA, 583 bp, Beihai paphia shell virus 3
  strain BWBFG40853 hypothetical protein1
tttatagatatttatatctatatctttttcacgttggaaggttttaacattctttgaatggtttttctttcaacacccatctatcattcattttattaactcattattcttttaatcatttcttcgttttttcagatttactcttgtcttcggagtaatgactatcaacctcttataatgagtgtttatattatttgatgaatttattgaatcactacattaatttgtggtagttggtgaccctgggtttgaacgtaccctcggaaaaatcctgtttcaatatttacatcatttaatatgaatgttctcgagctgaactcaatgtagctcatcctaaataaatctttgagagtttgcgcgactaaagtgccaagatgtggaattcatccatgagtaaacatgtaaaaacgtgcgccacttaataatatcttccgtgatccaatggtggtggggtgtcccgactcgaagaggtgaccgcgcacttgagaccgttgcgacatacgatctcccctgttgctttgggttaaaagcatgtccttctctccaattacgttttatggttacaacttttgctatatagata

SEQ ID NO: 2152 - DNA, 585 bp, Hydrocotyle vulgaris tombusvirus
  strain pt175-tom-27, complete1
caacggggctgatttcttgccctttcgggcggtttgtttgccctttcgggcggcttgcttttcagcaggctgggtacctttccgcacctgtgagtaactagctttcgctggttgcatggcggtaatactctctattaccgccatgcaaccagcgaaagctagttactcacaggtgctgaaaggtacccagcctgctgaaaagcaagccgcccgaaagggcaaacaaaccgcccgaaagggcaagaaatcagccccgttggaagtggctttgggtaagttgttgcccggagtgcatttggggtggttgggtaaggttgtggctgagttggccaagcctagccctgggtctgcggaggcctcgcaacctccgttgttcagagcgctcactgctgctctgaaggtgattggcggccaggacatcgatgctgccaatgcgtacaggaacagctctgccgtgaaagagtacgtgggaaaggtctttccccgtccgggaaacgccaagcagagcgaggggccggcaacgaacgtggctccgttgaacagcaagcagcgtcgggcgctcaagcgtgccgacaaacaggccgc

SEQ ID NO: 2153 - DNA, 585 bp, Hubei polero-like virus 2
  strain QTM26674 hypothetical protein 1,1
gtagacggcgaaccgtcaccccaacccccccctcctccgccaccaagtccggaaccagaaccagaacccaaaccagccccacctccaacgaggttttggggatatgagggtaaaccaacctcccgagtttcaacagctcgcaatgatcagttcatagatgtcaaacctttgacatttataaaactgtacaaatgggagaatgaacattggagtaatgaaaattttactgccaattatctacaaaatgatcgcgagaaagcaaccccctatttcctaatccccgcagataagggggaattcacagtctatatagagaccgatggggaatacaaagtccgtgcaatcacagatcctaacaagggtaaatgggcaggctttgtagctttcaacgcagatcaagacggctggttcgcacgtgagtattcaggagtcaagatttcaaactatcaagctacacgtagctttgtcgttggacatcctgatgctgaggtcaataactgccacttccaaggttctcgagcagtagaaagtgattactactgctcctttgacctctccgtggccgaggatggtgcttattgggct

SEQ ID NO: 2154 - DNA, 585 bp, Hubei levi-like virus 9
  strain WGML141493 hypothetical protein1
cctcccctttcctccatgccaccgattctggcccctcacagggcggtctttcggtggaagtgacatggaagaaaggcgggggagggggggtcacgcccgctgacatggtgtcagcgggctatgccggcgaaccggaagggctacctgcccttgtgaggtgaatccgtggagagaataagagaacgcgttactggtggctttacaaccgagaagaccatcaagatctcgaatggcactgccacccgagtaaactatgctggcgtcaaggtaacgaagaccatccaggacacgctgactcctaacttcacggccttgctaaaatgcggacaattccttccgctaaatccagtacgaatcaccactgctactgaaacccgagtttcttcgggtgacggttgcaagatctggcccaattacaacccgggctacatctattttgatggtgatgttggtggtacgagcttctttacgagcgcgtattgccctccttggcccacgattggtgacaacgacggtttgattaacgccgctgtcgtcgcagcccgcagtaatgcggtgtctgatacgtgggatgtgttgacgttt

SEQ ID NO: 2155 - DNA, 587 bp, Mossman virus
  complete genome.2
gatcaagtcagccatcggtgggagtgttagagctcttccaatattcagttcatcactaggtaacctataagctcattagtaccagaatgtgatatgtttccgatacggggtgtcacactatgatacacaacagcgatagtacagattagtagttatatgcaggtctctaatacttaatggtacgacatctcaatcagacaaatcattaagcaccagccacgatcagtgtctcactctatagctacaacaatgagtcttcctatacagaccttccaagcactgtatatcacacttataatgggtaagggctagtttcagtcagatagtatatattgtttgggttaataatctaacaacaaaaaacttagggcaaaagaccctttaatcctggatctctgtacagtgccagacagaccaatccatagctccccactcacagtctcctcactagcaatcaccggaggattcgttgtggtaagtcatatagagctatatttatactttcaccaaattctatattcactgtcagcatccgctggatcttgtcttacaatctgttgcagggaactctatatctggattaaatc

SEQ ID NO: 2156 - DNA, 588 bp, Beihai sipunculid worm virus 6
  strain BHNXC41400 polyprotein gene,1
gtgcgctcgcaaaatgcgagcgcacacctgcaggtttatgatgttgttcttacgtcttatgacaacctgcggtggttagaaccaccttgactcgaactgagtcgaattaaattttaacgactgaaggatagacggttccccgcccgtcgactcctaatcggtgatccttaattttgatcgtgtttgacgatcttgatatggcccgtttgacgtgcctgaggtagttttcttagtcagaaagccttagggattacacgttagacggaattgatagattttatttcacgagatttgttttggtgaaacgttgacctcggcctgagcctactagatgatatgaaatctcgcactttccagtaccagcggaaatccgccgtactcagtgttagtgcagtgattgatttgatttaagttttatcagtttgtcgacgaataaaggagttaggtcccaaccttacaatagggatacctaaagaattcagacccgtgtaatgcgggccctcttcggaggtgtttgggctagtaccccactgataccacagtgttagttttactcctacgactgatttaaagtcatctgctcgacaa

SEQ ID NO: 2157 - DNA, 588 bp, Victoria bee virus 1
  isolate VN2-2 polyprotein gene, complete cds.1
ctatggccacccagccatagtattgcggattagcgtcccattaagattttaatttagctattcacaaccttttgttctttctttgattgacttaagccgctgtgtctcacccttttttgtaacctatttatttttctccggattaatatttagccgctacatcccaccccctccacctcgattgcccatttacgacggtttttctgttacttcattgtaactgctctctctctctcggaatttcggtgatctctcgtactagcatagattacgagaacgatgccaatttgttgacttcgctcttcttttgctttgacgaatacatataagtcacgtacttttaaatgtccctttagacatgtttattaaagggaaagtgcgtatcaggatatgtatcaggtaccctgaaagtcataaggttagactttcacattagggatacgattacggcccagaatcattggattctctgggttatacgtaatacacacgcttattacaagcttctcttcttagatgttaatcattcaggcgaatggaacgcgcgtctcacgaccgtaagtactaatagccaatcacgaatttgaa

SEQ ID NO: 2158 - DNA, 589 bp, Chaetoceros socialis
  f. radians RNA virus genes for non-structural2
ggactcttccatcacccatttatatgtttgtattttacatatttatatattaagtgtttatttcttttgctgagaaatatgtacagaccactaatgtctataaactataagagtgtgcagtctcatacttgttcccacgggaaattgacgtgtatatattagtgatttagcgtatttaatatttatttgtcgttctgcatatttttacgtaccctgtatattacattttcatagaactttcagtctgtctagcccatgacttcactgctagatttgactataaacatagtgataagtcggttctacatttacacaattacaagccgctggcaattgctttacaaatattgccaaccgtgtgggaaaatctccagaaaatacacacttgaaaggagatgagctacctcaggtttattcacatcccagagatgatccattggaattagatatttcacctatccagggactacagcgccaggttacgatcggtaatctctcatctgaatctttagagatatctgaggaaattcagtcggagaaagtggaaatacaaccacttgatgatcgtgagagagaaattacagaatta

SEQ ID NO: 2159 - DNA, 590 bp, Elephantopus scaber closterovirus
  strain pt171-clo-1, complete1
gctgcgtacagcgaaagtcaaggacttgaagctagctccgagttttgactttcgctgtacgcagcgattacataatttcgcgcatctggcgcgcctttaataccgttggagtcctgcacttcttcggcactgatacaaccactacggtggttaaggagttttcggctgctgggccgatcgtccctttacggaaatcctgttttccgttctctgttcgcgctgctgttcgcgcgattaaagctgccggacgtcctattgacgctccgcgctccggatgcctctgtggcctccctgttatcgacacatctggtgtcgtgcgtccccgctctgttgcgggcgtttggaggtatgctctgtgtaaacctccccttactgctgccgccaagaggtccatccgcaaggcgaagaaagattctgcattctttctcagccgggcttcttctctcttctctcgggaagtcccctgcggcacgcgtcacagacttcgcaagcgtgttgcgaaactagctgaccccactgtgcgtgaaagtccccaagacaagactaaacttaaggggcgccgacatggcaaaaactctgacctcccgtat

SEQ ID NO: 2160 - DNA, 592 bp, Wenling triplecross lizardfish picornavirus
  strain XYHYC1852461
ttgggaaatccccaatgcttctttcaacaccgcctgactatgcggtggcgcttcggctcaaacaactagtcacttccccctcttaactactacccaagacttctaactacccttacctacttatttgtctaaatttcaaacttttattctcacgcgtcttataaacatcttttctatttgttatggtatgttttgtgatttgtgtggtgtatttcatttaatgggatctagtggaccgtgccccggttgggtatccgctccctttaaatgtttgcaagcactcttgacattataacctatcatttagtttacttgtttgtatgatcgtatttctgaatcgtaacatttatgcaattctttctcgccgagacttgtctaggagataaagttcctgcatatttagtgttacggttgtataatggagacttagatagcttcacactgaggacgctttttcgctatccttttgacctgattcaggccagtgtggagttaatgattgtatggatgggccctacaatttgtctaagacttggtgatagcctcgcggccgctcgccatttatacaactgaatagcggttgaaactctct

SEQ ID NO: 2161 - DNA, 596 bp, Wenling crustacean virus 2
  strain WLJQ102135 hypothetical protein 11
gcggaagaaaaaccgcacacatatactaagcataaatcgaaggagatttaaagtgaagcatttatttaatatcgtaacaatgaatgtgaaggagccctttttatgttaatgtacaaacaaattgacaaccccccgtctacgcagacattaaatgctgtcttttatatattgagattaaaataatattttgtgattatagaaaacacatcaatttcttactccagagatagtaggagtctaaaactaatacaaaaccgaaatacactattcgaagtaagttctcgagggtagtgttatttcaaacgggacgcacaagagctaactagttaaagacactcttgcccacaaattgaagttccgaacgctgtaagaccgcaggacccttttatattatgaatactactattacgaatgtagtcgttagaatatttatttatataaataccaatcttcaatttctttatcgtatgatagtgacattttgtcatttagaagattactttatatatatatatattactttcaacgtcattttaacgtgtgatcttatataatgtcccatgcatttaatgcggctattagttcgctcataaaat

SEQ ID NO: 2162 - DNA, 597 bp, Odonatan anphe-related virus OKIAV59
  cRNA sequence.1
ttgcatgtccagtaaccacacatatatcacgtcaatctcgatgtggtcattgtctcagaaaaacagaagggggtccttaattggcaattgtttgttcatacttgaatctcctgtaaaaaaaaccttcgagtgcctttatacttaattaagactagtaattatattttatacacataattttttatgttatacaccatgcatatacacatagctgtatctcttatcacattttaagaaaaaccgaacaaaagatggatcgagccggaaacacaccacaaaacccacatggagccatcagggatagtggatggatcactgtaaatggtcaactaccacctaatgacctagaacctcctgaaaggaagggcggaattacatctcaaccggtatacggctattgtaggcggtgtgattccgttgtccaggtcaaaccttctcccttttccagtcattatcgaaatggtcgagtaattgactctaagaagtcatcagtctgtgttactccctattatctaaccccatgagagaataaaggcacctacttgactcccactgtgagaagttgagccaaacgatttagaaaaacccgagtccaag

SEQ ID NO: 2163 - DNA, 597 bp, Rhinolophus picornavirus
  strain Henan-Rf265 polyprotein gene,1
cggaacgttgtatgctcagggcgtaggcaccacccacgggtggtgcctacacgtgtggactaaaccacacactcttttcagcacttagtgctgctatctctttttgtaacttagaagtttgtacacaatgcgttagggccacacatccagtgtggtatcgcaaagcacttctgtttccccggtgctagtaggagggtggctgctccacggccacttgccgaacccatcgttacccgactcattacttcgcaaagcctagtaacccagttgaagcaagcccggcgtgttccggtcaggaaaaaccccccctggccagaaacatgtgatgagggtgggctatccccactggtgacagtgagccctccctgcgttggcacatggcccgatctgggcgtggttcttgtggatgctgccgaagagccccgtgagctagtgtttataccgccggcctcgtgaatgcggctaaccctaaccccggagcagaggctactgaagccacagtagtcgctgtcgtaacgagtaattctgggatgggaccgactactttcgagtgtccgtgtttcctttattcttttattgttgtttatggtgacaaac

SEQ ID NO: 2164 - DNA, 597 bp, Wenling crustacean virus 3
  strain WLJQ142924 hypothetical protein 11
tttgaacccacgctgtctataagtctagtgtaaccgtggctgtccccacgctgaatagcatgtgaaaccgtggccgtagaatgattgtacacttctaaagaactgtgcaatatttaacctttttcccttacgattttattctatatatcagaagcaagcgttgattgatatatactatacttttgtacaatggaaaattgtattagtttttaagattttagttataagcttctatcttctcctatatgctagttgactagtaggatgcgatctcctcttgaagaaacacacagcggattcgaccccgtctgttggcgcatttcaggtgattattttggaactccgttatcttcggaggtaggcaccatggctagaacccatggcggcttgtagtctcttataacttttgatccctcgataggcatgagcaaagtagcttagaataactcctcatgactggattgttagcgcatttcatccagcgcacttggaagatgattttatgagatatacgcgagccgtagaaggtcagtccctgaaataagggtggcattaccggaaacgctatcaccaattgaaagccgcaacccatataac

SEQ ID NO: 2165 - DNA, 598 bp, Aedes aegypti anphevirus
  strain 1a, complete genome.2
tcgtctgtaggaactgtgtcttagtaagattaatcataatagtataacggtattaatctaatccttttgggtgagttataaccatcacctatctgcctaaacgtatctagtgcgatctatgtgtaagttagcctttagaagctttataataataataataggcatcggaagcaagtgtggtatcattataaaaacccgccagttacaaatcatgcctgtttcaatagcttgtgcacattgccactatcccattgacatccagtcagttggtgctcccagtgatattgggataaactgcaagatgtgtggaaaaacatcatacgtaatcaatgccccattttaacatgggtaggtagaaccgccacaccaggtttatatttatcttttgctcaagcacaatgcaacctagcaaatgcattaatatatctatatattttgaagattatacatattgtgcagctacattatcatcactgtgaggcttcttttctttatttatatttggctaatttattcaatgtataggttctcttgcttataaaaaacccgccagttacagatcacttgtcgtgtatttggaacattgaaaatcgaaaat

SEQ ID NO: 2166 - DNA, 600 bp, Scott virus
  isolate Antarctic6 polyprotein gene, complete cds.1
gcgggttaccccgcatggcgttttgaacgtgtcaaccacgatacggttgctgtaggggcaccagctgtgtcccacctcttgctagcggagctcgttagccggtgccggtacgttaagtcggcaacataggagttagttttatttcttctttactatattctttgttttccaggttgtctgcataccgagagctgctaccggtgcgcccgccggggttaactgcatggctagcatgcagctgtggccgccaaaagtgcagatgtagtgactatcgttgcggtctttgatttcagggggcattgtacgcatcctgtatcgaacgggtcagttggggtaggctacgggtgaaaccccagtggtatcctaataatatttattaggaccagaggcacgctaacgcagcggataatggtgagtttcaagggacaaaaaccattcaacgctggggctcgggtgtcactcctgattcgcgaatacatggtgtgtacaatgtgataactcttgtcattgaagaccccatcgtaagctacaccctatgcgtttagggctactcaggggcatgttaggttttaaagcccatatgtttgttagtatgccagg

SEQ ID NO: 2167 - DNA, 600 bp, Hubei narna-like virus 22
  strain SZmix20730 RNA-dependent RNA1
ctagactggtcatgtattttgtgatcatgctacgcgaatggcgagactgtcaattaggacagcctcggtgtagatactgatagtatctccgggtctcttatatttcagtaatgaaaggaggagaatactttggaaacaaattttgcgttaagcttaactactctaaccaaagtaacaaccgcagtctgtaaagcactacgatcattaggtttgtcaaagagaaaagaacacgcaatcgaggatatattgataaaacaattgtcctcctcggggcctgagtatgttttaaaacgcttatccgaattaacggactggcgaaagaaacatctcgagggagagctaagttacgctcccgcatggcacaagaagagtacgttaaaggatggaacaactaaaccatctgataggctgggaagccaagtctggaaattatcagacaaagctttcttttgtgtagttggttgcttgaggaaaagtatagagttaaatataccaaccgaaaagcagctttctaaatggttagagggggtaaggtgcgaaatcacatcaatacccagcaagactataacgctatccccaccagttgaaacaattgactgg

SEQ ID NO: 2168 - DNA, 602 bp, Kummerowia striata picorna-like virus
  strain pt119-pic-7 genomic1
gccagttcagggctgtaatcctgggaaatggaccgaatccatcagtgatgtagacctgttttgtacggaaaagcattcaggttagatcaccgtttgttgggatacgttaatcctcacacccccccccattccatttgtatttaatgtttagccgggtggtgtccggtatataaattaccaatgtttaacggatttgtttgtgtaccttcggtctgaaatcctaatgctggataatccttggcgtctgtgtttcacggtcttggaccctctttaggtgaatatgattgcaacctgtcggccctcttcggagcgtttagacatatcatattcttgggtcgctagcgcttgctctaaaccctcttagttgaaaattagagcacgtacgaactttagtggtcagggtgtacgttaaccacctataaaggtcatgtttatccacatcgaccctcaaggctaaccctttgagttaaaatcggatatcacttcgtcaaaattcgtcttcggtttctgcctccgcgtcttcggtttcggttagcgtatcttcggcttcgattcatgctttggaaaagcgtgttgagaaattgtctcttattgtgactaag

SEQ ID NO: 2169 - DNA, 602 bp, Wenzhou picorna-like virus 12
  strain WZFSL74240 hypothetical2
agtgtcgcaacgaaagcaatgccccctacctctttgatcgtccttcatggtgggaaccgtgttggaatgcattgagggtggagagaaaacttctttaggttagtatcgatatccaattttgtgcgtggaaagcttgagctggctgaccacattttgcacttacttagcttgcgaaccaaaagaataatctagcgttcaatctgcttaagattgacagagagaggtggtatcctctccaagctgacactgagcttgtggataaagacagtggggaaggcgtaaaggttcaacaggaaactgtccggtttcatgacaatcaaaaatcttattcatacaagattccgactgcacctgataccattgctgaggattctgctattgacgcagcatctctcggtgagtttttgagccgtcccgttaagattggaacagtcacctggagtgaatctagtgcggctggtttagcaacatccatatacccttggtctgcattcttcaatgatgcacgcatcaaatataagcttaataattgggctttcattcgatgcaatttaaagatcaaggtgttggttaatgcttccccattttattatggagcagca

SEQ ID NO: 2170 - DNA, 602 bp, Wuhan insect virus 30
  strain WHZM9934 hypothetical protein gene,1
caaaaatccaagttatacatcaagccaagagacaagtgcaattataaataattaacccaattacctacagacaatccaaatatatcggaaaatgaatccaactttaacaggtggcacaggcgaagcaagaaatggtcaatgggataagagaagaaaacaagcctggctaaatgatgcgctattgctgctcgacttgaaacttgggtttactatcaggacacgatcagactcacagctacagatgctagtatcaacatttgcaagcaacgagaagttgaaagagtattggcttaccttgggtgatacaactcatttggtacagccggccggtagttcagcctcatcgtacggtactgcgtttgagtgctcatactcgggaatgtttcgagaaaagtacttagagtgggtgttccaagacaaacaaatagttgacgaaatattagaagcaataggccagccaaagctgtcaatagtgtagacccctgaggagcttagcgaaacggcaatgccgtagggtcgcccccatttgaaaaaagaagtaactacaaataacaatagctccaacaaataacacaaatacaaacaaacaaacaacgccaaaa

SEQ ID NO: 2171 - DNA, 603 bp, Halhan virus 1
  replicative protein and structural protein genes,1
gggcaataccctgcgcaatcatttgaactcacgctgtctgtaaatcttagtgtaaccgtggctgtccccacgctgaataagtatgtgaaaccgtgaccgtagaatgattgttcttctttttgaactgtgtaatatttaaccttatatctaatattttattgatctatttatcagaagcaagcgttgattgatatatacttcaatatttttgtacgatatactgtattaattttaattttctttctcctactatatgttagttgcctaataggatgcgatctcctcttgaagaaaaacacagcggattcgaccccgactgttggcgctcttcaggtgactattttggaacttcaattatttgaaggtaggcactgtggctagaacccacagcggtaagtagattcttaattttatctaattatgttaggcatgagcaaagtagctttgaataactcctcatgactagactgtattgtgcatttcgtctagcacacataatgaaataactttaatttaatcgcttaccgtagaaggtcaaccccattttatgggtggtattaccggaaaacgctatcaccaattgaaagccgaacccaatataac

SEQ ID NO: 2172 - DNA, 603 bp, Perrin Park virus
  strain PPKV 205644 hypothetical protein gene,1
atatacagtagtcgactaagacatccgaatgcagtatccttaatgaaaagaataaaacacccagattgtacactgtacacttattagagttattacttttaaaataccacgcgtacatacgtgctattttaaaagtaataactctaataagtgtacagtgtacaatctgggtgttttattcttttcattaaggatactgcattcggatgtcttagtcgactactgtatatggcgtgcacttctgctgcctaaggaattattgcgaaacccccccttctcacaaacacacaaactcacaaatactctcgaactcatcacaactcgagttcagtttttatataaagctggtgtctgagaaacagctagtcgcgagctagtgtactatatgtcatgtctatgtagtacagtttcaacacgtatctttgccttatatgaattccccacacaaaaatttccttctgagtacgcctcccggtttcataccttactgaaacacgcgaggacaaacggccgtggcctctcagtcgtagctatcaaaactttatagccgaacaccgctatggcaaccccatggttattaggcaattctgaaaatcttaaact

SEQ ID NO: 2173 - DNA, 603 bp, Sclerotinia sclerotiorum
  negative-stranded RNA virus 9,isolate W45,1
tatagaaacagtactactcgtgagctactagacagctgaatctcacttggactgattacattcgtacatgctaatcacacttgtcctctggcaatgcatccatgtgtagttgtcacgcaaccggatcacattcgtacacattgtgccgaacatgcatttggcatttatacagtagaagacctaattgaagacattgatctgtacaatcatgaattggctcaggcacaagatacaggcgaatggcgacacttcaatgaaatatggagcaataagataaacgaaaagaatttggatcacattaatatccttttagtgcccagtattggtttaggagagctcattcaatcaaggagcatcatggcattggttcttaatgacagttccttcagtttgtctctcagaggaatgtcgatgcaggataaacctttacagattgagttcagagaccagagcatgatgtttgaaggatatgtgaaacagttcgaaataattagttcgctttcatcctttataatgacttatatgtgaaattaaaggcacaatacaccgttgaactacacataaaaaaaaccgtttaaagcttagttctcttttaacactaca

SEQ ID NO: 2174 - DNA, 605 bp, Hubei picorna-like virus 20
  strain WGML146806 hypothetical protein1
ctttcaaccccgggttcttttacaggtcttactaaccttgtctaacagtaatgttgacaaaattagtggtttttaagtgcgaagagctaggtttttccaaaaaaccgtacacttccgtgctcgtaagttcagcacgcctaatggaggcaattcttacatccatgagctagcaactccaactgctttaggttttagaatagattgttcgaattactgcatcaggaccatctgtcctttcataaaaccacttgttgattacaatccgctgtcagttaatattttgcactatatgtgctaactctgaccaggtgagtaattagtaagaaccatcctccatcaaagtcacaactggccacgtttgaatacgctgtctgctttgaggtttggattcaattgacacattgcgcggcattgatgttgattgtctgctgagctagcttagtgacactggggtcaaactgcttgtgctatcgtgtgataacgcgttacggcgtctgcactggtatgacgatgtccagtgactcgagttaggggaagtgcctaacgttctatcgtcacttaccttaaactttccgtttcttacggacccacagctggtaacacat

SEQ ID NO: 2175 - DNA, 605 bp, Wenzhou picorna-like virus 39
  strain WZFSL83776 hypothetical1
gcccgagaagggcttattatgacgtgaaatgaacgtatgagttgttaaagctccatgtttaaaatgggggctctatattgttattttatgtttaaatataagatctgattggaactcttttcggtaaataaaaggagtgtgttcactagtaatgtttggttcggtttttgttattaagagatggagttaaaacatatacagcttcaaaagaatgaagaataccaacaaacgtataagttttatgtcccatacttatagtattgtgtataaacattattcgtgacacggctagattatcatacgttatcacgttgcagcgcgtgtgcagttttgaaaggataatcattaatagcgtttgttttttggctgtagctcttttatagagttagaggtttataatacaatagaatcttaagtgattcccataatgtccttggttgtattttaaacctcgaatacgtgaatgcaaatactcgatacctaatagagttagctatgctacccgttgttgtatgagatggtatcaaatccaacggagttagagaagttgggagatagacctggcttatggttagtttcacgtattttaggttgtctaaaacgaa

SEQ ID NO: 2176 - DNA, 605 bp, Hubei reo-like virus 10
  strain QTM136127 Minor structural protein1
acccaattatattacctgatattgatgatatacattacaaatacgcttttttaagtagtttcagaaataatgtttttttacattatcatattactactaatattaatagttttagttattatattaatccgcttagcaaatcattgactaagggtatcagtagatattatacggtccctttgaatgggaacacattttttgattcgtatgttattgatgatgttgtattttcacttgaaattaaatcagatggcgttatattagttgatgatcaacaagtattttcccttaataatggagttaataattacactacttgtacagtaagatttaaaactgtcccaaagaaagattctaacaatttactaatagttactatttatttagtcgaatatgaaaaaatatttagtaaggacccattaaagaatgatgaatactcctttaatagaactattaatagagtttatactaggtcatttggtgtgtccgattttaataaggtttttgttgatcctaagaagtcgataaatgtttttttatcgctggatacatttaatgacatagtgcatgactctttatattctattttcattgctcgatctgaa

SEQ ID NO: 2177 - DNA, 606 bp, Mint vein banding-associated virus
  isolate NCGR MEN 454, partial1
cgtaatctgatagcctgagcgattcagaattcctccaaaccctgcctttgcagtcttcgttcctttcgtttaagttcactttcaatcctgtactttttcattttttactgcatcccatcccatcgttcatcaattcacaacccgcagaattcatcttctgcatttctcttcttttcattcttgtttttcgttcacttccattttctttgtgtctcaccaccacatcgacttttggctttgttttctctttgttcgttccatacttctcaacccgcagaactcgtcttctgcattttcgttttcttcgttttctcattttcgttcaaaaacacaaaaagattttgctttcttttcctcttttgtctctcacgagacccttgttgtcgttcacgcccagttgttttcacttgtttctctgttttccaaaacttttgttctctttctttcttcgttccattcactccggtttttcttcagttttgtttctctcctttgcaccactccatccttcgaacgttccattcctctttgttttttgttcttcatttccacttcttttcattctttttgtttccccttcgttccttcccacactcccatcgcggt

SEQ ID NO: 2178 - DNA, 606 bp, Chajerado virus
  strain Cx 1773-7 genomic sequence.1
cgtagatatgttcatgtttgttttgttttgtaatttagttcaaagggctatacctacccctgattagtaacaaaatataaaactcggtacagaccggggcaaactaatatagttatttaataatctgtttgaccttatcttatgttcaatgccgtgttcgcttgcgtttttcattcccaggaaaatgttccccataagttttcagattattgtttaattattgtttgtgtataaacaattattttataaggcaaggcgttaattgatttaatgtttataagtatacggatttttattagcacgaattaattccatggtgaccaccgactagtaatcgagtactttgagtacaaggccaaaagccctctgtataacatgtgaagtgtgttagaaatgataataaaatgaagttgaaagtaaccgcttaatgattttgaacgtgacaagcttctatgcttaaaatcatctcatatttattatgtaattcaatagatgtgtatctctacctattggatgtattcctctaaggaatagatgatctaagaaccggtcctttggtggtttcatacgtcatgaaatcaccattcctttttaaaattttcaatc

SEQ ID NO: 2179 - DNA, 606 bp, Macaca fascicularis picornavirus
  isolate KS018/MFS01, complete1
ggaggatactttgtttagctttgcaattcttaaactgttttccatttcactggtcgtttgacgcttgtagggcgacaggtgttcctagctcttgcttttctaaactatcgaattttgttttccactcgttcatatgtctatgtatgaatgaacggggtgagtcctcgttggccctcgctggagtgtaaattcccagtctttctggaactagaattacacaagactccaggagtgttctgaagattttcatatttaaataaaatcttttgggattgtccttgatggttgtagcgatgtctagtgtgtgtgcggattcccatgctggcaacagcatcctcacaggccaaaagcccagggttaacagcccccgctagatgcatggtaccccccatgcccattttggatatgaaattaaggtttgtttacttaggaatttcataaggaagcttctgaggctatgaaggatgcccaggaggtacccgctatatgtggatctgacctggggaccccttgcgtagctttactgcgtagtgtgggtttaaaaagcgtctagtagccttgttttcgggggaccgaaaacttccacattattttgagactggcatc

SEQ ID NO: 2180 - DNA, 606 bp, Wenzhou picorna-like virus 13
  strain WZSBei69459 hypothetical1
gccggggctctttgagccccggttatcgtttgagtagtctgatagaatatgtctatctgcaggtcttgtcattgtgcgagaaatgcacgatgatgatgttcttgtagtgttgcgaagtcttgccagtgtgcgagatcgcacgttggtgatgttctttgcttgatatttttattagtatgaacagcttggtgttacactgagctatatgctcggtgtcgccaccccaaactgcctttctactactcgagcggttacgcagccgttttctgcaggtttttagtcaatttatcctgcgcgtaaaaattaaatacactttcaacccagttgacgctttttaaggattttgcgtgataaatcatccccgcttctgcggatgaaaagacggacatcgtagatcaagactgtaagtccgtgggctgcatttcacttttgtgaatgtagctgttacagtcagttagggtggatatttagatgttttatgcattgtagatattcaccacatcgatcacccggatgcaacagcgtgacggtgcgtacatgtagaaatagcgtgtatgtgctgaatgttactatttccctcattttttgagagctcatttgtcatgt

SEQ ID NO: 2181 - DNA, 606 bp, Wenzhou levi-like virus 7
  strain WZFSL85855 hypothetical protein2
ttttagctaacttatcctctaacattattgtgttagatttatttataccttaggaggtacaaattggattatttgacagaatacccgattgataaatctttatccattatcagtcatatctcttcagtctgctctcagttaggtggacctctctcacaagaattgaatactcttgttcaagaggggaactattctgctctaatcaactttaaatttgattatcagaagccctatacacaaaacgactttatttacgcccgtcaaattcaagctcttgtttcaaaacaggagtttattgacttaggcgtagatcgagaagttgaagcgtataaaaccttttctgaggctgaggaattatgttcgcgtactaatgaacgattccgtggtagtctatctgacgtttcgtcagagtgtcactccgtgctttacggggcgacacgaaaaatagctaccatactcggagacgttcctgagtacagtgaattaaatttctcttttggacctggagctacaaccaacgttaaacgagcgcggtctaaccctagggttaaacttgaagctcctctaacttgtagtttcgaatttgttccccatgtcgcgaaattc

SEQ ID NO: 2182 - DNA, 606 bp, Changjiang tombus-like virus 11
  strain CJLX30677 hypothetical1
tggtgccgcgcggtgcttaatggtgttgaggcgcaagtaaaactgcaccacaggaacattaaggttacgtcccgtgtcggattagtgaagttgaggagaggtttcggttattttcgtgatgttgtgcaagacaacatttttttttataataatacagtcagcgtggtattgcgggctttgactgagcggttgtattacgttaagggtgtggatgggtttgtcccatgccctcgacccattgtaccattctccaggttgaaatggattcgcgaccgagtgcggagaggattagcagctgtgccgcctgtgtggacatatgaacaatttgtcaattcatacacaggtagcaagcacagacgttacacctctgccgtttccaatctagccgctagaggcttgagaagaagtgacggttacttgacaacattcatcaaagccgaactatacaatggcacaaccaaggctgacccttgcccaaggttgattcagccccgcagccctgagttcaatgttgaactaggacgatacttacgtccacttgagaaacttgtctacaaatccatcgaccatttgtttggccaccatgttgtacttaaatgtgacaac

SEQ ID NO: 2183 - DNA, 607 bp, Astroviridae sp.
  isolate rob180ast1nc genomic sequence.1
tgtgttgcaaaatcccacaaatcctcatatgttttctcaatttcaacaggatcactataatggaatttctcaaacatcttcgtataagctcgagacgtccaagttgtggatgcatagtcgtgttgttcataaggtgttattatccctagtaatggatctctcactttttttcaactatcaaggatggagtgaaaactcaaaccactatgcaaatggttgtcacacaggctcggaaaataaggaaaaagaaaccctttacatgtgctttttgtaataagacttttacaaactggcatgaccgccagaaatgtaagaaaagccaagagaaaaatgcagctgaaaagaaaaaagatgagccaaaaaacgagaagaaggggcagtagaaacatcgagctgccccgtttcggttttctcgtggtatgactatcttgaaaaaccctttggaaagatttgcctacctgaagaacaaacattgcttggctatatagcagttgacaaactagtggagagaactaaaaaagtgagagatccattactagggataataacaccttatgaacaacacgactatgcatccacaacttggacgtctcgagcttatacgaag

SEQ ID NO: 2184 - DNA, 607 bp, Linepithema humile picorna-like virus 1
  putative RdRp and putative2
cgtgttagtgtgatcttgctcttaatcggataaaaagagagaataataagatatagagtagtgctactaacataagggtcttagttatttagctttaccacacaaggtggaccgtggcagccccacaatatctagtgtagctctctaggatgggaacattaggtcgtgttctatccgaaattacccatggcctgcgtctaaaagtaataaaacaactaatggcaataataataccgctgtcattgatataaatagtaatacaggtattaatgagaaagagagcattggtcagagtaattttacagctcctcaagcacaaaattatgaagaagctccacaaatttctcaaacagttgaggagcaagtgcaaatcgtaacatttgatgatgataatgcagtagtccaggaacatataccatatgaaatagaagttccacgttttggaaatcaacaacacacggatcttttgacacattcagttgtgacgtttttaggaagaccgcggcttatttcatcatttccttggttggccgaatattctcggtccacgaatatactaaagttttcgaatcacggattgctcgtaccatcgaatattttatctccg

SEQ ID NO: 2185 - DNA, 607 bp, Fusariviridae sp.
  isolate H1_Bulk_Litter_4_scaffold_181
gtcaagatgcagcactatggttgtgtctacacttgtttgtgacttgaagtcgtcggactgtccactctgctccttgagacatggtggctttagcctttatgtcttaagtggtcgagttgacgggccctcgccctcaattctcattttatttatttgtttaatttatttggccacatagcccttgtgctttgtggagattatgatggtgcgctggttccgcactgacagggagttttgttttcctgtcagttcggggcctgtgaaccatctaatctcctcaacgctcatggtgactatgtgcgggagtcaactgatgccgagtatattattgaggttggcatggtgtttgccattccaacaccaataatgtggtcgggcccagatggtttcccacctggtcctcatcctgcgtcgccaaggttgtaggagtggctttgccgcccctgagatcttgtcgacgccggttgtggagccggtttgccactgttccccaaaattccttttcttgtctcattgtcaaatgcaagctgcccgaatattagctgagcggatgaagttcaaaggggaagcacccttacctatgccaccacgcgccccttggctgaaa

SEQ ID NO: 2186 - DNA, 607 bp, Sanxia tombus-like virus 3
  strain SXXX37381 hypothetical protein 11
cgccaattcttacgtcagtgtgttactgtttaacatcaccatggcttttagcactgaagtccaatggtgtttaatcggcatcgggttatgtcgtaccggtaagtatgtttatgattactttaacaggtttaaattacgggccaaggccatcaccactgctgctaattcacaggtcaatgctgtcatgcaagtgatgaacggcgacatctatgaccatatggaaattacagatgtcaccgaagatttgtctgaacaagttcttgattcatccgacaattctgttgtgaacaagcgtaggcgtgttagacaacgtgccccttttagagcttatttggtaaaaattggcaaagcaaaattcggtctgctcaaacgaactgaggccaatcgcatggttgtccgtaagtttctgtatgataattgcatagcacatggcgtgcttgcaagacacattacagataatattgacttcgccactgagatggtatttatacctacagagtccgagttgaccaatatggctatcaaatctactaccgttaatgttgagagtaacattgttgcccgcttgctgggcaccaatgatgctttcaattgatggggcccaagc

SEQ ID NO: 2187 - DNA, 608 bp, Apple chlorotic leaf spot virus
  VIC10 RNA, complete genome.1
ggtggaattactcaaacattttggatgggatgacaaggtgttgcaaagttacatcagaatgaaatgcacattgggttgcagactagggggtttcgccatcatgagattcaccggagaattctcaacatttttgttcaatacacttgcaaatatggtgtttacgttctgtagatatgaggttccagatggcaccccaatctgttttgcaggagatgacatgtgcgccctgaggaatttgaaagaaatcaatactcatgaattcattctgagtaaactgagcctcaaggcaaaagtcaatagaacaaaagtgccaatgttttgcggctggaggttgtgttgtgacggcctcatcaaggaaccttgtttgatatacgagaggttgcaagttgcaattgagaatgggagactgatggatgtgatagactcatattttctggaattttcattcgcctacaaattaggtgagaggctctattcacatcttgaaattgaacagctgaattatcatcaagttttaacaaggttctttataaggaacaagcatttgctaagaggtgattcaaggcacaacatctcggaactcgagtggctttcagacgaggatggcg

SEQ ID NO: 2188 - DNA, 609 bp, Wenzhou bivalvia virus 2
  strain beimix75763 RNA-dependent RNA1
ctttttctggccgcgcttttaccgtggtcggcataccacgtaggtctgatgatcaccgctaatcatttgacgcaaaaggccaagggggggggtgactattgcccggacgcacttgtgtaaacaaggtaagagggggaaggcatacatcaatgtccttcttcactcttgctatcgctgcaaggtagatttgtccgaaaacctcacggacgaggtatagactccaaacctcccgcccccgatcgtgtatcacatgtcgtgacacgttactcgtagttcttaggtctttgttagtaccaacaagtccatcccgcacccccctctggaacggctttgggagggtggcgcgtgcggcccgggcgctcctagcaaagggtgccagctgggttcaatcaacggttgtgtgttgcaccacgatcttataggattcgactcacccatagaactacaagtaaacatcacgcgtgcaatgacggctatcgcctgaaacaacgaaagggggcaaaactctttagaacatctgttctcatctagcggcagggagagggaattagctggcagtaaacctcgacctgaaatttttaatgcagccagggcgccgtttttactcta

SEQ ID NO: 2189 - DNA, 611 bp, Erysiphe necator associated ourmia-like virus 11
  isolate1
tggaagcccctttgctttcatccgtcgctaaccatttccggtctccaccaccctcccttccacgcggttacgtcacatttgcacgtaagatcgttcgacgcctgttccctcacgggtgggacgccggatcttacgagtcttgtgtgctcggaaccgatccttctttgtcagcatgtttggagaatcgccgcagtgcgggcggacttcacggctatgtttccaaccctcgggttgagaatcaactcggacgttttcgtcacgatgacttcctcacgacgtgcttagacggggcaacccgtcctttgagcgtcgcttcgggtctgactgtcgtccagagtgccggtaagcctcgcccgctgagcaaattctcggcggacgcgatacacttgagaccgcttcataaggcgatctatgatagactgtcgcgcgagaaatggctctgccgtggtgattttacaactgacgttctacagcgcgctggtttttcctttgttgaaggcgaagtcttgacttcgggggattataagagtgccaccgacaatctctctatcgaggttgccgaggctattcttgacgaattgctcaagtccacggtctctgtgccggggtcg

SEQ ID NO: 2190 - DNA, 611 bp, Wuhan insect virus 11
  strain CJLX30623 hypothetical protein 1 and1
gtgaggtttatacctcacacacaattttgacccatctatgggtaaaatagacgtccagagttttttagcatgcattctttgagagacgttaagcacatgaaagagcatgaagttgtcgatgtacagagaattcattctccaaggcagggcacatcttagtatataaaacaaaacgattccgattatttacgacgaaaccatttaagtattaatcctgacccgattttgatatacgacaaacagctgaataactgttaaaactattcaaatccaacggaccagtaatcttaaattacctgtgacagccgaagtttagtaggttcccaatatagccgtgaaacgcttgagggccgttacagctctaatttaagacctacgtttttaaagcttggtaagcgctttacttgagcaacatatacaaaactagtaccaaatcttagtggaatttaagtatgatatttgaatgttagacatgtattatgtcaaatatcctctacatttctacataaaggtcatgcaatgctcagtggttattgcattatggtcgcagttaacttgcagttttgtattgcctgtgtcggagcagtagtaaagtaaacagacgatttcac

SEQ ID NO: 2191 - DNA, 613 bp, Marmot picobirnavirus
  clone c214910_g1_i1_libraryA_2588 segment I1
tcaaagatcaaacttggctcaggagcaattgacggcttcaagagatcaggtggctaaggacctaggttatggtaccttagctgaaagtacacggcataacaaagcacaggagcagcataatgttaacgtccttggtgagcaacaaagacacaattatgcccaagagagctataatgtagcagtgttaggtgagcagacccgacacaacatagctaacgaagagctcacacgcttggctaatgaagagattgcacgaagcaatcgtgcacgagagagcgaaactaatcgacataatcttcaaaccgaagatgtggctaggcagcagttagttctatctcaagattcattggctgaaactgtgcgatccaatctcgcacgcgaaagtgaaacgcatcgatcaaacgttgaacgggagagagaaacgtttagatcgaatcgcgctagagaggaagaaacttctcgatctaatcgcgcaaaagaggatgagactcgaaggtcgaatctagtccgggagatcgagactgaaaggtcaaatcgggcgagtgaaggtattcgtcaacaacaggtgaatttaggctatgcgcagttaggtgagcagcgccaatatcaccaa

SEQ ID NO: 2192 - DNA, 613 bp, Beihai picorna-like virus 74
  strain BHHK130969 hypothetical protein1
gtgtgtttgttcaacacacatgttcatttttacccagttgctatgttgcaatacctaacttaatcagaggttatgttttagaaactcatgatattagaggttatgcttgaagaactcggtaagttgatatgttttagacactcagaaggatgaactcttgctggtcgtttattactcgttagtcattacgtctggtaccttcttgctcgtgagaccgatattgatggtcttctattactcgtgagaccaattttgttagctattgttaactcgtgaggcatgggatttattttaaccataaaacttatactaatatgagatggttttagccctatggaaatgcttagtacccttaggtgtgggaacacttttccaaagtcggaaaaacttcaaccgctgtgttgtacatgttgattgattttacatctcaccgctatgaaaaaggacattgctttattcatatgataaggacgatatggagccggtttagctacgtcgagactttggtcgtagacgcgtagtatgccaagcccattggtcaaactattaaggctctctggattagcaacccagtagtagatttagttttggtctgggcgtattccctgaagat

SEQ ID NO: 2193 - DNA, 614 bp, Serbia picorna-like virus 1
  isolate 71282 RNA-dependent RNA1
gtagtacgttaaacgtacgaccaccgatgagactgaaatgacactagttgagattatttcaatatcctagtgttataaagtcaatatttgttggttgatcgtttcgtcaatcgatggcgctgacagccggaaagacggcaataataaaaaccaagatttagtttttaagttttgatttgattgcaaaagctatcttgaatagacaatcaaaatattaagtattgcaaaagcttcttaaagaagacaatatttaattagttagtaaccaaacctcatcgtgcccctaagggttaaccggttacgtaaaagcgtagaggtattaaggtcactgcggagacctaaaatccgcaattttatgttttgtaatgttttaattatagacttagatgtaactataagagtttataaatacttgtttcaagatttatagacaagatctgatcctatggattttagataaccttcatgttagtggatagtgtgtgtacctatctaaacgcataaggctcttatttcatatttaaagtaggactatgtattacggcgcatctaacggtaacgttagtcaagaccggagaatctcggaatgaattttagtaattcccaaatttata

SEQ ID NO: 2194 - DNA, 615 bp, Wenzhou gastropodes virus 1
  strain WZSLuoI86017 hypothetical1
ctcgcacacgcgtttgcgtgtgcgaggatttcatttagtagttgtctctattttggagacacaattggtggacaggggtccgcccctgttacaccgtttgtcggagcaatggggtacgccccattgttccgtgctattgacgatttactttcttaactaggtatcgaaagtgttaaaccagctttcaccaaactttctacggagattgtaagattaaatctgacctgctagacgtatcataaaatccaatgtttactagtattgcttaaagctgtccgatcatgaggaagtacctactttcggatgtggtatttatgaggcccgtcacttggcctagtatgaaagaagtgaccaccaaaccagtccgcgaactatgttcgtttatagttatgatgtgtaccttttctaaggcgcgactatttagtctcacattttataaattggtgacaatttacataattatattcgtttagtgtgcggagagccgtagacctatggtgtatgttgatttgaaagagcttgctcttagtcagtacattgaaagccctagtggtgtagtaaaacataggtcgctttgtgaacgagaaaccccaacttttggggctttcagttcgc

SEQ ID NO: 2195 - DNA, 616 bp, Picornavirales sp.
  isolate H3_Bulk_Litter_17_scaffold_25321R
tgcgtatgtaacccatgcgcatgttttcatatagatatctttaaaacaatttgtagagaccctgcatattcttctttagaatcaggtatgagaccctgagtatttgctgttaagttttatttcgacgactattccgagaaatagggactctgtagccctggtattttgttctataactgtctggtttgtaatgaccttataaacatttcagttgttcataacatttgctataatttcagtataatatttctgtatgattataattttgcaaaaccccttttgttaatcacattttattcaaagcttcttaaatgaagttgcattagcattttatgcttttgctgtcagtctgatttattgttatatttacttattaatggtggcgagaattccactcgtcttgaaaacctttattttatatagaggtctgttttgttcacgctttaggtttcctatcgagcgactatgtgatgaaaaatgtggtagaaccaagtgtttcatcttatgcatacacctcaatgataggttgttaaaatctatatcacgctcgtgtcgtgaatgttgggtactctgatttaattgcagtaactttcctaaccgagttgtcatatcaacc

SEQ ID NO: 2196 - DNA, 616 bp, Hubei odonate virus 7
  strain QTM27298 hypothetical protein 1,1
atatgcatgggcttcccatgtatatcaattttatagtccgatccttattttaggtggcgagtatcctgctacatattttggcgagtacccttagcactggcgagtaccctatatctagtagacgattacccatttatttctgggttgggtgacccccttaattttaaataaccatcttatatcatattcattatttcaaatgttatattatatatgcttcctcatttattattaagtttgcttgatttaacaagtttgaactcgttatgaaacattgtctaagataactggattcggattctgggccagttatggagaaacggacgattgactgagagtaatggtgagactttttataattattcagtaacaactgtggttagtttgcggacgcccgaccgttctgtaccaattttattaagtctaaatgggcccttttgcaccttttggtccttaaggtctacagccattgcttgtagttacggacattcagacctccctgtttgatagcatctttctaatatttccagaagtatttgatttcatccccataataattttaagattgtgttttaaagtttttgaaaggttttcacaaaatctttcctctctggca

SEQ ID NO: 2197 - DNA, 618 bp, Permutotetraviridae sp.
  BGV/MQ/34/Bogor/2017 gene for ORF2, ORF11
aagccctttgtgcttcgtccctttgatcctttctatcttcctcttctacgacgacaaactgctcacccaactcgctaatactttctctgctaatgccgcgttcaagtggcttgggactttcatctctgcacataagaaacaaatagctgggctcatatttcttgtcccggccacttttctgtcgtgcgatcccaaatgggcaaccgtagtatctgctgtggtttcctatctggtatcagaggtgttccccgcccctgggaagtatttcgagtacggcttccttggaggttcactcattctattgtgcaccgcaaggaagccgatccagttcgtcgtcgctacggtggttgcgctgctaaccattggtcttgggttgtggggctcggaggtatttgcctctttgccctccacctcacgccagggctagcaatcagcgacatccctctctgcgaccccagaaactgcaaagtctcctgtactaccaccggccacccgctcccttggtgtgacacaggtcccactgtctactgctactcagagggcaaggagtgcaagcaatgttgccccttagctctcccaccgtgtacgccatggccgtcgtgcttcttcacgactacc

SEQ ID NO: 2198 - DNA, 619 bp, Biomphalaria virus 3
  complete genome.1
cgatgtatcggtaaatgtagtttaaccctctgtttctcgagagagacaggttggtgttctatgttctgctgcattgagaattgggctcccgttgtattgttgtacaaattgttgatatgtgttactcgtaaattttcagttaagttagcgttagaatttatgtgtctaccattataaacgtttgtatgtgatgtgttctaatttgatgtttatccctggtgttgaccgtgccaggcgatctgtaatatctgatgaagaagtggtgtagcttgacctacttgccctaaacttgggttttttattttaattttggaatacagctatttccctcctagttggattaagacagatggtgctgcttgacaatcagcatcaatcggtttggacgtttgtccagtcaagttgagtgtttagtacttgttactttgattttggaaattttagtgcctcatagctgtgagacaacactattagtccttgtcagagcgataaaggcttttcatgagacgtaagttgagcaattatgattgggtagcgctggaaatccgcgtagctcgtccttgttgaccatccatggtggtggatcagattgcttggctgacaaataaccacagatatt

SEQ ID NO: 2199 - DNA, 621 bp, Nephila clavipes virus 2
  isolate SC, complete genome.1
acacattcaatttgaaactcatattcattcactactgctccttggagcagtttgtgtttaatataaaacccaatttatatgttattatatgtttgttttgttttgtctgactgtattagcactattaacgtgccagtcgaaaagaaaataaaaatagaaaaatataaatactttataaactgttatgatgtcatttgcgaatgagattgaataagtacagaaagaatgttgagattgaaaccccgtttgagtccccaaagatgcatgctatattatctcatactctttgcatttttatgaatttcaatttatattgcaaaaagaaactaacatttcaaagttattcgagattgatgttctataagaacttatatccttcgaaaatttgttagtttaatataacgtacctaaagtaatgaaatatttaataccacccctcctttgagtagcttaacctctcaaagatcccgctgtggatttgtattaaatatgtaatgaaatgtgggaattgtactttattaaataacgaatgattagagcttgcccgattgaatttaggcttgttcaaattgatcgcttgaacaaagtattagatcactttttatggatttagtatgaata

SEQ ID NO: 2200 - DNA, 621 bp, Picornavirales sp.
  isolate H4_Bulk_47_scaffold_9 RNA-dependent RNA1
actagagacctttaacttattttttgcatcagtacttgtgtataaccttactaataccgtcattaaaactcaaagtagatttaatgaagctgttattggatgtatatttctactgattgaacagactttgtttgttccgtgcatggtctcaaaattaaaataaaataaaacaaaataaaacattataaaattgaaaatacaaaatattaccactttaaagatcactagaatgttttgaacatttctataccaccttatatttattatagagggctctatctacgagcacctagcgtttacagaagacgtaacttttgctttagcactttaaccttgtgaatggaatattggcggagggacctatgaggaagtacctactaacctcctttgttatcaaattttctgagtcgatttatttcgatgtttcatagttgtggcgcactcccactaaatttagatactcaaaacccaatatgtggcattcctacgttgttagagagttccgcgcaggcggctatcgcgtttatttaatagataaggtttattaatgtaagtagccattcttacatgaaatactaatcaccttctattatctaaaaccctgttgtttagctatatatt

SEQ ID NO: 2201 - DNA, 622 bp, Rhizoctonia solani beny-like virus 1
  isolate BR2 polyprotein gene,1
catccagtgtagcagcctaccatgccaagtatgtaaaagtccattttttgttctctattgctgagaaatttcttaacacgggccaacagtatttgtgtatggtgggtggatctcctttcttcggatcgtaggcgtctggttgagacgccatttaaggttgtgcaaggtgggcgtgtgtcgagacattcacgtaatcatcttctcacagggggtacctaaagcccccatggtcgtagacctttaggtgaccttagaaaaggcacgcgggcgactgattcgttcaaggctgaggagtctttaagtgttcttacaaggacacgaccgggttggaaaagccctctctctacagagagaaaagttgacaaagtccttacgcgataggggcgactttcccaatagggagtcccagtcgtaggctctactgttcagcttcgcctttcccaatagggagtagcagaacacgttcgggtaataagggcccatgttggtcaccaagtgcgaatgagcaacggaaagttttcggcaatcggatgaaagcgtcttaactctgaaaaagggggccacccgtgaggggtaagtgccatgtgcgtggagtttgaacggcgatctggaacccggtaag

SEQ ID NO: 2202 - DNA, 622 bp, Beihai picorna-like virus 4
  strain BHZY60671 hypothetical protein 12
atcccttttgccttggagaggcgtaaaatctaccagctccggaactattcgtagcataagtttaaaatagttgtgtatatatggatactacatattttataatttacatgtttatatattttatggaagctttgtacatatagacatcctacccttaggataccggtatttactggaggtttcgtcaaccagggaaacattgtcacacacagatacagtgggtactgttctgatgtggtgtttatattaaatattgcctacttcacttaataataataatacaaacagtcttagaactgactcaaatagttctcctgatagcgcttatagtgtctcaaaagcagctcaacaggtttcaacgcaaaatgtacattttgttgatggagacacgccatggtcttacgacatttcatcatcaccggatagcaccacccagctcgcaggatttagcgatgcagaactcggttccttcctcggtcgtcctctcaaaatcagagaatttcagtggactccggaaagcactcgattgtttgaaatttttaatccgtggactgatttttttagtaatacagatgttttagagaaaataaatagatatcgtaatcttagatgtaatcttaga

SEQ ID NO: 2203 - DNA, 623 bp, Picornavirales sp.
  isolate rfb198shi3 genomic sequence.1
tggccgcaatcgctagtgctattggtgctcttgcaggagctgggattaatcccaactctattatgcaagctggtttgccttttgcccaggcagcccagcaacaaaattatcagcaacaaaatattcaatcttattttaaaggagaacaaggtttacaatcagatgtacaaaatcagtttactaaagctggcttgccttcttttatggcttataccggtggtaattcaggttctaacagtttgccgcgtcaagaattttcattaggcggcatgaataggttcgttggtggaaatgttggcgccaatatgccttccaccatgaatgctatgcaacagtattaccactggggtaacccgtttggaagttcaggtcaatttaatttccaaggagtgaatggttcaaatgtaccacgtaccaatcctataccaagcgatgcaaggcagaataatacaggttctacatttacaacaccagacaatgctaatacaagatattccacgcggggaacaccagctcaaagatcgactgctgaaggaaccactgtccctggagcttttctcaatacctagttaaaacgtcattgagagaaatacgtagttatatcttgcccagaaataactgca

SEQ ID NO: 2204 - DNA, 623 bp, Cladosporium cladosporioides
  negative-stranded RNA virus 1,isolate1R
aggtttcagtaactattaaccgaccgacgggtctggggattcttaattagtgggatggtataactatcatgatccgtctaattctgaatttctcgtaaaacaaatcttatttctaagacaaatagaaaaaaactcgactgctatagatccaatcattcatcattgtcactcgatggattccaaaaggatctactcagaggaacgatttctcatatccgtgatacgtccaacagatccggaagaagaatatgtagagattgatatattcactgagaataacatggacaatccgattgaaatgacaacaggtgaactccatgacattgtaactgataaggttccatttatgcatatttagtccactgtatttgtactctccacagacagggagaaggtactgatgtctgtcactgatagaaatgtcaagatccatttcctgaatcgatttatcacaatagacaacatgaggtttgatttcaattcaatagtactggctatttctgtagacagagaagaggagagacagagggaaatgaaggagtaagaaggatgatggaatctatatctgtcattagttcttgataaactgctatgttattacttaaagaaaacccgattgcatc

SEQ ID NO: 2205 - DNA, 624 bp, Phomopsis longicolla RNA virus 1
  isolate KY RNA-dependent RNA1
tgcacgggtttagcccggcccccggatctgacgcgtgcctgcggactgttgaagtaggttgtcgtccttgcaatgtgagtcgattaaagagattatagtgccaaaggaatctcgcgctctcgagcgttcggcacttgcatgttccggtgccgggctgcgggttgacatccgcggtcccgttcccccctaggggtatttaaccggtgggtatgctagtaaggtccggccttcgggttaatgaacgcatattaaaatcttagatgtattcctcgagaggaacgtaagaacccactaggagatgctccaggagtggaccgtagcgggtagtgccgacggcctgggtggtggcggttgtgaaacaccgcggaagtggatgtaggggcgttgcatgtaatgcagggttagaaacctgccccgagtagcggtgtcgctgactgtgcctcgcgcgcgagtgacctccccgtgactgtgtgttcgtgcacggcgggttcttgccctttgggggccgcgaaaggttgtgtggacatggtcgctacctttcctaccacacccaaaactccgggacaacgaagtccctgatgagtataaaagcgaattgaaaatagaccccaaaagaaacagaac

SEQ ID NO: 2206 - DNA, 624 bp, Wenling picorna-like virus 6
  strain WLJQ101512 hypothetical protein1
aagaagtgagactttaaaacactttatggatcgcaattccattctttggtaaaacttagacaaattgtagcttgcagatttattagaagagtttatagttgtttggcaaatgataatctttatattgcttacaattatttcacctttcgtgccgtattgtactctagttcaaaatcatttgtggtttgctattctatttaatgttatattagttgttttttatgctatagccattgtacatgtggcaaacgttgttatacatgacgtagacgacgattaatatggttgttgttattaatgctccttttactgaagggggtgtttctagggttgggaaattttttgttttagttttcccaaaaaaatttaaatgtaggttatttgttaccgtgtaccacgagactttcagctgtcaagtgggcctatcatgttggtgctattcccaggagaataatccgacgagtcattactaaaaatgctacccattgtcaaaaatggagattcgaggagagaactgctaaggccaagttgcttcaacaagtgcgggttggtatagccaatagtgttaggaaagagaaggagaaattgcgtgatgagaaatttcagtatgagtacgagcctcag

SEQ ID NO: 2207 - DNA, 624 bp, Hubei tombus-like virus 10
  strain WHCC112361 hypothetical protein 11
ttagcggaccgcattttgtctgcgcaaagtgacctagggtttgaagaatatatagaccgggctgactatatcaacgccgaaatgcttgcggatgcactaggcattgatgccccggattactcgggagaagaagagttaaaggagaagttgcggaagatagaccagaaagtcaaggaaaaggtctgtggtacaaaggagctgcccaggaaagggaaggttcataagcgcaaccgtgcgccgttcatccgttcaatggtaactgaattacggatggaattcccgttcaatgtcactgaagataatgcagctaatcgcctgtccatgcataggcgcgctgttcaattgatgaagaatcagggactgtgctctgcccacattgttcgcgatgtagacttgattgttgagatgatgttcgtaccactgcagagtaacattgaagcacgtgaatgtgctaatacatgggctgtgagaaacgacatcgacaagtataacgccaggatgctctccgcctggtatgagtggttactccccaactggctgttgaatagacagcgggggagtgcccatcgcgccgcttagggaggcccagtgaccgtactcggaagggaagagactggcattaaa

SEQ ID NO: 2208 - DNA, 625 bp, Picornavirales Q_sR_OV_020
  putative non-structural protein1
gagagatattctctcacgtgcgggtaaacgatatgctagtcgttttaactggattttattcagtttatgattttaactacgtacatgctagcccatggcgtgtgcttttgaagtgataggaacttcaataatgcaacttggaaagttgtatcaatggaaggattttcccaagactgtgtcttggaaccaccctattttgggttggggcttgcgcggcccctttactcttagtggtaagtccttcgaccacctcaacgaagtaggcagtagtaggcgcggctctctgagcctcgtactttatgcttcagcaatgaagcacagttttaaactggtgcgtacctacgtctcacaagagaacttgtgatttgactgagtacttgtcctatagtatggaacattttggaattgatgaaccgatttggaaccgctatagggaacggatttgattcccttggattgctttgcttgaaattgtttctgagtgttgtataacgtttctatgctgtccgtcttgcaggacattaaggtatagaatttatcggttacccgggccggagtttaagtagatttaatgaggttggcaccttatcattatttcttgcaacatttcaggctaagatgatgg

SEQ ID NO: 2209 - DNA, 626 bp, Schizochytrium single-stranded RNA virus
  complete genome.1
agtaaaaaggtgtgcggggtaatcccccgcacgcctttgtttgtagaatgcacttatacagattccgctcttgccgttaattataccgctcttgccgcaatctgtcaccagatccgccatttccgctataaacgccatttacgcaatctaaacttgttttctctttcactaggttatgctcacctaattactcaaatttgctacaccacccacagcacttgattagtcaccacttgctgcttgtattatatagactcttttgtacacatttaatgtaccatatttatttaccaattatagaagaaaaataaaaatcaaataaccagaaaataaaaatatttatagacccacaatgtctttaaaattggactcaactctatttctttgccgatttagacttgtttgaacctttattccgaactcctcttgtatatacgaggctagtaaggtaaagtgatatgccctggacgcatgtatcgtcctgtttgtgagtaaagtataactctctccctaaaagtttttacgtttgtcagggataagaccgctagtgatgtatgccacggacacagaagtcctatatgcatttaattccactagttcataacgtacccccccatcttaacacc

SEQ ID NO: 2210 - DNA, 627 bp, Aedes aegypti anphevirus
  strain 1a, complete genome.1
gcctgcccacagaagatggtctacttccatatcagaagatgcagaggagaggtcatcgacaccaaccacccccgcggtgtgtatccatactttcatactgatctaccagcgaaatttcataataaaaaacccgctagttacaaatcatgtctgtcattgctgcattgtgggcatctgggagcgtgaccttctacaggttcttagaccacttgatcaagagccttaacgggggtataatgttcgacccccagccggacggatctctcttcggcccacccagaattcacttgatgagtgtgtcgtcagagggacttgccattctggggacaatcgcattggctgcatgtgttgggtttcttatagataactggcatgagtatgtgactaggcagaggtttcgcgaaagggtaagaagccgattgtctcgggtggattactatacccccaatgagtgagtcatagctcgccccaaaatcctcagtgctcaaattgtgacccactggatatgtatgacacacgatagtgttacatgtgaatgcgctttattttctagctgtgatatttttatgtttttattagtaaaaaacccgccagttacaaatcaataagaggagtaacacaggaacg

SEQ ID NO: 2211 - DNA, 627 bp, Frankliniella occidentalis
  associated mononegavirales virus 31R
gcgacgcaaagtgtaccttggtgcatagtatagccatttggcgacgggatttcccggaaaatcgaggcatttgcctctggccatttggccctaagtgtttagtgtgtgtaggaaagtttgtcgcttatttccgagcacatgtatgagttgtatataataggtctcgtaactggggcggcccttgttggactagcgtggtttataacgacgcgcgtgcagcattggctcattgtgcgaggactaccggcccacgtcggggatcttgagttacctagcgaatccggcatcggatattcgctgagttctttcgatctcgactcggttgatgattaggttgtaagccttttggcgtcttagttttcggcctttcggcgtttagttgtaagtctgacccgtttgggcctttagttataagttgcctcttttggcttattgtaagtttccctttcgggttagttttaagccttttcaggtcttaggttctaggtccattggattttctattgtagctttttagcttttgttttgtgcccccttttggggccgacccacgtttggcgtggcttatctttatgtttgcttaattgtaggttgcgccgacttaagtcggcgcgttgtagatttaag

SEQ ID NO: 2212 - DNA, 628 bp, Beihai weivirus-like virus 12
  strain BWBFG40815 RNA-dependent RNA1
tctccttctcgtgcatgtcaccttggcactggaattcattttgggggcgtcggcattttgccggcgagtagggagcgccactcacgccggtattcgccgggggggacgtgaggctgcgatagtcggcagcgcattttgctggtgtaaaatagggaggccagtccctgctccccgaattaccttcctgtcgtacgttcccgcgtgcggctatgagccaatttgcggcgtggttcctcccacgtgaaggtgaaggccaggggtgcggtagccgccggtatgcatgtatgtagcgatgattcgatcgtcgcgggtagtgccacccctcccgactgctcctatctggattaaaggttgaagttgtgcgatgatgcccaaactcgcacgatggaacctagggcagcgggcatggctacggttcggagcgcgtgtacggtccggggtcagccgtccctcggaaccccatcgcgtttcaggttagacggttagggtgggatttttcccagggcttttgtattagttattgcgcgcttggtgtttttccgagaatgacactcacatcaagttgtcccccttgcgcactgtttttggagcgaactgttttgcagttattagtggattttcgcccact

SEQ ID NO: 2213 - DNA, 629 bp, Ryegrass mottle virus
  strain GUNCC_DN53883-16 hypothetical protein,1
attaaattaactctattgaacccgttatccggtgatataggatatctgtgaactaacatcacaataatcagttagcccctcgatttatgccttcagtggttatcgaggtctgctcatacgacgaggagacaggagattgtgaacttgagagtgcggcgaagatattcaccagtaacttcgacgggacttacgtcctatacactcacagttccgggccgaaatacgccggatcaactgtcacactcgtctgccctcactgcggggtgagtgaacaagcgacgttcccgaccagaggcctttcaggcaactggggtcaccacgggccgcacgacttacgacttgattgtaaggcgcggcactggcacggagcgtgcgaggtcattcccctctctgagcaagagtcgcgtgtagcgtctgacggggttttcgaaccaggtctaacgcacatcactacgacccgagggcagtcttggactagacatctttagtccctcccagttctcgctgggagtcccgcagcctggctacgggaaatatcggtggggttgatcaaacctacacctcttcgagaaaagcgctcttcgagtactccctcggcagactattctgttgcgtctcccatagtgaag

SEQ ID NO: 2214 - DNA, 629 bp, Beihai picorna-like virus 1
  strain BHZC36988 hypothetical protein 11
ctccacacgggtttttgcccgtgtggagatcatcaagcttttatcagtagtaatttgcagttactcgagtcctctgtttggactctatttaggaatgttaatttaaactcaattcagtcgtcgatgtctctattgggtttattccctttagagttatacaattgtcttgagttttaaaaattgcatcactatttagagtctcgcattttgcgcatgactcggataattttactttattaccgattttagtttgtgatctgacccagttttctatctattcagtgtttttgctaaccatgcaataatatgtcgcactgtctacgccataaagcaagactatttataggtgcaaatttaactttgagaattctaggctttgaacttcttattagttgtccgataatttgttatcgccccggaccgggcgatttccttctcatttatgagagaaacttttcaatgtgctgagtactgatcacgtggaagcacactaatatgtccacatgaactatagtcataatcaatgaccctaaaagtccttgtccggaaaacacgcacaaggcattatccgcaggttttgtcgcgaatccaaaataggccggattgtagacctatcgaatcgcgataac

SEQ ID NO: 2215 - DNA, 630 bp, Isahaya Culex iflavirus
  17CxNGK-Cps gene for RNA-dependent RNA1
ataggtcctaacagtgtagatctgcttatttcaagtttttctagttttctgttggatagaatagtaatatattattttaatccatttagttcacggggctatacctaccccctattagtaacaaaatcatttaaaatactcggtacagaccggggtccaatttaatattcttaattatgcaattcgaccttatgataagttcaagaagcttctcttggttcctaataatccccctaggaatttccccttatcttttttgtataattttgattaactttggatgtataaaaattattattaaggcaaggcagatagtataattctgaaatgttacatgatttagattgccatttgaagcccctagataaatagttctgggtatgagttcgaggaaacaacaacgatgccgattttggaactacaatttactttatgtttcaaagtagggttttactagtctgtgacagcttttgcttaatacacgttagcctatgtgctaaaacttcgatgacatgtttatccatggacttcggacatatatctttaagatatgcgtgtactctgaaacgtcagatggtagtagcatgacgaagatagcaacctaccaattttcctttattttctttcact

SEQ ID NO: 2216 - DNA, 631 bp, Wenzhou picorna-like virus 52
  strain beimix75583 hypothetical2
tgtctcatccccgaccaccatgtcgttaaactggtcgcggcgcgcgtgagtgtcgtagccccacggggaagccaaaatcacactcatcgtagtggttacatacgaatacatgtttttgcttgtttatcatgattcggaatgcttgcgatgagaatggggagtattgaaactcgagtgctatttagttaccgcagagtcccactgcaattaaaatacgcgataggagtgttctaggaggcaagagcattaccggtataaattaaatcgtctcactaaattttctaatgaaatagagtctgctgaagactttaaaatcagcgggtatgtaccacaagctggcgagcctggtactactatagcccaaggcaatgggcaaaagttggaggccattacaggcttctccgaccagttggctggttggacgacttctatcacgggaggtcgtgacgctacgtataatttagctaacaataatgattccgacttgggagatttcctcggtcgaccagtcaaggtgttagagacacaatggtcgataggacaacctctttttgagcgttttaatccttggtatttgttcttgcacaataccagagtgaaagagaagacttccaactttgaattattgagg

SEQ ID NO: 2217 - DNA, 632 bp, Culex Bunya-like virus
  strain CBunVL/Fresno, complete genome.1
agtagctgtttattgagtaagagtttgtagaggatggatgattaagagtgtgagtgagaggtgtagttgtgcgggtggtaaggttgagagtggtggtgtagaggaaaggtggaggtggagaccaaagtgatggggtatattcactgtgtacactttgctcaggttctgaaaacgtaaacctggataagaagagaaagaagtactgcatttgtgacaaggccttcttagaggagcacacctgcaattgctcagctggagtagtcaaggaggagttcctgagacccacctttaagcattggcatttgagtgagcctctaaataagtacagactatcttgcataaacgaggagctattgaagaagagctcatccaaagggccagtggttgaccctgactacagagtatcctctttgtcttttagactaggttggccactatcaccattcagtaagagctcacttccagtgcctcgttctggttctctcacaacaccagagaaacccaaggctgttaaaggcgccataaaggctgagccgaaatctgagccaaatccatctactagcagacccagtagagtagctcctcacacacaatcagaagggactgctaggaaggagctgtttaaatcagac

SEQ ID NO: 2218 - DNA, 632 bp, Haldis virus
  isolate AbWando19, complete genome.1
ttccgatctcgattttatatcgcatacactcaacaattacccctttatttggattatcttctgccttgctttcgagcaggtgcattagacttattccttataattcttccacaaaatttttcttacctccttttggagggatctttttgcgcgaattatatattggcaatgtataatttttaattgactaatcgtcttacccctttttgtttgcataaacttgctgtatctgttgtactgcaagctattgcatatgatggatttttgtgctgtatactgtaagctattgcacttatggttccagcgagtggtttgtataacatttccttaaccacgcgtaagccaacaaaataattagtcctattttgttaactttttatcaattgactattgatattttgatgagttggcactcattattattatcttttgccaaacccctcaatatttaccctagaacgtcatcttaggaggagtttttattttctaacggttctttttagacgcttgattataattataaccttcggtacagttcttagagtttttagtatgttttgtccaacaaaacatgcagcctgtattaggtttacaaatactagggaaacgccccgaaagagcgatttgtggta

SEQ ID NO: 2219 - DNA, 632 bp, Beihai picorna-like virus 78
  strain BHBei73249 hypothetical protein1
gcgaaatcgtctatggttaccaattatccttaaattggcgcaggcggcgttatcgtctttagtggaaactactatagtgtcaccaattgcttgtttacattcgacgtactatttgagagtgtgagtttcctttggtcgtagggtacttttgtaccgaaagcagatgtgttttcctgctgtttaaggtttttatgatgagtcctccgagaggggttttgtcggcacccagtcgacatcctttattctggatgacaccatacacggtacaggaaagtgcttgcaccagtaggttgttccaagagcgtggatcacggatactgagtttattttaaaacctagtgtgaagcgtggcggaagacccttcctactgtaggcgcatgtcgtggctagaacccgcaattgcgcttagcaacaagatagtgatgcccttgagtgatggcaacgttgttagtgtgttatgttatgacgaccgctttctttggcattttgccaacgggacggcccagcagagacacgattagttgtggcatcctatgtagtttggatgatctatcttgttgtgaataacccggtgattgcacaccacctgggtttgatttcccgactggccggtgtgtttgtcgttcggttta

SEQ ID NO: 2220 - DNA, 635 bp, Thrips tabaci associated narna-like virus 1
  isolate ThassRNAV161
aggaacccctacggggtcacataagagggctactgtgcacccagctaggcttaaagcccgctgtcgcagacgtcttcctatcaaggaagaagtctgagatcgaacgaatagaacaggagatccatggagtcttcgactccttactcttgttcgactggaaatcgtttaacgatgaacataactacaagatctatagatctgtggttgtgtctatcatcaagttaggttgtaccaaccttgacttggtgacaacgtattggaagcagtttacaaactggctcttcatacgtgtgtcccggtctattactcttgaagagcctagccgggataaacaaaacttcttcttcactttaagtgatattcgaagaattcgatcctatctggatagggattatcccatttccaaacgaggatggtcacggatagcccacctgatctctacgagacagctggtggccgggtccgtacggatagagcgacaatctgtcgatcgattccgagaggtgactacgtcaccctttattgccgaccccgatttccttaaggagatcggggacgtcgcttacgtcatcgggagacgcctcaggcgttctcacggcgactttccttcggatgccggacacatatctttaagt

SEQ ID NO: 2221 - DNA, 635 bp, Verticillium dahliae chrysovirus 1
  segment 3, complete sequence.1
tgataaaaatttaaaaatctctcagcctctaatacgacactgacatggacgagttgagagagcgggccaatctgatatgctcatgggagcatgtcatactcgatagagcgataggatatatcgtattgccaccgggccatgggaagagccacttacataacaggataccaggcctagtagaggcagacatggtattcgattgtagaggagacgatgagctgaaacgactgcgcggcaaagcgcgggagaccggggagtggtctacttacgatgaagaatggagtaatagactgtcggttcgtctaactaatcatcgttgggttgtaatggtaccatctcgcgagatagggaacaggataggcggtgtgtgtttgggggtggcccaactccacgacaagcagtggtcagctaacgtctcaagtcgtgggaagacgtctcgtgactatgaatacagcaggcaggttggtgtagatgtattgaggttcaagtgcaataaagacttagcagaatggttactcacagtggctaacatatggttagatgtgtgagcggcctgaggagtaccccccagggggacgaaacgctggtcgtagccgcgggcgcaagctaaccaacacatactaataagagacaac

SEQ ID NO: 2222 - DNA, 635 bp, Changjiang picorna-like virus 7
  strain CJLX30780 hypothetical1
ccgagtgaggacggtgttcccacaaaattataaaaaccccaatgttagagaccagattctttacgcgacgtactattttagcgtcagattctttattatttctatttttagggttttatattggcccgattgtagtatgactacaattaaacagtatacgtcaaatataagtcgaaagacaacgaatgctttcattatcattattcaactataagatttacaaaacacacgttgttatgggcgtaacttacgaaggctatttagctgaggtgatccccggattagtagatgttttgtgatgatatattgttgccaccattccagagttttcattaattggtaggagacaagatttaagcaggttgtgacaaccacgaaaggatgaacctatgatatcataatgtttgattagtgggttgcaatgaagaatgcgtaatccaagtcatgtattcgtgtctgttacctccccctgttaaagatgtgacccgtggtcacatttccacttatgtggcgccgtaagctatattggcgtgtagctgaggtgacttgtttagtccccacgtatgattactcagagagtgtgagataaaacttgtttaaaagacaaaatctaaaaatatttctgtataatcaaa

SEQ ID NO: 2223 - DNA, 636 bp, Bundaberg bee virus 1
  isolate QLD-6 nonstructural polyprotein and2
catgcttaattgctatataatagattgaacattctataacaaaaagtttcattggagttcaccagtgtcgaaaaaccgtaatgcagattcacgttaggagtcagccgtccgtggtccgagacgttaaatccgacaacgaaagcgatgtagtaaatacaaactaggaaatgtaatggctgaataacagtattgacaggcgttataaacaccttatggaaattatgtatttaatgcgtagccgtaggcagcttggatgtgatcggagtgaatgtgcgagtatgtgtgtgttttaacacattcgcttacgctatccaagtaatgaccgtagctatttagctttactgctcaggaccggtcggtggcagccccactaaagtccagaacattaaaataaatcaacaaattcttcaatacaccaatgatggtccaagtcagaattcttcaaccttttataataattccgaatttgatcagcaattcttgctttccgctacagacgggaggcaacatacaataattgattttttggaacgacctttccctctgacaaactttgaatggaatgtttcgagttctcagttttctacgctgtattctgcagaatttcctgatgccgttttagctcagccattgtat

SEQ ID NO: 2224 - DNA, 637 bp, Forsythia suspensa tombusvirus
  strain pt110-tom-8 genomic sequence.1
gttctggggcgtcgtcgagagccttaagccgtggctgtgttgtgcccgtcaggatagtagtgaagttgtggagaacatccgttccgtcagagcccgcccgggtgaattggcggtggtataccttgactacacgcacgaccctaagcaccatcacgtcaccaaggggttcgaaagtcttgttgtggtggataatgaacaagatggcgcgacaggacgttacccgcccgctcctccgccgcctgctcctgctcctcaacgtgtacaagtatgtccagctcaaagttacttggcgcaactcaagggccgctacggggactataaggacgcgctactacgtagcaagtctaaggtccctcgaagagaccctgtcgcggttgcccgcaagaagaagctagacgtgctagtcagcaggaatgtgtgcctcgcagaggcagtgaaatccaagcagcaccactgtgagagtgctgatgttctcagagagatcgcgagtctcaatgtgggcaataggagcgcgcccaaggtctgggatgcagttgagaccttggtggccacgacggtggccgattgcgctctgggggtcgcttgggaccctccggtaccgacagtgacgagcccttctgggccgccactaaggtcc

SEQ ID NO: 2225 - DNA, 637 bp, Brejeira virus
  strain AR800224 hypothetical protein 1, hypothetical1
aaaagggggaaaaaaacctaaaatttttgggggtttttttaaaaaacccaatttgttaagcttcaaatgaactgaaaaccggtattacgaccaaagtagtgcacgttggccaattttagaatacagtattttacagtatccaagattatgcttctccctaaagagaagcggacaagactttacggtagtatagtcttgtccgcttctctttagggagaagcataatcttggatactgtaaaatactgtattctaaattggccaacgtgcactactttggtcgtaataccggtttcagttcatctgaagctatactaattgggttgttaaaagcatcccgtaatacttacgagtttcatcgctcgtttaatatttctactctttctgagcagaataccacccctacaactcttaattggagttagtaaacttttcacaccttatcgtgtgaatacattgttttccagttagctgtgaaaactgtctttctgcttcctgttattcaggaagctcttctttgagactagctgtctctcttctattctctcgtaatcgagagaatcctgtctttggtcctcgcaagagaaccactactgtcttgaaggtttcttttgaagccgtcttatcttgatcttcaa

SEQ ID NO: 2226 - DNA, 638 bp, Beihai tombus-like virus 18
  strain BHZY60611 hypothetical protein 11
cgcacgttttccttgtcattggtaaccaaatggcaagcttggattcgtccttgagcgagttaggttgaatatgcaactgacatgaaccatttcggtgggtgccgtaacgcaaggtgagtggctgaaaagaccacaccggtgttacttaccattgaatgttgggcatttgtagcgagagatgatagatgtgggaagcaggggccctgcttgcagaacaagtggatgcgaactgaactctagcgacagtaagggagtatctgcttgcaatgtgagtgtgcgaaacttgtgaaacacattgcgtaatcaagctggacttgggagtccggtagctttgttgctgccggagaggcgtggggaggccaccaccaagtaaccaacgatgtagcacttgcccggcatgcgccttctctgtccgagtgtaaagacaatacccttctgcggtaccttaacactggagtgatttatgtcatttgctgataatgcttgcaaatcgccttggggtaatgtccgctcttaggctggtgtacatcggtgtaaaccgcagtaggtccctcccgatgcaccagttgttgagcgaactgcgcctgggggtgtttttcaaattagggatgtgcttatgctgccctccttcatgaaat

SEQ ID NO: 2227 - DNA, 639 bp, Wenzhou tombus-like virus 2
  strain WZFSL84050 hypothetical protein1
tcgacgtatcattttcccagacccgagcgcatgatgttcctctacgctgtgcttgttacctgtttcttggtgtgcatatggagactctgtgtgggcagaggtgccacagtgaatgctaacgcactggagcggtttgatcgtgccaccctcggcgatgagtcgagcgtcgatggtggtcacatgaccagccgccctgggtttgctgcagcaatggcgtgcaaggagaagctaggggagctgcgctacaataacgccaacaggatggtggtcggcgattttgtgcgcaactacctcagagagaactaccccgacatgaggaatgtcgatagggtgaggcacgctgccattggtgtggagttggcattggtgccgacagtcttcgcggtcgatgcagctggcttcgccagtgatgcggctgtgcggggccgtcgcgcaatggcaagtggacccaagtaggggtgccctgtcacatttcctgctcgggatacagctgttgaggttgaagctgtacctgatctcagggagcgggaagagtgtgataggggaggtcgggccaacggccctgatcgaacggtgcgctacctggctggctttgggactggagtcaactacggcgtgcatcgtaactcggctatcaac

SEQ ID NO: 2228 - DNA, 640 bp, Guadeloupe Culex tymo-like virus
  strain 2016-Ab-CQM, complete1
aggggctgaggcactcaagcactctccacacccaggagggggccgagtcgacgtcatcatcagctgaatcctgcgtggcgggagtgacgttcgatggctgctgtcggggagccgggagcaaatcaggaacgggggcggttggttgctgaaggaaaggaagcaagaagaagggttccagttcgtcgactttcatgacctgcgttctccattcaagatagaagcgcttcgggtgaaggtagttgtagtactgggctacttggcagttttgagtgtagcttcgagtggcgtaccagatggctgcggcgacgccagatccgacgcagaggagggcagcgtagttcttccaatgactacgaggagcaagctgcgggaaatggttcagcacccgagttgggatttgccgcttcatccagtcgataggttcaaatttggactcgcttcggatcacgctcgagctctggccggtaatccatcggggaagcccacgccaatacgcggtgaaggggttgattgagtcgttaatgaagttgtgcgagcgtatacgggctgacgctatcgtgactgccttgtgaattgccacatacgttactcacgttcaccgttatcgtacaaaccgtcatacgctccaaattttgccaac

SEQ ID NO: 2229 - DNA, 640 bp, Apple luteovirus 1
  isolate PA8, complete genome.3
aaactcgagacccagatggcaatatcctctccctacaccctggcggtttgaatgccatgggccgtgacctacagcagttcgaaagggatgctgtttataagatgtgggtcgagggacaagcagaggatatacggcgaaaacagattgagactgatgccgcctcagcacgttctatttctgagaacgactaccgccagataaaccaggaaatacgagctgccgagctgcctaaccaaccgaactttgtataccgggacgaccctattgtgaagcaaaacagcacgtctgatttcattgctgcacgtagggctgatttcgatgaacaaagtgtatcggatttgaagtctaatgcatcaactcggacaatcactgggaatcttggtggtggcaaactgaagaagaaggcgaacgaccttgatgatgttgaggacaagatcttgaaggcattaccagaaattgattataaaccttcagaaatcctcggcgtcaaggcacggtatcatggaggatgtggcaagtggagagatacctttgattcttccatgaattgccgttgttggatgccaaccctcgagtggcaacaagttgattttcaatacaaggggaaagcatccaagaatgagggaaagtctattatttc

SEQ ID NO: 2230 - DNA, 641 bp, Agaricus bisporus virus 14
  isolate AbV14-003, partial sequence.1
attatttatcggttattcgtcgtcttggaccctaccagggcacggtgatcgactttggctcgatatagaatgcgcgggcttgatgcctactagtccaaaagactaggaagagcgacattttcttctgtacgatatttctatcgtctgtcttgattgacgcaagacactacgtgtattattagtttcttattctcttcagatttctcgttccctcacgggtaagactgaattacagggcgcgaccctggagaatcaattatccttccggagcttccgcccccactgctcctctcccctcctatttgtccgtttaatcgaaatggtccgcgtctacgtcagccagcgagcgttataaatgcaggccgcccccccatcactcttacacacaaagacaattacatcatatgctaaactccattgactagagctctggatgtgactcgcacttgcctcgtgattaaagatcgaaatagcaaccggtgaaatagtctagtacttaatgactcgtccgagaagggcgacgagagcctactagctatgggttatcctatattccgtgagtttcgacggcctgaccctaggctttgcagtatctgttgcgagctaccctcattctttggtaactcaagcaatcaaatcgc

SEQ ID NO: 2231 - DNA, 641 bp, Beihai picorna-like virus 56
  strain BWBFG40791 hypothetical protein1
cctggcgaggtgatttttcttccttcattgttgcgcgtaaactctgcgcgtattcgatgaagggtcttttttgtgtagctttaagttttcccgctcaatcgggttgattatatgcatgttcctttggaggtcctgtaatatagactgcggattgtggctgagccgtcatttagatcgttccctactttctttatgccttgctggtagaagccagtattgaaaatattacggcgcttattgtattaatttaacctagcgaattgctttgttacacactagctggcatgcatgcctaaatgcaaactcttaatgttcgtgcgtaaccatagcgcacctgcccatgctcagatagtgtggtagctcctggctagatccaggaacagttgtagtatagaacctgctggcacacagattgtgccaaccaagtcaacaggtaggcatacctaaatgcaaacccgtgtagaaactttttggcataaagattgtgccaaccaagtaaacaggcctggctgacccaggactatgcgttaaaggtgttttcggttccgtggtcctgagtggcctacacgacgggcgcatagtagtcccctagggacgtgggtgcacactatggtgtgcatcaagacaataagccgaacccc

SEQ ID NO: 2232 - DNA, 642 bp, Circulifer tenellus virus 1
  complete genome.1
gtcatccaccgaccggtgggtgtttggcttgcggggaaactcactgctatgcaggaatggaccaaccaaacacacaagacaaacacccactggcaccccgttggtgctcagtcggtgtatggccatcccccaactccatgcaaaattaagggcttgggggatgctaattagtatagcacacaacgcaagatgtcttgccacatgcgtcccacccgggggaggagttccactgcctacccctcagggtttatgaggacgtgcccaaaattcggatgcttggtacatcagccagatgtattgggcatgccggtgctaagtccaagccacgggcgaatgcgacctggaagcttggtaaatgccgagagactgcaacgggctagggggtgccatttggcactgcgttgagcaacctgaatgtggtgaggtacagtccaacagctaagcgagctgagatgatcacatctattgcgtttgcttctaggtgtgctcctgcgttttcatccctattaagggctgtgttctcctccgtcttcaaactgttccgcattcacttgattcagattttagtgatagcgctttatttgactcatttgtgtgcgtttcaatctgttttcaagacggaccgatcgcgtgaatctgggc

SEQ ID NO: 2233 - DNA, 642 bp, Hubei picorna-like virus 69
  strain WGML147773 hypothetical protein1
gttttacctcactaaattaatagtttcaaacacgcaatacccaatctactagttatggcagcagcagcagcagctcttttaggtggctcctccattggagcagcctcacaattaggatctacagcaattagtgccaatgcacagcgtgaaatttctgctaatcaaattgaacaacaaaaatgggaaatgatgagaagagaaggagcatttacatcgcaagggctcccctctttcttagcttaccaaggtggcaatgcatatgtacctagaaccgttagccatttaggaggtacgaattatggtatatcggggttcaatggaaacaatctgccgtattcaccttcactcaccaggcagatgtatggcttttacaacgatcctttgcgatcaaggaccgaggcacctgccggtcccgttggtgatccgcagtttcctggacaaaccgacagaatgggattaggagctggaaggtatagtgcagttccaccaccaactcacatcggaactcaaacagaacgaacccatttccctagtagaacgtttgtaaacagtaaccgactttaatagatacctgactcattgagcttcatctatcgcaatacccaagtgattgcgaaatttggaattcgtgaatcattcaaa

SEQ ID NO: 2234 - DNA, 644 bp, Citrus leprosis virus C2
  isolate L147V1 segment RNA2, complete1
tttcatacatgagattggtatttgctcatatggattttgaattttatctttggttttatggatatgacgactcttaatcttcatcggcagttacagctgcgcctcggcccggactgtatttggtggtacctggaatgcccacacctttgaagacagaatactctatttcatatgtcgcaatgatatttattcatattttgtgtatcgctcagccgattttggtttgagcatttacacacacttagtttgagattatctgtacgtttatcacaatgttgattgacgttttagattctctcacgtatagtacgtgggctataatcggttaaaattttaaccgtattatttcctaacatattcgagatgacttgatctcccgtccttctcagtattgctataccgtttaacggtgttgagataaactggcgtcggtcgattctcagttttaccatcttgtttggtaactcttgtatatatgtaaataggtaagggttcttgcgtgccaagagtcttctgtattaatgtagtggactgctgcttcgatagagttgcagcagtacttgcattgatatgtaaatacacagagatacatatcaatgatccactccttattatggagacaaatcaaggtatgagttcacaca

SEQ ID NO: 2235 - DNA, 644 bp, Raspberry mottle virus
  isolate HCRL Glen Clova, complete genome.2
gtcgttttcttaagtggggtagttacgtcttaactagtagtttccagcccaacacgcccgttcctctcggtgctttgttgtcgcctccatgcatcagcgagaccctatcgtcacttcgtcgatgttagtttcttgtcctcgatgctctagcttctacgcaaaatttttcgctctccgttagtttcagcgatcgatcgtctcattcttcatctctctccccttttgtttctgacggtctcttctttcaagcttccgagctcggtggttctttagttaccctttcgttgtcaaggtctctctctggtctgctcctttctcttcgcgcgtcgtccccctcagcctcaggtatacgcactcgcctcctagattctattgttgtgtcgagtttgtcccctgctatacacttttcgttgaagttacctaactcccgcggtgagtcactgtcgtctactgtgactttgggcgctcgggtactctttcttccgaagggtgtttataactccttcgcgatcggcacgtccttttcggtcgtttcttcgttgtcgcgtgtttttcaaaaacgaccagagtcgcgtttcgcttaccgtttctcctcccctgacgtgtctctgtcagaccagtttaggttttgtctaccgctaatc

SEQ ID NO: 2236 - DNA, 644 bp, Hubei picorna-like virus 45
  strain spider133521 hypothetical1
ggtagaaacccggttcccttttggtggttgtgacatgccaccagctcaagtgaaagaactccgagatctggtatatttccatttatgcgaatatttggttatgtacggattgattcttttgcacttgagttcaaacgtccatttgttcttccaaaaacaaatgtttatgttttagtgtcgtcttgtatgtatgtgtgtatgtttgagagtatgaatgttatgagttgaaaaagttacaaacacaagtcgtgttgttgttgttgaagttgttgttgttgttgaagattgttgactttgtgtatacaactttttgctcactgtatgtatttttgaactgactgtacggacgtcgatgttatgattaattctaagcgtacctaaagtagtgaactttaagatatatcttaatagctgatgagatgcctatgaaatcttggtaggatgattaagttcgatctatcgagttagtaagtggcggtcagtgatttagcgtagctctgtatcttattgtaagcgaaatgtgggaaagcatgctttgcatacttagttttatgattaacggagacagactttggacctgacctccagcccttgcgcagccgctggttgtattttgcgcacccccctgactaattgctttcaaa

SEQ ID NO: 2237 - DNA, 644 bp, Beihai weivirus-like virus 13
  strain BHZY60103 RNA-dependent RNA1
ccgaccattgcggtcgggtgtacagggggtgcgcggcgttcgggggcttcggctaccttccgcgcgtgttttagggggcacatggttgggacgaccatgtgagtagtgtgcggtgctcacgcgaacccaggcgttctggccgtgaggtggtcctacgtgaccacgcagttttggggcttgtgtagcttgttcatttgccattttggcgctgtcgggacggttcacgtcccgactgactcccgtagggtcactaaagccccgtgccactgtaaaatagggaggccggtccctgcacaccgaattaccttcctcatcccacttcccaggtggggtgtacgagccaattagcgggtgcgtgccagcgcactgaaggtgaaggccaggcggatgctgttacccgcagctatgcaccgctcacctgccgtcctatccggatgaaggcgacctccagcatgattgcccagtagtgctgttggaacccgaggcggcagtgtggatgactacggccctcagatccccggtttggccgctggggtgcggcgtgaatcaagtaacggtgggtgtgccgtcttgtagcgtcctgaggtgggtacacaccaatgggtgggtcgtgactggggtccgacctagggcaatttctgcgc

SEQ ID NO: 2238 - DNA, 645 bp, Darwin bee virus 6
  isolate NT-8 nonstructural polyprotein and1
cctagggatacagagattttggacaattatttatattacagcttatatttggactaacagctggttttgttacttggtaatacatttaacatctaaatccaactgttaggaccagatagagtgaggctttatacacgccatttgtgcagggcctcatgggactgtacaatctaagagaatgtataaatgccttagtcgtatttatgattgttcatcaaaaacttttgataaattttatatctattttaaaatttatttaatgcatttaaatatgaactaggagtaaagttctatagtgaatagcttatctggggtagcaacccgtataactatagaagtaatatgcctggttcctctatttctgactgtgtaggaatttttatggagaacgtccaactaacagtggcgcttatcctaagtttcgttagtaaacttgcctaaagcttttcgatcggtaagactcgcctagttgcgacgacagatcacaatgttttaaatttaagggagatagtcctcttatctagtgattcagtattactgtgattattactatatctattaagcgtaacgaccttagtacgtatagtaataagagttctaaatgatgaagatttgaagaaatatcccgtagtcgtattgttaaat

SEQ ID NO: 2239 - DNA, 645 bp, Beihai picorna-like virus 76
  strain HOU156700 hypothetical protein1
ataaaattccgtacaacgattagtcgccgattaggtgctttgtgaggtattcacccaggcctagtttcgtgcgcgtgctaggttgctttggctataaaagttggagtagtataagcagcaaactcctatatttaaccctcattgaggggtacttgcaatggctgattgccttttatggagggtgcttgtaatggcctattgtgcgtgcactataggttcctaagggtataaaagtattacttgtatgttccattaaaaggttcagttcctcagggtataaaagtattgcctgtatgtctcatgagggagtgcgacaccccccttttaagtttcagtttaacttttaatttgatgatttaggttctggtgtctgaggtattacaggttgcgcgcctggacagcacatgttagtcatgtattatggtgtttaccaacacgtatctttgttcctaatgattcttttaggtcaagataaggaattgtgtgccccttatctgataagctgaacaccttgggatacggtcctggcgtttagttacagagacacatagccccgtggggttccctcgtatcaaatcgtataagtggcgaaatgaaagcttagtttctttgaaactagcaagtaagaatagccaaccctaagaa

SEQ ID NO: 2240 - DNA, 648 bp, Yam asymptomatic virus 1
  isolate VU567Da, complete genome.1
atataaaaactaaaaaatttttaagaaaaaccaaaaacagagtgtttgtttgacttttcctttatttgtagtgagtcagttgtaatttcgctgtttccactatcttatttttatcgtgtttttccagtgtgtagttaaagtcaagtcgttgatttggtgatagtgtgtcgattgcgcaccttgtaccggatttcccgaattgacttattagagtcagtaggtttgtatcggtctcgtttgtttttctttgtaactgttcctgtctgcttctgtaatttttaatttcgggtttatacgcatttgtgtattcgtgtggtttgttcagtttccagttgtaacctgtattactatttgggtttgtcttattaccgtctacgttgttgtttggaagttcccggaaaccactttcttcccaatcaacacacgtcagttgttgttcattctccctgtttgtttcgctattcctgtcagtagtgcatccactgtcatcctcgaacactttagttttacagtttcccatttttacttcctaacactcttagtctttccgttcgtttaattcctttttgtgtttcaaaccgtctgtggttttaattttcctgagatataactttttgacgcagtaatctttctcttacaatcttcgaa

SEQ ID NO: 2241 - DNA, 648 bp, Picornavirales sp.
  isolate D-16-0054, complete genome.1
aatcatcactcatcaaacgttaagtcccctgtttatacttctcgttatcattactaaattagaaactcatctttgcggtgatatataattgtcgtggttgtcgattatatattgtcgtgctgtaggatatttgtcttgattgttgagatattccaatcaagcgaccttctatctaagttgtcgagcatatgaatcgcatagtttattcttaattgataccgacttaccctcgccttcatgtctaaataagctatgtctcatatgtgacggattacagcactgttaacgttttgagacgatatataaggagacctaaaggggtcctcctggttttaaattgagtacatattgtaccgtaccaggcaaaggcctttaggagatctatatattgtttcgaaatgttgataagtaaatggtttctcaccccctccccgaaccttaacgtgattgcactcatacataagaatctcatgtcctatttgaatcatcaggattagactcttttgcatgtttaatgaactcggcgcttaaccacgtcgtttaatgaattagaacaacccaatattgtaggaaaaactttcggtgatataaagaaccgatgacaggtgtcaaagacactgaccgacggaaagacgtcacaacaaacta

SEQ ID NO: 2242 - DNA, 649 bp, Wuhan spider virus 2
  strain spider133995 hypothetical protein gene,1
gcggggttttccccgcatcgtcttttcaaccttatcgaatatctgtgccattgtgtcatggctatttgatattgtatgcttcttttgtgctcgttcggcaatgacctttccgcacgatcactttggcagctttcttttcaccttccggtttctttttgttttatgttagtttgttttgtgctgttttgctgtatgcgttctctacctatgtaacgccagctaaatgtttactataaaaatacttttcataagttagttttaaatgcattccggtttcggttttagaagtctttttgttgctatcttaattatgtatgctcctagtgaaggattcgctctgctagtttaaacttagtatgacatatttaattattttagtggcatttagcaactccattaatgaacgtttgtaattaggtgagatacgtaggtctcctgtaatgtcctttgcgtaagttgcttggttagtcccttgcttcttagacacttcgtgtggtggacctcttgcactgactgttgaggttgctcataaattacgaattagtaaggttggttttaggactttttatcagctttttggcccctttattataaaagctgtaggtaatggcctcatccatacgcctaacattgtttaatcaatgtgaaa

SEQ ID NO: 2243 - DNA, 650 bp, Robinvale bee virus 2
  isolate VN1-57 nonstructural polyprotein1
tacaaggcctatacagaccacctagatcagcggaacttaaagagaacgtataattatcaattattcaaacgctgatctaaatcaacttttaaacaattaaccctgacacgtccatcattgtaaaatataattcatattcacctttgcatgagcagttacgagtacgaagaaacgaagaagtttatagagcgagtttatgagaagtttaaaacgcacttgcgtcatcatccgttgtgcacttctcagttaccatcaattcgacagtgcctgacttgctcagagtacttcaccgcctatttggactatttggtacatattttgtcatctttaccaatatccagacgagaatacaagatccttcgtctcgtcgaaagcctacaattggaaattgcagatattgtagaggctggcggacttgctcctttcatgtttgtattttcttccccttctgttactcgtattgttggcgaagaccttcatgaagtttggtagatcacaatcattcattaatatatcattattcattgtatttaacctcattctcctgtatttatcaattagatatcgcaacgaacgtcgaaagaagctaaaacagaaggctgaggacattcttgaatcttcgcgcttgaatttgtttaaagacgatcacg

SEQ ID NO: 2244 - DNA, 650 bp, Wenzhou shrimp virus 10
  strain WZRBX43419 RNA-dependent RNA1
ccgatctcgcctctcggcttggactaacctggttatcactaaccagtaccgtgtacaagtgactccacatgtggagactcctgtcttcacccgttaagtggcctttaactacacgctttgacttgttctacgaacgaatcaggcctgtagttggggttgccatcctggagtagcattcttccttgtcttagcctgttcttgaacagaattagactaggaaggcattgctcccagatggcttcctcccgttcgctggagttctcattagaccccagcagacggataagcccacctaatagtggtcattcaccattgcattgtgcgtaagtgaatggttgtcagaagtgacgtgatcgtgtcctctctcgaaattgttcttgttcaagagagagctcatgctgtgactttacaaccaccggtgtcctatttaggacaggtaccggggggtgcagcccaccccaaaaccttaacaggataggactagtgcgattgggtaaccgcattatcctttaccaacggtaagggagtccgaaatacaactacctgctaacacgaaaacaaccccaggtattagggtcgttcccgtgtcgaggcgccgtactacttgtcctagcgaccgcaaggtcaatggaaagtcggacttgaaggct

SEQ ID NO: 2245 - DNA, 652 bp, Chinese softshell turtle picornavirus 2
  strain WHJYGF758571
cctgggttgatacccagtggtcatttggacgctttggtaaggaggcgtaattatccttcccatgtggaacctagtgcttaggttcttttatatgttctttgtttgtcctgtatactttctatcgggcaatcttgtagcctaacacaatatgtgttttgggttgcctaagataatttcaattttaaccagtccctatcttggggttgtgcctttctttctttcttatatcttcttaagctgacttacttgctaatccgactcctcgtcaacgggagggtaaagcagtatcactagggtattgtgatgtaggagaaaaagtaagtaggaattatacatgtaacgaaagtaatttggtactttaaactctcttaatcccaaagtgtggtattggtcatgttggagtaggctacgggtgaaactccttcacatttagtaatgtgttcacacgctaacgctacggtagaagacagactaggtcttattctcaacgtagggggacgggtgtatgttcatgactagccacatattaaggttttgaggggctgaattatataagtatgtgtattaattcttggtactagtccctggggactagcccttttctaggttgatattagttttccccaattttaaaacatatgagatttacgac

SEQ ID NO: 2246 - DNA, 652 bp, Sanxia sobemo-like virus 1
  strain SXSSP20269 hypothetical protein1
gggccacgtcggaaaaaggtaacaaacgctacgaagccatgtacgtcaatggtcaaaatgacgatcatggtgtagtgattaaaggcataagaggaagaatagtttatgctgaagaacaagaagactggatggacatctcaccaactccaaagaagaaggtgagatcgtttaccggagaatctctttcttcgaagaccacaactctcaccccgcagttcgaagaccaacctccttttttagaggaacgccaggcccagcaaaagctgagcctggaaacgctgactacagccactgccgaactcagtcagaaggacaagcagatccttctgaacgctctgatgatgaagactcagagctcggggccgagacagaatgctactgtcttggatacagcacaggaagaacctgcaccgagccaatctggctcgacgttccagccaccgagaacccaggaccgggttacgaggaaggcctctacgcgttaccacgcgtggactcctgcgcagaaaagaagagtttctgtacgcacgtccagatcaacgccaaatcgcacttaaatcacatcccccctactcaacacgaacaacaatatgtcgaagaaaacatcttaagacatctccgctcaatagctggtgtttactgctattccacc

SEQ ID NO: 2247 - DNA, 653 bp, Picornavirales sp.
  isolate wiw119pic1 genomic sequence.1
gatccacgaaattcaggattgtgctttggtcaggcaattctgaaggagagatctctgtatcctggtatgggatctcgttgacctgatgaggacggatataaagtgtttgcacctgtcacgtagtggggtcattgcagctattctattattgctctggctgccgcaaatgacctaggctcgtgtatgtgtttatgcattcacactctgagaatcaagacgtgctctgtaaccatcacaaattctcaccgtactatctcgacttgtcttgaatggacatgaaatggaacggaatggacatgaataagaaattcaattttggatatgcacgactggcgactgcgttgtactgtctttcctcttatagggctgacacagacgttgctttaaagcgtgaagaagtagtttccaattttgtcttaggaaaataatctcgagcgattcgcatcctgttagggaataggattgatgctccttttagttcttgtatactgatgactcttgtgaatggaatgattcagtaacgttagcatccgcttagccacgggtatcgattaaaactggctcccacactagtaacaaggccccatccatgttcaagagcatgtagttggatcgcctggtgtcagcgaacagtattcagtttttctgaatcg

SEQ ID NO: 2248 - DNA, 654 bp, Human respiratory syncytial virus B
  isolate HRSV/B/Bern/2019,1
actcaattatcaacattgaatgacaggttcacatatatcctcaactgcacactatatctaaacatcataaacatctacactacacacttcatcacacaaaccaatcccactcaaaatctaaaatcacttccagccattgtctgccagacctagagtgcgaataggtaaataaaacaagaatatggggtaaatagatatcagttagagttcaaccaatctcaacaaccatctataccgccaatccaatacatacattgcaaatcttaaaatgggaaacacatccatcacaatagaattcacaagcaaattttggccctattttacactaatacatatgatcttaactctaatctctttactaattataatcactattatgattgcaatactaaataagctaagtgaacataaaatattctgcaacaaaactcttgaacaaggacagatgtatcaaatcgacacatagtgttctcccattatgctgtatcaaatcacaatcctgtgtatataaataaacaaatccaatcttctcacagagtcatggcatcacaaaaccatgccaaccatcatggtagcatagagtagttattaaaaattaacataatgatgaattattagtatgggatcaaaaacaacattggggcaaatgcaaca

SEQ ID NO: 2249 - DNA, 654 bp, Menangle virus
  complete genome.2
caatcttgactggaaagtggataaaattctctctcagcagtctgttattacccaaatcaaacacgagcaacatgcaatcaaagcaggaatagccactttggaaggtcttatcaccaccatcaagatcatggaccctggagtaggtgatggcgccactgcggccaaatcaaagagattatttaaagaagcccctgtggttgtgagtggaccggtcattggagacaaccccattgttgatgctgacaccattcaactggacgagttggcccgcccatctcttcccaaaacaaaatctcagaagtccagcgctgcctcaccagcggccctatccggctataagatgacattattggctcttatcaaggaatgcattcccaatcaggcaaaacgccaaaagtttgaaatgcaagttggcggaatccgaaatgagcaagatttcaagaatctccgccgagagataatccgcagtgctgcccaataatcattttgtacgctactacatcctgccaattcagcacaatttgattaatcaccgcaattaattagcaactattaatctcttcttatgccaggctttgcttatctgcgactcttctttgagctttaagaaaaaataagtgagcccgaaccagttaagaagggcacactccgacc

SEQ ID NO: 2250 - DNA, 654 bp, Israel acute paralysis virus
  of bees from USA, complete genome.1
taaaattgtacgtagggacttttatgtccctacgtacaatttacgcagaaattagcgatataatttcaaaattgttttgtggcgcctgagcagcctttttaatggtaggagcgtcgatcccccgtatggagtggagaatataaggctcagctaggatgacacgcctgtacactgtcgacattagttaagttacaattacacgtcttttgccgaagaaaccattttagtcaattgattatgatttttgtataatgataaacagtgatgaactgtataactcatcgataacaaaacggattacgaacctatttgtaactatcttgatcgaagtctagtagatccccaatatagccctgaaaagcttgagggacgagatagctctataaatagacgtgaggctttaaatcctgataagtacattacctgagaattcctccttttggagtttgaatttatataagttagtaccaatagttaatatcatttaagtatgttattattgctgaagacatgtatttcggataataacctctacattgatatataaattatatgcaagtctcggtggatattgcattatggtcgcagttaacctgtagcttatatattcctgtgtcggagcagtggtaatggagccggataatttcgccaaaa

SEQ ID NO: 2251 - DNA, 654 bp, Wenzhou picorna-like virus 4
  strain WZSLuoI86003 hypothetical1
gtacgtctttagacgtacagtcagacttcttgtttagttgtgttcagttcatgttcaggtttactttatgagaagtgacctacatgtatttgacgcagttaaatgcgatatgacgatattttcgggtgaagaaaacacctcccattttgttgggtaaaaaattacattcttgtttttatggcctattggcactgtagcaggttcgagccctgcaaggccagtagatgaagaccaaaaagagtcattttgtataggactctgaatttatttacggtgaagttagatagaacgcttgcttctgaaacttatagagtacgaacatttgcgccagttatggcactcctttggagaactggtttatattgatgtgtgagacttgaggactcgatcaatatagcaaatatcacgtacataatattggaaaagatgagcaaggccagtaatctattctgatccctttgatttatttagggtgtataatttgatgctgacatttggtaacgggatttaatttaatgtactgctagtcccatagcgtgaataacgtttagcatatttattactagtatcttgggtcaacagccctgggtagcgcagtctacggagcgttaaaagtttgttacgaacaaccaattttggtgtagggggagcaca

SEQ ID NO: 2252 - DNA, 657 bp, Beihai rhabdo-like virus 4
  strain BHJP58499 putative nucleoprotein,1
gaatccctcataactcgataggctccgatttttaaagcgttgtttcctaagaggggtatgacgggtgagttacaaggacatgcctatggggtaacattttttggttttttggtttgtgtttgtatacgcttgcttatacaaaatacaaccaaaaaaacaaaaatgtcaccattagacacgatcttgtgactcactctgtcgtacccccattatcaaacagcgcgttaatgagcttaaaaaaacgaaaacacaactcaggaactttgcaaactcctaatcaccaatattcggttcttatcctaatataggttagacataatggcgaaaaatgtgacttttgttccaccagtgaggtccactgagacagaggatgagactcttgccactctctcagctatgagagatcagtggatcgcccaggacggtcttcccctttggagatctcaagcaggggtaagttagtcttcctagtgccatattatatcgatatgaggtcattaacattgctgaggtactaattcgtctcgtttatcctttcaggtaaaagtggcaagagagaaggggttgctcgcctacaactcgagtgccaagaagtaccagactgcaggagatctaggtcaggccaatgcctcgcagttcgcccaggccgctcacaag

SEQ ID NO: 2253 - DNA, 657 bp, Wenling banjofish picornavirus 1
  strain LXMC34076 polyprotein gene,1
ctcttccgatcttgggggttcgcccccatgtctcatttcaactagccgtgtgtctagttaacgcaccgcctcaccctggtcgttatcgggtcggttcttgcgaccgttagatcgtgagcgtttctgaggatcagttcgtataagttctccggtgtggcgaccgtaaaatcgtcacgtcccatgcaatagatgacgttaaactcgtttgccagttacataaaggaatgttgttacttttaaattgtctgttacatttaacatcttgccagtatgatgctactgtacactacgggtgtaggaaccttgtagtgtgacgtatcactcatatgtggatgggtgctccagacctttatggaagctctcagttagtagtgatccttgacttcattgagccctggtaacagtggaagtcaagatgtatatgttgctcaacacacttcggtgctacgaagctgtttgtggaagtactggcgaggttcattctgaatcatatgtttgtcacatagtcagggagtgccgtcgcttacgacggaccctttttctttataattacaaatctgtgtctcaagtgttgttggctggttttcttcttctgttttcattgttcatatatatacgtcagagtgaaagactcggtatatacaaaactgatccaga

SEQ ID NO: 2254 - DNA, 658 bp, Beihai picorna-like virus 2
  strain BHNXC40556 hypothetical protein2
agctgctccgccttgggcaggcgttgtatgcaccccgccttggacagcgtaaaggtccatttctgtccagggatgacgtaaaaagccccgcttgggacagcgaaacagtcctattccggacctatccgggatagcaaatgcatgagttgaaaataggtatgtacaacagattactgcatgtttaattatttatatgtttctttttcacatgttcagcattgtacatataggcacagccctcgcgctgtactggtattcaccagagagttagccactcaacaaaacatattgccacttggagtattaagcgaaacccttgtggtatgaacataaatagcttactgaaacaaacattaataataataattctaacaatccatcagttaatgatgggccttctttttctgtatctcagacgagtaatgagtcatcagcacaaaatgtacattttattgatggagactcgccatggacttatgaggtttcacacagcaccgattcgacatccaagcttacaggattcgatgacgcggacctcggatcattcttatctcgaccagttaagattaaagaatactcttggtcaccaactgttcagttgtttgaaacatttaacccttggactgagttttttaataatgcggatgttaaagataaa

SEQ ID NO: 2255 - DNA, 659 bp, Picornavirales sp.
  isolate H4_Bulk_47_scaffold_38 hypothetical2R
aggtcttaagtcctggaaggacattaaacttaacccgtcaggaaacttcttttcctgtttttccgtgttttacgttaaaaatatggagtcagtggaacttactcgcctcgaagatgtgatccgtaaatctctttcattctagtataaaatggagattctatcaggctatcattcgtgaaacggttgtgtttttacgcatagatcagtaaggcgccgtgctggcagccccagcaaagactaacgaaactagatatatcctaaagggcctgggtggaccgaatggacgaatataaccacctgctgaaaataatacaaatgcacagggacctgttgcccctattgcaaataataacaactaccctgtggcagttaccgctggtgaggatactcacactgcatctgccacaaccggtttcacaaccgatgctaacatcgcaaatgtagcaccacaagcacctgtaggagttgaccggctttttcttgcatcgagttcggacaattacgaacaggatatcaagaccttcttggccaaaccggttgcaatcaaatctggaaccatatcgacagccgatgttgttggtactcctttgtatgctgctaatttacctcatgatggtctctctgctagtaatatcttcttaaagaaaattgaaggtttt

SEQ ID NO: 2256 - DNA, 660 bp, Picornavirales N_OV_080
  putative non-structural protein1
gcattagcccgacttatagttggcactttgagcagtgcccgctttcgaaataattgtgaagattcaccctccatcttcgaccccatatctacgcatatggcgttattatgaagcaaataccatgtccctatttctagctcatgtgtattttcacttttattatctcatttgacttattctaacgcacattcttccattttcttagtgtgttatttaattatcaaatacaatacaaccccccctatttctacatggacatttatgtccattttgaccgattttttgggagggacaatttatgcttttatagatttatcatgggatagtggggtacaacccactactttatgttaatcaattctattttaatagtacctaaacctataattctggatacgcgttattatacgcaagttataaagcgtctatccctgtttagaaccatgtttctatccaaatacgatgacatccagaattgcatactcatgaaccccagttttaaattgaatttgacgatcccgtaaatatacttcagaatctgttcgtcctgattttatacttatgtagggtggtttcatgataaaaactataaaagaacgtccataaattgttttcccggaatttattctttttaaattttcctgaccatttttaaaccaa

SEQ ID NO: 2257 - DNA, 660 bp, Beihai picorna-like virus 17
  strain BHZY55665 hypothetical protein1
cctatacgtcgaaagacgtataggtagcattgtattatttgtgttgattagtttactggttatcacaaactagtatactgctgagacatatttagtaatttttaacgggtgatttatgagaacacctctccaaaaggagtaaaaaatctcattctttcaagctgtattcagctatcaaaaaacgttgtttcttcaattttcttcaaaaactgtttgatgaagttagttagattcactgatctgtgtatttacaaatccggtttaccgggaaatttggtacatttaagaccacaatacgacctaatgaattttaattgtaaagtaggcaaataattataagtcctatttttgatttgaattgtggaattaacgttttagggtgaatgaagtctgatgatatcgtgtagtgataaaagagccctgagaagctcgctaccagtcacagatgtatatatgtcgtgtcggacatagtcgagagacacataaggcactattcggttagttatagttaaagactacgctataattgaggaagatgaccggagtaccagctcatgcgagtaaaggtacgcaatttcaaatacgatcttcccgtatgttgattggcaagttaacatactatatatattttttgctgctacaaacaacaataatattaca

SEQ ID NO: 2258 - DNA, 662 bp, Beihai mantis shrimp virus 3
  strain BHXG26678 hypothetical protein1
ctgcattaatttgcagcatacatatttgacccagatgagttcggcctgggataacaatagtcgacaaaacttttaacccttttttattttcagggctgaccaccctctttcaaacggttagtgattgtctaataccacttgattattgggcaaagtctttttagcgtctgtttatgatttatttcattgtgctaaaacactttttgactctgtgcattcaggtatatcgtgcattgaactttcatccttgcattgatagaacggatttcatcagattcattgagtatttcttgatacagctcagtatagatttgcttgacgtggatatcagcccacgatactgatgtgattgattagacgtagtctgtcattcgagaatattaatactctttgtttccaggtgtcttcttagtaagcttgtctaactcagatatcttagtgtttgttccaaggaacgaatttgagcctacactcttgctaaccactggagtgtacaaactttgaggactcgacaccttcgaagggcttgtgttttaggccatgggacgtctccgaaccttataattccttgattagttgaatatgtagctcaaggtggattaggcgccacccaactatgatttgaacagttcaaatgagacattaggccgatcatatatact

SEQ ID NO: 2259 - DNA, 663 bp, Solenopsis invicta virus 2
  isolate Mississippi Delta, complete3
ccttttgatgtttgaattctaattccgttctcgccggagatgagtaccggcttgagtttaattcccaggtagcgcgagccgtgagtcagcccagacaagcgcagtagccctacttggagaggttctccttgagcgaccagaagctggcattgaatcgagccacataatgctgagagtagagggatttgcattctattgtgaaagcaataatttgagagctaagcccatcacattgtgcactcggaatattgtgcagcgcgaaaggttagtaacattaagttggcgaaaggttagcgcagcaatgattggtggtaacgctggatcttattgtggaagcaatggatgaatatgaagttgaaatcaggatcaccacacccccgcagcatagcggtaccgtactgaatgtcacaatccagtgatgatttgaagcctataacgggcggacgtgtttaaatggtgttttatgtggatgttagttcgccggaatgtgcagctccggatatcgagtcgaagattcagtgaccagtggagcaagcaacataggtaactatttcgtatgattttactcacaaaattgcactgggcaggagcttccaaaggaaccttctgcttctcgtaactgcacacaaactagatttcttattttcgaagagcatatttaaa

SEQ ID NO: 2260 - DNA, 663 bp, Picornavirales N_OV_011
  putative non-structural protein1
ctgcaagtcgtttagacttgtagagggaatgttagttaatagctgtgcacatgtcgtttagactgtgtattttctagtcaccttaattggtgcataataaaaatactgttttttgttattgtctgataggactttaaactatcaaacaaacctttcgtagatagggtcatttctctgaacttagatgagaaatgatatcaaactatttagtgaacgatggtaacgatgttgtgatacttatcacaacattttaatccatgtcgtctcttaattgagacggataactacgaaccgcactgtttaattatagtgtacgtgcactcgcacacttaccaaccattttagtattggttggctatattcttatgaatatattgtaatattgtagtataaattaaactttgagaccaagtgttgatatagttttaattttgtataattggaggccatagcaatgaggccgttgtatgctttgaacaaaatgtaaagcctagggcgaggaacttaatagttcggaccctggtatttggagtagaagatataaaccgccccgttcaaatgggtaaaccaatttttatgctgagcagaaggccgcctagcccgacctgcaagctactattcaattgacctttggaagctgagaagatagtcaatcaagaaaaa

SEQ ID NO: 2261 - DNA, 663 bp, Warroolaba Creek virus 1
  strain WRCV1 205652 hypothetical protein1
aatctcaatcttctattgagaattggtttttagattcattttacgagggttagtcaatgagattattacgaaggagtcctaattgtgtattctgtagcaggattgtacccatcccgctcatactaataaacggaacacgccttacgggaaatccgtattgaagtacgataaaggctgagcccggccttatcaacgtgagatctgagaagtgaagcacttgcaatgtggatcttcaagagtgattgttatttgcacgccagttcaatccagattacggtgcaaatgattcataaaagtatgagtacagatatctgcgcaaacaccctagtattcctaaccctcccctcttaaagcgtctacgggcgttgcaggtctaattgaaaacagcggtctgctatagagggagaattagacactaactcttttctttctcgcctcggagctttatagcgatgtgggaacgcgaacggtcactctctaactacttgttggttttgagagagacttagtacctagatacctaaggtgagaatgaacattgttatcaaaattataaaaactgccgaagcgctaacaacgtgaggctgttgttttctaaactttcttgacccataaatcgtatttagtcgtcactaatacgtagcaacgtttgcagcgtccctt

SEQ ID NO: 2262 - DNA, 664 bp, Alternaria alternata mitovirus 1
  isolate CREA-VE-3SY3, complete1
gatctctctcaccgaacctggccccgggcaaatgccctaatccagaggtgaatgtgtaaagtctcaggccaaatggggttggagaaggtatcaaagattagattaataaatgctttaaggcttttagttaaacttcttgcttgattccgtccctggtgtgcaaaagcacactacactcgagaagaataagagctagataaccttagggataaggggatctaactccgaaatacactctccaacacccgtgttctcctcctccttctccggcagctttgcggctgtcgagagggtaaggaacgagataggtgcggattgacacttccagtccagtataaaaactgaacaactgaagtctatctgacacatgtataatgttttctaatttagaaactcatcctaagtggaaattagcggcgaaaagtcagctatggggtaacccagatgctgtttcctaagctaaattcgactctccaatgttgaccttcttaacggacgacctcttaaatgtgaggaccctattaatctgactttgatcggattagaatgaagacaccaaagggtaaagagttggatacggggacagtgagacactgacctagtaccaaacgctctagcacctctggggtttaagggagtttaagcccttttaatagtagtaaaa

SEQ ID NO: 2263 - DNA, 664 bp, Lycopersicon esculentum picorna-like virus
  strain pt077-pic-41
accaaggcataatcacattggaatacggctctgagtcccttttgaacggttaagaactattcaactgggaaggcacccgctcccttgtggcgatgtccaaggatgacaaaacacaaaacccaactctatgtttttgtatacgtatgaaatcttggtgttgttaaatattagcagccaagtaacgtaagacagaataggttgagaaaaccagaaactaatcagtaggacctccgaaagttagaccttctggcactactctgaacttattaaacgggatctctagcatctaaattttagtcgctgacgtaagcatttgctagtaagatactgtgaacagttcatcccagatctatgacccgattgaaataagaccatcttatgaacgaataacggattatatgatttgacggatagtctcattgacatgcacatagcgagtttaatatgattgaagtagcaaaccctaggggaccgcaatgaatatcatattaaggttgaagcgcactcaacccttgtcacgagatagtaaggacgttttacatagtactatagttttctcaaaactgtgtataggtgcggataacattgaaaccgttcaccgacctcatgggatcgtcctaggaaagcccatgttgtatgataaactaggcctcaatgtagcaca

SEQ ID NO: 2264 - DNA, 665 bp, Wuhan sharpbelly picornavirus 2
  strain DSYC36136 polyprotein gene,1
tgcgggtaaactcccgcatgtgtgaatgaggcgatgtcccaggaactaactgccgatcctggttttaactacgatccgtatttgttactaatgcgatatccccccattgtttgcctccatgttgttttcaacgcttttggccttgagtgttatcaagtgttttagcgacatagtgggaagctacggctgcgtccccatttttgagtggcgacccagttttagtggccactctgtccctgaactgcgctataatgtgaatttatgttcacaaaaacggactgatgtaactgttaatgactaaggaatagtacctcactgaagtatcaagaccccgttcgagcggtgtacatatatggatggaaaccttgtctgagtcatctcgaatactaatcaatgagggatgtcgagtaagcatatcatgaaccacatagaatagtggggtttcggggttagaggctctctgcagcaatgtatctctaacaccatggccgaaatgagagatagagaccacgatgtttgtgtgtaagtaatgatgtgtggaaagaaaattctgaatgttggtatgatatcagtctaaggggagtggctcacctaagagctacccaaacatttcacagcagacaacataacgtactgagagtagttggaaggttccagaaatcagt

SEQ ID NO: 2265 - DNA, 665 bp, Beihai picorna-like virus 91
  strain BHJJX25930 hypothetical protein1
cttccgatcttgcgtaagcatgccctaagtatttgtggtggtctttaaaaagacatgattaatatgtaatatctccctttttaaggttttccctaatcagtcaccaccataatgccaaatgcatattacaaatggctttttcaacgttcgtgaaacgaattcacatccactattctagcgaatcaatgctcagctagtctagctcattgtgaatgttagcatcactgcagagcacatgtgatcatttctttgagcagagcggacccagtggcaatctgtctttgccggtttaaaattgtaccttaacaatccgcctatggtaacggcgtacccaggaccgcaaatccattaatgggataacatttcccatgttcttttgatattatgtgaacatgtaaatcttcaacaaaatatcacaatggctctatcaatctttcagcctcgacagttgaaagagggctctctagggatttatgtctatggcccctgtggttaaaacccgcccatccggaagtgtattgggactagcaaaggaagaatttattcaaatacctcctagttcttggatctgaccgggagttgatcccccgggtacactaaaagatgggacaggatctccactaccgcctgcatttaatagactgctttcccgactttgatatact

SEQ ID NO: 2266 - DNA, 665 bp, Changjiang picorna-like virus 9
  strain CJLX26226 hypothetical1
agtgttagtcacttgcatgaagagtagccgttgacagtatggcgatcatactggcgtattgggctttcacttgggtagcagtacctctgtgcctcgtctgtacgtctccctatctcgggagtctaaaaatagattcggtggttcgacagtttcgaccgagtgctgtgatggcacgctatctgaagtctgcggttgctgttggctgcaacagcgttgggcgcgataagtctaatatgtttgatgaatcacttttctttgttcgtatataaaaaacattaagttgctttttacccctatgtcttaggacagtaaaaattcatacacgcgccgtgtactaaagataggcgtattcatattctttcgttggcattttcgttaaatggccgacattcttcaaaataccaggtaagaaaccgcattgtgagctggaaattgcactgttacatttgaacctttttaggcgagctggattgctcatgtaactgttggaaacacacttcgcaaaaggtggatgatatggtataactggtcactattgaccgcaaggagcattatgtatagtgtgtgctctgtaggcagggaagtgctgctgtgttactatacacaagtcgtcctttggcgtggttgccattggatctgttataccacacacagttttaccactt

SEQ ID NO: 2267 - DNA, 666 bp, Hubei picorna-like virus 18
  strain QTM26408 hypothetical protein 11
cccggagccctgcgtacctacgcaggactttcttttaacgtcacctcgacgtgactgaggcatttacacaccctcttttgaggagcgccattaatttgacttgtaaatgaacacaaaaccggcccccaaaactcaatgacgacaatctttagaatttaacactacccgcttttaaagtaggctctgttatttctattgaggataccgcaaagtttatctttcaaaacaactcactacggaagataagtgaccacggacttcatacaataataaaaatccgtttaaaatgacgtgcacaagtaattatttagagactcttagtaggatatgccaagatgcgttctcgcatatccatagtattaggacaatctcacttaattaatcaccaatcttttaaacttgataataaaatttgtatgaatgatacattgaccctgcgaaataaccttttaaaatacgatttaataagataataaaaattgaattgggaactcaataataaaattcttatgtcggtgttggcgaaggaaatttcaaatctatgacaacgtgaacggaaatgaaacatcaggtttttcaactacccgcatttatgtaggctcttgaaaccaaaatcaacggttcttcggaaccaaaattttagaattaaggaaaacaaaaaccaca

SEQ ID NO: 2268 - DNA, 667 bp, Solemoviridae sp.
  isolate ybw116shi01 genomic sequence.1
agacagtatctgtatggtgtcggggtcgccagtagatttccaactgacggtctttcctctttcaaattgacctaacaaccattctggtgatgactccagacgttgcttaaaatgcacgtgaatcaagttctgaacatagttggctgagaaaccaccattgacagcaccgcccatttgatgaatcccaaggagttcattgcctttcatgtacgcagccccactataacctggcagagtcatctatacaggtagtactctgcaaggttatagtggggctgcgtacatgaaaggcaatgaactccttgggattcatcaaagcagccccactataaccttgtagagtactacctgtatagataactctgccaaagctaacagcatcgtgcgaaacatttccaacagttcccttcccatcgggtccaacaatttggcctgttgtccgaatctcatccatatgcccgacgttagaattgctcaatcccaatcgggagaactccgcttcgtccaggacaatggcaaccagatcagcatccaaagggatgcggacttttccagctaacgaaagccagacgcccaacttgctccttgcgcacttaaccaaacaagctttgggattttaattaattcaattgcgagttagaccatttattacttaacattcgtaaca

SEQ ID NO: 2269 - DNA, 667 bp, Western African lungfish picornavirus
  strain FZFYF1205461
tggtgttctcgctaggactcttggggtgcgaacccccttttcaacaaatattgttgaattgcaagtgatgtaacgtattgcactaattatagtaagtgttataccctccacaaaaatattttgtggagtgttaaggtatggattgtatagggcattagcaattaagtctgtaggccgaaccggcatgcacggtacatttgaatggactggagttatggtttgaacaacttagaagtcactgtgtgtattccttttaggttgcacattggcccattgatgaacgcaatgttagcgtagagtagtcataactattttgttcttgccatgttttcatatcttgaaaaatgtctcttgtttgttggcgtatggtttggtgctatcgtaaagcacaattccccagaagtcgtaagactattccgaaaggatttgggttagccctgggggaggtaggtctccatgactcagacattggatcatggcattgcaaaaacacccatgttgaggtggtgcccaatagatcatgaacaatctctgtttaagaatgcttctacatgggggtctatggcgctgcgaggaatatggtcatgtaacaagtagggttcctcttctacaaatgttgtagttggtgtttagattacaatctttaggaccataccggcagcgttaa

SEQ ID NO: 2270 - DNA, 669 bp, Wenling chelidoperca picornavirus
  strain LXMC188591 polyprotein1
gatctctgtgggggagttttattctcccccataggtcattttaaagcacccaacatgttatgtgcttaataaacttgcatgcgcgtggtctggcgggtggtttcaccctccggggtgtcatcatcaacgacccggtttctgtttatcgacaaaagcaggggcttggtggatgcctgattcaccacatacatcgaaacatgaagatgtaaaatttatgtcgttggtaaattacgttaaagttacaaccaccaccatcaggcaggattagattatccttctacgctcggtagacaaaaccttgtattcgggacaatctaatttggttatgaagtactgttgtgaaacagtgtgggaactgcttggttaggttaattcgttgtggagaatgcaccgtggcaacacgttttccccagcatgaaaggtagtgcatgccctagaccttagcctctcatagtacctgctgcgtagtggctttatggattaattgaattgctcctggagtctaaggagactggcgtaacttaatacgctaccccccttctttaacaggcacaattgtacaggatactcacgtgcagtcaaagaaaacccccggagagttagaaattttgcgagagacagtttttggtttactttgttgcgacgagtagcttgtaagaggccggcaac

SEQ ID NO: 2271 - DNA, 669 bp, Beihai picorna-like virus 31
  strain BHZC37445 hypothetical protein1
gtcccaccaggttttcacctggtggactcccctatattgtatgatttcattgcacagtttagcacctgtgccgtgcttttatacgaaaattttattctcctttatatacctttcacagtaattttgtgttctattatgtcaatacctctacgaggttttgcaagaaccctcgtatgttgtgttgtctttgaactcctggtgagtttagaaataacctcatcagattactacctattttatacataaagcatttattctcgttggtagagaactaccattcccgctcgtctgtaacgcgttaagtgcacaccttttggtgtatttgagctgattatattgaaactttatattcagatcgtctgttttaagtatgttactttattgtgcgtaagtcccttcaagaaaacttgcgtagtcgtgtgagactagagaactcagactaacgaactttcgattctgtcataattggaaatgatttatatgaacttgtttacaccgccccggttgtcttaagttagatactatctaggacccatgagtggttaaccccacatagatactagtattaaaatcggccggcgaaagccttgtggatttgcactccactccgagcctccgtccctccttcatcggagagggggttaaaactttttagcttctatttctttt

SEQ ID NO: 2272 - DNA, 670 bp, Saguaro cactus virus
  complete genome.1
gcggcgatatgaacactgccttaggaaattgcatcttagcctgccttatcaccaagcacatttgccgtgggttagacgcgagacttatcaacaatggtgacgattgtgttctcatatgcgaaactcgtgacgtggggcgtgtcgtggataagttaacgacagcgtggctccactttggttttacatgtatcgcagaggaaccagtctatgaaccagagaagattaggttttgtcagatggcccctgtatatgatggtgagaagtgggtgatggtgcgagatccgaaggtcagcctaagtaaggacgctttttctatggttcgttgggatacagtgaagaatgcacaacaatggtttaaagctgtggggcagtgcggtctatctatagccggaggggtgcctattgtgcaggagttctacaggatgtacgagcgcgcgggaggtcatgtcaaactcccagtgttgaaagaggttagcgctagtgggttgtttcatatgagtttcaattccaaccgggcctattctgagatttccgatgctgccagatttagcttttggaaagccttcgacatcttaccagatgttcaggaggccaccgaagctgaactgcgtcgcacctggattagtctcgattttggcccggctggtgaccttaacaaccctatcctaga

SEQ ID NO: 2273 - DNA, 671 bp, Beihai barnacle virus 9
  strain BHTH10927 putative glycoprotein,1
ctctgcggtccacttctgtcccacaaggggccgtgcctgcccagcgagtacctcgctctgttcaaactcgggaaaagaagagcattgtgaggttacttcctaagcaactattttcttttaagttagttctccttgctttttgcgtgtttagtgctttgtaggtatgtgtggtcccctatattggattatgtccattcgcgccctgtggcgccttccaggcagggaccctagtagaagtgatgcgtcctctcaggtatctctcttgtcgttagaacgtgtcgttagtgtggagcccggctccattgcccgtctccccgcagctccgcttgaactatacagtgatggtcgaattcgcccgccacaagccagtagcaatgatctctctgctgaggaattagatcggaggctagacctccttgcattagaatcaggatgatcgatcccagattgcccctcctcccgaatacgatatgttagtacggaggagaggactccacggcatttctgccaaacctggggtagcaaacatagggtacaaatacacgtgtcgttctgggtttctgatttaaaaccaccgatgatcgggattccaccgaaatcactgtttattagccgggccagaggtcttctgtgttctgagctcctgcttccggaactgctcgaaagcactg

SEQ ID NO: 2274 - DNA, 672 bp, Apple picorna-like virus 1
  isolate WA1 hypothetical protein, capsid1
atgtagcaatttgcaggtgcccgagacatggcgtgtatctgtattattgtttttatgtgaaagctcgccttgactaacccgatggctccttttaccgacggtaattatctttaagtaaggccggattagtacgtttcaagttgtggaatataaaaaacttctttaatttataaaagtggatgatgcaaaagttggattaagacaaagaactcttatacccaatgatcgcacgcaaagttagtatttatacgaaaggttagtgcgagtctgaaactcaacaaatgacagaagaaaattattttgtgatggatagcggaaagacggttctggaagaagagagaaaggttaaaagactagagcatgtatttgtttttgtggaaacaaatagatgagctagagaacaggttggtctatttaagcttagggccttacctttctaacgttacccgggagaatctgccaccattgtgctgggtggataacagtagtatctgagagtctaggcaaggaaaataggtattttcccctaaaacccttttccctttatgtaatacccatgtcatgttttaaaagagaagctttccttttgaaacacaagcacacaaatactaaataaatatattacttgtgaatttttatttctttttgatatctttaaatacaacgtttaat

SEQ ID NO: 2275 - DNA, 672 bp, Hubei picorna-like virus 53
  strain GCM3912 hypothetical protein1
caacgttaatgattccgtttgtatctttgatacataaatcgtttcgatataacgatttgactcagtcaatagacgtattgccttaaccggtttccgcgagtggtacttcgcgatacgtgcctcgtatcacattgctattgatttgcagggtatgaactttagtcaagagctgggattttcctgtgccccgatttcagtcttcacacaccaagacacagcgagtacatacaacgccttggtaggtcttaatagttgcagtagttttagcccatgaatttggctctgattctaccagtacctaaccttcgccatggctaatgtcactggattttcgctatcggggagccgcatcggagcgggccctacctaatatccaattggattgcaaaatgatcacaactaaccaaaaaaaaacaaatcatccaaacaaccaacctcacatccaccatttattcaccacaatctggcaaatacataaagaccaatatcacagattttaaaattgttcatgcaaattgtttttatgataatattaaattcactaatgtacctttgctttcagttcaagattcagaatattatttgtttacaccaactattctagccactaaatttcataatataacaaatggatcagttacagataattttgtcagaaaactcaccacatta

SEQ ID NO: 2276 - DNA, 672 bp, Cylindrotheca closterium RNA virus 02
  complete genome.1
cgggcattacccgtacatcacttattgaattatttggcattaaatatgcatagaaatcacaccctcgagtggcatctgagcattacgatgctcttatgtcactccgattgtgactctattaattctatttattctaggtttattcacacctccgtctctttcgagcgtgaaagttgaacccttgcctatgtatttgtgaaaatccagaacgaaggtaggtacacattgtagtgtatagtccttgtctaggttctcgttaggcacgagttcaccacctaggaataaaatctactggaatgccaccagtagttacgtagaaagttaaacgtatttattgacgtctattttaagatgttgaactagaacttggattctagtgttaggcgatttaatcgcttttgaaattgatttttcttagtgtatcatagcacagttagttaggttactccaatttcctactaaccccttttataggtaaaagataatgataaagtaattagagaaataacgtatgacacttcatatatatgtttacgtgttcgaccggcgcacatggtaagaccggaatcgagatcgtcaatgtatatgtgcttgtttgaaagcaatatgattaaaatttgacgtagggtatgagaaaacaccccgtccattcaattgtaataaaccacttct

SEQ ID NO: 2277 - DNA, 673 bp, Plasmopara viticola lesion associated botybirna 1
  isolate1
gcatgcctttgagatgcagttttgatttttgtacttaacaaaatgccatggatatgtatgatagctaatgactatctggaacaagaggcacgctgcccccggctaggggtccgaactgataaggttcttgcgattgatccggcgcaaggatttctcatttgagaaacagtcttgaattaacaagtttaaggacggaagcctcgacatgtccaatgttcacaatgaagctggtcttgtgaattcgccaaaatccagtgctttccctggaatcgtgtaccctctcattagagaggcgattggctggaacgggtgtaggtgtcagcaatgccctacgtgttgtccgtgcaaggaggagagctgcgtatccagcgtagtttgaatccgagtgtaacgactgcgaagcctttgtctgtagggtagtcctgtaaaagggggctatccgtccaggaacagtctgtttccctgtcctcccgtgaggtgttgttcgtgactacagttcaacagtaaaaaacagggcgatgtgtagatcggaaagatatctctaacaaagtattaagcgaaagctaaccgcgccgcctgccgaacgtgctgactagtacccgggcgtaaaactacaactacatatcacaaacctacgacttaactaaaacattccaaaatctacaaaacaaac

SEQ ID NO: 2278 - DNA, 673 bp, Picornavirales sp.
  isolate RtRrs-PicoV/YN2014 polyprotein gene,1
atatgtgccctcacctgtcaattgggaccaccactttcagtgaccccatgcgaagtgctgagagaaaggaagccttcttacccttcatttgtgaacccactagtctaagccgcttggaatacgatgagtggaaatgttcattctaaatggagtgaaacatgacttaacttttctagtcagacgcatacttgtgtgtctgagcgccactgtcttggcgtaattcttcagagtgtcacgccgtgcttgcggatcttacgtggcacatgacaaggctctcgctggaactgtgagtctgaagcatgtgaagtaacagtgaagagtgcatgatcacacgtatgtgtgggctatgagcctgcggatcaacaactggtaacagttgcctcaggggccgaaagccacggtgttaacagcaccctcatagtttgatctaccccagggtagtgatgttgtgtacctagtaattgccaattttcatgttttggtatcacggcataccggagagttcgcgggtgaaggatgcccagaaggtacccgtaggtaaccttaagagactatggatctgatctggggccctgtctggagtgctatacacacagctcagggttaaaaaacgtctagcccgccaggacccgagggattcgggttttcccttaaaaaaacccgactagagctt

SEQ ID NO: 2279 - DNA, 674 bp, Culex mononega like virus 2
  isolate OTU6 RNA-dependent RNA3
ttgtaaaagaaaaaggataaccggcactcctgttataaaaacccgatagtaacgctcaactcaaatcgctgaaccaatctcagagaggacaaggagtgagattttcctcaaggagagagcagaggagaaaaggtcaaggggaagaagaaagaaacaaggaacaaagagggtgaaaagagagagaaccagtggtaccaaaaatgacagattacgtcacatgcaccctctgtgggaccaaaatccctgtgattgttgtccccctcggcacactcgaaagagcggttcagtgtaacgtatgcgggcaaaactattcggtctctccaaagtgaactggtgtattgtagaagccaccttagacatgtacatatgtatacacatgtgtatgtgtctatatgcatacacacatctatatatatatatatatttttgatcaatttactcatttatttgtctatcatctttacaatctttcaaacagctcaagaagcatcagcgtatgtccatttggatacgcactacgccgggaagattgcatttttgtattgtgttttacaatgagtgttgcagctactttttggttggagtgttttcctggatcgggggttctttgttattaacacaccatccacctggtacttttcagatttagaaaaacccgatagttaccagtcaaa

SEQ ID NO: 2280 - DNA, 675 bp, Diabrotica virgifera virgifera virus 3
  isolate South Dakota,1
ccattacggccgggggaaaataagggctatggcgtcatgccatagtttatatacaccacggattacgtgaaccttgttagtaataacgggtgccctttgttagggatgtgttttatgaattattaattatgttataactcttattttcaactacgggattaaaaccccactttaaaactatatagggaaatttagtttaaacctgtataggaaattaaggattgataattttattgaacgagcctactcgttgaatatttatagttagttgtgataactagccttgtatttagacatggataatctccagcccatgttcgacataccttaggaagtttatatgcggcacgtattcaattaaatgaagatgctataagtgcttgattagacattaaaactagaacaagttctctagttgtcgctggtagagcataacttatagtaggtggattttatttgatgacccaagtatttatgaaatttgtcggcctccaagttgatcagctaattatttatattttgcgagtaatagtagttcagactgtgctatccccttgacatgcattttttggttactccagattgtgatattagggctctaatattgcaagactgcccaccaagtaaggaacttatgtaaacttgcttgggaaacacattactcaaaaaattatt

SEQ ID NO: 2281 - DNA, 675 bp, Beihai picorna-like virus 93
  strain BHBJDX18546 hypothetical1
gtggtttacacaccacgcacggtatatagttaaaagtcctcccaattgcaaccccggcttaacccgctcttttaagagttcgttacagcctcgcttgcatgacagctggttctatattctttatttttctttttgtttaaatgtgtacgtcttttgttagtgacgacgttaaaagtaactaactgagttttattagcgacctcattaaaagtaacttttatagtggatatctatctcttatcccgagtgaagattcgttaaatcactggacttgatttctttcattgtatgaagattcagatgcctatagtacgttcgaggtgtaaaaacctcttcgcggaaataggatatacatctgtttttgattactttgttagattgatagtgacggcttgtatcctactacacgtttgacgtgatatcgtataatcactaggtggcttgacaaccgcccaaatctcttgacctctcatgacgaagcataaacactaaactgacctcaccacagtagaattgtggccagggaactggttagtggtggatagaccttatgtcgaatccgcagtgttatcattgatgttttgagaattgtttaggtcggctagttgagaagctatagccctcccatgttgtcaacacattaggttctcaccttttacctcttttctctccttt

SEQ ID NO: 2282 - DNA, 676 bp, Iflaviridae sp.
  isolate rfb200ifl1 genomic sequence.1
ccccccacccgttcaaccaccgctaacatgtcggcccagtactacggcgctgtgtcgtcccctgttatgtgctccatcatcaattcggcctcgtactacggcgcgttgtcgtcttacccaagatgaggatattgttgacggaagggagaaaacccccgctgttttgaaaaccccaacttttatgtaaaatgtaatgtgttgtccacgttgtatgtttacgcggtggcatatataacaagaaccgcctgcagactaacactcacttcgtagatttgaggttaaagtttggaactgaacagttgatcattttctggtgtccccccagttggtttaagtactgtaaaaatgtgatatgtagtaagtgccagacctcttaacagttagttcttcggaatgttgattcaggtgacactgatgatcatttgtaggtatggacttggtatgtcgtaggggcctgtcaacgcaggtgcagccgcgcaaccccttgcagcaaaggactagatagtcgcaagattagatgtctgatgaatataccagacacagataatcgcttccaggtaaataactcactgtctcttcggagatataggacggtacctcggatagtcgcgcgccttaaccggtatctaggactcgttcgatcggagaacggcaagggctcccggattattttgca

SEQ ID NO: 2283 - DNA, 677 bp, Hubei odonate virus 10
  strain QTM133243 hypothetical protein 1,3
ttgatgaagttcaactactctttaaggtcatacaaaatatataatgtatcttatatataacaatatacacattatgatgtctcattaaacaattcgtacaaacagaatttcatgagaagacatgtaattgagtaatcatggttctttgttgtcaatgccaattggtatctgcttagtggccagaatctcgatatatattcatatcactcaacttgccatagtatccaattgattgtggtaacgtggtttgaagccatgtagaatgagaaactcattcttgagagatctctttgatttccattatatcaagtctctaattagttacatcaattcttttgagtctttaatttgttagaatcagttgatccttagcaagatcccatgcttcctacgagaatgagtaacttaacgttcgatatggaggagcaaacaatgaataaaaagacaagacttccacaggattatgcaaacatgagatgtttaccatcaattattttacccattgttagattccagtctttagaattatttttcaaattcttagcaactgaaaagtgatctataatataagtaattaaccaaaatacgatcaatcaatatctacactttatcactgtgtgttacattgttttagggctgtaagattcctaatgaaaagtagcagtttctgatgttgc

SEQ ID NO: 2284 - DNA, 678 bp, Picornavirales sp.
  isolate rfb094shi2 genomic sequence.2
tcgaccaagttggaggacacgttggaaagtacattgatggaaaaaataatttagaccttcaaaatttaaaggggagaaatttattagaccttcaaaatttaatcggtgatcagaaaaaagatgtcaccggtatggagatagctggaaataaagatttgcagaagaatcaacttgacaaccaggataagtggatcaatgcaggacgtgactcgttcactaaagcaggcctcccggaattttcattctgggatcggggtcgcggtggaccactcaatgtcggttcgacgagaagttcaatcggtggtaacaactttgtgaactcctttggaggcccaaacacaaacttaccgtcaaccggttcctcgccatacgcagacttgaatggattatcccgcccgttctgatcagggttgtcataaactttcttcatcatttcttgcattcttaagcgttttgtcatgagtcgcaggttgctgttactcatggggtactggtttgcgcacaacaaagtgttcttactggaaaagcgtttcattatgcacaaaaaaattagaattcctaaggagcttaactcccgtcattctagctatcgtgtaaactaaattagtttagtagtctttcttaaaaagataaattaaaatttaatttgggttaaacataacatcatacacatggatc

SEQ ID NO: 2285 - DNA, 678 bp, Picornavirales sp.
  isolate RtNn-PicoV/HuB2015-3 polyprotein gene,1
tgaaccgttacgcaccactcagttggtgtttggtggcaccaatgatggaacaaaaggctacaccacttgggctacggcccgcgccaccttgtggcgcaaagacattagaagaatagcataccgcccactagggccctgcagccagcagggtaacgggcaagcacttctgtctccccggtagaacggtataggctgtacccacggccgaaaactgaactatcgttacccgactccgtacttcgcaaagcttagtaggaaactggaaagttcgagttattgacccggagtgttccccccactccagaaacgcgtgatgagggttgccaccccgaccatggcgacatggtgggcatccctgcgctggcacgcggcctctaagaggataactcgctcctactggtaaccgaagagccccgtgagctacggtttattcctccgcctccctgaatgcggctaatcctaacccatgagcagttgccatagatccatatggtggactgtcgtaacgcgtaagttgtgggcggaaccgactactttgggatggcgtgtttccttgttttctccatttgttgttgtatggtgacaagttatagatctcgatctatagcgtttcttgagagatttccaaacatttattcaagtcgtacaattcttgtgtttaagcagtacagtgtaagg

SEQ ID NO: 2286 - DNA, 681 bp, Barns Ness breadcrumb sponge picorna-like virus 3
  isolate F53,1
acaataaaatttatgaattactacaattattatatgtttagaataagtgcttttgatggttcgctctagcaaagcgggtcacacgagggaggaacagattttggaatctcgtggcttattttattctcaagtatttatatagatgggatattatcgatgatttttggtgcagccgtaagcagcagagaggtaagaagtttaggcgaacataccattccgaaaggagcacaaaccgcacacaatggtttgtgaacagcaataatggtactttcactcgttttgcattatttgagtgtgctggcagggtcgaatctgtcacaattaggatgtcggcttaatgaaccgagtccctaattgcagatgcattactttagagtgaatagttttcaccgacgatacttaaactgtggtgactccacacccacctaatttctaaataaatatgagacaagtctcttatttgagcatttattttattgttggttgggggggcaaatccaatgatgaatcccaacacttctctcatatttattttccgaattagcaccaaatctctttattgattttatcaggagtatctcggactgcgttctatcgtcgtttgtccgggtgactgtcgtgaaagacgaatatttggagagaactccagtagctgattctgaatttttacaatattgccct

SEQ ID NO: 2287 - DNA, 682 bp, Fusarium poae mycovirus 2
  genomic RNA, complete genome.1
cacgggggcacacaacgatttaacgttgcatgatgtgatcttatcgtttcatcatgtatatatcgaaggatatataatgtaagttattttatgttatattgcttgagggggtatctcaggcacttgggtatgctttatgccgctatagcgttgtcccttaccgacacctatgttgtttataggtgcagtcagtcatgggaggaaatgcctatgccatcagacttagaacaagtcatttagaatgtcatcgtttcggccaaccacatacgaagtgggtggcggtccattcaggcaactggatgcggctagttacgtgtaactcgataccacaaagctcgcagcaacgaggccaggctttaacaattctagcagtccatgttagaaattgcgaaagataaagcaaggtgacccaagaccaagggtaagcaagggtcgacgtttacgttcgacgaccgcacaatctggggagtaagtgattgtatggccctgttcttgcagccagcaggaatatccatgtgtggcattgatacatgggaagcgtcaaaggactgtctagccatgccacagacaagtacatttgggtacttctagttaatcaagaaagcgattagtttcgcgaccaaaggtagaccgcctagatctagcctaaatgccgatgcacaagcggaggtaatctagcact

SEQ ID NO: 2288 - DNA, 682 bp, Forsythia suspensa picorna-like virus
  strain pt110-par-3-NW genomic1
acatattttcgcccggtgcagtgtcatagcaccagctggatttacttctgcaagtggacgcatttgcagccatatctccagccgtacctgagcttcctaatttctgcacgacccgtgtgattaggccacttacgtacaacccctcacccttctatttctttcacagctatttagtattacatccgtggcgttaggcccgcccaacatctaggcctctctatagcgtgtgagatctatttagaatttggttgagttattgtccctcaaccaccatccgtttgctactcacttgaccttgacagagcattctgttagtgcatagtagtcgattccatccagtaccccttgatcccgggtatctggcccgtagactgattgacttcagcttattgcgaagcctacccaccatagtaggagatagtagcgagaactgtcgatggtcagagcctgctaaagattattatgtacagtgatcaccaccttctggtattgtctacaccaacgtccattcggtcttaatcgagcctacagaacgcgccacgttctggtgctgaattggataaacaaacgtttagctatggtatagcttgtaattgtgacttcccgacgagggaccacatcgtttgctctggctatggtaaatagctaagccctagtaaggacttccacaggagcctccagc

SEQ ID NO: 2289 - DNA, 682 bp, Hubei odonate virus 4
  strain QTM161803 hypothetical protein gene,1
tgagggccttcagccctccagccgtattttgataatagcttagtttatataagactaatatatagaacagattaattcgaactatatatatgcaattaaattttgctattatcaaatgtggaagtatttcatctttatataagtctaacgtattttcaacagataaattcgagaatttacgtatgcatttgctttcacatttgtttttgatttcaaagtcattaaacaattatgtttgtttcattatcattttattaatgttaatttatatacttatacatctttcgtttaatttcttcgatttagctagctgacattcattatgaaacgcacataagatatattacgccggatacaggtaatatatagagaatcgtgtgctgcctgagtaaatatgtgtacttaagaatatcttgcgcctccatcgttagcgtgactaacgtatatatttggattgtataaagagcattagatttctttatgttttatgggcctcttttcaccttttggtcattagagtctacagcatatttatgtaggtatggcgttgttggcttcccagcttgacaagaaattatccacataaagacatataagtatttgttttcatttcccatattaatttaagtttatgggttttagctctcctagttttccctaatataactaggagatccgcaaa

SEQ ID NO: 2290 - DNA, 684 bp, Perth bee virus 3
  isolate WA2-20 polyprotein gene, complete cds.1
tggccatagtattgcgggttagcgtcccattaagattttaatatagctattcacaaccttaatttctttctttgattgaattaagccgctgtgtttccctttccgcacaaccactttgtcttcttttgttgatattgtgccgctgtgcccccttcttttcccctgctctttttatgacggtttagttagtaacaacttgaggaatagggattcaggctccagcccctggaatctatcgcactgttaccttgggagagaccactaccattaatatggtggcagaggtttcggtctcagtgttattcaaatacagttgttattagcggcgttcttttcggatgtctcttggtgatctcttacactagcaaagattgtaggaacgatgcctttggattgagctcttttgcatttacggattcacataagtcacatacctttaaatgtccctctaggcatgttaattagagggaaggtatgtatcagaatgtgtctatggtaccctgtatgtcaatggttagacatacacattagggatacggttatggcccaggaaacgttggtttgcctgggttatacataacacaaacgctcattgcgagcttcccttcttatgatttttctcctttggcgaatggaacgcgcgtcttcggaccgtaagtactaatagccaatcccacaattgaa

SEQ ID NO: 2291 - DNA, 685 bp, Blechomonas juanalfonzi Leishmaniavirus-like RNA virus 1
  strain1
tcccaagctctccttctctacggcgaaagggcggggtgacatcaatttcggatatcgcccgttgatgacttcacctctaaccctctggaatgcacttaaatggcgtagcctgacggtcccttctagccaaagggtgaaacggaagaaggctacagtttctgtgtctgcattgaagtgaccttgtgatctaacaccctgaatacttgttagttcaattgtcttatttctggctcaataggttcggctaacgcgggttgttcctaagcctatacatagtcgtggctgtcttgtcgatcgtaaacagtgacagcgtgactcatcgtgatcatttaaagtattttattgctggcagtaggttgttgctattaagtctgaattgttccgtttgctgtgctttcaacatttaagcttacccacttattgcttgtggtatttgtagtacgtattgtggattgtcaggtgagtttttggtgcgtgtgccttaacacagtcttagtgcagactacctcactgatcgtaaagtggttggtagtgtcactcgagctagtttagtatcactccttctattagtggttgctgtgtcagtttttgtgttttcataatatttaacttcagactacttcactgatcgtaaagtggtagtagtatccaagcccgttgggatctttaactttaaaccttaaca

SEQ ID NO: 2292 - DNA, 685 bp, Wenzhou picorna-like virus 8
  strain beimix75836 hypothetical1
cacgggaattcccgtgtgcagtgtaagttagattacttggcagtttttgccctaatagaccatagacgtcatcctgggcatattatgcccattgtgaccactacgtctattagtttttctaacacaaccaatgttttgttctaagtattgatcgtgctaaactagcgatccccattttctttgagttgagttatattattacttgactctttactctattttaagtagggtttttagttagcctgccagctagctatttgtttgtcactattgtgacacttgattcttcagattgaagatgtagaactatacctggtttctgagttcaggcgatttaatgttctaatttattgtgatttgtagtgaatacagcacactaatagaagttccgtcaatcttactattagttctccaatattattatttggagatatcagatcattttagatttttacaaataacgtacgaactctcgttagtgtatgtgtgtgtaggccggtaccgtatggataaatccgaaatcctgatcacatatgcactagcgcttgtagaacgctatatgaagcaatctgaagaatagggttaagcgagaaccccgttcatcaaatttcaagaccaccactcctgtatgaaaagaaagtttattagtatattatatcgtttcaagtggtgaaaaattgacaat

SEQ ID NO: 2293 - DNA, 686 bp, Chinese broad-headed pond turtle picornavirus 2
  strain WHWGGF755341
cgggattacccgtgcggcgcttttggacgctctagcttggaggcgtaatatccagctatcgtttgccgtgatttacggctattttaattaataaaattcaaaaacattgtgcccttcccccaatacgacctggatcttggtcgtggctttagactcaccatcagtgtatggtagtactttgcgatattatgtcgcaatggcccagattgtttgtcatactattgggccctctcttgtggcccaatcttttctttatgtttgtttcttagggtagtctgtgttaccaagccgagtgctcgcgtgtggcatgattagcactatcactagggtggtgtgagtaggcgaaacatacagagtggttgtcattctcatgtggtaatgttctgcatttcaacccttacaagtattaaggtggtgtatgtgtgtccgtagtaggctacgggtgaaactacggggctaacaatttagtcagcaatgtgaatagtggcggccaattgtgcaaatcaaattgataatcgttgctcaattcaacgcctgggaactacactaaagctgcatacttgccactggaggatttgttaaggggtggttcattatatcacatgaggattataccgccccttctacgggcgcttcagacacgtattagttttcccattataaaacaaatatgatatagaggttat

SEQ ID NO: 2294 - DNA, 687 bp, Hubei picorna-like virus 50
  strain spider113255 hypothetical1
gttttttattattgtttatatgtaattgtatttgtttatatgtattatgtgtagtgtttcgtggtaacattgttattgttacctgtaaaaatattaaaataacaatataagttggtatacttgttaactgaagttttgtagaatactgggttaatctggatttttgtatgaagcaattgccgagtaagatgtcgtcctatagcttatcaaaatgttcttcggaatagtttagtttcataaccttctgtaattcatatcactgagagaagcttttaaagactttcaaatacatgttacggggaaactttactgggtcgtgccgttgtttaagctagatagatatatcattggaccttacttggactgaacttttgtggattcttcttggtaggttagcaaccggttttattaattactacctttcgtttcgagaaatcctcctttggaccgccaaaggatcgtcgattctatgaactgagtgtacatacgttgagacgtttcgaaatgttctaattaatatgacatctgcattatggaagttttcaagtggttaatcccaagtttccatggttctgccgccgaataactgggggttctcatcccttaagtgatgacgctggaaagacagcggactgatggaaagacatcatttttcagatttaaagcttttatgactagtacaactta

SEQ ID NO: 2295 - DNA, 688 bp, Changjiang picorna-like virus 9
  strain CJLX26226 hypothetical2
acacaaatacgcacatcactaactcaaatagtgaagcacgggaaagtgtgatgtggacagggtgtcgcctttaaacctagcttttcagctttactactcaggcggagccagagaggtgcttctattgcagtgcgtgggaccgcactgcaatgtaattagtcccgctagttctacagcgaataccgatcagttggatcgagactcagtcactgtttgtgatcaagtggattctcttgccattaataatggacccgagaccactggtgtcaccgagtttgtacaggaggcttgctctcagattgacgtgctaggtgcacatcacgtgcccgcgccgttatctggtcagagccagtttcaggacttgaaggcctatttctcccgaccacgtctcgttactaatggtaacgtcacaagtgtggggaggattgcggccatcaatgtcacgccgggcatcctgttggctacgctttttcccgatggggttaagcggttgacaggtgtgtatggcatccgtttcactttggtgtttacgctgcaggttgcggctacaccattccaccaaggtttgttagcattgaactggcagtatgaggttagttctaacactaacgaagcttatgtgcgcagtgtcaatagtgagactgccaccaatcttccccatgttagacttgacctcagtgtggacacg

SEQ ID NO: 2296 - DNA, 688 bp, Wenzhou channeled applesnail virus 3
  strain BHBei77067 hypothetical1
gctcttccgatctccctggagaggtgtaattgtatctcttcagagtattttttggtgcgtgttcccgtagggtagtatactgtgaggttgctattcgtaggggcatgttaagaataatatatatattatcatgaggagttgtttaagccgtgtgttatcgggcttctttgaagtagtatattttctttgatttgatatgttacattttgaaagcgatcttttcgaatagtgatgtgcaaatatacagcaacgataatttacacctattttaattcttgtacgaagattttatcttcaattaagatggagtcagttaaacccaacagcctctaaagtttgaggaaaaagaacaaacgttggtgactgtgtcccatataattgtatttgattaatttaggaataatttggattgctagccttgtctgtggtacgttattggttttagcagcggccatgcagttttgaaaacacagatagtctaggcatctattagctgtagaatcttttgattcgagttgtattggcaatttttggttgacagccccctatcgtcctgggtaattgttcaatatgacgtgcaagtgtatgcaaagagccgattctatataagctcagctatgttaccccaagttgtacgcgatggtatcaaatccttgggagtaaaggaacagagagatagacttagttc

SEQ ID NO: 2297 - DNA, 690 bp, Astroviridae sp.
  isolate coa196ast2nc genomic sequence.1
atcaaggtatacccttgatgaggagggttgatagtgtaccagactatattgaggcttatttgagagcccatgctgctgttgaagtgcgtctgcgtgacgctcttaaggaagtatctcacctgaaaatgcagctgatgattgctgataggaagaaagatcgggctgagaggaaagtagcaaatcttgaaacctggcgcagaataagaaatgctactttcctctcagcccgatctttcttcctatcagcaatcatcagctgcattttcaggtgagatacttccttaagagcgtcacgcagacgcacttcaacagcagcatgggctctcaaataagcctcaatatagtctggtacactatcaaccctcctcatcaagggtataccttgagagacaatcctgacttgaaaaaactcctcacctttcatggcataagccactgtgaggttctggagaaaaaccttgtcagttctcagcaattctttccagacattagtagtgccaatagcactcctccaaagagtaaagagattctgggttgctacgccagatatgacctttgaaaggccagctggtgtggaacgatccatctcctcttacgctttggaggagtgctattggcactactaatgtctggaaagaattgctgagaactgacaaggtttttctccagaacctcacagtggcttatgcc

SEQ ID NO: 2298 - DNA, 691 bp, Dicistroviridae sp.
  isolate sru103dic1 genomic sequence.1
tagatacacgtcctacttatgtggctactcgtggtgcaggttgtttatcctgcaccacgagtagccacataagtaggacgtgtatctacggcactgacggactaattatgtgttgaggatatcgacggatagatttatgaaataatatatttctgacggcgatattgtcatacgaaatcccccataggcgttatctacggcactggcgaatatggactaaaaatgtttaccaaactgatcacttagagatccccaaccacacataaatacacttataaacgattgataacactataacaatttgtaggcaatattttattagaatttaagcataatgatgttagtaacctcatagtaacctagatatatttgtttgacaaatatcccacagttgagtgaaatcaacaatgggccgtttaggcaatgttatgagaactgaggcgttaaattttgacaaatacaatacctgacaagtcccttttggattgactaaatataagaatagtatcaatagtttttgaatttaaataagttattgtagatgaagacatgtatttcttgcaataacctctgtatttcttaaactatatgcaattactcggtggtacttgcatcttgatcgaagttaacctttattcttatattgctgtgtcggagcagtggtattggcgccggactaattaacataaac

SEQ ID NO: 2299 - DNA, 691 bp, Beihai picorna-like virus 11
  strain BHZY60905 hypothetical protein1
tccctagggatgtatgaaaattatccttagggcttcaagccaaatcgaattggatgattatcgtcatcctctttgctttgtttaaagctataaaattctacgttaaaacatttgattctcatttttaaacgttttgagtttctacacactttattttactgccgtgcacagtataaaagcatgtttcagaccttagtaatgtggtctgtgtaatttacgacattgcatatcgtttcggatcaagtacgttaaatctctgttatgctaggtaccagagacaatatttgatcctttcttaaatcttaacatacgctagaatgttagatttgagttctaaatacaatagttttcagtgcggaacggaatccccctgaatgttatatcacgtccagaatagataaacccagcagtatggaagagtatcttagacctctgattataacagacagaacaattggtccaccccgagctgtattaacgcaacgtaccgcggctatgattgttacaataccgaatttatattccacgtttaggcattttaccaggatgtcaaggtagctgactgcacctaacttttttcgtggaccctatgttttcgtgaggtagaatctcatttttgacacatattttagactatttatagagatagtagataaacccttgacttagcacccaacgcttgttcctaatt

SEQ ID NO: 2300 - DNA, 692 bp, Picornavirales sp.
  isolate RtNn-PicoV/HuB2015-1 polyprotein gene,1
tttgaaaggggctgggggatgtatccccatcccccagtgtgtatgccatactgcatagctcgcctatgccctatggattcacaaccctttcatataccctccctacccaaccccgtaaccacatgctttactccgcttggggttttgcggccccatgttgtgacgaaatggctacgcaatcaatgcggctaatggggcctgccgcttttaagtggccccagttagaagtttatgcacacccgcccattaggaggccaccagccaggtggtcagagggcaagcacttctgtttccccggtgaagtttgataagctgtgcccacggctgaagcagacagatccgttacccgcctcactactacgagacggctagtagtgtgtaatatccgaatttcattgatccgggtgttccccccacccagaaacgtgtgatgaggagcggcacccctcctatggcaacatagggcctctcctgcgctggcacacgggctctatgagcatgaaatcaggagaaagtcacacgaagaccttattgtgctagtgttgattcctccgcccccctgaatgcggctaatcccaactccggagcgcccgctggcaaacccgccagaagagcgtcgtaatgcgtaagtctggagcggaaccgactactttgggtgtggcgtgtttcctttatttcctttgtatttgtat

SEQ ID NO: 2301 - DNA, 692 bp, Wenzhou channeled applesnail virus 2
  strain WZFSL85846 hypothetical1
ggtgtagggcctaaaaaccctacacctaattttatcatcatgtcgttgttatttatggacgcctgttgagagaagtattttatacgatggactcccgttgcgagaagataacccatgattttgtttcagatgtttggtttttagaccatacatttaattattttatgtgttttgtttttaatatgtgaaaagccccttagtattaaattgcaattaacaacataattcggcctttgggcttcttttatataaaataaataaaaatactcgttaccgaacggggtctttaaatagattgacaaactattttaagatgtataaaatcctactaacattgtgtagatacacgtacctattcgagagttgaagcagtgctattagatatgcagataaaagtgagggttgcgagctaataactcgtcctcatggccaaaagcatgcctctatcttttagcaatactgtgtatagtacttcagtataatgtgggcaagtgtattctgtcaaaacggtttaaacatatttgttccgtaacacaacaaatacaatttatgacgttggaaagcgttagtttccgagtttttctggaagcaagtttacttacaatcataaactgctaccattcaaaaatttttatttcatttatggtcacaatttaagattttagaaaagcgttcatatatttacatacaaa

SEQ ID NO: 2302 - DNA, 692 bp, Hubei virga-like virus 7
  strain QTM27262 hypothetical protein1
aggctggatcaattaattaacaataatggttgctgctatgaaaactgctaacacaactagacgtatcgtacgtcgtactattcccgtcggtaaacctcgcagttcaccgactcgacccacggtacctgtcgttaatagtgttaaaaaacgagcgaccgaaccaattattccagtcacctcacttagttttagttcgttaaattcatatttttcatatgcttcaggtgttttgttaaacaccgaatttttattatattttattgtggctatgtttgctatttttaactatcattcaatgcctgaaaattcctacgttactaaaattgttagtaatatcttttctaaggccagtgcttatgataagtgtacgtataccacgtttattatggcttttataccatttattcctgtcattttaagcgtttctagtaatatgcgtattttatcggctattttatgcttcgcattttataaatttttccctgaaaaaacttattatgaatatttagtttttgctacgtgcatttatttagctgtaaaaacgaagaataaagtatatagatttatttctattatcttattagcatttttgtattttatacaatttgctttaccattccctacggacaatacacttacgtgtagagctcctgcatcgaaaccaaattagaatgtaagataatagttaagtt

SEQ ID NO: 2303 - DNA, 693 bp, Riboviria sp.
  isolate rob114pic1 genomic sequence.1
tttaacggtccgacagaccgatatgtatcgcagctcttttacaaactggaaaactgctcttttgcatactaggatgaaactgtggatcacgtttgtcaaggttacggccccatacactcctgatttccgagcctcttatgcagaatcaagtcccttttgtagaacctgacgtacaatgtcaaccccaaaacccaaactttttgtttttgttttgtcctctttataaagaagattgttgtggcttataaaccgcaggttttcttttagatgacagaatacgctgagaaaacatagacttttggtagtaggacctccgaaccctttatgtttatgcactactctgaataacgtattaatattttgttaatcatctaacacactgatctcgtgtagatccttgcgcatttggttagtaaattattgatacctattcaccccataagcgtatgccccgaatgaatttagaccagaattttaacgactattggaatatatgaattgacggataccagataatgattattgtcagcgagaccttgtagcagaacgcgactgctaatatgaatctggagtacggatgtttttatgactcaaacagttttctcaaaactgagagtaggatggatttccgacctcggcaggtaaagcttctaggcctgaccgttgcatcactgaagcagccaatgtatcaca

SEQ ID NO: 2304 - DNA, 695 bp, Changjiang crawfish virus 2
  strain CJLX30764 hypothetical protein 11
ctcccggtaaatatatatacacagttaatagaactaactgtgtattatgtttgcctggaacgagggcagtatcccaagtagtgtggtaaccatttagcggtcccagcccacgctgtctcgtggtagaaaatgggtaactttttagggaagggtaaatccatccggtcatataattcacgcctttcaatgacatttgccaggtcacgctgattacagaagaccggtttaagaatagtttattgaggacatccatcattcaatgttcagtactataacctctcctctgaagacagagcgaaagttatggattgtttattgtatagtaaagttttgcgtgagtttgcatgcaaagcgtccccgtattattattcacaatcccagtggagggattgttagtcatcacttccacccatgcgattcgtgtgtggaaggtccaggagagtgcatcgtagacagctggtggcaatatacgtaagaccaccatgtcgcacgctgtagtggcgtgatcatccttagttaattgatgctttcatcttaacttccggtatgggccacttaccgttcatccattcataggtttcccgatataacatagtttgaacgccttttcaacacgatctactagcatcttcagtgggtaacaccctggagggaaaactagagaagccgttaacaattgaaaagattagtagact

SEQ ID NO: 2305 - DNA, 696 bp, Hubei picorna-like virus 51
  strain QTM27291 hypothetical protein 12
atatttaaacgaaacgtaattaatgcgacaaacattagttaaaacgttgaaattctttcctttgtcactcgtcattgaaccccttaattctttgttattacttttaaatcatcatttcacccctctaaattttcaggttgaacgcgtttaggtaagtctggacaaccgattatgtgagacgtaactgccctcatgtaatttgtgcttgtcttcggcccctatcctgcaactacctttatcttattatcaaagtctttagtcaattcctgcgtacacctccaaagggtgccttagtgcagacgagatctgtttacgttcgagaacaaccatgtacttgggattttccgcctaataacgtaacaagagatcgctaaagatagagaaataaggtataaatgagatagtaataatatatgaaattaagcttagtaaatggataccgcgagatgcctatatctataaataggagaagcttagtggaaaacggcttataatagttttctgacaccccaatagaattggtgttaaaataattctatacactttttggatatagtgttaaaacaatcctctcattccacactgaaagtggaattcaaatactttcagacactgtttttataatttcgtgtaaaacaaaaattataacactttgtgaagtagtgttaaaataattctcaaaaacccaatgacaaa

SEQ ID NO: 2306 - DNA, 698 bp, Changjiang tombus-like virus 1
  strain CJLX26263 hypothetical1
cgccaatatttcgtcgcctgtcttgcgttaagatgatgcttcagttgttggtctgcttgagtgtcgttggtctaactgcttggctgtgtgattatttgtttcaggtttatgatggggtacgcaggtggattcgggtacgacgtcgtgtcgccaatgttgtccgtaaggtcaacaatgacgttctcgaggttatagctaccgtggaagctgacattgcggctgatatcgatgcgtctactgctagtgctgtagatgatgaggtaattgaccgcactgtagttaaaaagcggaaggttaacaataaacaccgcgcatcccatttccgttcgtggttggttcgtatggcaaaagcaaaattcggacgggtccatgagactgaggctaacagactttgtgttcggaaatatttgtatgatctttgtgttgagcacggcgtggttgtgcgtcatatagcagagaatatagatttcgcgaccgcattagtttttgtcccaatgtcttatgagattgaagctctggcagttaaacacaccactgaggtgatggatcttaaagcgattgctgagcggttgcagccgctcggtcgatgtgcttgatggggccccgagaaaagggaggggatagacactaagccttctgtttatcccggcatcactcccaaattttcggggaaggcccgtccacgcaaatatctgact

SEQ ID NO: 2307 - DNA, 699 bp, Picornavirales sp.
  isolate H4_Bulk_Litter_22_scaffold_61
gttttgtgggttatcccccactttatgaatgtcactgattttgtattttatgatttcatagattagaatatcttgtacagacactcatatttatttatctacttcccgcgttctgcggttgctcttaaataaattaaattgagcagttttatatattgatatgatgaattgttaggttccccatgtggaataaacaagaatttgtattctaaagatttagtatttcgaaagattgaagcgtcctaatattttaaagtgctcgctattacacaagcgttgttatggtgtaaatagtaaacggtatagttgatgtagcccggtttgcagccgccctataatttgctatatgtcagacaaacgcgatcgtattgtataacctcctttgatgatattaacgattgaacatttcgtatgaagctggacttaccaccagaacttggatttcagaatgattaacgactttcggcttttgctgggagttgctccaaggaagagttcttccgatttgaacatgcccgagaataaatcattggcgttgtgcattatttggcgattctaataacggtttactgaacgatgtaggaatttagttgttgtaatgttgaacgtattattcacttacacctatttctgggcatcctttatggaaaacggagtcaatacccgacttgtattagaacaggggaggcacttgctaat

SEQ ID NO: 2308 - DNA, 699 bp, Robinvale bee virus 7
  isolate VN1-35 nonstructural polyprotein1
tgtggttaacaccacatgcttgatttgtttggccggaagccagacttgatttcaatttgcgttcattcgcacctggatgccatttgatgacaataacttgcgtgcgtttacgggcgtacgtatagacattaacatcgaaacatcttgtggctcataaccacactgaaattcaattctaacctgacaagatgaaagtatctatccccccctttttgttttgtatatgtacctgatggggcgatgtagccccatttatatttcattgatcgaggaataaataccaaaatatcatcactcgacaaaaaaggagtttggtcactgcccctttagtttcaatccgttctggtaataaactattgataatactccacaaagaaaatacaagaaaaagaaaagtgttttgagaagatgctagtaatttacccttgattaagatcattagtgtgtggtgttaagcacccactagataagcagagtcattctctgtaatcgttttgaacccttcgtcatcgattttgactagtaaaactatcaattcaggtcgtaaactcgactaggtctgtaccgccattccgaagaatatggcgggtatgccccacaacagagggatgaacaaaatatctaaccacaaaccagacacaacctacgatagactcaccaaacgcgcacacaacgatttgccccatatcagcacatatc

SEQ ID NO: 2309 - DNA, 701 bp, Beihai picorna-like virus 19
  strain BHJJX24523 hypothetical protein1
ttcacggacattcttttattcttcgctgcttgtgagaaaggagcagcaagtcttatggttacttctcatttgtcaatggctaaatgccatgagtgtcatttgtataagtagaaactttatatttatatgtttataagagaacgattacccaggtttgcaaaagctatcaaaccccctctcgttgggagagggtcttcagttaagcgatttctatgaatttgcgatcgtcctgaagaggaagtgaccttcaataacatttgtcagtgtaaaagtaaacatctttttagtgcgtgtgcgttcacaacgtatgggcaagtagaccttgcgttttgacagcaaccttattgtggattgcctactagattacatatgtttacctattgaaatgcctctttggaatatacgagaccattggattacaatgagtttctctgaatgagtgcggaggatggaagagtgagtattgaactacaatgtacgaaatcatggtactataggatttccgatcagtcaatatgtcactaatggacctgctgaacacagggtataaaatgttctgagtggtgtaaagctgcaaccacgaaaaaccatgtcgggtttgtactaaaacagcagtagtaggaaagcactgaccggtgcagttcccccggagggtaacaccccggagacacctcgagtaatgtcgagagtgtgccgacctt

SEQ ID NO: 2310 - DNA, 704 bp, Miniopterus picornavirus 2
  strain Henan-Ms56-2 polyprotein gene,1
tggcccttcccttcccctttcatgattcccttggatttgactcggattgtttgactacccttcttcttaccacattggccctagcggccaccggactgacctactcccatggcaagctgaacgccttcgcagcggaggtcccttcttcggatacggttgaccactgcataagtcgcgggcccaagtgagcttttggactgacccattttgttttctggactgccaccgccaagaattgcggagcagctctgtgtagagagatccttcctttaggccgaccccgtgtcccagcacggtagtaggactattggagtgctttgcacatctgcgcctagtgtcagatgagccagtggtgtcacaggaaaacgggacgcgattcgctatccctaagcatccctcttcggaggtaaagcgcctgtggcatacggtgggatcgtgccttcactcgagggccgggaaacccaccctggactggtgcagcttgacagagtgtcggccggcactctggcactagtagccggttgttctgggatatgctgttctcttacctctcctccttcaaatcctcctctcataccttcccccaggctttttcaaaagccccctcccacagagtcctctcttggattctctctcaaggagcccctcaccaccgtggctcctacctgcatgcaaccctgccctataacatttatgagcaggac

SEQ ID NO: 2311 - DNA, 705 bp, Rhizoctonia solani mitovirus 15
  isolate K-IL-s02-3-25b1
gtaacaacggaaaacgaactcaaaatcttgagttcagctcttgtgagcactaatttggtatttatactaggttacgcttatgggagttcccacaagtaaagtagcgtcgacgattacactgttgacgggacccgtctctggcgttgagagggcccgggggcaacctcgggggaaaccgaagtcactttctcttgaatgagaatgatagaggcatttcaacatccagaacgtaagtccgatggcaagcgccatcagtcctacgaaatgctgcggccccctgctttgcaggggaaaccgaagtttaattttaaacttaccgtataaaacggtagtttgtacgtttgtcaagttgaaattaagtaggatcaatatatatctcctagaacttgatatttatgttcccgcaagtatggcgcttagtttcctttgtaggaaagtaattcctattcccagaccatttggtcttcgaggttataggttatccgtagggactaagttaaagtcataccaggggtatcaagatggagttttaataaaaggctgagacgccgcttcccgtgagggatgacgcatcaggaatgcccgtgagtagaccccggaccggtgtaatacggtaccgtagtggctgaaagagccatatctacgaatctcctctcgaaagaggggagaaacggaaactatctgagtgctccttatatatataac

SEQ ID NO: 2312 - DNA, 705 bp, Potato virus M
  isolate PVM-352, complete genome.1
ttagtgtagcttaggtattgctattgtattgaatatttatggatgtgattgtagatttgttgtataaatacaagtttgagcgtttaagtaataagttagtgtgccctatagtcgttcactgtgtgcctggggctggcaagagtagcttaattcgcgagttgttagaattagatagtcgcttctgtgcatacacagctggtgtagaggaccagccaaggttgagcgggaattggatcaggaagtagagcgggcaacaaccggaaggcaaatttgtggttctggacgagtacactctgttgactgaagtgcccccggtatttgcattgttcggtgaccccatacaatcgaacacaagcgccgttcagcgtgctgactttgtgtgctcagtgagtagaagattcggcagtgccacgtgcgggctgttgcgagagttgggctggaacgttcgaagtgaaaaggctgacctggtgcaagtatctgacatatacacaaaagaacccctgggcaaagttgtgttcttcgaggaggaagtgggttgcttgctgagatcacacggggtggaagcattgagcttgcaggaaataacaggccaaactttcgaggtggtaacgttcgtgacttcagagaattctccagtgatcaatcgagcggctgcctatcagtgcatgacaaggcatcgaacggctctgcacatcttgtgtcctg

SEQ ID NO: 2313 - DNA, 705 bp, Beihai shrimp virus 3
  strain BHBJDX18821 hypothetical protein1
aggggcgagcagatccattctgtggatctgcaccccaatatactctcttcaggtcatctgactcatgtcacaaagtcagagctgacctgggagggtgatcagctggtcgacagcgaggggcgcaaatcacaacagctaacaatacacacaagaacaacaacagacacaagcggtgaggtgacaattaaacaggaagatgcaggatttgaagacgtgagtgtgctccaagcggtagcgaccacgctggacaacaatggtgacgatgggagcgatgacatcatcagcattgaagaagccagtcccagcagtgacactgaggacaggccagtagaaccacaggctgaggaagaggaagatcaggatgtggtcgttggagttgaagaagaggaagagcctgtggcagaagactgggcagcagaggtagaggcagctgaagaagaagaactaatagagctggcagtcgaggcagaaagtggccttgccagtaagacagtattcaacacagagggcatcaagaaagttgacaaactcactgtgttgaacactgtctccacattctaccacctcaacagagacggccacacatacccagcagcacaagtgacatttagctttaaggatttcagcagatttcctgacaagaactacactgaggtgaaggctaagggcttgcctacattgacagtggctgtgcttccagcagaa

SEQ ID NO: 2314 - DNA, 706 bp, Bat iflavirus
  clone Bat/CAM/IfaV-P17/2013 polyprotein gene,1
ggaccgtactttgtcgacgttttgaacgatgacgaatcggtatacgcttcggtacctattgttgcaagttcgttccctattttcgatttgcctgcccgaatttgactcaaacaattgtgacatactatgtctctgtttgaaagcactacacgagtttgcgcccagcatgtatgttttcaagtcttttgtataagtctgcctctatagtggttttctttgaccttaaagccttgtcaaccatcctatatgctgcatcgagacttgatgtcaatctgcctctactacgcaaatgtctagtaattagttataaggttttactattttccctcatttccaattttagtttgtagtgtatgtgagtatcattcttactccgactgttaagagaaaccaatttatagtcgttaaatatgataaatggaatgaatgatggtgtcattttaaaaacactcttctctataggcgtaagcattctcgctcttagagtcgtaaagaagaaatgccgtgtctatcagtatgttatgcgatttattttctgccacgcgcttctagtgcaatctagttgacatacagacattgcctaccactcgcgagggtcgaccggtagtgtaaggagtaagtgatgatttccgcttattctgtaccctttgcctggtgaggacagatcctgactaattttaaatataaatgaacactagcttccaag

SEQ ID NO: 2315 - DNA, 706 bp, Shahe heteroptera virus 4
  strain SHWC01c2975 hypothetical protein 11
atgcatgtatatttttattcatatgtagcattatagaatgtaacacatatgcttatgaatcgagtaaaatcggtcacggcgtcactgtggtaaaattttaataatgttgcaaaaattttttagattacatgcgaccaaattaatatatggttttttacaataggttgacctcctattgtatgacgaatttttacaaaattcatttggtttaataatagataaattaaattaggaacgcgatttttaaaatggtatgtttaatcgaaagactaacacgtgagtaccgaaaggaaagactcatctgaacctaatcgattaaacgcttaatgaaatatatttaactcagttgttgttaccacaatgcaacaattgttataatcaacaaatacatcactaccgtggtttttaggtagtaaagcagtttcgattgcagactgtattgttttctttaggttaagagagtttatacactctcaaaacttggatggtttctttttgaagaaacgaatccaatccttaaaagatgtcatagccgtagtaagctaacgcacgatatttatatcctgttagattataccatcggctttatatgataagtacctgaagttagttaccgtgtaactaacgtccagactagtatcatataaaggcctgtataagcatgctgaagcgcttataagtgaatattttaagatcaatgtgaaat

SEQ ID NO: 2316 - DNA, 707 bp, Xincheng Mosquito Virus
  strain XC1-6 ORF1 (ORF1), ORF2 (ORF2),1
acctattttactcatcattttacagcggtgtttataggtcgcttaatcaaaacttattcaatcaactttttgattaatttctttctttcattttctttaataaaacccgccggtcatggaacaaaataacttgagcgcattggagacattttataaatatattgaagaagtctttgtgctatctgggattcaaggatttgtgacagctgttttaggctatattcaagataattggcaaaggggaggtctgattgcaggttctgattctgattcctgcaatccattttggatctcccccgtaattagaaatcaagacgagtcaagagtgactgaaattgttagtgaatattcgagtcccggaagaaatctggtcgccatgctggttaaaaggaccgtgacaaaggaaattgatagtgttagttttatattaggatttttggctgctgtagtcttggtaatcgcctacattctgataaggatggcaatccaaaagatatgtgacaaaattaagggtaaggctagggatttcattaatagttgtataaggagtcatagggcaaatgttttagcccaatatgcagttgaaaaaggagatcaacaggatctttagaaaaaccctccggtcaaacaacaagtgatttgatagcagttagcagagatttagcaaacgacagatcaaaagttacttcaacagaagaagagttaat

SEQ ID NO: 2317 - DNA, 707 bp, Xinzhou nematode virus 2
  strain XZSJSC33555 hypothetical protein 11
acaaaatgccccctcacttccggccgatatttggcgaatagtctcatgactactgcataggtcttcgtacctggaggattcgtgtagacagccctattattttcctacgggactatagtcgggtgttcgccggtatgggttatgagtttcaataaaccctatttaactgtctcttaaagactttatcttttcattctgaaatcccttaaggatttattgcaacacctgcatcatttgttttggacggacgccgaaagaaacaaaatgttgctgtcgcatggcaaaggactctgatagtcgtttgaagggcttctccggtatgaagccttcgaagtagccaacagcattgtggaagtttggggtcgcgcccaggtggaagcagttgcaagtcctacgatgacgtcctctctcacttgtaaatattgaggcatgtcttcttacgacttgttcgtctaccataagctactgcgtaatcggtttgtgatgggggtcacttactgtagcaggataaacgtgtgatatataatttaccgtatgttttgatctttccttggcggaagcggttaacccgtcattgtatgtaaccacgacttaacaaaatttcacttaagaaagaaagtcgtaccggaaaacgcacccccttgtttttgtgtagccctgccgaacgccgccatttgtggtatcgtcagtggcaaaataagaagaaa

SEQ ID NO: 2318 - DNA, 708 bp, Bat Paramyxovirus
  Eid_hel/GH-M74a/GHA/2009, complete genome.3
caaagatcagtatggtcacctgagcccatcctccacacattcccacgactcctgagtctcgaccccgaagggcagaaatcacaactgacacgaaccccaaaagacaaaaaaagcaacctagctcacatctcaacccgctcactaaacaatctcaattgactgaacgctacatctccaatagattgcgataagccttgctaaccagtttatcaaacagctttgggaattttactctaaatctgaacttttggtcaactaaccgaatattaatctctcaaactatcatattaagggttaatcttgactaaacaaaacttaggaaatcagggcttatccgaaaaagacaaccaacagacgccgaaaatcaacacacacaaggaccaaccacagagaaaagaagaagcaacaaacacaggagagacccccaagccaccaccagaaacaccacatccaaggcacccccaccccccaacaccccacgccacagcccgtccacagaaagctccgacggcccggagacccccaggaacccggaaaccacacaaagaaacaggaccatcggcactcccagagagaccgaaaagaagatcggcgaccaagttcgaaggaaaagcgagacatccaaagaacccgagaaacaaaacaattcgactcacagcaagctcagtcagcaagcaatatcccaggaaacaaccctggtacagcaca

SEQ ID NO: 2319 - DNA, 708 bp, Beihai octopus viurs 2
  strain BHZY60909 hypothetical protein gene,1
gaaacacctagggtgcttccctaggtgttgtttttgctttctttatagctttgacgttatggatatcctacttgtacgtatccatatcctcttagtatctttctttcggcaaagacactcttttacccgttgctttttccttctttgtaagaaattagtttgcggagttattactaccagaatctgattttggctctgtagctctgtaaccttttatgcttacccttacgaacttggactagtcttctgattatgagcttgcctatcgattaattaagacgatcttatattctctttagaaactgacttgtcttcggtcagtggaactatcaacctctaaaagaaccattcatggaccctttctatgttttgctccccttaggtatctccgaggagtgctgggaaatcttcataggaaatgctaacagaatgtctagtaactgaacaaatactactctaactttattgttcaacaaactctatataaggaagtggttattatatagttttatgtcggtggctccaccggaaaaccatgtacgcgcttagacttagaaatctacttgattcgtcatttagatagtatagacttaagaaatgcgggctgatatgcgctgaagtcatatcgctcaaagtgttcaccgagcatagtagtgaacacgggtgctgctttccctgtaagcaggttttcaaaacccctctatttat

SEQ ID NO: 2320 - DNA, 708 bp, Changjiang tombus-like virus 14
  strain CJLX30318 hypothetical1
atgaccgtaaactgcacatcctaactcatggcgattcaacaacttgtacaggcgacttttgtcgttggtattgctcaatcgtgcatcatcaaaccgtttctggcttggaggcgtcgcagaagggctctgattctggatgccaaggatgatttgaacgtgttgaattcaccatccacccttaagactcccttgaatgccttcactgaggtgcattcgcattccatccgtcgtggtgttgcacctgaggtgtcggagatgacgacaatcaggagacggcagcacaaaaccttttgtgcgaagtgggcccgggccgccaaggttcggttcctctttgtacagatgtgtcaggacactccccttaacaggggggctgttcacaggtggttgttgggacagtggcgcgagacgtatcggacgcagattggtagtgatctgcacaagatggatgtgttccttcgggacactatagagatggcgttcttgcccactgatgaatgcgtggcccaggacaagaagtccagtagggaggtgaagaagcaggcacgcatggagttttataatgagaggaagtttgtggagggatggaaatagggatgcctggtgcaagttcctggttatgatagcagacccgttatagataacataccaggggtaagggtgcgagcactggatgatgataagggtcagaagaaggagcggttcgttgtc

SEQ ID NO: 2321 - DNA, 708 bp, Beihai sobemo-like virus 1
  strain HWRTX12503 hypothetical protein 11
ccgcgcccggcatgtttatggctttgacgaagatgagttcgagtccaatggccgaaccattatagtccacgacagtaagatctcaggcgatcgcgctctgcgccgccaggagaatgagcgtatggctgacatcgccgcacaacggaaagctctgctgcgcactcgtgatcagattgcgagtgagcgccgtgagcttgaacgtcaaactcgctcatatagggaaaatctccaacggaaacgggaggcgcttaaagaggctcaaattgaagcccaacggcgcctcaaagaactgaaggaggccaagactgctttcctcaaagagcatgaggccaaagcagccgagctggaccgagctattaatgccatgtccagctcactccctagtgaaagcaaagaccatacgcatgaggattttcggcggaggctgtcaccgggccagcccgagccagaaagtccggtgaagggaaagaaagttacatttcaatcccagggccagcacgatacgaagaactcgaaacctatcgaaactactcaggaatccactggctcgaaagcaccccccagctcatcggaaccgaaacgccctccgttgaagcaccactcacctgggtcggaaactggaaaactaccgcgccgccggaaaaggcgccgcgcggcttcgaaccggaagaagcaataaaagtccttccgggactttccggttatgtc

SEQ ID NO: 2322 - DNA, 711 bp, Ceratobasidium endornavirus B
  isolate Murdoch-2 polyprotein and1
accccaccaataggcgctgaaggccaactaaagcatcaaacattaatcgcatactatctgagaaggctcaaatctaaggctaaaggagaaccaaggctcgaagaaataatttctaaatatgaatttgagcaaaaacaaaatttgacacatacaataacaacaagtggaaaatataacttaagtggaattatacctattaaaaacaattatggaatattactagataaaggcacaattataacttacatacgggaacaagaatgttgggtattaacgcataaaccagtaacaacccactttattggcgataacgatggaaatatagccaaccaatcgagacaaggtagttatgaattaagaaataaggataaatcaaaataccaacatattccagctgaacctgtcattaagaacaccttgacaaaagataaattaagacaactattagaaaaaaaatatacctataaaacaaaaatagccccacacaaattagattacactactttaacagatggacatataaatgaagaatggaaaaaatttttattggatgcttatgatgactgttcgtttatacctgacaatgggaaaatagccgtgtatgggatcataccaggccagttagatagggacccaggtgatgaagattactcaatatggatatgtggtgccaaaccagatggaagacacaaccgaatcaatgacatagtt

SEQ ID NO: 2323 - DNA, 711 bp, Sclerotinia sclerotiorum umbra-like virus 2
  isolate BCS2_DN31091
atgtgcggtggcaattttccctgtcgtgcgctacgacattaaagacgcgtatggagagaccagttgtgccaaggcaaaatgtctgtaaactttggtaacttggacgtgaatcccctaattaacgatacaaagctggggcgtccacacaccatggggcggagccgttcattcggaaagatggtagagggccaattccctcgcatgcagcgcccatgttcaaacggcgtggtggcggttggccaacaccccttcatcgggatgttggtgcccccaacatatggctaagggggggccaacgtgctaatcccagcggtaaattctcgggattgactagggagagaccaagactgatggaaagacatcaaacgaggtgattgaacctgaccgggagagagttcccatgactggccaagcgcgcgtgggcgggacaaccacgcgtacaatattgtcccacgcttatgaggcgtctaataagtgtgtaaggtaagacgagtttcgaggtcgttggcgacccgagatttatgcttaagacgtgtttcgaggtcgttagcggccttgagtacccgctctggttggaattgcctggagggtaaatacgcattcctggctctggaaagacagaatcttgactgctggaaagacagcggcgttgtctggcgcttaaggggcagccccccacagggtgtggtggacgacaccagatgatttagt

SEQ ID NO: 2324 - DNA, 711 bp, Forsythia suspensa marnavirus
  strain pt110-mar-6, complete genome.1
aagtgtgtacaatcggtttgttaaccaattatacatacattattactaggggtggtaaaacaccctagcatggttatagccgaccatgtgccctctccttccaattagtgtaggatgaagcggacctactgttaaatcaacaacggactggtggctctttggactgtataagtaagcgacagcatgcaacgtgcagtggacaaagatccatgtaacacgttgtcataccggtgagcttagaaagaggatattggcaatcccgcgggacgcgcggaaataaattcgttccaccccaacccacgttttgcatattgttagtgttgtgagtaaaccagaaaactctcttatatgggagcatcgcttatagagcgactccggaaacttaaaacaaacagattgcggccaaaacttaaataacttgtatattcaagccaataagatctggaatagtgggcaaagccattaactttggaaatgatctctaggagtaacagcatggtacctatccgaatcgtacaggtagtgccgacgttaaaccatgtttggtcggagtaatgaaccgatctcctttagtgattgtccttagtgaaaactttgtgctaggctgtaactcagctagccggaacccccccggtgaacgaaataggggtgggaaagggacgcaggaaccctgaaaagaaactgcacacgaatcagatacaaacgaataca

SEQ ID NO: 2325 - DNA, 712 bp, Picornavirales sp.
  isolate rfb199shi3 genomic sequence.1
tattggagcagccgcaactttgggagcatcattgggagcagcgtctatacaatccaacacagctaaagagaccaataccactaatttaaatttccagcgagatgtcattagtcagggtgagaagtcttttacggatgctggactaccaaaattcatgtattatggaggacaatcagcaactcagccaaacaccctcttgcaccttggtggatctaatttctatgaacaatcgggtgttaacgcgaatttgccacatttcactacgggaggttattctcaatggaaccatactggaacaactcagcaacttggtaaaaactcagctagaactaactcagtacttgacggtgcgcctcacctctacaacagctttgtcagggaaggagagactgggcccccacgccttggatatggtgattggacagttgtcccacacccgacagcgtactctgatcagtcgattcagacggatagagcgatcacgtctaacttctctggcggccccgctaagccgacaagaaatacaggcacaaattttacgtcaactccaatgtctcaacgttcaagctataatagccctggaaggtcttcagaaccgccaatgtctgaagcagatatcgttaaaggattgtatgctatgagaataaggtaacgtacctcggctttcgccttcacgttcgcaaatgcattagccatagaaaattatatagtc

SEQ ID NO: 2326 - DNA, 714 bp, Beihai picorna-like virus 8
  strain BHNXC41454 hypothetical protein1
gcggctagttgccgcacgctttgtagtagtatttgtacgttataattatcaggttagaagagtactaatactactctctaatctcacatttaactatagatgattacactcaaaaattatatttcatacgtccaagcacgatacgcttacacatacgctttaggttaagaccgtaccatcttaacctttatttcttttggtacttggttactatgtacccgtaattcactagacaatggtctagcacataacaaatcgtcaacttagagagcgttacgtttgctcatgctgatcacataagcatccactctcaagtttttatttaccacgtcatcaataagattgacatcgattcttttctaaacgactgttttgtattgcgaaaagtcatcccaccaacttataaaccctgaatttatagatcacacccgcagtagggttgaacgtgatctttttcattttatttgttggaacaatcgggacttttcggttgcattaatccgacgaactggaacaagttaacaatatatcgtttttgcaagtataatttcaggtagtctacaccgggctactagggttgttcgcagcacccgtcctttaaatacctctgactaacgattgagatagactagaactatgtccataatttggtaactgacttgttgaataataaaatcttttgatcaaacccccagacttgttttcaaaataatc

SEQ ID NO: 2327 - DNA, 715 bp, Unknown
  Description of Unknown: DsRNA virus environmental sample clone mill.culi_contig891 sequence
ccgggccccggcttatcttcccacaacgctctcgcatagtgatactataggttagctatgcgggagtgacaggcttgcaaacgtggggttacgcaagttgggcctaggtaccccttggggtgcctaggtctgggcgggagccaagccacggcagtaatgtcgtggcgcgattttctaggagattcctagagtctcctagaactgacttacatctttttataaacttcttgatggcaataccccattaatctcccaatattataaactctatagagtttctttgagagtttgcgtatgtataacgcaaggtttctctctaatgcgttgggtttggtcggtattgcgtcaataagtttataataactggtctgtcagcccgttctgattttgtcctgtgttcttcctactctttgctttgtgtgttttatttaaagccgactgtatgaatgtaagcttatttctaagcttgcaggccaaaatcgtcagcaaggggttgatagccttgcgatagggcgtgctaagtgtgggaaaccactaaatgccgagagactgcaacggccgtaattcatatggtgcacagtcctcacctactggcgggtagctccggcttataacaccagttctgtgctatctttggatatttggaagtattttggaagtgattcgatttgtgaaagtaaaagtttggaagttctttggaagttttcgaaagcgt

SEQ ID NO: 2328 - DNA, 716 bp, Heterobasidion mitovirus 3
  isolate HetMV3-an1 RNA-dependent RNA1
ggggtagactctcgtaaagagagcctatcacgtccaaagactaggacgtagatgatcagattcatcgtaatgtgacatcgccgtaacgcaaggctacggaaaggaatgccgagagaataacttactctctgcaacccttagtgtaaggagtgtgtcgttgggtgttttctgaatacctaagagtagaactcttatgttaagatctcagccagggttagtaacctggtgagcaatcgaagcataagtgttcccacttatagtactcctgttctcctccataattgccgtcaaaagcaagaaagagtgcaaaacagaaccgtactagacgtccccgcactgcctacgcgatctgtagaaggtaccattggaggtccttccggggcggaatttcaccgctagtgaacgaaacgatttcgatcgttctctgaaactgtgtgcgatttccattaaaatcagtaaacaacgtataattattaacgatacttgctgatggacggataatccactgtaaaccttaaaggtaccttatggtatatcaggttaaaaactgatgaaggggtaaagcaattcaccccaatccataaggaggtctacctgactctcctagagtagctgcggccccttgaagtgatgtagaaatatataacttcttaaccttcgtgagggaaaccgactttgacacgaccaaacttgaggcaacctacaattttaaattt

SEQ ID NO: 2329 - DNA, 716 bp, Riboviria sp.
  isolate cfe153shi01 genomic sequence.1
tagaatatacaaaatatcttcccttagctgtagtaacaagatatgctgagcctataagggtaacaacatttgctgctagagaagtgcacaaacaagtggagaggagtgtagggctcaggttaagagccttcaacagattagctgtgaaagcatccccaacctgggctataaccccagttgagggtccagcttttgattgtaccggcatattgccgaaaatacaaaagcacaaaaacgataacgatacacgtaatacgtatattcgtttttgtgcttttctcaaaagtacagcttgtttacgcgattttctcaaaatcgcattgttttcgcgcttttctcaaaagtgcatctgtttattcgattttctcaaaatcgaatttgtttatacttttctcaaaagtaattttattttatagatttcttcaaaatctatatttgttttatcacttttatcaaaagtgaatccgtttattagattttctcaaaatctaacattctatcatatttataaaatatttaaattttcctggcttcttcaaaaccaggaacttttgttggatattttgtccaacacattattattaaattattttaacacaagtattaggttttacctgatatatgtaaatattttagcgctttttataaaagcacacagtttacatacttggactattcgcataaggatttgccaagtattaagtattttcggcaat

SEQ ID NO: 2330 - DNA, 716 bp, Wenling picorna-like virus 2
  strain WLJQ104117 hypothetical protein1
gggaaaacccctccgtgcaaagtaacgctcctcaaggttcgtctgcgactaagcccaatgaactgtataaacccttgaagttactttgtgcaacatagtgtatttctcacgtgctttatttaacttcaactcttctgtattatcagacgcaagcgtagattgataatacttatcgagttgtcgaacacctctgatttatgaacgatctcagttgtaatagagagaacatttattgtattagaggccatatttattgtgatgctagtaataatcacttcattttgaatgtgtaaagactgctgctgcttctaatttatttgctctataggggtcatcccatcctatagcataaattatttgtggaaattgagttagtaataacacagccgctctgctagtatcactctatctatggtcctattacaatacttgctatcttagttcaacctctacattccggcagagtgtagttgtaactcaatccagcggctcgaccccgttggatgccactttataggcgacgcctagtaaaacctgtgaagaccttgggtcgatcagagctcccaatgtggatacattttaacagaccaagcaattcaagcaaagggctcacttatgtgaaaatacctccttgttttgtggctccaagtggatcatgagcccccactagaatgtagatcataagtagtgtactgatcactgaccctgtctgagga

SEQ ID NO: 2331 - DNA, 717 bp, Wenling yellow goosefish hantavirus
  strain XQTMS34106 segment S,1
cccagaaaactaattgcaaactcaaaacctcaatctacatgaagccgacagtgacactcttaaactggttgtcaaaagctaaacttggggcaaacgcagcaagcaacgaagaattctttgttgtcctctgcttttggcacggttacaaggcgattgggaacgaaagtgttgttagctggtggagaggtgcagttaacgaagggaggccacaagaggagaaagtgagcgaagcagagtttgacgaagcgattgaggctgagagtccattaaggaacatacagataaccagaggcggaccaagtggtgaaatcctgtaccttgcgacatctgaagagacagttttgtttaatcagcaactgtctgatcaggggtttgattgtgcaagttgatggaacagattttgacttgggctgagaacaagggtgtaggataccatacattaggagaaaaagagaacaaagtgttcttgtgttgctggacagcatataataatcgcggctccaggtcaacttgtgaacattggataagagaaggttgcggaaaccaaacagagactgaattccaaaggattagaactaagttctcttggtgtcacagtctcgctacttggtggccacatcatctctctgggacaaaagtcatcatttgggagaaagccgttcccggcacggtattcgtaagcccacttaagaagcacgagacaacaagtcgatagtc

SEQ ID NO: 2332 - DNA, 717 bp, Beihai picorna-like virus 47
  strain SCJXSX39359 hypothetical1
cgtggattaacacccacgcaatgatgcattcctcaggaattcctcggaagctattgatgattgaactggctttctacggattccccagaaattcctcggatatagtgaatgattgaactgagcatccatcgtttgcaacgcattttatttctaacgccggagacggctttaaacatctacccctttatgtattgtctataccgcgtgcgcaagctgcacgtgagtgagttgtccggccccagggctatgtgattcgtctaagttaataatacctctcgacgacgaattcacaaccttggtaggtcggttgcggcttatgccgctctcttataaacaaataaaagaaataaaaattagaaaataccgctaaaacaaaacaaaaaactttaattcgaacgtacattttgtacaacgcttatatatttctattttctgcggtatacgtaatgaaagtcatggttgatgactgtatagatcgatgtcatattggattatggaaatccactcactgacaaaggatcaaagcctctcagatttgacgctttgacatgtacacgaatcctagtttactagtatggaagctatgatctttcgttcatcctatatgtgaaaaccagatagggtaccctcgatgtactgaaactcagatagagggatgggacctcgataaaagaccctattaaatgaaagttacttacgatataacgatataaaacg

SEQ ID NO: 2333 - DNA, 717 bp, Hubei toti-like virus 13
  strain QTM25941 hypothetical protein 1 and1
gcctgacacgcagacctagccctctttgcctgccgtacacagtattgtacgaccattcagcagggaactcttagagtgcgagaaatcgcggagaacaacgtttatcctgaaaccctaaacctgcgacaaccatcatgggttacgtttttttttgagtctgagagtaataacatgtacccgaactctgagtcagtctaaaaacacgcggtggagtggcatgtcaaccgttgtgtctgtggggtgccacccgtgtaataggacaagataacgaggggagagagtgggacttaccggtaggacgttgagtataaaccttcagttaaagtaaataacggcataaatatggaatcgaactttaatcaaactgataatagggatgtactagtcaacgaaaattcagttgatatagtggacgagacgtcaaggttagttacagatgtgttgtgcgtgaacacattgtacgctaaagtggaacgccactggatttggaccattggaattaacgtggttctgttgtgtgtagtagtcatattgggaatatggattggactattatacattcagcaacaggaacacgtttctgaaatcaaaaaaatgaattacggaattggaatgatgaaaaaatcagcaaatgaatcggaacgtttgctgttggaagtgtgcaaggctgagttcggccagacagcttccatttgtgaactcaactggctctagtta

SEQ ID NO: 2334 - DNA, 718 bp, Aedes vexans iflavirus
  strain Barkedji Village, complete genome.1
ccagcgtgcgcatctacctcagggaagaggtccgatttcatatctcagtttcttgggatatgttgtaattcggatagtagatcctacctttggaatatgggtaaaagttatatttccaaaaattcaataaatatatttataagttagttcacagggctataacctaccccttattagtaacaaaataaataaaatactcggtactgaccggggtatattattgtatttatagagatcaaatttagtagttcgtgggaaaactatggtcgttttatgaattatcgttctttggaggtatccatttactggcttggtcagtcaggctcgattattcattttatattttgctctctactcttacaatgtatatgtataaatatagttttaaggcaaggcatagataataaagatatgttagtaagtaaacaagagtacgcgacgttatgttgtatgaaaatagtcattgacttaccagtagccctggcgtaaccagtaacatagctattggctcttgtcggaagcaaccgctactttattatcgtatgtgacagatttatctacaatacgtgttaacctttgtgttagaacctcgatgatatgtgtatccatagacttcgggtatatgctttctaaaagcatgcacgtacttctgaaccgtcattatgagcgttagacgacgaaggaatatcgactcatttccctttttaaaatcttactt

SEQ ID NO: 2335 - DNA, 718 bp, Wenzhou yanvirus-like virus 1
  strain WZFSL78003 RNA-dependent RNA1
cctggcgttggcataggattagttagactaacttcacacctccctcctcatcccgattagttagttttgcactataccggtttttggagttccagttctgcctgttggtgtgtaaacgttttgagccaggttcaatatgtgtgaaaccgagcggggtcctgcactttgatcaccagtaattcttcctgagaagtttccgtcgctctatgggagatggcagcattgtgcaactgtacaacggacgtacagtggatctgacaggggcgtcgccacgcgtttgagagacgtgttaataaatatggcggccgggcctcttaagcgcgcctacgaggagcgtccaaccaagcgatggataggtggaggtgttccggagccccagcggtagcttccaccgaaacatagtctctctaggggtccgagcatatcaacgggtaacgggctgtcactcctttccttgtggaatctgtaccattctgatgcgaacgcggtacctagtacctcggtccagtcagacttctttttggacgtgtatgccaatggactgccattcatcggcacgcacacatgttatgctgtccctccccctcctgccgctgctcctccggcacttccacctccggtgtggtcgtgcaccaggtcagcggtgacaatagcatactttttagtccataggaagcttctcccctccccaccaattcgggacctcaccgttcccgga

SEQ ID NO: 2336 - DNA, 721 bp, Picornavirales sp.
  isolate rfb200shi4nc genomic sequence.1
tttcacaacgaaaatggccgctgctgcacttgctggtgccgctctttcaggaggttctaatataatcgcatctttaggttcaacaggattacagtcttatacatcattaaagttacaaactggcgaacaaaaatacaatcaaaatgttatggacactgccacaaaagcttttactgatgttggtttacctaagtatatggcctatacaggaaattcaggttctcttcatttacctggccaacagtaccacgtttctggctccaacttttattcagctggccttgttggtcaatcagttccttttttatctactccgtatcaagcttttactcatacaggaagacctaatactaccgtaaatcaaccctctgaaagaagagcaggattaggtgtgtattcacaggtacgtccctggaatgagcctcaaaatgtaaatgagctaggaaatacttcttaccaaaatttgccgataaatagggctctaatggcaagtatggctcggaatgagaaccctaccggaaacatgcaaactttgccgaaaacaaattttacaagaagtagttttcctactgccactccattacaaaattttgtaggtagaaatactgaactgcatcaacaggcagcccgacttctacaatgacctgcttagtctagttgacgtctggtctattttctttccaatcacttagtgtagcgcttgtattggttaatcttaatt

SEQ ID NO: 2337 - DNA, 722 bp, Human rubulavirus 4
  strain t146a296_HPIV4, complete genome.4
tcaacaaagttattctgtaatataaactaatcttatgagtgaaaagatacccacacaaggtggtcgatagacaaacagcaagagcagcaactgcaacaaaacttcaagggaaaaataattcgagaaatataataaattgacctcagagcaaacacaacatcgatccacaatagtcaacacaatcaacaatactccatgaggcttcacccatcaacagcaaaaagcacagtccattaagcagagcccaactcgcctcatcctcaaccatccactgaaagaaaaaatacatgaaagacctttggccaccagatccaaacaatccagcacaaaaattcaaacaaccgcaacactccattcggcctcaacaaacaatccgccaatctgtccatcattcccacactgacacacaaccatcccattcctcaccagcaacttaatccgcaagtcaaggaagattctccatatatttagccagtccgtcaatccgacacatcatcgtattttttaagaaaaaagagagatgagcaattgatacattctattttccatacgtatagtaaacattaaatcatggattcaccatagaccaagaccagaaattgaaagatcagaatgatcttgaacagcgatggataagcattgagaaacaaaaaagatagattatctccaacaacgaatggcacaaagcatccaacaacaggggggaagagagcacccccaag

SEQ ID NO: 2338 - DNA, 722 bp, Sanxia picorna-like virus 3
  strain SXXX36208 hypothetical protein 11
ctctcttacaaaattttgaaggatctatcttcgatccatagaatacattattgatttgtattttatctatgtaaggaaaacagcactttcgttttgccggattatggaaattaattcggttatagtacgaaatggcaaaaacgacggtaaccaatcagagaatttcattattcttttgattgaccccgtggctttaaacatatgcgtgatagtatatgttaagcaaacaaaacattttgggtaaaaccaaaaggttccatctgttaagaggaataaaaatatttaccacttttatagtggcggttttcactaggtatttagtgttgctcgtgaagcaatcctagaatattaaacgaacatcttttacgaagcacattgctcgcttgtcgaagggttttataatttactgaaaaacgagagaagacgcatgctagaagtatgtagttgctccgtgcacaccaccgcgcgtccgcagtttaacgttctctcatatctttgcacgagatatgtttgacgaattagaaaaacaggttttcgaaggagaccgttttgatttacaggtacgtgaaaagtaacctatagggattaggtacggcattcagactctcatctggacgtaagtccgctaatactataggccaagatctcaatcggattggctaaatttaagactattagttttttaattttagtaccaaaacaacaagagcccaaccaacatc

SEQ ID NO: 2339 - DNA, 723 bp, Soybean leaf-associated negative-stranded RNA virus 4
  isolate1R
ccccagacatacagccagcccagcatcctccttgagatttcacatactgtctcctgtcccccatccctatcacgagtccggatggagaaatataaagatccgagaagagacacaatgtatccttccgagatcaaaagttctgctggtaaaagagtagctttctttgtaatgcctaccggacatggaaagacgcatcagcacagtcctgaaagagggatatacgatgccgccaccatagttcctccgagcggaactgccttcctccgttttgcgcgcgatcatgggaagaagacggggaaatgggacacttatgaccgagagtggactcgtcttcttgtagaatatgtggagagtacaataggtaatatagtcgttatgattcctcattacgcaaatggtattcgtgcagggtgggtagatatgggaggagctatcctgaccaggaaagcccttgaacataactttagagagaggaaagacaaccttgagtcatatgaatattatagaatggttgaaaagaggcgcggtgctcctgagtttgaatctaacaaagaacttgaaaagtgtttgctattgaccgcagaaaggtggattgttcgaggaatagacgagccttccaggattccctatctccttgactactaatcagtacgtctgtaataactattaagaaaaaattcgagaatagactctcaaattgaaaatttctaccaagattacatc

SEQ ID NO: 2340 - DNA, 724 bp, Rabbit calicivirus
  isolate BEN-12 capsid protein gene, complete1
ttgtgagcaaactgaactcacaaaaagtgtcgttctgaccttgaagtcgcaccctatgactattcttgacgcaatgatcattcaaaccaaaagaggacttccaagtggcatgcccttcacatcagttataaattccatatgtcattggttactttggtcagcagcagtttataaagcatgtgcagagataggtctccactgttcaaacctgtatgaagatgcccctttttacacgtacggtgatgatggagtttatgccatgacgcccatgatggttagtttactgcctgccattatagaaaacctccgtgattatggtttgtctccaactgctgccgataaaactgagtacattgacgtgtgcccattaaaagatgtggcattcttgaaaaggcatttcaaaatgacagacattggttgggtgtctttgctcgacagatccagcatcctcaggcaacttgagtggtgcaaaaccagcaaacggcacatgacactggaagagactcatgaccttgcaaaggaggaacgcggtgtacagcttgaggaactccaagtggtggctgctgctcatggtaaggaattctttgacttcatcaagccagagttgatgcgccaacaagcttacacgaagttcaacgtgtacgactatgacgcagcttggaaaattcttgcagatcgcaagagggtcgtctcggtagtacctgacgacaattttgtgaatgtt

SEQ ID NO: 2341 - DNA, 724 bp, Wenzhou picorna-like virus 29
  strain BHBei77092 hypothetical1
ggggggaggggtaaaaccctcctctccttttggcacgaacagagattcctccttgttaggttaagtcctggtggtggatcactctcccattaggttaagtcctgactttgactgtccctctgtgctatgtcgagattccttgtgattaagtagtaagtcctgaccttgggttaccccactgttaggttgtaagtcttggtcccaactaaccctcggcgtggctgtgtcgaactgagaacctttatttgtttagattaggacaagcgattttctttgtcgctataagttcgtcaggcattgcttattgcctgtccctttctatctgtcccagagtcctgtgactattcttgtcccaaaacattgtagctgctagtaccatcgtgtgttgattattacaggtaacagcgtagatcttcactggcaacagtaaagcacgacagcggaacgcagagcactatggtgtactaaggcacttatagtttctaactctatctttttcgacaaccggatgcgcatgacgggattccttctttaggaatgaaagggtaattattgcgtagtcgggtttaccggctattgtctactcgttgtgtgttaatgttcgcttccagaacagtccgaaagtgcactctatttctttcttcagtgtgtactgccacgtgttgtcttcttagtggcatctctttaacccgctagggatcttttatttttgcaattttaatat

SEQ ID NO: 2342 - DNA, 724 bp, Shahe picorna-like virus 11
  strain SHWC13613 hypothetical protein 11
gtaaacttttagtttacatcagcctttaaggattcctcatgggattctttatttcaattggattgaatagttactttaagtactttttgatcgaagaatttattcgacggtcttaatttattttccactgttctttacattttgtcttatgcaagatttttatttatctatcaccggatgaccggagtgaatattaatttacatgatctttctcactatgataaaagtgtcgttttattcattttacgttaaaatgtttcccctttaattatattaattatttccgtatagttacctgagctataattcaggagtttgtgcaatacttgcagttaacactgtaagattgataaagattttgataaatcacatactgtccccaatctgtacacaaggatgtatttatagtcgtagtttttattctatgaagtagaacttacatgaatattattaacgaaagtgtgaacaggatttatttctattataggcgcgagaaaccatatcaattatgatagtggtaggacgtggttagaaagaatcagtttccaacacatattagtttttattacatagaacacgatgcacaataacgaaaaatacttattaaatacgtgcaccatacttgtgatgctgatagaatttcccaattagacaatgactcaacattattgatcgacgtggattacgtattctaaaaagctggtgctgttaacctaaagagaat

SEQ ID NO: 2343 - DNA, 728 bp, Lampyris noctiluca iflavirus 1
  isolate 17FIN2, complete genome.1
gtggggggaaaccccacgttctgcaaagtgtaataacccttaagcccgtttcatacgtacctcactaaattgttatgaccactggaggatgctttgtgttatcggtctaaccacggccgagagcaattcatttcgtagatagtgttagtaacatgctggttgacacatacctgacgtcaataagtaaaagactttgtagaatgtagttcgaacccattacctttaaaacccaaaaccaaaactttcttatcaattatgaagaggattaaacccctaatataattgttcgtgtcattgcgttcaatgacttaaaaccatgcactaaagcaagtttaattttacgagcttttaaaatttggcaaatttttgtaagtgtagctactcaaagttttcgcagactttgttttaaactgtaatctttagatataattcagcgactgatatttgcgagatatcggaacgttttatattctattgaccagtgatattaccttaattggttgtatcgagacatagtaaggactataaccttctctcaaacggtgtgtttattagtatttcagaagcacaaacgttttcatattttatatgttggtacttgagtataagtatccctattttgaaacccttaatggaactgggaaccattattgtataaaccccttaccaagttatgatcgtagtttcttggtggaccgttaaatcgatcactactcgtgggaacaatt

SEQ ID NO: 2344 - DNA, 728 bp, Niviventer confucianus picornavirus
  strain Wencheng-Rt386-11
ccacgtgtgtatgccaacctacatggactcgtgcatgtaggttggattcacaaccctttcataaccccccccttttaacccaacccttcgtaaccgtacgcttcactcgcctttgggtatagcggcccaatgtgctgaagaaaaggatacgctataaggggccaacgggtggtggcccttaagaccacccaacctagaagcttgtacactcgggcaatagtgaggcccacatccagtgggtcaagcccaaagcattcttgttccccggtatgatctcataagctgtacccacggctgaaagagtgattatcgttatcccactcagtacttcggagagcctagtacaccacttggaaatggaagtctgtgatccggggttgaccctgaaccccagaaactcatgatgaggctaaccttcccgaacacggcgacgtgtggttagcctgcgctggcatgaggcctctttgtaggcagactgaaatggaagggtgacgaagagccgactgagctactgttttattcctccggccccctgaatgcggctaatcctaactcctggtccagtacttgtaacccaacaggtggctggtcgtaatgcgtaagccgggagcggaaccgactactttggggcgtccgtgtttctcaatattattcatttctagcttatggtgacaatttatgattgcagagattgtgctgtatttgtgtctgagagaagaagtaacaat

SEQ ID NO: 2345 - DNA, 729 bp, Fusarium sacchari hypovirus 1
  strain FZ06, complete genome.1
tgcctgtaaaatccttcaggtgtttccttttggaaactaggagtgagaacaccacgctttcagtggtcagtatttgtatcgtttgtgttcgaatactactggctgttatcttttgttctcgtgagctttcgctcgtggcctttggccggaaactctattgagttttgtgggatttcctcccgtgggctttgcccgtggcacttgtgccgtttactccgaaatgagtgaaaactatttcaaatgcatgttaagacctcaccgcaaagtgtataaactaacagaaggcataaaacctgatgaatggagtagaccattcacggagaaccttattaggctgcctgtataaccgttcttcccacgactttatcaatcacgtagactgcggtccataatcgtgtttaagttgagactcgtcagcggagtcaagaacagaacgttaaaataacgctgattaacatgctttcaacatcttccggtggacgtttactggttaactgtatttggtttaaatttgaggtgtgacccctaccttcaagctaatttgacacgaccataccctgcgtaactagaaacctaacaagtcgagttcgaacttgagggttgtgttatgatatggtggaatcgtcaataatgaaccttgttaaagagccaattagcacaccgtgatgctcggttttaaaattttagaatggctgacccggcctagatgggtgtgtcacgtccaagaac

SEQ ID NO: 2346 - DNA, 731 bp, Caliciviridae sp.
  isolate hwf182cal1 genomic sequence.1
tcccgtataagggaatggacatattgagttaacaatatgccattcccttatacgggagtgagcccacgaccgttggggtttttaccccaccgttcgtggacctcatttctgcttattacttcccccactttcatcggggacgttccttttgccgcacacccagtgcggcaggaggtaacgagtttattttgtatagttgttattagtcacaccggagggcgtgctttacgctcttaagggcttaacccactccgttgtgcctgtcacttgtcgcttgacggcggctggtctagtacgggtctagttagtaccactcagtggtcagggtgtgccgcccgttgaaggctggtattcccgcgtgagggggctaccgtggtaacacggtccttgcgtgtgtgtgagccagtatgctctctggagctgccattgtttgggaaagctcttccccgaacaactaagtgcctgatggcctcatttggctgattggtgctctcaagacatgtgccggaggcaagcttgttggaaccaccagcaagccctgaccggtagctaattagtcccttgacggcatcgaatttttcctttttccttttctttttgtgaactgaatatagtgatttgtgtttagtgcttttgtgcctttgtcacttttactttgtcaaatattagtgtttgtgcatttgttttaaactgcaacttgttgttaatttttggacaatttgaacttagac

SEQ ID NO: 2347 - DNA, 731 bp, Picornavirales sp.
  isolate RtCb-PicoV/HeB2014 polyprotein gene,1
tttgaaagggccctggatataatagggttaaacccctattatatccaggaattgccaacccataatccattgtccatcaatgttttatgggggggaccctttctcccctccccctccaaataccttttacccctctgtaaccaagagtgtgcaaaatctatttactagcccagaattgcggcttctggggaggtttattcctcatgcctaacaagatgttacgcaaactccgggctacggccctgggcttttgccctaaagatttagaagtttacactatcgtccaacaggaggacaacaaaccagttgttctaaggacaagcacttctgtttccccggtgagactggatagactgtacccacggttgaaactggttgatccgttacccgactcactacttcgagaagattagtaggaaactgtgaaactgattccattgatccggatactttccccgtatccagaaactactgatgagggttgacttcccgactacggcgacgtagtgtcatccctgcgctggcagtaggcctctttgaggatggaagatgtggatcggtaaccgaaggtcctattgagctagtgtttatacctccggcctcctgaatgcggctaatcctaacccatgatctagtgctcacaaaccagtgagtagctagtcgtaacgcgtaagtcgtgggcggaaccgactactttggagtgaccgtgtttcctattttacttttgtttg

SEQ ID NO: 2348 - DNA, 732 bp, Wenling triplecross lizardfish paramyxovirus
  strain XDLYMC449513
accctaagtgatatcactaactgattaagcaaaacttaggatgaagcagttggaaaacagtttctcaacatttaaattgtgcatacgtatctactttgaaaacaaccacctggggaagagatggatgattatacaccaatcaaagatattatatcagcagaggccctttctgacctgacagcaataataattatcattttacagatccacacggagctcggaatcaggccttatcctttcagtccagatattcatgatagatttcgagtattgtctatcagagctagtgatttcaccagacttagcataagaaggagggatctccttaactacgggatagactcgttacttggaaaggctgaaccgaatccgcagattgcttttgagcttgctagagttaggctgctcttagatctcctaagaaaatacacccacccttatatagagcctgacacaaagaaaacaaaccagaaatgaattaagatctctaacgatccgatatcagatgagttcggataacatacagatgattaacacctataaccttcttaatattgcatttgaacaaaaagaaattgatatcaatctgagtttaacaatactgtaagagatcatatactatgattttggataattaagaaaaacttaggattacacattatatacatcattctgtgtgacaacattcatcaaactagcttcaaaggcgttagcctctcaaaaagtgtcagt

SEQ ID NO: 2349 - DNA, 732 bp, Helicoverpa armigera iflavirus
  strain HBLF2013-1 polyprotein gene,1
cgatctcgggtttaacccgtgcagtgcttttaatagattttcaatattctatcgtttatctccgactttattgattagtagcgtctcttgttcatttttcagctcgatttttatcgttcgtgattttatgttcgttgagacgttttctgaactttgttagtcggagattttgttagaatatctttttctattaatgcattagtagtttaggtttcttttgcttagttttgtttattctggttttatctccagtacaattggaatattggaaaactttgccttcgtttcaaagagccgggctactttcccgtgcatgttttatttcctgcttactgagtgtaaagcttggttaccgtagatgtattaagttatgtaatgtaatttatgcatcgttaaattctctttacgtattatcgatttatcctccggatagataatgaattaacggattgaattttcggtaattgagtgtgtaatttcaggacccaccgtgagcagcgggtgtagagcgcatatcttggtattagttgttaattttgaatactaaagttaattgatttcttgaacttagtgtagtcatgtcttaccaatgttcaagttacggcaattaattaggtatctattttaacttgacaagcccttcatgcggaagaaccgaagttgtggtagttggctagtattaacagaaaatggggtgcgtgagctacattagtggtgtaactttaattaaat

SEQ ID NO: 2350 - DNA, 732 bp, Robinvale bee virus 9
  isolate VN3-31 polyprotein gene, complete1
ggtatcagacccgtcatcaccttagcatacgtaataggtatctttagatcattctaaaagcattctttctactggagtacactctcctatatcaaaagtgaccagtgtatatggttggtgaaccattgtaaacaatcaccgtagctcttttaacgttataaagatggaattttaagctactaaatctctaaaactctgtactcaagccatgttaaggcgaagtaccaagataggggttttaccctcatcttgctcgtattgtgatgcgttggtgcctgatctgggctaacccaatacgtgatacatatacatatatagcactatgtgctactgcattaagaatttactctatgggtataaaaaacataaattacaaactccccatatagatccattttagtgttggatttctaatacactatgatagcattttactatgttagtaagcggataatagcagccgctggtcctacgttacatataatatatactaacctctccgtgaagcaaccttccgacgttactatagaaaactctaggataccctagtaacctctccgctccgagaaaggacgacgttaatactaatcaactgattttgtgtaataaggcgttcgctgaacactagtttaattactaatcatgtaaaagtcaagattgaaggaatcacaaccttaaatagtgatagtctagctagacgataaactcaattaagaaccagagtacaacaat

SEQ ID NO: 2351 - DNA, 733 bp, Kimberley virus
  isolate CS368, complete genome.1
ctaattaaaccgtgtacctcaatattatatataatccattgcatgagtaatgaaaaaaatgcgagcgacctttaaactcaatatgaatttttgatataaattaatcccaatttaacaggcatcatggagttttccagatgcaaactgagtcttcaaataatcaattttaaacccattgagattgaaagaagagcactactaggcttgcttgctgttaagagtataaagaccttgcacagaggtaaccaaatgattacaaggctttctgagatcttgataccaagtgcaattgtgaatggagaatttgttgttcgaaatgataaaaagaatggttactgaatctttgtgggggaggcttatggagctatagattcagatgatttaagaggagtcagagaaaaggtgatgaaaattagcagaaccataccattgattatcacaggagaggaatatggggctattgatttggacataacgctagaagattccgaaataatattcttaaaaagaaagaatgagcttgacatctgtgacttacctcgaaaaatgagatttctgcattgagcacaggcatcaaataatacttttattcacgctccaataaatggacaagtaaataaaggaaccaaataaatccttaaacagatgaaaaccttataaacatgaaaaaaatcaaattctcaagctgagacccactgtccttacgataggtaacttaagatcaacaggcatc

SEQ ID NO: 2352 - DNA, 734 bp, Halophytophthora RNA virus 2
  isolate HRV2/BD641 RNA-dependent RNA1
atgatggtgataaacattgaaactgaaacaaagagctttgctgcgcagctgggcaactctgacaagaaattacagcttaaggaaattttcaaaagaaaattctgtggagacttcgcaagtcaaaaatatatttccttcgggagccagccatgtttggatttaggtggtgaaggtgattgtttctacagatgcatgtactactcattgcctcactcatttcaagcaagttatgcagaattttatagcaatttttctgatggccagtgggttgatgaagctaagatcatcaggttttgtgaaaccttccctgtgaagatttttgtgcattacggtgatgaaaagggtgtgatcaaacaatttggtgtaccataccttctggtggtgcatttgcttctctccaagggtcattacacattgatggggtacaaagaaacggggccttttatgcaaaaactactgatgtcaaataactaccatgcttctgcactgtctgaggatgtttatgactctattagcagcctcggcgtaggcttcatggaggattttgaaattctttgcaaaatttataggtcttgtccgggtttagttaccatgccaaacacaaatgtggaagttgtttcaaaatgcaaagatatgttgttgaacaatcattaccatgaaagaaacaacacagatatggtagcacacatccaagttatgatcaattcacttctttgtactaatccgggcggcag

SEQ ID NO: 2353 - DNA, 734 bp, Solenopsis invicta virus 4
  isolate Gainesville-Sin, complete2
tcgctttagcggattgtgtttccttaggttaagaacagtaagctttttgctgagtagtaagtaatgcgtaactcaagaaatcccgcaaggtttgaattcttgagaccactgccctgctgagtcatggtctagtaattgtagtgcaatacttatataacagtcaggccactaagaagtaatctcttagtttgctaaagtcctgaagaaacgatggaactagcaattccggactttccatagaggaacctgctaaatgtggatgccaccccagagagctccatttagtatgtcagatataagtatgaatgcaatgaatgatagtggcgaccccctatgggacccctcataggtaagcttggtatgtcaagaacactctcatcctaaagttagaacgatctgttcagctggagtttaaacattatgcttacatgtttaagttgtgcttcagttaaatcttaagccggtttcgtactgggacacacaaaccgttaatcttccattcgtggctagattgtgagtacccaattttattttgtacttaatgctgtttattttgctgtctattgctgcccttgctgttttattatttgctaatttttgcttatataatttgctatttactgctgctataattgatactttaggaatcaatccaatcgtaaaatattgcgttataactctaacttctgttttgcttatttttgctattatttacgaattaataaagattaaac

SEQ ID NO: 2354 - DNA, 734 bp, Beihai picorna-like virus 83
  strain BHWZXX15514 hypothetical1
tagacgtatgtctatgcacactttgttaacataacccggggcttgccgcctgcggggccttgtaaaaaggatactccaataacggtttgactggatagcctccagtcagggttttcccgccggctatgtagcttgccgctcatagttaaattggactccaatttacttggtgttcaggagaagatgaagaagtttgggagttttaagtctgcctgactgtaaaaggcaaccccctccttagccagtgagccatgtcgcaactaaataagtgcctcgctcggccccagtgggaaactggataaaaagactttccccgttttgttagtgaacgaaatcacacctatatcgtttgatagtaagcaaacgcatgtttggcagcgtgccctttgccactggatacgtatgtagacgtagcgatggaggacctgctccagcaggtatcaacgcaagggatttgaagaccttgtagcgaaatcgcatttaaatagaatcgtggcggattctagcctatctactaaggcctcattttgtatgcaagtactcttgtgatatgcgacgaacacggtaggatgagttcagtaccgcccctaggatgatctccttcggtgacgggaacaaactcgtttatcctgctgctagtaagcaatttgaacgacagaacgtgtgcaaagtgggattccccgctagtcgtgcctagactttaaattggcatttctttttctctttccctcatc

SEQ ID NO: 2355 - DNA, 734 bp, Beihai weivirus-like virus 16
  strain BHZY60618 RNA-dependent RNA1
ggcacatgcattaattcgtctgcggacgggaaaggatcacagatagcatgcaccggtggcttttgaataccaccatgggaagtcggggaggcagtttggaaactgtcgagatgtgggagcatgggttacctatacctggcacattcgttcacatgtgcgatccatgcgcggttgtagcagaccgttctaccacgggcttattcttccgtgccgggcagaatgccaatgtcccggtcggagcctgccgcgagcctacagggggccgctgaggtgaaggctcttcagatttccgcatcccgggcggttggggaccagccatccccgtaaaatctgaggattgtactctcgtgctgctaccggaagcttgactgcaagggagtgggcccgaatccggaaggtgaagggacagtcaggtgaccagccaactgtgtgtgaaagggaatttccagcccggggatcacatggaaggtcggagggtacacaaaatgactacggccgagcgccctgcgatagtgggttgacttgtccggggggggacgctccatgccattttggctcgcttttcgtgcaatggatgacttcctcagcgcggggactgttgcccgcgccgccgcggttgctgcggtgttattttcaatggcatcatttgaataattaggcaaaagtgatcctcgacttgaaccgaaaagctcacatataaacattgttgtttaagtgcacgtgacatttcgctt

SEQ ID NO: 2356 - DNA, 736 bp, Rhizoctonia solani mitovirus 37
  putative RNA-dependent RNA1
ggggccgtgaggctccttatgagtaatcgaaatctcgattaccagcgataaatcgcacattacattgttttgtgtagttcgtcgttccccaacagtaacgaaggggatcactggaggacttgtcgtagctcatacggccggtgttaaggtggtctcggcagaccaaaacctcgttgcgagggggttccctaccagaaatggtgttaaagggaactgagaaagttgctctcccaagagtaaccgtattgcgatataggttatcgtctgccagtcgtctaaggcgcaagccttagaagacgcagtcttctctgctgctgcggcccctgcgaaagcggggaaaccgaagttttatagagcttattaagattattaggccctagggacagtataccaggcactggtcagtagaccaggcgttagtacctgaaccctgtgcgaagaaaccttaagttcaccctaccagcgagagcgtagtacgactcctggaaagagaatttaagaatgtattcacccgaatcggattcaaatctttttggatctgaaggcggtcactggataccatgcatggtgctaaggggaacccgctttggaaagctggttatccaagagctacctagggacgtgaggaataccaagtagtaatacttgagatcctcgccttttacgtgtgggagcaacctcgtagcagttcggctgacgagggacccatgacggaggcaccacctttttccaaaaa

SEQ ID NO: 2357 - DNA, 736 bp, Rice Picorna-like virus 2
  isolate FYBPH-9, complete genome.2
gtgtccccaaatacgcaccgcgtagcgcttaaactacggtggcccgtcgtaagttgcgcggtggacaggggggacacaggtcagtcccgggttttttaaccgtactactcaggcgggactataaaatatccagagaggaggccaccacccacacgttttatagcggtaagcgtgtggtgtacattccgctgctaataacgataataataccgcttctgcgggatatgtacagcctcgggaaactgaagttgtgtgcgaggagtttgagggccttagcgtcgacgccgatccttctgccacgggcgctactgaatttattcaggaagcgtgcgcggcagtagatgttcttggcaagtactacgcgggcagctccatccacgcaaagcagcaagatttgcagggcctgcgacagtacttttctcggccccggcttgtgggccgaggtactatcaccactggctttaggggtcgcattgcggtcctgaacgtcaacgcctccaacctttttaccactttgttcccgaacggccttgcgcggctcactggtgtctatggggtgcggtttaagatctgctttaagttgcaggttgcctctacccctttccatcagggccttctgtcacttagttggcagtatggctctttgtcaaccagtaccacggtttatcagcgtgcttcgcgcgctgagactgccaccaacattcctcatgtcaggctggatttgtcagaactcact

SEQ ID NO: 2358 - DNA, 736 bp, Canne point virus
  segment 1 RNA-dependent RNA polymerase gene,1R
atctaccaacaaagccatgcttgggaatctcaaaacgtaaccaaagattgagtgatttttctttgcattatactccttctcttttgtgttgtgatggataggcacctactaagtttggcctaaatactcactattccgtccagttttgtaatttcagctccataatctcatattattccacgagggtatgtggcattgtaattgctcatacaaacaagttcctatttttctcttatatcgattttgctgatttaaaatcactatgggcctagagccaacttgctaagatgtccgatccatcagaagatttgcccttagccggtccatcaggagttctccaaggacccgggagattccctagaccattgacccgtcatcatgaatcttttgaagaagaaacaaggcgccgtcttacctccattgaattaagaatcaaaggcctggaggatagagtctccgctcaatccacaatcttgggtgagataaaaagcatgctggaaacactcaccattgcagccaatgtgccgactcactcagtaacatcctatagccaaatccgcagaggccgatcggcgcgcaaaaattagacagccaaaaatttgttcgtaagaactgtcatgatatttggatgtttgctgtattaaaacttccagtcgcatgcacgaagaatggattataccctcctccttccttattatagtgacagttttaacggacaaaaacgagcagagccatt

SEQ ID NO: 2359 - DNA, 737 bp, Picornavirales N_OV_039
  putative non-structural protein1
cacggattttgtccgtgtacgtctcgcttgatagttgagcttcgctcagctcagagttctccatttgattggaggcattcagggattcgtccctgtacgatctgtatcattacctttactgagtaaccagagaaattagactactctctacctttatgttttagtagattttaaaacctaaacgactgtgccgcccctgtggggttagtcagtgtccttgaactgttgttcgagggagtattaggcgatcttgtatcgccatttttgtaaattattatacagacttataatgtctataaacttagaaaacaaacaaaaatacatatgtaaacatagagtcacatacggctgtgttcggcctatagaaccttactgaacttatcataataaagaaacgcgagttttataaaagaatacattcattaatacctgccttaccaggttctttgtgaatatctcaacgccagagagaagtaaagtatgacaacacaagttaatcatgaccaatgatgaggttatcgattacgccctggtgcagggtagtacagataaattgctgtgggagcaccaagtccactccgtgagatcgaccggaaacagttgctgtcttttattcatagtctaacaaaatgaattaaacaacgtatacactcctaacccgtttctatgcactaataaatatcaaatgaattcaatcaaatgatattactggtgctaactaacacaactgtcttaat

SEQ ID NO: 2360 - DNA, 738 bp, Lactuca sativa marnavirus
  strain pt151-mar-11, complete genome.1
ttattgctaggtacccctttaggggggaactaggacattatggtttttgtctgatagcttgagttttctcttgctagtttattcgtaggcatacatggaaatgctcgttagtatctgatctaaccccaccatagtatcgcggcttacgtgtattatgctggcaagtggactgctaaagcgaccaaattcttatgtttacgaatttacgaatgaaccaaattttgttgatcacgtccttttataaagtgacaacggttttcgtaataagggctttaccgtttgtaagtaaaaagctactgttgtttgacacactatgttagggtgtgccgtagaacagtttgcgctttgcgcaattgcatattgaagaaaaaataatcaaataaaaagtttatatttacatttatgttttataccggttgatgaccaaccttcacaatatatcctttaaagaagctaatctttgtgtgttatgttatgaaaaccttgttgatggcgccgttttggcttacagtcactgcaagttattctgttcacactgacatcacatggacagccagatgttttcatttggtatgcaccctcggtctttgttttcataataatatgctttaacggtgtattgtgaggtacctcctcagatagaagtgcagagggctgaacctaacagtaaatttttggtatccttgaccgggagaaataatacgtcatccaagaaccagagaattacgattttacacg

SEQ ID NO: 2361 - DNA, 741 bp, Unknown
  Description of Unknown: Uncultured virus isolate acc_9.16 sequence
ctgaaacctttttctaaccggtcgaaaccctcaaccgcctcggaaacgttgaggttgagtacaggggcgtaaccgtctaggttacgtctccccccagctcttaggttggttagtctgttagcgcaatgccttacttccgcctttgagttacggcagccctaccgggggatacagggttgcttagcccgcgagggtcagtgcttcggcagtcttatgtgggtccctgagtcacataaggcaacgtacaaaagggacatatggagttctcttcgggggtctctatatgttcttatgtactccctatatgaaccttacaacgccaacggttttcattgcccgctttctccccctggagagagatgactatcgaagacggtgtaatggttgctataattagaataagctatacattaaggacttagtattaaacactagggggacgcctctaggagtctccgttcgggcgtgggatgtggtatagcatttcactcggagaggccaaaacagggatcgcctgtgctaacacaaatgtcaactgactgcaacggccatgcttaattgctctcctaggtgggtacagtcgggcccgtcttcaggtgggtcgcctgtccgctattagtatctgaagttacgaagttataattcaaatcgaaaatctttattgcaattcttatttacgaaagcggacgtctagtaaactatcttgggaagcctacgtctggtggtagttgaaaccaaata

SEQ ID NO: 2362 - DNA, 741 bp, Ustilaginoidea virens nonsegmented virus 1
  strain GX-10 fusion1
aggtgttgtcgaagctggccaccagcttcgcagccaagtgtggagggtaccccgttatgctacatacctcctcgaagaccatttgcatgctcctggtcgagtgctgggagttgaagtcgtcgtagtccagcataacgttgtacccctggccgtgtctcaaagctacgaccttctcgcacataccgagcgtgccgtactgccctgggtcgaggaccaccctcctgttcctccacgccttggcaaccagcgacaataggctacgaatgtgtcgagtacccggggcgcggttgctgtggatggttgccctcgcctccacttcgatttggagggtagtcgtgtgggtaggaggggccgcccacgcgcgaaggtaagtgccctgggctaaggcgttccccagtagaacgctcgggcgcggtggcgcccgcggtacctacaagcccgcacacgcgtctgacggattcggcctagtattgccaactaagtcgtcctccccgtagcgcgtgtggcggttaatcgggagagccaggtggagggttatggcgcgcaaacaacacgtcccaggttttaacgttctgggtgcggccttgccacctccttaaccatttaagagactggtgcatggtggtgttcccgtgtcgagcgggcggtcagacacgagctcaggggagtcgaatccccctgagtaacgtggtttatgcgtagcatagctgatacggccgcaggcccactgttactgaatgc

SEQ ID NO: 2363 - DNA, 742 bp, Simian virus 41
  complete genome.1
aatacttcgaggccttgatctcagaatgcaatctctggaagggaaagtggataagattcttgcaacctcggcaaccataacagccttaaagaatgaagtgacaagtctaaaagcaaatgtggccacagttgagggcatgatgactactatgaaaattatggacccaagcactccaactaatgtaccagttgaaaagataagaaagaacctgaaagatactcctgttataatctcagggcccctgagtgagagccacatcactgaagggagtgatatgattgtgcttgatgaattagccaggccttctctaagttccacaaagaagattgtgaggagacctgaacccaagaaggatttaacaggtatgaaattaatgttgatccaactagctaatgactgtatggggaagcctgatcaaaaggcagaaatcgtggcaaaaattcatgcggctactcgtgaggctcagctgttagatatcaagcgcagcatcatcaagtctgcaatataagaaatcttagttgagtacatacctaagacacaacaataattccactacatatatattgaatcgaagtgagcactagggtggataggtcaagggacacatctaggcatcagaaatccgagtcaatctgcactgtccgggtttaagaaaaaaccaagtgtcaagagcatcagataggcacgaacctaacacaccccgagacacaccagccacacacatccgggccgaccagcagcc

SEQ ID NO: 2364 - DNA, 743 bp, Beihai picorna-like virus 59
  strain BHBei77099 hypothetical protein1
gtgggtggcttaggccacgcatagagtttttctagtcatcatttgatgccagtagtagcacttatagtccttaggggctatttagtgtgtttactgagaagtgttacatgtcatgtataatgttgctaaagatgatattgttttaagcacttcgaaattttattgggtatagtagtgcaacgtctactatatcctttctctctaattagagagataaaatcaatatgtccaccttgtactcatttttgagtacatgttaattagtcagtggaggaagaactaaactttgcagagaagaattagtgtttgcaaactaaggaatagctctgcaatttatgcttttaaaaagatgatcggttaattcgccgtcatttcacttcctatatggaagtgttttataagggattgctgtcgtgaaagatatcttgcgtaagaagaacgtgtctaaggggaagaaaaattcatcccctatagttagtaaggaagaaattcgtcagaggaaggctctggaaaaggagcggaaaactaggatagaaagagataaaaccagattgaatgatctggataccgttgtgcataaaaagaaaagtaagaagattgttccctatgagggagatcataataatatcttggatatcccagtgaagcaagatcatgaattcgatgattttctggacaatataccagattcagaattctttgatgagagtgatattccacctgttcataacaacaatgtggat

SEQ ID NO: 2365 - DNA, 744 bp, Wenzhou picorna-like virus 43
  strain WZSBei69573 hypothetical1
ccacggtcctaatcgaccgtgtatccttttgaccccgtgtaggttgcgggtgaacgcctcattttgttaattcgaagttctcgggttttcaactgaggtgttgccagtgtggacttttgtcgcttatgtttcctatacatcgacttgtgtgtataggtacaacaacctccaactttaaccttaacctttatttgagtgtttattttaagatgtctctaactcagctctcttgctgtcatggctaatgactcgtgtgtagattgtattggatgtgcccatcgtgtaacgggccatcacttaccacctaaatattagttactcgtcgtggaggctaatagcatttgggagtgatggttatgatttcgatgggtaactggctgcccgctagtggttccggtcaggcccgattgtagatctatgcatgccttattagtaacaaaatccttgagtggtatcatagggtggagccccagggctccggtgtgaacactgcttgaggtggtcccctaggacatgcaccggggagaggctcctcgaggaaccggtggcgaaggctacaggtgttccaactgtagtcggcgtgagacctagaatttcccttggtggagggcccacattaaaaaccccgtggggcagaaaggcaccatttacaaaccatatgaaaattacaactagtgatatagacgattttgttggtacagagagacctgcgattataattgttgatacaagagttattacaag

SEQ ID NO: 2366 - DNA, 745 bp, Barns Ness breadcrumb sponge aquatic picorna-like virus 3
  isolate1
ccgtataggcattttgcctatacggagattattgagttgtgtggtttaccccacaccggttcattcatttatggactgcagcacatgttgtgagagtatagcatctctcattgacaatatgtgcggatttaacttgtccttaaatggacttctttgtgcgcttttgattgttttagctataaacaatacaaacctttgtaaaagaattgaaaataaaattataaaaataaatttcaatcaatgttgcaagcgaatacttgcgttctttatgtaaaagtttacactgatcagaccaaactaaaattttgacacgatctaagctgtaatctacagcatgtaaagagttcagtttactgctctttatgattattttaatgctattcctgtatagctgtttttatgacaaataggaacttccgaattatacgagaattcacatctcttggtaacgccttcgggtagggaccaaacccctgacgagactctgtagaaagcgtttctctcagtgatgggaagatattgctcttcaatgaattttgaatttgagcgtcttcttgcatctgttgaaactaacttttgcattgaaagtggccgtttttgaccgcggaataacactttatgatttgcatgactaaatctggccttttattacgccagacaaaaagttgcagtgtcgactgttgagaaattttctctgcaggtcaactgcttggaaagttcttcaactcgtcgatgttaacaacat

SEQ ID NO: 2367 - DNA, 746 bp, Marmot picobirnavirus
  clone c328515_g1_i1_libraryA_2739 segment I1
tctaattctatttttattcttagtgttcttctaccttattcaaggcgaaacacccaaactaattagattggtcaaatttacacgtagcacacttcgtttgagtgtgaatatgtgtagaatgatcaagctacagtaacacacaaacatccaaccaatgtcacaactaaggaggtgaatctctagtgacacacaatcagctactctactggcagaacgtagagacaaacagagctaacgtggctcgagagactgaaacgcatcgagcgaacgtcgcacaagagactgagactaatcggtctaacttagcacgagaagctgagacaaatcggtctaacttagcgcgcgaagcggaaacaaatcggcataacaaagtgtccgagcgtgagactgaaaggagtaaccggcagagagagtttctcacaacactgcagcgtcagcaggactggcagctggggctcttaaacgagcagtatcggcgtgacgccttagcggaaacgaaacgatcgaacaaggctaacgaagagctgaaccgactacgaacgtatattgatgagtcgatccggagcgaaacaaaccggattcagtcgttagcgaacactcaagctaactcgatacgtcaggcaactctatctgaaacagtaagatccaatcagaaacaagaagcgttatcagcacagcgcaacgctgaaagtgaacgcgctaacttagcgtctgagtcaattcgagaagcgcagaacgctatcgct

SEQ ID NO: 2368 - DNA, 746 bp, Cragig virus 8
  complete genome.1
ccctgcacacgcgtacgattatttagatctatatctataatatagttacttttaaatgtgaatgtttcattgcaaatttgagagtgacaactcttaaacattgtgatgtaatttgcatattctaagaattatttagtatatatttatttattcgatatttgtgttcggtttgaagagccgtcaacattatatatttttctggaaattcgacacttttatgacttatggtagtaagttgaagatactgtttacagtactaccacgtgaccagcgatggtcttaaaatatatctctttttctacttatcagaatttttcttgaagaaaattcagatatgatgatcataatgattactcagatgcatggcttgccctgtctgttttaccgaatattgataaattattctaccctcatcgactatgaattttacaacgttgccgcttttattaggtaacctcttggttaggttagcgatttgaggatgaagaaattgattatttgaagatgtctttggtattttgatgtattattaacgaaaatgccaccaagcccacccgggtcgaaacggactattgtccttattagacacggggaaccgcagagtcaagggtgatgacactttgaaggagcttgctcctaggtggtcaccatacgtttggaatttattccttattaaaacttgtctcgttagttgaacttataaccctaaaacactcttgtttttggtttatttgttcactcggttc

SEQ ID NO: 2369 - DNA, 746 bp, Beihai narna-like virus 15
  strain BHHZL10358 RNA-dependent RNA1
cttagagggaaatcctgattcatcactgaatcagttccgtgcaacattagttgattccgattaactagcgctgtgctgaacgttaatcgtcgtgtgatctggagagagttaaaatttagactctttggaactaaattctctcttgctgcgacgttatctaaggtaggtgtcctatttaggacaggtacctagggaggcagccccttccaaaaccttaaagagtctagcctgacaactactgagtcatagttgtgacaaagactaagttctttgaaggcgaaaatacctgacttggcaatcacaaaagaataaaccgatcagatccatcggaaggatctaatggttctttcaaatgtgatcgggaagccatccaaacccgtcctgccggtagtaataccaaaggaaaggtggaccttaaaatttcaaaggtgcttgaatcctatgctggttgcataagaatttggcatcagattaattttaaagggtgtttttctttttcagaaaaggcacagatcgcacactttagaaaagtgttcttagggattgagacgagtaagtacccaaaggtatttaaaggtctcctagccgatcgtttttcaattgaattgaatcaggatcgtccagaggtccctatctctggtcatagactattctatccatcttatgatcggaagctattccgatatttaagtggaatttcgaatggtcagagaccaaagacccaacttagactcttctgggactta

SEQ ID NO: 2370 - DNA, 747 bp, Hubei tetragnatha maxillosa virus 2
  strain QTM20713 hypothetical1
actgcgtaggcaaaacctacgcagtttcttttgactcctctcagaggagagggatcaagtaagtcgatgtatcgcattgataaagggtgggctgacatgtaagtcgatgctgtcattacatgtccatcgctttgtttattagttttaagattttcttcgtctccaatttatttttcgaaatatcttcaacaagaaaaattattgttttaattgactgagttcttataagactatgagtttattgtgtatttctctcttatttgaaccctcgtattttatatagatgcattatgtgtatttggattgtctttcttgacgcttttgaaagggtacaggatatttactttctccagttctcgttggaaaggctctttgaatgattgatatatgctgtttcacattgtttcttgcatagtattgtagacataggctcggcacgcattggcacttccgtacagcaactactctacaacgaatatgtatagcgacaatgtaacgttaaccttggtgatgagttggtgataccctcttggttatgtttcagtatatgtttttctttttaaagatgtgtcccgaggccattctttggtttgatggattgatgaaaagaatacagacattttgttgacatttattatatgagcatattatacacacgacgatgtgaaagaacattgacaatatgaaagcatattgactacaggaaagactgttgacaataggaaagactatacatatgactttaca

SEQ ID NO: 2371 - DNA, 748 bp, Sogatella furcifera totivirus 2
  complete genome.1
caaaagtggcgaggcttttgcccgggcacaccgactctacgattgggagttgggtgtgtccggtctctgcactctggactgctcgcaagtctaaacttaattttgggtaggatggcgaaagcgtgtagcctgaaatccgaaactaccctcatattacatctggattacgcaattgtgcacctgagagactataacatgtacccgaacgcgtaagaatactaaaaaccatgtgggagtggcatgtcatgcgaagcatctatcgttggccctctggttggacgtgtttgaagcggggcgagagtgggttagtccggtagggtttagatttcattttttggactggagagtcagtactcacccgaaacaaacatggaaaacttaacaatcaacacacaaagtagggacgcactagtcaacgaagtaagtgttgacttagaggatgagacatcaaggttagttatagatacacttggtgtaagtgtattatacgataaggttgacaccaataggaaaatactttatggaattgggatgattttggtggcgtgcggagcaatttttgggattatggctgggctcctatacgttcaacaccaggatctgacctcttatgcctctcatatggaaacaaaatggattggattgaataacaggataagggaatcggagtccttattagctacagtatgcaagtctgagttcggacagtcatctgtagtatgttcgcggaattcttcttcttttaata

SEQ ID NO: 2372 - DNA, 748 bp, White ash mosaic virus
  replicase, 27 kDa protein, 11 kDa protein,1
gccctgtagtcccttataatctagtaagtaggtaatttagctatagatatatgtttcttccttgtttgaacatgagtatatcagcagttattgacatagtaaataaatcacactttgtaccctgctacccctgcacacaactgccccccgtcattaacggagtaccgggatcagggaagagcacactcctcaaggaattgcttaatctgcataacgtccgcatctacacagccggcataccctacggatgatcccttaagactgaaggcgtactcccactgagtgagttcacaagccgagctaaccatctgtgcatcctcgacgagtaccaacttgccactgataaagaatttgagccattccaggtattggtgggcgaccccttccaaggagctacacaccgtagacctcacttcattgccaccaccagcttcagagtgcccaaagcaatctgcgaacacctcagaagcagagatttccagattgagagtgacaaagaaggtgatctaatcaagggatctccattcaccacagctgttgaaggagagttactgcacttgggccaagtcagcaaggaccttgcacactcacacaacgcttgctcgaaaggtcccacggaagttcaagggcttgaatttgacacagtgaccttgctttaccactcatctgaactatccaatagaatcggattctacgttgcctgcactagagcttgcaagagattgctgttgctctctgatgagcacgt

SEQ ID NO: 2373 - DNA, 750 bp, Solenopsis invicta virus 2
  complete genome.2
atggactccctaccaccgcaactcaatttactaattggtacagtgagaactttgcttcttctgggatatctttccttgcaagtggcggcgcaaattgagtccctggcagtagcagtgtttcgtcctctgttacgccgagtcgggtacaacctgctagactcaatcaggactatgccagcttcgcacagtcatctcccgctaacaatcaaggatttgacccatggggagtgaaggactcgccaattattgatgatgacgaacgtgttcaatctaatttggaaactgagacagaaataccgaatgaagctgaggaagggttatcagagactgttgaggcagttggtgaggttacgactggagttgaggcagctgaggcgaccgctgcggtgtccactccttggaccttgctggctatagccaatcaacaactaggccaagcagttagtacagcacatgtgtcaggattgcaacagcaatcctcggcggattacacggccaatatgcagtctcacggcttgaatgtaggtcttaatgcagatcttattcgtgaacagcagagccagaccatttcgaggcagcaggcaggaggttctattgggtctttgcttgggccccttggaacgttgatcggacaggccattgccggatataactctgtgaaccaagaggatttgaaaacagccgcttctttcaacggctatgttaatccccaaatgagtaacatcgttgcttcgcagacaacatctggtg

SEQ ID NO: 2374 - DNA, 750 bp, Robinvale bee virus 8
  isolate VN1-22 nonstructural polyprotein and1
gaaatatgtatggagtgtcttctttaagacacttcatatgtatgagtaacgattaatttcggttacgacgacctaatggaaggcgtccctttgagaatcatggcgggatgtcaacccccgcgaagcgatagaatgagtcgcgtgattgaaatgagggagaataaaattcttcggtaggttgttgtaatctctatggtctgggaccatattctaagtttttactgcttttttaagaaaaagtttatcgagagcataactcgtgtgaaagcaacatggtgagtctaacatcagtagaaaaatgacaacccctcccctatatgttatgtaagtatatggcagtgtgccattaaaacaaaaataaaaatctgtatattttatatttcgacaaacagtttgtaagacgttagtcttcaaaaattaagaacgcccctgtgtttattcacttgtagacgcaaaattgtttgatctccattttgtcatcagatatgacaagaaaaagacaaagtgctcaacattagtacgtcttgtaatggttttcaccgtcagaaagatattagcaattcgattttccaacctctacgctcctaaaaggactacgttaaaaggaagacgatggtatgttacagctgcagttgcagccgaggacagcctggcaatctagtaagaacaagagagaaaatgatgagtaggttgtaaactcaactagcatatggtagagggcgaagatagctttaccaatccggggctcca

SEQ ID NO: 2375 - DNA, 751 bp, Bremia lactucae associated fusagravirus 1
  isolate DML-A_DN430091
ctgaccagttgtttctccactccggactgcgatctagtcattaagtcctttcacaagccgccgaatcaagtattaggggagctggtgactgggttgactcagggtgcagtgtgccttgcctggtgagatggacacacaagatgtgaccgccactatagggtccatgaggagttaaatcgatttggtgaacccgtgctaaggttcaccgaccttttaattcaggggatgccgaagggtgaaacttggttactatctgtcttgagtggctgcataaccgcatcaagcgagaaactattcaatgggtagatagttttagcatttggattaaccactaaatgcttatgggccggcaaccggaactgccacattagtatcatccttcgggatgggcgcgttggataccgcgcttgaaatggaaacactgcgctcacattagaggtgagcaactacagtcaagctgggtttttagccaattctcggacactgtagtgggagaccacggtggttaagcatcttcggatgcgttcgtgtggataacctgaatggcatcagggtgtgatcaagtctgagcttcctctttgagatgctttaaccttactcaggggacttgtgagctaacgtaggcgagtatagagtagatgcaaactcgtcgaacgtgctttttggttttagaacaccaaggagtggagagactacacccatacgaattcgggaaaccgagttaacgaatagtccagcccaaagggagcct

SEQ ID NO: 2376 - DNA, 751 bp, Picornavirales sp.
  isolate wag054shi1 genomic sequence.1
gattcaatctaatacagccaaacagaccaatcagaccaatcttgattttcagaaaagtttaattgataggggagaaaaatcatttacagataaaggattaccgtcttttctttattgggggggatcaagcgcacaaactccaaattctttaatacagttaggaggacaaaatttctatgaacaatccggtgttaattcgaatctcccatattttacaggaactccatacgctcagtggaaccatgttggcacacctaagatccagcaacaaaaaccttcaccctctagctctcaggcacatgcaggagtgtcagctcagtctggaaagtctccagcctttgtatcttcaactagttcaggaagcgtatcttccggagggacagttagtatcaatgttggaaagcataatttcagcggtcagacagatacgacaggacttggaaatggccgttactctgcagttcctccaccaaccttaacgtacaatagcgttggaatccagaatgctgcaaggactcatgattttgccacgcaatctaatccatctgtgagaagtgcctcccaacagacttgggcccggtttgactcttcaaagtccactcaaacaagtttaacgggctcccagtttatggtcgacaaaggtacccaagccaatcctttcaggtactatgccaaccgttgagttcctaggcaatgccgtcactcacgctaatgcacacaaaatcgagttcttatacgataacgcagaaat

SEQ ID NO: 2377 - DNA, 753 bp, Marburg marburgvirus
  isolate Marburg1
cccggatactacagcacgattacccacccatccacttcgatatgattcaccctcagatcacagcaatcaaccctatttgaatatccaaaccactatttagtatcctattacttgtcactattgtgtgagacaacataagctatcaaataacaatcacgggcaagaactgggcatacgatggtgatttgagagtattgttcagtgctacaaattcttttttcaattgctataatgatacaactacaaatctccgtacacttgccgcaatactgtaattaacactgctgtatctcttcctcaagccatctgatttaactcaataaacatgacttgattcagagaatatgctgaaaatgttattgattgaacttctcaaatggtgcactatcctactgttttactcaacttggtatattgtaacatatcagcggactctccacttttcttcttgtatattctctataagtcatttacttgatagaatgtcaagtctactggttcagagtctcctcactccaatgaatgtaataattaactgttagcttagatgacaacagttatgaggttatataattactcatggtgtaaaatgtaattcttacctctatttcttctgttttccctctcctttataatatgccaattaagaaaaactaaaaatcgaagaatattaaagattttctttaatattcagaaaaggttttttattctcttctttctttttacaaatatattaaaataataattctcaca

SEQ ID NO: 2378 - DNA, 753 bp, Arma picornavirus GZ
  complete genome.1
cccatatctttctgcttattacgacccccaaacccttccttttggattgtacctcatcctgcaaaattcttgtttggttccatatggactttcactaccagatcctttcgatgttccccgcttatttacatatatatcttcaggacgattctgaatatgaacggattttcccttttgctcgactacctgatcgttgcttcaataaattatttatgtatagcacatttgtacaaaattttcttgcagacggagactgggcgaacttgttcttcggcgattttgctgttgctcacagcactagtgaccgaggttatatacatgacattgacaagtacgtccacttttcgtatgataatgaccgctttgctaatactttcccactatttcagcgcactgattatctggattatttatttcatgaaccagttccttataatgtacgaaaactcagaggatggtattgtagtgttcgaaacctatcacatcattttcaggaacatgtcgcacgccatcttagtttggaatggcttgcaattataaaattactaaactctccattacccgtatctttaccgccactgttggcgcttcagatgaacaagtttattgtttatttggagcaaagacagattaaagaaatttgggcacttctgggtatcccccgttttgagtgtgtttatttcggcccgggattttagctccttacgaggaagcttgccgtaaaacttaaatcttattttaaaacacttcaaa

SEQ ID NO: 2379 - DNA, 753 bp, Picornavirales sp.
  isolate RtNn-PicoV/SAX2016 polyprotein gene,1
ggagtgctcaaaatagcagattggtgtgtacgaggcttgtcaacacttgctgcaattgtgtcaatagcaggctctgtgtatttaatctatcgcctctttgctaaagatcaaggtccatattcgggtgcgccgcagagaggtctgaaagccccagttccccgtgtggtgaaagctcagggaccagattatgacttcgccatatctttacagaagcggagtctcttccctgtgacatgcttgaatggtccattcactgctcttggattaaaaggaaagtggattctcctacctcgccactgcaaagtgggggaaaccctggatctagccggaacagaatacaaagtgctagacaatgcagagctagaatgtaatgagggaaagcttgaattgaggtgtgtgaagattgatcgtcctgtggatttccccaacattttgaaaagaataccaaagaaatttgaagaacgccaggattgtgttttgtgtgtgaattctgaaaagtttccagggttgacctgcccagttggcaaaatccaaaattggggtaagttgtgcttgtctggtaatgtgacatgtcgcaccttaaagtacaactacccaactagatcaggccagtgtgggggtgtggtcactaaatgtggtgaaattctgggtgtacacattggtggtgatggacagaatgggtatgctacagctttgtatcaacattattttgatgccctagatgatgctatagagcagggccatatagtggag

SEQ ID NO: 2380 - DNA, 754 bp, Shuangao Bedbug Virus 2
  strain SACC-1 ORF1 (ORF1), glycoprotein1
aaatatctattagtatacatactctatagcctagaaaaaacaatgatcaagaatccttcagtcatcatgtcagagtcagaatggtcatcggaagattcttcatctcttcacacttcctcaactcaatgtgatctaagcccacttcaaaatcaatttttagctatgtctgcaaaaatacagaataacatagatagaattaataatagacctagatttacgcctctgaattctcaggtaatcagaaagtgtttcaacgtaaaactttctagtggtgagcttgaacaggggttaaaggatgacggagaggaatggatgttttactcagcacaagacacagtatcaaagtccattccggtgtatactagaggaaagatctttcctccacttttaaaaggatctattgtcaaaattaaaacagtcgaagtccctgtctcttctgagaaggaacatccctataaaactaaattgaaccctatatcggagcaataacctctacattgatcttccagattgataacaggtgagctctaatggggaaacatgtaacctccgcattgatcagttacctgcttcacatacctgtgcgcctttaacattaaccaaattgcttttctactcctttaattaaaataatttagattttgaaaaactgtaaagcttaaaactcactaaatagaaatctcaatgagatcttaatctgtttatctcaattgatcttctcctgtttttactgccccaatccacatcccctgcc

SEQ ID NO: 2381 - DNA, 756 bp, Picornavirales sp.
  isolate RtMrut-PicoV/JL2014-2 polyprotein gene,1
tttgaaagggggcccctgcagctcatcagctgcagggtcccccggtggactgggtacacttctcgcccccttctggggtgggggtgtggctcagttaaccaccactgggtggctaccagttttcatagaatagccaatcccgtaacatttgccacctaagcatagtttaacctcctacaattggtcgaagccgcttggaataagactgattgtatactgtgagcctgagtattctcttctgtcttccggttgctctacaaccggataagggctgtacctgggcggtcctactcttcacaggagtctgcataggtggctttcacctctggacaatgcactccacacccactcccacactcaagttagtataagttgtgcatgtgaaatgttgtgaacgcgttgggtaggtgtagcgactacaagtgtgccagcggatttcccctggtggtaacaccagcctctgggcccaaaaggcatgtctctgaccgcacttgtacacaatcccagtgatgcccaccgttagtagtgatctagtaatctgcacttctcaactagcaaaccgtgtgcttggaggtgtaggtatggcaggctgaaggatgccctgaaggtacccgcaggtaacgttaagacactgtggatctgatcaggggcccaccggctctccgggtagaagtcttcggaccttgggttaaaaaacgtctaggcctgtcccccagagggatctggggtttcccttataaccccaatactgacaat

SEQ ID NO: 2382 - DNA, 756 bp, Perth bee virus 2
  isolate WA1-14 nonstructural polyprotein gene,1
attaataatacgtatttctttatttgccgtatcctgtacgatactcaggccatgggatggttttcccacaaaaacaatacacaaagttccttaacattcttttgattattttgattctatataacagcttacgtagtactatgtaagtgagctgttattgatttataatttgatttttaaggttgtgcattgacctgagtatagtctaactatacgcaaataatgtgttcatattaaagttggtctttaattagattctaacatcgaatgctttcactttcagatatgaagtctatatgatttatcacacacgttgttatgggtttagcttacgaagtgtgtagagtagtgagattgactattcagtagatcaatcagagcctttacacatgaggtgttttccctattagtagatgtggtcttgaatatatatttcccatcatttccggattttcattaatcggtaggagacaagaaaagacaggttgtgacacctatgagagaacgaacttatgaatcttaatgttagataagtaagttgtcagaagtggacgtaatacaagtcgtatacttatagctgttacctccccctgttaaagatctgatccgtgatcagatttccacattatgtggcgcttagaattatattggcgtgtaattcaagtgacttgtttagtccccgcatatgttaatcttgagagcgtgagaatataattgataaaatacaaaattcaaaaatatttcagatttgacaag

SEQ ID NO: 2383 - DNA, 756 bp, Hubei picorna-like virus 48
  strain spider129651 hypothetical1
tccgatctatgggtcatgcccatgggtctcattttaacggtcggagcaaccgatagataagctctactacgttcatatcagagatactcgcatctagtttttgctacgtgtcagttttctcgaagtatggatctagtaacttatcagctccaaacaccaaacacaccaaacatcaatcataaatcatttaatcgtgagattttactaagtataaatgtccagtagttctactatacggctgtggtggtacgtggttggcgcttaactgtaacaggttcagtaggccacgtgctgctcattacgcactccagcggaaacaatggttaaattgtatagttagagcaaaagatcttagtaaaattggtgatgcaagtctttcattatgttccgggtagcgaacttgataatttgatttagttcggattaccgagttggaccgagttcattgatggaagcaaccgcattggttatattgcgcaagcgaggcatattgtgatttactttctttggtagtactattcttaggatcaagtatcgagagatactcctttggacaactggaaccccgagaagtaaagttgatcaatatcgttttgcaagtgtatgagaccaatgtatgtgttttgacagtttgccgaaactgtccgtcagttataataatggtagtaagaggttgcacgagacgtaaaccttggctacaccctttgactcctttgtaggtgaaaaggagggttttattcattttaaacttaaacc

SEQ ID NO: 2384 - DNA, 757 bp, Beihai picorna-like virus 114
  strain BHZY60932 hypothetical protein1
ctggggggctaaccacctcccattttgatctgcctcttccctgttggtcagatatgaactttttagtcatatctgaaccggaatgcagttttcgtaaaatgtaacgtttaagtgtctttgtatcgttttgtaaatcaaagtcttaatcaatgttaacttagtattttcagtagaaattacgcgatttttgtcaattagtaagaattctataggcgtagccttagaccttattatggcaatttggacagtgttctaccagtcaatactagagttcttagtattagaactataaaataatactatctcttggaagcagagattgaaaataattccaccccttaggcacctgagacccaattcttaggaatccaccgtataggatttaaaataagatactgaagttaatggaagcgacaagcttgcccgagaggtaacctcgctaaacgaccctataaggattcgacccctttatagtacgatttttgccgctatgggacgatcaccggccccgttacttaataccttctatctttcattgttcacaatcttagtttagtcgatcttaaatgtgacgaactatttatattgatacgcagggtaccctctgattgaatctcaccttagtttaagttaagaggactacgcgtaaccagaccgccaatgctggatgcctatcaatacctaattttgtgatcatgtttgaggggaggatctgtgacaactgccaatttgatcataagtggcctcaatatagatc

SEQ ID NO: 2385 - DNA, 759 bp, Picornavirales sp.
  isolate H1_Bulk_30_scaffold_14 RNA-dependent RNA2
ggagattgcaaatacggtgtatgcagatgtaaataaatagctgcatggtaaattgcatacatgacagggcgtctccaggaaacgtagctttttagctttactactcagggccgtttgtccagagaaatgcggctcttactttccttatgaagctaaggttgtgagtattttgcttcgctaacacagataactttacagttgaggcacaagcgtgccgtgaatggaccgctagagtccttgccgctaatcttacttattatagattgcgacgtgagctttttgaacagttcaacgatttagtttttgatgaagaccagagtcaacctttggttaatgttaacgaggaagtgttcatagtagttagacagtttttgacttcacgtaatgatgccattaatgatgataagcgcttgtcttttgacaaggctatttttgagttgaggcgcgcttgcgcaaaggctttaaagtctacaccaccttccacaccttctgagggtgtttcgagtcacgtctctccatgatgtccagagaaatgccgctcgccatttgagtgtgagaccattcagtggcgtataatgtctcgcttcttctaaaaataattctaacgagggaaacctccgtgacgccgacgttaagtgcgacgaaataaattctttggcaattactaattcgccagagacgactggagtgacttcatttgtacaggaggctgtagaatgtcaggatatcattccagaggctgttaaccttggcacttta

SEQ ID NO: 2386 - DNA, 760 bp, Nephila clavipes virus 1
  isolate SC, complete genome.1
gtggtgggtgttcccaccacggtttctaagttttcaatttgaacatttgtttattacattatataagtagtgttgttacgacaacacgctatatttttgtaaggaccatttgtttgaatcttttcttagttatttttcctttgtttacgtttttctgtgttagtgtgtttgtgtttgtttagagcttgtattcactccctttctatgtagtgacaagccaaaaatctactatataaaatacctttcatcaagttagtttcaaatgaattccggtttacggttataggatagttgatatattgtgttattgcaatgagttcgtgaaaaccccttaacagggctaggaagaatggacccccgcttaacgggataagttgtcttctcgttctctctttaagtttgttaatctcactttattatcgctatcacaacttcacgaatagaaagtttcagttgtaggctagatacggaggactcagatatggtgtttgtagaagttcacttggtaattcttgtggatggagactcttcgtgaggtcgccctctatcgctgtctgatgaggttgctagtaacactggaccgagtattgtgtgtcgaagccaatttacgaagtagtttctcggcttttatgaaactatccaggacatgaatcgacagttgctcctatcctgagtatcgatcgatactgaatgagtactgaaggttgaccatttagtttatgatttattgattaagatttaagatttaaagcgatttaaa

SEQ ID NO: 2387 - DNA, 760 bp, Beihai picorna-like virus 44
  strain BHXG26143 hypothetical protein1
gcgggattttctcccgcactcttatttcaccgacgttaatcatagcccttgctatcatcaactttgagtgatatatgttcctattggtagttgtatactatacggtatacccgtttggctgcaattacaatagtgcaagatctatgattgttagccagtagggtgatatctgatcccacaattatcaatacttaatagactttgattcttccagtctataaaattagaatcaacaaacccaaattttatgtagtaatgttttgttttgtcttacaacttataccttgagtttataaaacacacctttgctcgttattataaaaatattattatttatgagaataaaatgtgaaataggttgttctgcaaccacctggttgggctattaccacgcccctgacttaccagtgtttcagtatggagaagcccgggcgatttgccaaagggttatttgtattgaatatcacattaaaattagtacatttgtttaatatatgaaattattggtatcttcgtttagttcccaatagacacttttaagtgagtcgtgcagacgttcgtttttcggagtcaacttgacccaataattttaatatattaaattcgagaagatcaatgctaatttgatgtgagtttcgagaggattgagcacccttgagaaaggttttacatttgaagcttataatgcgatggtaattttatcgatagcagctaaacttcgactttatatgttttaaaaaacttacctttaatcaatgat

SEQ ID NO: 2388 - DNA, 761 bp, Wenzhou picorna-like virus 40
  strain WZFSL83107 hypothetical1
ataaaatgcatgtataatttttattcatatttatatttatgttatgtaacatatatgcttatgaaccgagtaaaatcggtcacggcgtcactatggtaaaataatatatatatagaaaactttttcacgtacatgcgaacaaaaagatttatagtttttcatatagggttgacaaccccatatgtgatggagttttcacaaaactccatatgtttgatgacaaaataataattatttgatgcagtttattaaaagatctaagattgaattgtgattctattttaaactttatatggactaacacggatacgagatttatctcgaaggtatctctggacatcgtataaaacggagagtagaatcttctgataaggactactggcctcaatacaatgtatcacgagcgttgtattgttgtatctcaaccatcacaccactactagtgactagtagagtagtaaaacagtttcgactgaaggctgtgatttttcttttgtggcgcgggtttatacactcgtaaaacaggcttgtttcttttggaagcaaatgggccatcccatgttatgtcataccagagtaggctaacgtacggtgcttgcacactactagctaataccatcggatcttgtatttaagtacctgaggattgagtgtcgttggaaacgatacgagctcaatcataacagactagtaaatatttgatgcctgtattagcataccgaaagcgtaaccaaatgaccaatcatggatcaatgtgaaat

SEQ ID NO: 2389 - DNA, 762 bp, Pythium polare RNA virus 1
  PpRV1-OPU1176 genomic RNA, complete1
ggattttaaagggggtaagacacctttaaaattcgtccgatttgcgcttgtgccgtggtttgatccgatacgttcgtctctccgcttgccgctgccagtctggaaccacggtccggaaagcatgccttctctggaatccaccgctgaggtcctctggttacaaatcggtcggcaggttcgcctgtcagcgtcgtcgaatgagcgaagttgacgcttgcgatctactctgacacccgtaccaccggtacggacgttatgaccctcgtcccgcccgtaaggttctacgttatgagccagttaacggtcttcgccgaaccgtgtacaaatgaggccccggactatccgcctatcggatatgccaaggtgaaagaacctgacaacagagagagagctgtgaccgctgggagagaccgctgacggcagtagatctgcaagcgctaaacggaatccggaccggggcgtgacacttggcaaagctggggagttttcgacgagcttcctattgcaaccttgtggatcgaacagtgttcttagttttccaattaagtgcgattaggattggcccgaggggcgaatgcaccgtatgaaggatacgcgttgggcgtgtattactgtatgggaagaagcagattatggattctctgtgttcgtctaagaaacttggtaactggtcagtcctagcgaggcaagggagtggtggtttagtcgatgagccacctgtgggtaactggaccccttgcgttaccgtcgcattgaaggtga

SEQ ID NO: 2390 - DNA, 763 bp, Soybean leaf-associated negative-stranded RNA virus 2
  isolate1R
ctgctgtcgtagatcgagatggacctctgaagagtggcatgccgaggatgttttactccatcttccggctcagctcaggtgcctcgctcaacccgcttttgatcatcactcgatttgcccgaaagtatccgcagttctatgcggagtttcccgatctcgagaccgagtttcacgccgctgcgcatgcgcttgctcggttctacgacgttaacgagaagcgtcggatgtatctgaaggtaatcttcggaagtgattacgtccctgtgcctcgaactgatgtcgactctcttttgggagttgctgtcttcaccttgcagcaaaccgagcgttctctgcaaaactacaacggcggcaccctcagtgtagctcatcgagagaaacttctctcactcctcaatgtttccgccgcaaaggaggaagacgtcccggagtcctaagtctccttctagtctcgcactgtactgtcattggtgattaaataaaacttaggagagaatcaattcgacgtcgatacgatgctttacgataagtttctgacatatgtcatctccgtcgagctactagcgaatctctgcgagagagctggtatcgaagaatccggaccgaagaaagaagatgttccatctcgatgcgtcttgccgattccttccgtgcctatcgagcatgatgatcgagagagagcaaagttggttgagctaactacctcttcgtcagagcgtctgtaacgcaaatataataaaacttaggagacaaataaatcacc

SEQ ID NO: 2391 - DNA, 764 bp, Ipomoea aquatica botybirnavirus
  strain pt078-rha-1-newwen-plant_78,1
agatgtgtataagagacagagtcccaacccgttccaccgaaggtaggcacaaaaggtgggtgttaccacaccaccggcccctctcagcactagctccatcactggatttgtcgtgtctgctagaccagctccatagcagatggtttgcttattatcccgcattccgcggctggcaataaaaggcgaagcctgtgctttggcttttattgcaagccgcggaatgcgggataataagcaaaccatctgctatggagctggtctagcagacacgacaaatccagtgatggagctagtactgagaggggccggtggtgtggtaacacccaccttttgtgcctaccttcggtggaacgggttgggaattccgtaaggaccccagtaatgtccgtgcgacggggaaaagctacaacagcctgcctgtaacctgtaagggccaagggactacccagagtgtaacgactgcgaatcgtttactcagtatctaggaacagtctacttcccacaactcaattgagtttctggtcgtcgaaagccagagttaaaactgtgggcggtgttcgaccttcacaatcttagtaaccccgatttttgcgatagatcaacttttgaatatcgcccggcagagtgagttaatccaacagccacccatctacataaacaacaaaatatcggaaacacaccagcaccctcgaaactaggcagagcgatttaatccaacagccgcacgctaactattaaaacaacaaaacataccatctgtcaac

SEQ ID NO: 2392 - DNA, 768 bp, Shuangao insect virus 8
  strain insectZJ96360 hypothetical protein2
gttgggataagctccaattctagtttaacccgggatgtgcttttgttgcccgaagattcaatttggtgagccgtaagtcagcccagacaagcgcagtaaccaatgcgaatgaagttctccttgagcgaccgagaaggcgcgcaggtgaagatgtatcacttagtaggggaggttattaaacgaatctgaaaagtagttttaatgaagttgtacttactattgccccacggattgaacggaaagaaaccgtcatacccagtgctgcaggaacagttactagacctttaaaagtaggcgggccaagttactgcagaatagttaattcaacggatttaagatgaaaagtaagaggcagtgaacaccgaagcgaaacgtaaacgagataaaatgaggccagatgcccaagtcgtaagctccaccacaacccagtggaatggagtaaagctcagaagggttctcggatacattagacattagtcgagagtctccctaccgcacttggggaggtaacaaactcttagcctgtgacgttggattgagagcaacataggttataaattaggaaacgctttcaaaattgctctgggcaggattttcaaatcagaacttcctgctttaaataaaagtgcacaaataagtctatatattttatgtcagaagattttgataaggagattttgctatttacaattaaagcttctatagttgttttacttgtttatatttcagctttatctttgatttgtataattgaaaaccgaatttaca

SEQ ID NO: 2393 - DNA, 768 bp, Dicistroviridae sp.
  isolate fcc172dic1 genomic sequence.1
acttataatatcttacgggcctacgtggcctacgctagtacaatgtagtatagcagggacttaaaggtcctttcaaaaccaatataggctcggaaatccgaagtacaccctataccagcatttacgcaggattgcgtaaaggtcaatgaaattaacaataagtatatcgtatacaagagattgtatccacaaaaaaggagccgtaattcctaatgagcagcatatagcgcggtgtgacgcggtgtgcgaagggattataggttcttttttgtggatacaatctcttgtatacgatatacttattgttaatttcattgacctttacgcaatcctgcgtaaatgctggtatagggtgtacttcggatttccgagcctatattggttttgaaaggacctttaagtccctgctatactacattgtactagcgtaggccacgtaggcccgtaagatattataagtattttattatattttattcaccccccacattaaccccagttaaagctttataactataagtaagccgtgccgaaacgttaatcggtcgctagttgcgtaacaactattagtttaattttccaaaatttatttttcacaattcttagttaagattttagcttgccttaagcagtctttatatcttctgtatattattttaaagtttataggagcaaagttcgctttactcgctatagctattttatttattttaggaatattatcacctcgtaattatttaattataacattagctttatctatttata

SEQ ID NO: 2394 - DNA, 768 bp, Beihai picorna-like virus 82
  strain YYSZX17728 hypothetical protein1
cggcataccaacgcacgcccaatgtttgaccctcaagctctggcatttagtctgtttatcttggttaatactcttcggaggggtacaagttcgctgcggctgaaagcgggaagctctgtccttatggggccgaacccttgtcgttatgggggggaacctatgtccttatgtggggaagccttgtccttatggggccgctcttacgagagtgtatctttttgtttttagttttaagtctgcttttagcacttaggtcgtagaaagctagattggcctaagtccttctttctctcttttactattttcctttctttctttctcttatgtagtggtgatctaccttcttcacccgtggataaatacacgttaaactttgagattccattctttcaacttgatgttttgtcatgttcctttagtacgttcggagggtaaaacctctttcgcggaacgagattatgtcatgatgagattgattgttgtctgtttagaatgatgtctgacatactgctgtcagtttgatgaggagttctcataacctctaggcgacttgagattcgcccttgttcattgcaatttgctagtacgtatacgtggttggtctgatcatttgcgcagttcccgtgacaggaactgtgtgtatgtgttcagatgtggagactaaatccaactgctattaggttacgtatcagctcgtcacaattgcttcgttcaagtttgctcgtggggtagtgctatgacccacctgttttgctctcacaacattcg

SEQ ID NO: 2395 - DNA, 768 bp, Hubei picorna-like virus 25
  strain QTM27237 hypothetical protein 11
tatgcctaacggcataccatacagtgtagaggaattttgatatcggcatctctatagaacaagactgcaagccagaaacatgactatagacttaaccgagaagttttcaatttacacaaccccctgggatcaaaccctcttgtctgtccagactttaaatggactcgcctttccaattaggccagacttttgcttttatcgaagtaactatatagatactagcaaaggaaagcggcgtattgtattaacacgaaacgttgtgctgtgttttgtcgaaacaccataataaatcaacaaagacgacctatcgctaacgaataatggacgaagaattcggacttatttactatgacgattaagcgggcgtatatgtttggtattacttaacggttttatcgaccatgttacccgtagttataggaatagacgttttggacttcacctaggatagccctgaccggcttacccgacggattgaacgagacggctatttctatgagcctttagattgacaaacgtgcaagtttttgtcgcatcatattgcgcgctttgcgattttcagtaatggagaaagcaaggacttcgacctgacccgttccacggtacataatctggttatatatattagaacgttagacatgtattatgctaatatatatttcccgggcctgaaaaccctaaagaaccctaaggacgacgatggcaatcgatgagtgatatgacgaggaccgcttcggaggcggacttgtattggcggacgcgttagaa

SEQ ID NO: 2396 - DNA, 769 bp, Shahe picorna-like virus 14
  strain SHWC13617 hypothetical protein1
tatatgattaaaatcgtatttatttattatttagttgttcctttataatttgcagtagtgcttacgttagcactttgcaattttattttggaacattaaatttataagtatttacttttctagtcttatagctctgtttgtgtacctggatgtgggaatacattccaaacaatttcaagggtttttttgaatatcaaaaaccctaatcgagtatcgccgtcaagtcttagcagttttatcgctaaggttactcgttccctcccttttggaggagctctacggtttgacggtcttaatttgtccattttccatttggattttattaagaccttttttgttttagtacactttttctagttttattgttttgctttgcctcttttccattgaggttttagcttgatgatttaatttttcttccctactatttcttttctctttttctacctattctatctctacttctctattgtttagaagacgttgccttttctattgaaaattctttattgcgctcttaaatgacctttatttgaatttaatacatagattttggttttcttattctttccgcaattgtccgcaccttatatgtggggttggttggttttccagaaaccagcgctgtacgagatatctttctcccaattagtgggagtttcaacagcttaagctcgccaaaactattttttacgacggagttcgtactaccctggttttgaaatgaaagtggtggaaaacagccgaaaggcacagggggagaggagtc

SEQ ID NO: 2397 - DNA, 772 bp, Potato leafroll virus
  isolate May8B, complete genome.1
atgggcaagcggcaccgtccgccaaaacaaacggcaactccgacatccccgacgccgctacaagcgcaccaccaatggacagaatggtcgaacagatcatcacggctatggtggggagaatcaatctctcggagatagaggagaagatagtgagcagggtgtctcagaaagccctgcagaagcccaaacaaaagaagcgcggaaggcgtggagggaagaacaagcaaaacagttcacctcctacttcaacgcaatctacaagtggggcgcccaagaaggaggctgccccccaggcttcaggaagtgtgggcacatcccgcgctactaccacccccgcaccagaggcgaaacccagtgggggcaaaaactctgccaagttcatcccgagctggcggagaaaacagcaggattcggctggccaaaagcaggatctgaagctgaactccaaagcctgaatctacaggctgccaggtggctccaacgcgcggagtcggccactatccctggcgcagaagcaagaaagcgcgtgattgagaaaacagtggaggcatacagaaattgtgtaactaacgccccactgtgctcccttaaatccaaactggattgggctggctttcaacaagatatccgtgaagcagtccagtcccttgagctagacgctggtgtaggcattccctatatcgcgtatggcctccccacacaccgaggatgggttgaggaccataagcttctcccagcgctcactcagctgacctttgaccgactacagaag

SEQ ID NO: 2398 - DNA, 773 bp, Guangdong chinese water skink picornavirus
  strain ZGLXR1196821
ggggaaaaccccctacaacttttttcgcgcagttattggaatctgcgtaggcaataacatcgatgtcgctactctgtgcttcggtgcagagcggcctatgtcgcatgttgccaacatcaaaattctgggagagtcgcgaactccttaacactgccttgcctcgacggagccgttgttatagtgtcgacgggatacaaacattaaactaaacccacttgcctcgacggaaccccttaccttttattttattttatagtatgaaagtgaatcttgtatgaatgttcatagaaaactgcaaatgagtaccacgtctaacatgagagaatgatactggagaaatccaagtttagaagtcactacgaatcccagcggaaacaagggaattctgagcttctaataggcgtttaagactatttgcaaaattctggtgcgtaagtgatattttcattgcgtagaacgctggtaaccactccggctagtataagcattgttagtcacttattatgaaactccacactatcctttctggagaagcacacaaacttacatggtaaagctagaccattatcttaagcggtgagtacactgcaaccttgtaacaatgcttgtatgactactttttgtatatcttgagcaatattgttgaggtggacatgtccaaaggtaatgttgttgggaatggaggggtccattttcccgtgcacgtagtgtactagtattgggtgatagccttgcggcggatcaaccatgtattttaatccgttgactttcac

SEQ ID NO: 2399 - DNA, 774 bp, Hosta virus X
  TGB1 (TGB1), TGB2 (TGB2), TGB3 (TGB3), and coat1
gaagaatcagagaccggttctgcccaaaacatatcctcatcaattgcgaaaagaccccaacacaaatctctgactttgtcaaagctcagtgggacttctctgactttgcatacgccaacgacttcacggcctttgaccaaagtcaggatggagccatgctccagtttgagatcatcaaagcaaagtttcacaacattccagaggatataattttaggctacatggacatcaagacaaatgcaaaaatcttcttaggaaccctggccatcatgaggctcacaggcgaaggacccaccttcgacgccaacaccgaatgcaacatcgcgtacacacacttacgattcaacgtgccggaaaatgttgcacaagtgtacgctggagatgattccgccctctcaaaggtctgccctgaaaaagactccttcaagcaattcgcggaccgactcaccctaaaatccaaaccccaggtgttcccgcaaacacagggcgcctgggctgagttttgcgggcttctaatcacaccaagaggaatcataaaggaccccgtgaagctgcacgcctcctgggtgctggcaaccaaacttggcacactgcaacaaatcaaatgcgttaactcgtacggtgaagacctcaagctttcttacgaccttggtgaccatctacaggagctcctctcggagtcccagtgcagaacccaccaagtcaccgttagggagctggttaagttcgctggaaaagtcgaaaagcatcaagcagagatcagatcagtggcca

SEQ ID NO: 2400 - DNA, 775 bp, Wenzhou picorna-like virus 45
  strain WZSBei69068 hypothetical1
gtgaggatgaacctcacatgattcttttatggctcgttgatgagcaatggtttaattaccatttttcaaatgatgcgagttcgcgtgctaatgattagcagtggttttattaccattgccttaatataatttagcataggcggttttgttaccgcttcattatttcatatcaattcattttgtataactttgtgtgtattttctttttgttttaattttgttatgaacgggcttacgctttagccaagctatacgctacggcagtacggtctaatgactagagagactgctagaatttcaattttgaaacaggatgattgtactttcagccaatgatttaaactttttgataaaaagtgcgttacgttaagttgcaaatggtgtctgattcagactttggttggtcggcagaattcttacgaccttaatgcggcacattagctccattgcgggagtttaggccacaatttattgtgtagtgtctatgtaacaagacggtgtgagagatctttgatcgtggctctttgataaaaggcgttttttgcgaggcgtataagatttggattataggagataccaataaaatcataaaaatcggtgggtatcactttaagtagcgagaaagacatgccttcccaaaggcttagtttagggtgctgcttacactcgcaagtgtatttgcattatcttgtggatatttaagtggacttaagtattcgtgggaacaagataatggcttgtactacctcggtaagtttccgatgacgcgacgacg

SEQ ID NO: 2401 - DNA, 776 bp, Picornavirales sp.
  isolate H4_Rhizo_44_scaffold_11 hypothetical2R
atttggtagcccaaatatatatagtttattatctaaatgctttgtgcaatatagcacggcatccgatctattatggttgtgtcaatatttgacgctcactatttgttattacaatggaattgaccggattttccggcactattgtatatcaaatatgagtagagacaatgagacacttcgactgtattagtcgatgttagagagtttgagctctagtatttagatttaatctatagcatagattatttctgatggccctgattcgtggcattaataaaattaccaatcgccccccctgcatattacaagaaagtaaatcagtttttaactggcattattaaatcgtgtatccttttggaataaatccgtacaaataatgtttttacacaaaataacagaaaaatagataaaagtgtccaaacaaaaacatatacatatatatatacatttgacacagaacacacaatttttgtgtaggtttatggaatagttttcactgtcgaaagctattagcaaacatcgcaaacgcctctccaaatcgaatcacttatgtggtgtctgaagatttgacgcgaatcgtaaagatgtggtatagtacagtaacagttgttaccgaggctagcctagcaagttagtagaccataaactaaccttcttttgttacagcatcatgtaagagtcaagatgcagatttctatatctttaaatagaatatctctatactgggagaaaactacgtcaccaaaatccagatacaacagacaatttacacgata

SEQ ID NO: 2402 - DNA, 777 bp, Iflaviridae sp.
  isolate ecw123ifl1 genomic sequence.1
tttaaatctagtgcataacatcgcactagttatattttggagataagtaccataatatatttaaagtttgcattgctttcaatcgtgaaacattccttcagaattatttcatgctattaaccgatgagccgtgagtaagccctacaagcgcagtaaaaggtttttagaaagagttttcctttagtaaaaaggagacggtacgattataaaataataccttccgcatttattagcaatgccgaggtggagaagtaaagtggaaagttaatttgatactagtaataatgaaaaaaataattatgtaaaagtgggaatgaggctaaagattgccaataccccatgatcattcgcccagctaggcatgtaccgagctattagaaagaataattataataaataaatattagaagatgattaataagtactaatgaacgcccatggaagacccttttaaagggagatatattatcgatcatttagttaactcaaaaataagcggtttggaggactttaagcctataactcctagagcatctatttgtggaaagtgcagtgcgcatataattatatccgttgtattatttaaacagtcccattacatcgtgctggtgtgggatagcagctggtaattgatatttgatcctaatgaacttggtattttatttggactacttttcaaaacattgggcaggaattttaaatcaaaaactcctgctttaaaatcagcacaaacaaataaataaatacttaaaactttagaacatttcaattttaaat

SEQ ID NO: 2403 - DNA, 777 bp, Beihai paphia shell virus 4
  strain BWBFG40859 hypothetical protein1
caggggcactccccctgcacttcctattttaacttcatatgagacgtggttactccatatgtcgtagtgatgtaagtttgctgtatgattgcgaacaccgtaatgtgcggtagaacctctctcacaaaacaaccaagaaccacggtgatactacccgtgttaattgtagtacaaccccaaccaaccccaacctgttagcttaaacagtataaacctcgagcaactcgtgttaactaacgtagcgatattatcttatgttattttagtcaacaacttctttagtgttgagtcctagaagtaaaacaacactcaacttcattcctttgtattagttattcaggatcacctagaattatcgacgtaatcttttattttatatgtctacaaatattgatatggaaaatatgggacgctttcggtttccaatggtgagattcggatactcactgcggaggttggataacttaaagttttctgaagcttaggttcttatcactgtttatatatcttatatattcgtcggagctctgcctttcgtattctccctcagatatggtatgaaaatagactatgtcaattcatattcctctactgtgaaaatatataagtgtataatacatattccctaacacagatttagtcaccccattctttattagtaatcaacatataaatattagattcaaccgtataagacttggtgttgaatgaatcactttacttagatagtaatgaggccaaggtaagagctttaatcttccaacagaaacaaacaaa

SEQ ID NO: 2404 - DNA, 778 bp, Neofusicoccum parvum chrysovirus 1
  isolate CREA-VE-22AS3 segment1
gaaaaaggcttctcatttttgcacatgtacgagcgctctccactaaacacgttaggcacaccaggtaacgcccaagacccaacagctagctaactgcccaccacaacgccccactcccacgcggccgctatgagcaacagggtgccacgtggtttcgctcacatattctccgacttggataccgcgagcgcttgggacaacgcactgagcgaggttgaagaacgcgagccggacgagagcgtggttattgagggcgaccccgagatctacgagacactgcgcagtcacggaggcccgccgcccgactacgaaactagtgagatagctagcgtgtacggccaaagagcagccccacccccgccagtggctgggtgcgcccgcaaccgctttgcccgcaccgagcgccccgcaaaccaccgcgaagcgccgcagaggttggctacaccacctcctcgcccccgtcgagacactcagttctacagttcggactggccggggcgcgacgctctacccacacgaggcggcatcgaggaacagacggcgcgcgttgaggcaaggaaccggtggctgcaggctgaattggacctattaacagaggacgacctgcggttcaacaacacacagcacagagcgcgtgccccatccgtacgcagagagtccggattataccaacgcgtgagcgagacagctgctcgagaccggcgccagcgcgaacgccagcgtagcaaccgagggagtagcaccaacggctctggcagcacactcgtgcggtacggcg

SEQ ID NO: 2405 - DNA, 779 bp, Cylindrotheca closterium
  RNA virus KT12RNAV genomic RNA, complete1
tcctgcattgaccacatgcagggtttttcgggtattagccgttcttaattgaacgcaaatatttcgtttatttacgctatgaactccaacgacctggagttatttttgaactgcgtaagtaacgcagtttgatcaaaatatagtttagatttaacatttcgaagttttttagccgacatttttatgtcgtggtaggcaaaccattgccggtgacagaaatcccattgatatagtcacttaaataaaaccgttccttttaggaatgtgagcatttcagatttgggcagtgaatggggccccaaatcagtcgcacaattgcggcattacgttttaacgtttatcgtagtcaaaacgttgatttttacttagtttgattgtaaaactaatgtgtgttacgaaagaaagtcgactcactgatgagtttattgtgttccttagttggttacgctttaggtggtttgccaatcccacctttagttctcatttgagatataggaagacagtgaatgaattattagtaacgtaagtacgtccatttttgtggagcacgtgtaggtcggtaccgtatgggtaaaaccgttaacctgatcgtgtaaaacattgatgacacatgaagagacaagatttctatttagagatagggaagccaaacccgcacaaaaaatagagcaaaggtgcaatctacgagcctaatgtatttatacaaaccgtgagtccactaaccgaaagtatttacaggatcaaaacgagtttacagtggaaatttggtaatcaggaat

SEQ ID NO: 2406 - DNA, 779 bp, Guangdong fish caecilians picornavirus
  strain GDYYC830051
gggatttatccccatgctgaatttatcccactctaaatattagagtgttgtactcctctttggcccaccattgtacggggtgtgtaccgtacactagttatagtaagtaccactagttcttggttccttctcgtgttagtgcacacgttcttgcgctaagttttctaacttttctttgtctaaactttaaatatgtgcttcttttaacctggaggtctatcgtatttgtggagaaaagctattctaagcaaggaaaacaataacactttctatcttctttgtttctgggttgtcctcttaaccaagctggtcccatgggggcgtgggtaaatggccctatggattagccatagtggttatgtaggcgaaataaggggaacccccaatcatgttgtacgttgagttgttcatggtaactgctttatatacatatctataattgcccataagaggtaggctacgggtgaaacctctattgtagacggtaaggctgcggtaaagattttctttcaacgcagggggaccgctgttctgcagtgggaatatataaatatttatgtactgtgggtggatgactaggctaaggcttgattgtttaggggtgcttaggaagttattagaggaaggggttcacttatatgaaattgaaaaaggatgaacgctatcccacctcaaacttcctgagccttttcttggctctttcaggttttaaatccccaaatgattaaaatatatgatatagatacaaatattggtttttgttttgctgattagtagca

SEQ ID NO: 2407 - DNA, 779 bp, Wenzhou picorna-like virus 5
  strain WZSLuoI84329 hypothetical1
acgcattatgcgtatgcggggatcatcgagatgccggattaacttccggccagttggccttgaggaggtcagcctcctttcgagctagagtagcactttgggggttcgccccctctgtgctagttttgttttgtaattaaatttattcttttatgcaggtatcgaccgtgttaaaccagcggtcatcgacctgagaaggtcattaaatatatctaccaatcttttgtgatagagacgtaaaataaacctataaaaataaattgcgtccaatgtattgttattttgtcggtctgtagccggcactatatgttgtatgttaatcacaggctttttactgatcaaatggaagcctaatatgtccattagaactaatccgtaattaacggtaatatgagtattatgactgctcgtctaacagtcatagctccgcctgagagtgcaacgtaatgcaatcaggcttgagtcgggacgaattatcccgaccacatttgaggaacgccttcgggtagggcctcaaccccagacgagactcagtagcaagcgtaatgtgagttgtgcttaggtatagcctcattcatgaatttggattttgagcgcctttgtgcaacagcattgctaacttgtggattgagggtggccattgtgtccatggaataacacccaatgatgtccttgattaaatttcattcgtgagactaaagatgctgtgtcgactgtcgaagatttattctttgcaggacacctgcacggaataatctttgactcgtcgttcaataacc

SEQ ID NO: 2408 - DNA, 780 bp, Hubei picorna-like virus 33
  strain QTM27281 hypothetical protein1
gcaggtttccctcacacggaaacctgcgcacgcgtattaaacaaccattgcatctgcaatcacgtcttagcattgctagtaagttgctttaaacttgctagttgtcctttgactagttgtatgatccgatggactttaatatataatttaattatatattttaccggattaatggtacgacttggaccgtgtgaagtaaacagcttcgcacgttttcttggatttaaccatcgatttataggatggtcactgatgtatatcagttattttcttataaattgattcttgagcgagttttcttttaaaactgcatgcgaagcaatttattgtttcgtagattcgaggtgacattgatcgtttgacctaataaggcgactgaaaaaccaccggcttattagttagatcttggatgttgcttatgtaccgcaggggtcttatccgccccctcctgtaagctactgcacgggtagactggtgtctccttttaatattgtttcagacccatgcgagtcgagtattagaaggctgatcttccggcgactgtgtagatggagctaatgaggatggcttactctcctcgtcatcggaacctaattgctgggacgtcatcaaatacttgggcgatccagttcttgagcggcattattcgcacaggtgaaaaagtcctgctggtctagtgctagtgtgcctcgctcgaatctctgacaaggtagtctttatggttatctataggagttcgggaattagggtgtgaacgagaactaaatttcattttttacg

SEQ ID NO: 2409 - DNA, 780 bp, Beihai sipunculid worm virus 3
  strain BHZC37455 hypothetical1
ataggacatcctttacggatgtcctataggctcttttcttatgtcgatctacagtttgaactgctgtagcagtcgcatgagatgtattcatgctatcagttaatttgactttattaatagttgcgctcttctgggacactatttttattgtccctttagagattgctatatgaagtcctcttggacactcatttgcattgtccaattgtttaacgctagtattactttattctcgttggcagagtactgccattataagttttgaagcttagttcacttcatgaaaggctttctttcaaaaaccctttcaacccccccttttgggggcttacatgttcaaatctttcgttcggggaaagatttattgtttgctcccggcttcctctaattgattttagtgaaagctgatttatttgatgtaattcgcttagtgttttatgccctaaagagaatcccacctttactatctaacaaccgtttaataacctcgtgacctaataagaacgtggaacgagtaggaatgatttagtttaggaagaattggtctcttggagtataatttatcagacgtacttgaacatatttagctcaataccaaatagtaaccttacgtttaagcacgtgaaccacacgtgtagggtatgtagccgtgcccgatatttgagtaagaagtgctatttgtgagatacatataatgatatttcagttattaactttttgatattttaggaagttttgtttaggcctggtgcctaccgaaacctcacccagtttctaatt

SEQ ID NO: 2410 - DNA, 781 bp, Culex negev-like virus 1
  strain mosWSX37710, complete genome.1
ctggcgacaaatgtcacaggtgcgttcgtggaagacgtaaaatctctaatagattattatatcgctagggctaattttactaacactaccatagattacgataagttgagcgaagttctatcgaatgtaaaaattaacgtaaccactacgcagtctaaaccgtcgttttcttactaccgccggcttatagattactatatcgaccacgactacaatatcacacaccatatttttggtggcggttctatagttggtgataggactaaaaggtttacgttcgctggattgttcgagagctccattcttgccatagttagaccgattttacatataatacacgaatttttcttggaatttattgaacccttattagaacgtttgatagatatattcgcaaaaataacattaccattagttaaaacaatatttactttttcaaaaactttgttcgaacacatatacaattacataatcgaaaacgtacctgaacagacattgatagactttttcgaaagatttttaaaatttttatacagaatattgcatgttgttgttgaaaaatttgtagacattctaataaacactaacactacacataaaatttttgagtttgttgcactatatttaattctgttttactattttaaagcatatttcttatcattaattatcacaatagtaacttttgtaatcattggcatagaacgcaccgacgaacataccataatggttatattaatttttacttttctattgattcgctgctacactaacccacgaa

SEQ ID NO: 2411 - DNA, 781 bp, Beihai weivirus-like virus 21
  strain BHZY60786 RNA-dependent RNA1
tgacgttgctttcgggcgacgaggtaccgtgcgcgacggtaggacagctgccccggcggccgtaggatacaaggttggcgtctgttcagtatgaggtgaaaccatggatgtctaagacattgcattggtactcctgcggatggcacttgattccgaaaaccggcgtggggactttttgggcgcatgctgtgggcaggcatgtgagtagtgggcgctcgtggttttttctcagctctggtgtcgcaaccaccaccagcatattctgttaaacagtgtgctgtgtgtccgtgccatagtgtagagctgacccgtgctgtagggctgcattatggtatacgtgagagtgtaaaatagggaggccagtccctgcccgccaaattaccttccgtggtcaacccagcctcgaggggagaccctgagccaattcgtggacctgctgcggccaggttgaaggtgaaggccacccgactccgaatgccaacggaaaacagtcgggcatcctaccagcctatctggatgaacctgatgccccgcacgagagtgtactttaggggataggggagctggaggatggaggttacggttccgtgtcatgaagtgtggaagcgatgcatggcacgtaggcatccagaggccgtgggcggtcattgtgatcatggggtcactgagtaccgctcgcgaattttcatccacgttagcatcacattgtcgcgcagaggaagagtcccagtggtgttgatgtgtgagacgtttgtgtcggtgtttgccattcattacagag

SEQ ID NO: 2412 - DNA, 782 bp, Mirafiori lettuce big-vein virus
  isolate F_Meta-contig11655-RC1
aaaaggaaaaaacattgcatcaaaacagtaaaaacattcagtcacttcaaattttgactatggactataacaaagatctaccagaaaatgtaagaacagtgactaaaggtgaaagtaatgaagcagaaacggttagcaaggctgattgtgaaaagtctaatagtcttagcattcaattgttcctcaattatcatgttaaagagattacagttaatgattcaaaaatacaaacaagaaatatctatcttttaaacttgttaaagggatatcaaactagttacaaagaagtaacaagattcctgttcggttcttggttacttttcgaagaggagctgcagccaccctttaacataaaagccatgataataattgacacgaaccaagaattagtagacgtctcagaatacaaaggaatcgagctaattctagggaatgacatacaatcgtgtattgattcattttatatgcatatttacaaggaagatctaattatctttaatgaatcaggagactttatgttcctgacagatcattttaagattccaaaatattttgcaagactggatggacaacaaataaaagtcaggaaaattattgaaaaaagatatttagaagtatctaaagggaaaacactcaaggagagaacttagctgttttaataaaaaatcaaacaaaacaagtgagaactacaaccaagatcaattaagcaagtaaaaatagtgatatcaaaacaaaaaccaaccttcaagttctttgtcatactcctctgcataacgttaata

SEQ ID NO: 2413 - DNA, 782 bp, Wenzhou picorna-like virus 50
  strain WZSLuoI83448 hypothetical2
atattgcatttggtcctgggatgacattaaactcatccaaactccggaaccatctgtagtataagtttaaaatggttgtgttgtattggataccatatgtgttgaatttttgatgttattttgtacatatataggcttgcatcacatagacattctcccagtgggaatacctgtttttacaggaggtctcgtcaaccacacaaatatcatgcggaaagtgctttgagtagagcacttatcctaagttcataaaattacttactacacttaatactaataccaaaattgaagcggaaggaggctccgcataccaagtctccaaaacctctcgcgattcgaaggcgcagacagtcaactttgttgatggcgatacgccttggtcgtatgatattgtcgcaactcctgacgcgacgaccaagctctctggattctctgatgccgaactcggtgacttccttagccgacctatcaagatcaaggaatatcagtggacgcctggatcttctttgtcagttacgcgtttcagtccgtggacggaattttttagtaatgctgatgttcttgataaaattaatcgttatcgtaacttgcgctgtaatttgcgcctaaaagttctcgttaacggaaacagtttttattatggacgtgcattgctaacatacaatccgtacattgccaatgatcaagtgactgtcaatcgtgcatttattgctcaagatttgattcaagcgtctcagaagccacatttgttgttagatcctacaacttcacaaggtggtgag

SEQ ID NO: 2414 - DNA, 782 bp, Wuhan insect virus 20
  strain WHCCII13322 hypothetical protein 1,2
tttagctaggatagttagatagcataactatgaatagatcaggaaatagacgtggtaataatggatctgtgcggttaccagcacaaattttggccagagcgctgacgcaacaaatgaacaacaagtcagcaagaaaaccccgtcctcccaaaagtaggcgaaaacagccgattgcacctggcaatcgagggcttcgtgacaccttcgtgttcacggttgattcactgaaaggcaattctgaagggaccttaacttttggtcctagccttaaggagtgtcctgctttttctgggggagtgacgaaggggtaccacgagttcaaagtggtttgggttaggttcaccttcatttctgaagctgcctcaacctcctctgggtcaatggcatatgagatagatccacatttgaagttgacaaaactgtcctccaccgtttttaaattcggaataacaaaaggaggatcaagaacctaccgagcctcgcagatcaatggcaatgaatgggtatccacttcggatgaccaattcaggtttctgtacaagggcaatggagacacaactacagctggtagttggcaagtgacaatgatggtccatttccagaactccaaataggtagacgacgacccggcacctgctccggtgccacctccatctccacccccctccccctcacctagtccacaaccaacaccagatgatgagagattcattgtttacactggtgttgcaacaactcgcataagagcaaagacaaccgatgatgcattaattctcaacccg

SEQ ID NO: 2415 - DNA, 783 bp, Nilaparvata lugens honeydew virus-3
  genomic RNA, complete genome,1
tattttatacccccatgcttcatggcagatgcatacagtggagatgcatccctgtcaaagcataccctcttttagttataagattttattattattatcaaattaggcctaagtataatataataaaatgctcgttactgaacggggctcttttgagtgtataaaaatttggttagaatgtaagtttgatgactccatcactcgcggagttatatatgaattaaagaatgtatgggcattccctcacaaatatgaaacatgaccctataattatatcgggaagtactcctatggcgtttatgttgctacttactgtatacatatttcggcattagttgtcaccatgcaagattctgtcctctattatgcatttgtataggccatccgacttgtcgcctaaactatacagatgtgtattatgataatgtttcgagtactagaactacttattagttattccatatatgcataatcatggtattaattgtgagattcatatattttgcgtcagtcgacacatggtgttttataaaatggggttgcattgtaaacatttcaccgtcttcgtcgatcattccatatttttttttaaagctcaaactcttctctttatctatcttttcggagtggcgcccgagatttataatctcattaaattgagagtaaattgagccattttgtatttcctttcttttcttccgtaaaatgtttagctactccgaccaccagggataggtcgatcatccacccccaagaattacgaatcagatacaactaaatacg

SEQ ID NO: 2416 - DNA, 783 bp, Hubei tetragnatha maxillosa virus 3
  strain SSZZ2994 hypothetical1
ggggcttttcccccatggctctcattttaacggcaaagataatcatgccgatagttaagctctcagtgatcttagatgtgcatttggtatacttagtttcgacttttatgcttcttgtacaatctattacactgttggtttttcatgatttcaccctttaagttgaaaaacttattttgattttgattttcgaatttagaagtaagacccctttgtttgacttaacttttgttattttgacattgggcaatccactgacttttgagaatcaccccttgtggttagaagaccacgtacgtaactttagcatagatccttggatagctagttacggcgacgaagtctacttacactttaatttactaagcagagagaaagtgctgacaaattgatttagttcgatttgtcggaattgccgaggtccctcacagaaacccgcctctttagtattttatttgttgtagtagcaggctttgacgatgaactgatataagtacaaactgatcctttggtcggaccccgttcacaagtcttggaacaacacatcgcgaggtgtgccttggccggtaatcatcgctatggttacccgtggacaattgggccccccggctgcgctagcaagcaggaggaacatatcaggaattcaacgaagtatcttttacctgcgttttaataagaaatgcaggagttgataaatagggcttaaactggaagcgagactgcagcggctaaagcagcagtaaatggtgccagtgtaggtgttttctctttttaaatctcatt

SEQ ID NO: 2417 - DNA, 784 bp, Shahe arthropod virus 1
  strain SHWC0209c12762 hypothetical protein1
gctcttccgatctggggaaacccccctgttctcttttgaaagctgaagtattggattttgcgtgatttattgagttaccgcagtttcatctgaatttattccggattttgcaaaatgttcttttgtttaattgataccagcgggattttatctaacgaatctagccacacttttaatcattagcactctttagtacaacggcaccaaccaacccccccttttatcattttaatattcttctgtgacaggcgccttagcgcagtcagtgtttgaggattctttatccatttcggaccgcgttatctatttatagatcctttttacgatttcacactgattgtttttaacaaccatcacccttatatttacgtgtacaaaaaattataaaaacgtcgcaagacaccaaaaacaactgtcttttcatacattagatgcaataataacactgatgaattagactatgaatcagatttacctatatgatactaaaacgtcgccgaggcataaagagcggacccaaaaggaaaacctacgtcaagtattatatctgctgatcagccatcttttttattttgtgcgctgtttttgcggacactttgtaaatgctatgtcgttgctgggctcacttttcgagcaataattactagaacccaaaaaatgaataaaggtcttacgggtattcttaggcagcaactttcattgtcaatccaaacatgtttcggtgtttggttctagcaattaatccttcccacgattcctattttaactctttttaacattcacg

SEQ ID NO: 2418 - DNA, 786 bp, Trichoderma asperellum hypovirus 1
  strain TaHv1CBS 131938, complete1
gggttccgactaaggtgctgtttacagcttaatcgggtgaacgcgcccaacttcaatgggtcaccaatttgggttcgtgatgttcgaaccattggaggttaaatattttgcgttcgtgtcacattgtgacgtgacctatttaggtcgtagggtgagtccctgtggtccattaggacggtgcctctcttggggcgttgcacgaggtgcagcatatcaaaagtaaaatcaccaaaaacaatttaaaatatgaaatgataaaatttgacctgggacgtcattaaactcacggcctcaattgccaccgctcatcggtctcagtgaaggggtgaaagcggccacggtcgttagtaaatataactgggaatgagtaggagagtctgggcccgattaccagttggctgatattaagcggatagattttaaaggttcacctccaggctcaatcggactgagatccgttgtcggcagtaatgagtgcaactcacaattctggctaggtaagacgaaaagacgttaaaacctgaggtgttcgatcaactttaagactatttcggttaaatatggctgggtgggaaaggtagtaagctacccaaaaccttaggctgagatgtcactttgtgtccggtaaaactccggggaagcggaaaaatgcacgctgcacatgacacgagagacacttgactgtactttggtcccgaacgggagcacatgggggtcgatgacaattgggaaagaccaattgacttggcagtggaaagaactgctattcaccatgatcacatataa

SEQ ID NO: 2419 - DNA, 786 bp, Mobovirus A
  isolate MBOVA, complete genome.1
acatgggcgtttataacgccctaccagtcctctttgaacgtgtgctgtccatctatcagcgcaccatggtctcacgaccatgttgttcaataggtattctaatccaatccctattctcccacaaaccttcttgtaactctgttaagccttttacatccatgtaatttaattttctccacctaaaaggatttcccccatggtcctttttggctcgaacaaatgctacatagggtcttgttttctccccctggctctcttgccagggttccataccccaattcctctatttccatgatttttcatcatggtttatttttactgtcttcttattttctgaggtgaccaactcctaagccgactgggtcgcggaagcccggactcctcgcatcactagggtgcgtagcgatgtaggcgaaaatattggttgctagatgcatacatatagtgaattgatactacaccaaactctgttctttttgaaactagctattttctaagtaaggtaggctacgggtgaaaccttaccattgcaggtacgtgaaccgcaacggacatttggccgaagactggtgtacccacgtcagttataggacctcttcaacgttggtggacggcatgtcactgattagttaggctagtgaatttaagttcagggggtatcttttagcttaagcgtgtattctagtaggacttgcagagcctccccacctaggaggatctctgtttatagccccttttccttgttccgttagttttccacacttttacaatatttgatgatttgtt

SEQ ID NO: 2420 - DNA, 788 bp, Bovine torovirus
  isolate BToV-China/BToV yak-XZ01/2019, complete1
tgacgtattcttagttgattttgaagccttgaaataaagcttttaaaccccttttacggtttgtccaccatacggacattgttcagaccgcagtgtcttgtcaaggaggttcagccttgacattacttctctgtgaggaatctactcagaaatactgcttgcgtactagtagttacaagagttgacacttagtacttacaagcgggttcaaccgccctccggaacggtggaaactccctcccgaacgtgcgcttgacgtgaccaatttaggtctagctttctgagaaatactccagggctgtatttgaccacatctgttattcatttgtggttgtccacaaccaaacatcgtgtgactcacctccagctttgctgcaggccttttggactaaacgagtcgcacgttttgtgactagttttaggacttttcacactcccctaccgccaacctgattcttttcatccttaagttttgcgtttatacgctattttcttacggttggcagtttgtttggttgtttgcacagtttcttttaataccaatttttactgtgctcttagtttttacagctaaggctgttttttatttactcaagttgcttgaagcagcttttacaacactagttttagttttaattgaaaagttaaagggcgtcaggaaacaacgcagacgcccttcttgtggtgtctagttagtcctaatctggcaaacaaatatcaggttgttgactccctttggagtgagacctacgagtatcagtttgcttattttggacacccatataaaa

SEQ ID NO: 2421 - DNA, 789 bp, Picornavirales sp.
  isolate muf160shi3 genomic sequence.2
tttagtgttgatgggcttggccgcaggtgcttcagcaattggcactgcggtcaatgctggtatggctgctaggggacagaataaagctattgaccaacaaacttcagtcaataacacaaatttgcagatgcagaaaaacgctatgaattatcaaactctaaattggcaacgtaatgtagatctgtttaaacagagtggattacctggttggatggcggaaacccaaggtggaggtagtggtaatgttgcgtttaacgatttccctaaaataactcaacaagtagctggtaataatttctcttcagcagcaatacctggaaatttagtgagcgattttggcaattctatgatgcaacaagtgatgggtatcgctaattaccagtacatgacaaaacaaggttttggtccaaaagtatctaccatgtcacaaacagatcgcggtgacattaatcctaccagcacattttcgacccaaacagagccaaatcctactgggacctcgatgactgcgactccaaacacccctgaagaactttggggtgatctgggaggcacagtgcctagtacatcctcaacagtagctatgcccgatgcgtctgcagccgctgaggcgattccagctgcagcgccgattgaagaatagccctagtaaacgtgttacttgtgaaaaacatccgcggattttttcacgatggtacagttgtcaaaataaatacatgggcttgaaagacttgaggatttactttgaccttttgtgtttcttggataataaccttgaaatattcaaag

SEQ ID NO: 2422 - DNA, 789 bp, Pearces Creek picornavirus
  isolate A888, complete genome.1
acccctggggcccacgcggcgccagtactctggttcgcttagaacctttgtacgcctgttttccctcccctaaataaattaagatcaccactactgtggggagtagtccgactccgcaccgatacgtcgcaccagtgaactggttcgcttaggacctttacacggagtagatggtgttcccttcccccgtaacttagaagcatgaaccaaccgaccaatagtggcgttgcatccagcagcgcagcggtcaagcacttctgtttccccggcgcgaagcgtcgttacccgcccagcctactgcgggaagcctagtagcaccccaattgatcgcgcggttgcgttcagccacaaccccagtggtagctctgaggaatggagctcgccgtccccccacagcaatgtggtggcttgctcgcgcgtgtcctcgggttcactcaaagagtgttcaccgcaacatcaagtaaggtgtgaagagcctactgcgctaggctggttttcctccggagccgtgaatgctgctaatcccaacctccgagcgtgtgcgcacaatccagtgttgctacgtcgtaacgcgtaagtcggaggcggaacagactactttcggtactccgtgtttccttattttgtttcaatattttatggtgacattgactgatatctgtgaatttgctcgctgcccctgaatattgccttatattacttaatagcatttcacgaaaacgacccagctttcaattgagcttattaactttgctgtatctttaaaccagatccacaagtcggtgtaca

SEQ ID NO: 2423 - DNA, 790 bp, Beihai sesarmid crab virus 1
  strain SCJXSX39422 hypothetical1
cagaataatagctacctgcaagtcattattgacttgcaggtagtattttatgtaattgtgcctatgtttatgcatggttctacggacctatgtttatgcatggtcaccaaacatttattattctgggagaaggatactcctccacattatgtggtaaaaaaccaaatcacggcgtttaaaggcctgaattgcttttagcccactccctttctatggagtgaccaaaacggcggtagggtagagattatatctccctagtccgcgtctttgctgaatattgattcagaaaggaatggcaattcattgtgatgaagttttaggacagactttaaaatgtcctcgtgtgttatgttatatgataagagcagtaccagattttctgctctacatttgctctatgatttttcataacatatcgtctttaagattgtactttattgattagtttttgctggtttagacctagctattaaggtgagtcgcccactctgcatacttacgagtatgtcgaagtaacgatagtctttttagtaaagttgcgcttcagatggatcgtgatcaccacctgatactgtctttttaacgaagctctgaaagtttaaatacttataaagcatgtgtttgttaaagagaccaccgtcctgctgttgttagttaaaaataaccaggttaccgaattcatatgaggaagtctttaagaagatatgggggttggtactcccgaacggataattagtacctgattagttaagaactcgtgttggtcgtgcgttaacggctgtgcccattg

SEQ ID NO: 2424 - DNA, 792 bp, Brevicoryne brassicae picorna-like virus
  isolate IL, complete1
ttgaaaagatcgtgtagggtatttaccctacatgatctatcatattcttttcatgacgacatttgttcttgacatgcaccatatttgttctctttgaggattcttatggtatatgttacaggattcttgtcgtagtcgtttggatatgattattggcacgtcccgctgattgcgtaacaatcaacaatttagtctataagctttcttttcaaaatttaaataattaattcgctctaacaacattagaattcttctatttcaattatactttattaaccaaaaatatttagctttaagactagctttgtgagctttgcacacacgtcatttatgtattacactttagaaggtaccataaatggacaatttcggttgtcttggctgatacgataatcagtttctattctaaggcttcgggtgaagtgtctatcccgttgaaattaacaccgctggataagagtctttaaacttactatctgagattgtatttagtacaggcgatagttttatgtaatctaggctggagacagtacgattatataaatctagtttaaagaatttctgtttggtttgtgtatggcatattcagtgattatacgtaatcactgtctcgtttataatgtttaatatttttcggcaaacggaaggttgtagttactctgagagatttaataccgtatctaatagaatttagaactcatgatttgttctattagtccagcatattgctataccgtattattttgcctttagtagcgttttaaccaactgacttattagccgcatttacct

SEQ ID NO: 2425 - DNA, 792 bp, Beihai picorna-like virus 1
  strain BHZC36988 hypothetical protein 12
atattgtacatattgtcctgggaagacgtaaaactcattccaaccccccggaactattcgtgggatgtgtaagtttaaaatagtcttgtagtattggttaccgttaatctgtaaatttttgtgttatttgtatttctttctggcttgctacttgttgacacttccctcgtgaagtacccgtatttacgggaggtttcgtcagccacacaaacactatgcaggaagtgcactgagcaatgcacttaccctaagttcataaaatagctttctaatataattaataataatgataataataataatgaaggaggtgccgcgtatgacatttccaaaatttcaaatgaaacaagtactcaaacaactaattttgttgatggagacagcccttggtcgtatgacattgttgcaacacctgatgagacaaccagactcgcaggtttcactgacgcacaattaggtgatttcctcagcagacctattaaaattaaagagtatcaatggactccgtcatcatcgttgtctgtcgcacgttttaatccgtgggctttgttttttgcaaatgctgatgttcttgataaaatcaatcgctatcgtaatttacgttgtaatcttcgtcttaaggtgttagtgaatggcaatagtttttactacggccgtgctttactttcttataatccttttgttacgaatgatgaagttacagtgaatcgaacatttattgaacaagatcttgttcaggcttctcaaaaaccccatttgcttttagatccgacttcttcgcaaggaggagaa

SEQ ID NO: 2426 - DNA, 793 bp, Toad HDV-like virus
  complete genome
ttctgaagaaaaccccgggaaaggaacaaccccgagtttttctccctttcgacagccgccacactgtctcatcagctgggataggggctctgtcgagccccccggcccccaggagagagaaaaactctgggcaagagattttgatctccttattgagaggaagatttttggaagattccgggagcgggaattgttcttccgggcgagaccgaccgtggcccatcctcggataggtcgggccctctcgggactgctgtcgccccggagactctcggagatggagatgcctcggcgcgggtggcctcggtccaggaggcgaaatcttccgtttcaagtcggaaccgatggagtcccccttgggtccttcgaaagctgaaagaagttggaaaaatcgggcatccggagaacctggaaatggactttgaggagagtgttgctaaggctttttacctgtcctgtttttcccgatttcccgcatgtggctcttccgcaaagaggggctccctgaccgttttgtccttcctcccctccgcgcctttcccagttttgctccgggaaagaatttgacagtttcttctccagatctctcgattcccttagggccaaactagcccccgggagcggcgcgttctcgtcggttccctccccccccattactaacaattaccgtctgagttcattgtccccaaatcctcaaacgggatcgcccccgggctgcagcgggagtctaaaaagccttttggcataatagttctccgctgagtcggaggcgcggtcccctatttttgaggaa

SEQ ID NO: 2427 - DNA, 795 bp, Beihai picorna-like virus 21
  strain BHZY60822 hypothetical protein1
taaagtctccatgcgcattatgcgcgtggagacttaaattgaattaattggcattaatatatgcccttgaaccttgtttacgagctatgaagggcattatgatgcccccatacctcgaaggaaagaagcaagctttagatcctttattgtaggatcttagtttgatttaagttatttattttattattctactggggggtggtcccctacaaaaaccacacactatatgtatatggaaaccaaaacgatggtagtagactctctgttggagttgaagtccatggccttaatggcaagagatatcgtggaatgccaccacgataaataaattaaataagcaacacgaaataattcgtgcattttatcggagtaacccgaagtgcgaaagtgctcgaaggtactcgtgtatatttgatatgtatccttgttcgggatgctgtctagtagccactgtcaagcctagcagtgtagtattataatatattacatcattgatagtatatacgagtataggcggagagcagttagtaacccttgtccgaagaggaaaggtaggtgcaagcagtattgtaagccttgttgcctgacacatagtctaaggaaaggtcggtctcgcccgttagaagtatcggattgtttagagtagttatatcagtagacgctcgttcaaaattgttaactgaattcttaatatttctatagcagaattaaaattgcaataggactcaaattagaacaaaagttattataaagaattaaaacgatatttttgaggtaaattgacaaagacagaag

SEQ ID NO: 2428 - DNA, 796 bp, Yado-kari virus 1
  genomic RNA, complete genome.1
tggataaaaggccgacaccttttatcccttctatcaattctttttgatagttgttttctaagtcacatggtagcgaaccacaattcgttctttgacgttgttatgaactcatatcatttccataacgtaattcgatcaaaagtcttggtggtgtgtacttcctcacaccttgtcgtttattttgatgcactagcaacgacgtaaaatgcatcctattttacaatttcctttcacacgtggagttaaaccttcactttactctttttcaacgtgtgcctagcattgtatttgaaagctaagtaccctgtgtcatatgaatcacacatccttgtgatatttctagtggtcccaagctcgtttcagccgagtataagatgacagtccctgctgttaattgtgtcatctttagtcccttgcccccctatcttcgtttatttgaagatagataggatttggtttagccacagtgttctatacctagatagctgcgggacgtgattccccgttgggaagctatttctaaaacaatcacaaaaacaggtataaaattaaaaatcacaaaacaacttaaacatgcatggttataagcatgtgcgtgactgagtatgtcctaggttttgcctaagatggaccactacttcacgttgttataactatttgaatcatacactattcatctgtgcctcggaccggccttgtaggaccccgacccatcatgatttctatccgcaccaaacatgtcaagtcaggacctcaacgccaatcccccgttgtgccagtccattgattcatccct

SEQ ID NO: 2429 - DNA, 797 bp, Beihai picorna-like virus 36
  strain BHJJX25939 hypothetical protein1
cctgcaggtattacctgcaggaggtctgagatctggaattcgtcgatctgcgacgacaggctggttgtttactagctttgttgttgtttttgtgcgtggaaacacccgtttcatctttgtatgtatgtatattagttactatatgtttgtttgccggtgtcgttaaaccggccatgccccgcatatgcggggctagtttatgttgtaaatattgtatcctataataacgtatggtccctgttcggaccagtgtatgaaaaagtggactattttgggttggagcccaacatggaggaacttaccccagtagtttgaactggggacccggggtcggtttaacgagccggccccgtgagttctggattagcatggcgctgtccacataaatacgtacgacctttattttagaataataacctttgcggatgccttagggtgtacgcagtatacagacgacaggtcaacattgacgtttttggagttggtccgtgcctctgtgctgatcccgaagcacatgcgattaaagaacgacccgagatatggtatcatcatttgtagttgtacgaagcgtatgtatctgctattgtgtaaacatagtctggtaaagccatgatttatagcatggacaggccagtttgtggtactgaagcagtagatttgttagcatttcgttagtggattgcaagtgatggtagcgaagtccccaagaaattagatgttgtccgatatttgagcacgcgacttttgtcgcgagctcaagtcgtcagttgttactgacgaacttgagactcgcgttt

SEQ ID NO: 2430 - DNA, 798 bp, Beihai picorna-like virus 29
  strain HOU158675 hypothetical protein1
cggacgttcacgtccgtatgagatatagtttagttggcagcttagcccgctgcccgggttttacctgtattttaggtactgtttaggtttgttcttgaatgggatcgcaggatacatggtagaaccatgattctgtcccatttttgaggaaacctttctgatactgttacgattgacttctatataaacgttttttaatgctctgaggagtaaaccttataagaaatctagggagtccaccctacgacaaaacaaaccccaatgctcatgagggcctgcgcatgtcgcttttattgtgtagaccttccgtacgtcgatgagggaagtttaggccttgagcaagcctttagaacttcttaccttactttcgagtgaggtggcccacagtggtgtggacgttcttgattggaaatgatcatattaggtcatagtagtgaattatgatgatgttatgcataattcgaacttattgaaactttgatatggtaatgtcggtttaaatacgcaaaagtgtgtgagactagagtactcgactttgctaccgaatggccctgttattggaaatgatatttgtatcgatggcgtattctgattctgcaggattcttacttatgagatgtgtgagttttatccggtcataagcctaattatcatagtgttggatgtggtgagggttaatagcccaccagcttctatgcaaaagaacttagctggcccaacacgccagacgcctagccttcgggagggaattttatcgttactaaaaaccaaacacagagcggggagagcttgctgaca

SEQ ID NO: 2431 - DNA, 799 bp, Beihai weivirus-like virus 15
  strain BWBFG27289 hypothetical1
gacatgtcactccagaattcgctgcccccgggtcggtcagggggtggcatatggccgtggagaaggccttggtcgaggagtgtcggccatgcatgtgtggggggccggttgcccaccggtcgagatgggggccctcgagacattgccgactcggggataggcgagctcaccgctgaaacccttggcttattctttcgtgcgggcgtggtgtgacgtcccgtcaaaagcctgctggagtatcggcactcctgaggtgcaagccagtacgcgctgtgcttcgaggtgggcacagttcctttgccagggacgaaggcgtaccaacgtcactcaccgtgccatccagagcaccaaccatttgtggcacgggcgtgtgagtcaggataccacatctgtgggacacccctggtgttgtgtggaaatcggaccgcgacggagcacgccacgtcgcaacgggcaccgtgggaagcacatattggggaggcagagtgacggggaatggactacggcaccgctgcgccgcggaggcgcctgccctcgccattttggcagacggcagatacaccccacaattttgatcgattttccgcgcacacccgcgtgtcggtgcgaccgactgccaattttgggactgtatgaagcgcgtctgttctcgcgcgtccgtgcctatagcggacatcacggtccacaagagacaagtgatcccacaccgactgaccgagctccggcagccgccgggggaggttttgcacgaaggagttgagacgttcggggtctggagagagtggtaccgtcgtgtgcc

SEQ ID NO: 2432 - DNA, 800 bp, Beihai picorna-like virus 24
  strain BHZY60459 hypothetical protein1
tgcaactgtgctttgcagcacagttgtattacttacggataatgtaattcggtatattttatcgattatgttgttgttaacagtttatgacactctaaatgagtcttacatactggcgcctaccgcggcttcagtatgtaatcaagaagaaagttccatcgactgtctaacgacagtcgtggtttctctctttatttgtattataaattgctaatatcacaattatattattccgtatattactgtgtatttctgtatcatgtgtaatatgttttctaatcacaggatgcttggtcaaggacttaaaagctcccgatagggcaccatgggagaactgattattaattcagtatcttaaacagcagtattgtctaaccacgactagcctgcgtctattttctcttttagttaaaataggacaagcctatcaccttgcgtttttgttaacgcccactagttccgattaaccaagtggttaaacttagaagttaatcaattaagagatgcattggagtcctctgctccattactctataaaaacctaccccaaagagtagaacttgagggatgatatgattatagcctaactaactggcaccataagtgaaaacgttagtccccacacatgcccggtcgtctcttgtgacggacggggaatcgtagggtcatgatcctcacgacttgaaagagcttgctcttagcaaaggatatacatcacggagatctaaggatcaatgaagtgattaaaacgtggcccgccgtattgaacatacaaacccattaatttcgggtttagttca

SEQ ID NO: 2433 - DNA, 800 bp, Beihai octopus viurs 1
  strain BHZY180716 hypothetical protein 1 and1
gtgctgcagcgcgtaagcgctgtagcactccataggtatttggacctcaaccggtccaggtatcactctacatattatatgtgggcgtttcgacgccctgctgtatttttagagcgttaggtcgctctgcaatattgcgggcgtcaagcccgtagcattgtagaagcacagtaagattttggaactcttttaaccaggtatcgatggtgttaaaccagccatcaccccctttttgtcctgagctggacgctaaacatgctcgattgtcctatagtaagacattaaactgctttttgtccatgagtaagacataaaatcgctcaatagtcctagatatgacataaaactttctgttgtggctttaggaaccacacactagacttaaaattctgtattgaagaaatgttcggatgtagagatttaagcaacctctctgcaatacgcaatatgtaagacgtatatgtcgattgttgtgcaccctctatgatcgttccacagaattaccgagccccgtcgtgtagcgagcacctcggcggatgattagttaagccatgtcgaatatgtaccgaagcgatcctgcgtttttaataaacaatgatcttcggagccaattacatgacatgcccaggctactatctgcgacgctgttaggtacgagtgtaagaaaaatttcttatacgttgaattttgatgttcgagtgccatttaaggctatcattataggttattcctatgtacttgatgctagccaaatttaaaacctatatggtcagttgtgaactgtgaatcactcggcttgg

SEQ ID NO: 2434 - DNA, 801 bp, Heterobasidion mitovirus 1
  strain an1 RNA-dependent RNA polymerase1
ggggtagactcctaagataggagcctatctcggccaaagacgaggccgatgatgatcagattcatcatatgaagatgacatcaccacaacgcgaggttgcggttaggaatgtcccttgattagtaaccaaggcacaaccctttgcataaggaagtagacgttgggttgaaatacctaagatccataagatttgaagagataacatcaatatcaaaccatatgggttatagtatgtcgaccttctattctatctggtgtcgaatcagattagaaagacaggacgaaccgtactagacggcccttatttgcttttgcgatccgcagaaggaacctttggaggttcttccggggtggaatatataattccggagatcaatgactttcgtcattccaaagattaagtgttgagtgctctgatcggctgtatgaaaattacagtccttcatcctagcacttctttaatggggtgacaattttacaaagttattgtgaaccagaattggtattccaataagcatatactcatacgcttattgttaatcacgatattgtatatgtggaaggataatccaacaggtaaccttaatggtacctgtgaggcaactctgctattaatacgcagagtagaggtaagtaattcacctcacccttacaggaggtctaccagactctcctagagtagctgcagccccttggacctaatgtgaaaacattgggtccttaactaatcccgttaaacggagaagagggaaactgacttttacatgacctagttaacgatacaacctttaatcacaaaat

SEQ ID NO: 2435 - DNA, 801 bp, Niviventer confucianus picornavirus
  strain Wencheng-Nc42-21
cagtgtgtatgccatccctcatagcatgcctatgactgatggattcacaaccctttcataacccctcccctaattcccaccttgcaaccatacgctttactccgcttcgggttttgcggcccgatgtcgtgaagaaacggttacgcaaacttagtggcgaacggggcctgccaccataagtggccccattagaagaatgtacgatccgcccagtaggcggccaccatccaggtggtttacgggcaagcacttctgtttccccggtgacgttacataggatgtccccacgtctgaaagtgactgatccgttacccgcctcaccactgcgagacggttagtacgatgtaatagctgatcaccgttgatccgggcgttttccccccgcccagaaacatgtgatgaggagcggcatccctcctatggcaacatagggcctctcctgcgttggcacgtgggctccttgagcacggtgtgatgtgaaagtcatccgaagaccttattgcgctggtgttgagtcctccgcccccctgaatgcggctaatcctaactccggatcatccgccggcaagcccgccggtagggtgtcgtaacgcgtaagtctggagcggaaccgactactttgggtgtggcgtgtttccttatttgtttggttgattgcatatggtgacaattcgttgtattgacgtttgccacttcccctgcaaatattaccaaaccaggtgctgtttttgtgctaactcctgccttactattaccaagaaattttcagagtcacttattccctcggttgtttggagcata

SEQ ID NO: 2436 - DNA, 801 bp, Beihai picorna-like virus 79
  strain BHBJDX18844 hypothetical1
cgagggggtagtattaactaccccctcggtatatgaagtcatagacgagacttcttaatttacacttagtctattctttggtcgtatggtatctacgggaccatgcctcacgacgtccaatgtcaataagtggcgctgacacgctagtccgctataagcgggtcactggccatgagatgaaaagcctattctgaatatgattatttgtaagttatttacattcgcgaaccccataatttgagatacagtatgttcgcttcggagcatcctggagcattaacggttaacagttaccggctcgaaattgcacaacaacatcgtgcatcttgaccatttactttacgccaatgatggagtaaccatttcaccgacaagctagtactcttgtacgaaacactaggattgaaatgttcgaaactgattttagtattgtaggtcaccactttttactcttacgagagaggacgtagctttcccacaagcacgtaatagtgatgaaaattcaccattaagggagcagtaagcgctgtctgaacaaatgctgcgtatgtgcacacgcaatagaagaatgcacccttttaccttgccggtgctctcgcgagcatcgggttcaagtccttcacgaatttccgttgattatgacgattgtcccagattttctggttgtacgataagagtcaactgataataggaagtagtgaacttaattgtttgcaatgtcccttggaggcgcccagacatcaccaaagccatcttttggctttggcgttatttgggcagaacctggttaccgaaactatc

SEQ ID NO: 2437 - DNA, 801 bp, Beihai picorna-like virus 49
  strain BHZC36855 hypothetical protein1
cttctttagattagtagtaaatatttgtttctgttcattggaaaactatcagtaatataattattgttgttatgactgatgtgcccaatttttggaacggtaacgactgcgtagcatcccccaatgtaggactacgtagacgcttagtcggtaattgtagctattgatagttacatttcgtgacaggttgaatgaatattaaaaataatcatagtacaccaatttgatgtaggccaacccgttgtttgtatatgcatgtttcatatttgcgtttatatacatttgacaaacagtttttcgtaaaaagggctttactgttgtgaataaagctcgcgccgttttgatgtggtaagttaggccgcaccgttgggcgcacgagatttgaagaaaaaacaaaataaaaagaaaataatgccaaagaaaaaggtagcagaactaccatgtatgtttaaaagtgctggcagcaaaccttgaatgcaatgttggagcatggtatgagtacactgactcgtattgatataagaggttttctctgcatagtcactgcaagttatacggttcacactagtatcatatgttacaaatgcgtttgttgagtagttgtttagtttttaatgcgttatgcaccctaggtaattagtcaagtagtatgagtgatcatgtgcgttgtttttatgttacgtccagggtaaaagtcccaggaacagtttaccgctcctgtagagcgggtagccgagctccgggcgataaacgcagcacgcaaagaccagagtgaacacagttaagtaataagtaagtaat

SEQ ID NO: 2438 - DNA, 803 bp, Plasmopara viticola lesion associated Partitivirus 6
  isolate1
ggctcgtcccaagtcgagcttgcaattgctaattcattcctcttttcccctctccaccctcaagctctaaagcaattatagcaaccatgcagttcgagccgccgatcaagccagccgacatgaccattaagatcactgatggagacaatagcaaccaaagcatcgattcgaatggcatcgtgattggccgctggaagaccggtctctttggtttcaccgattcgatagtgcccaatggcgtcatgtcttgttgctgtcccggtcttgtggtagctcagatatcggctcgtcttggctttatgccattttattacgtgctcagtatctttggagggctttatctagtagcacttattgcggtgacaacccacagtcgctttttcgactttattatatggttgtgcgttgtaatatcggccctctccatgatgcgtttgcgctggcgtattcgatcacttttcagtattcctggatctcatgctgaggacgccgccttcagtttttgctgtggatgctgctcgatcgcacagatggcctcgcatgttgaatcgtatgagccgggcactttttcatttgccccacgcgccacacttcaaggctactcactgaattaaggctttattataaaatagaccatcactatttgcctggaggaagatgggtacgcaagggtacagatataatctctaatactatttacataggcgatttccattcgaaactgaactccgtaactcaatctttgctatactgtcgcaaatttttcagctcttcctacgcttttttcgtaacctctacccact

SEQ ID NO: 2439 - DNA, 803 bp, Human parainfluenza virus 4b
  strain HPIV4b/Seattle/USA/SC0496/2019,2
tgcaatcaaagcattagaggtgaggttagacaggatcgaagggaaagttgacaaaattatgctcacccaaaatacaattcagcaaacaaaaaatgacactcaacaaattaaaggctcacttgcaacaattgagggcctaatcacaacaatgaaaataatggaccctggagtcccatcaaaagtaagtcttagaagcttaaacaaagagccagagcaagttccaataatcgtcactggtactggcgatgtctcaaaatttgttgatcaagacaatacaataacacttgatccgttagcaagacccattttgtccggaaccaagcaaacaactgatgaaaggagagcaggtgttcgtatagatgcacttaaaataacagtatcagaaatgattcgagatctatttggagactgtgataagagcagaaaacttcttgaatcaataaacatggcaaccacagagcaagaaatcaacctgatcaaaactaatgctcttagaagcatcacttaaactatgagatctatgaaccacggaggtcacagtgacccaaattcactcaatacgccaagcaatcaaccccacactcagaagggacaactgcaccgcatccctaagaatcgacaccaactcaagcgacggcgacatcaatcatcacaaaacaaaatacagaacatcagcactgcatacaaaatcaccccccggcacacataattcatcgaccgacagattccctccatgacattacaaagtatttaagaaaaaaaccaaaagtaaggggggacccatcatccaatcgactgtggcc

SEQ ID NO: 2440 - DNA, 804 bp, Weivirus-like virus sp.
  isolate cra070shi3 genomic sequence.1
aaatcccctccattagggccggtcatctgcaaccggtagagttattttgtttatcttaggaaaacgtggcatctcaacaccaaaaacctgtaaaaaagggctgtttaactcgcattactgctaaagtacggtaaagctaaccggtaaaaagacccgggggtggaaatcccccgggctctttttaccggttagctttaccgtactttagcagtaatgcgagttaaacagcccttttttacaggtttttggtgttgagatgccacgttttcctaagataaacaaaataactctaccggttgcagatgaccggccctaatggaggggatttctgcctcaaagtttcacatactaagttgtgagtgtcacgcactttacgcgtttttagaattagattagatatccgacttactacatcaggacattaggtcttttcacattttccgttcgtctgataatgaccgctgttggttaatattttgatgggtttaacccactaactccaaccaggcattatttttcgttcacattttccattaaaactaagaatgaccacgtttggatacgctgtctgctttgaggtttttgcttacattgaaatagagcgcggctctaattactcattgaagcaaaggctagcttagtgacactggggccacacttcttgtgttatcgcttagtaacgcgctacggcgtcttcccccactatcgcaatatgtgcgggatttagtcaggggcagtgcctgacactttattgcgtttttctatattttgccgttttggacggccccacagctggtaacacct

SEQ ID NO: 2441 - DNA, 806 bp, Warroolaba Creek virus 2
  strain WRCV2 205660 hypothetical protein1
taaggcataataaccgaagttacccttaaaaccaacattgaaaacaatattctacctaaaagtcgtgtgtacatatatatatgtacacacgacttttaggtagaatattgttttcaatgttggttttaagggtaacttcggttattatgccttacggtcttcattgttaatggttttcgcggctcgcagtccctaattgttgaattgttcttactgatacgttgtcttcattgttgatggtaagtagagtggtttttcagaagatagctctattattactgttttcaatgttgatggccttcgtttggactttctttattaatgacggtaatcaaagattacacccaattttagaattaaacttttaagtagggtatgctgattttatcctctctcttaattgattttgatatctggtaattgatctcgaaagaagatgcgtcttctggatttgtaatagctgggccttaagatcgtaggtgttattacatggggaaacacattactttggttgatgatgatatttcgatgatgattcatgatgcatgtgcttgtattaagcctgatacaagaacttactaatttgcatagtgcaaagggttagcatatgatttctctgatgtggattttgacactgcctttgattaggatgtgtggatgatcttgaagcatcattggatgtttatgcgagcgtgttgtttaccaatttcaggatatgtggaagcggttgtgtatgatctatacgcacatttagttcccagagggcgttgtcgtctccccctaagcaagggagaaacacgtggcac

SEQ ID NO: 2442 - DNA, 806 bp, Wenzhou shrimp virus 4
  strain WZRBX43306 hypothetical protein 1 and1
cccgccgcccttcaggcgacgagtggaggtcacaagccctcataaactgtggagtgtaagacacatgccctttaaaggcatgaagattcttgcttattttagcagatgaatcatactagcttgctttacaatattagcaatcgagccagaccacgaggattgaacttcaattgaaaatgaaggacggtccgaatgccctcactttatagagaagtgtgccctcactttatagagcagtagcgttttccctcactctataaagcagatccatattataattgttgccctcacttgattgaatatttcaagccagcgaagcaagttggtgtggtcccggcgtgttaggtgagccgtttaagacatctaacaaatatttagtttctttcttttctcgaactaaattctttacttcaatcgctgaaacttgtatgtgacttaacttaggccagcatattttgtgtaagcgcagtgatagtctgactctatccgaggaatcactacctcgttaaataaatgtggcccggccagggttatccaagcctgagacttcgaaactctcaggtggcatacttcaagcggagcgtaagacctaaccaccgttggctagtggcgcagtatgagcgaattaatggattgtagcaaagtagctttgaataactcctacgatcagcacgcaaccgggttttcgtgccccggcattatgcaactcatattaacggctagcaaagtctatgtccttgtgtggacatgtgtgtgtgggcccttaaccgggttatttgattaggctatattcgcgaccatatatt

SEQ ID NO: 2443 - DNA, 807 bp, Shuangao insect virus 8
  strain insectZJ96360 hypothetical protein1
tacacaacaatcaatgaatttacccccacgtgatgtagttgtgcctaacgttcctgaaacacaaactaatatgggaaccttagaacacactggattacctattgaacctatttggcaaattacggatatacctccggattttaaatggatgactgaacaatggaaatttcacacaacttttgaagtaaaagatacacaacttcctggagatgttatttatacaacacgcgttgttcaatctgatgcaagtaaggattctaatttaacattggcacaatggcatgatattccattcgcttgttctaagtggtggaatggaaaaatttcttatcgttttacgatagttaaaccccctcgtgttgttggaaaattattaattcgatatcgtcaagattgtttcgataaatggaatgctgttgatgctcctagctctggttgggacatcaaggattcgaaaatgcgctcaattttgaaagaatgggacttaggacaatcatcacagtttgaatttgatattacaggctcaaacccaattcgtgcccgacccacccatctttatgaaaataaaccgcaaatagatggaactagtttaagtttaaacgatgttgctgaattccgaacaccttatatcctgtttgaaatgggacgtatcagcatagaagttgctcaaaccatatcacctggtggaatttttccgagcaattatatagttatagttgagaagtgtttgaaggatagtgagtttatgaccccaacggacccccgaactgatcataaattgactttatataattctattactgaatc

SEQ ID NO: 2444 - DNA, 807 bp, Beihai picorna-like virus 14
  strain BHHK130444 hypothetical protein1
ctccacgtgcgcgatttgcgcacgtggagttatagtgtagttggcgatcttcttcgcccgatttaagtgttaaggtagtgctattaagcgttacgacgctttctagttctgcacttaatacttttttttgttttacatctttatcatacccgttccctgggatagtgggaccccctctgtcatgaggtaagacattaactgagattagacaggtctgtgaagtatgtcaaacgtatatatagtaataccgatttcttatgcctctataggaagatgaagtatttaactggtggtgtgtacttgtttttaacaagcgcgtcctttatggattcacactttatcacctaggaataggtgacaccaagttactcgtaagagagactatcttgtaatcggtcatgaattgataattcagactcgattgtaaactgatctttattgatcactctagcgcctacttggcgtattttgaaagagtaaggagttcgagacgtgccctactagcatgggccgacgtaatggtcaagcgaaactcgatttatctcattagttccggtgagacttcagaatcacatatcttgagattggcactcgatgatagattgtgagctacttgacaaatataatatttaggacactttaactagcatttagcaatagttttatcgcaatgtttagggtattcagaaaccttggtatttataccgtaagacgatttatgagttatttcgcgaattttagtgtgagtgtgatgtggattatttttgcattcgagggactaccatccttttattttttgaacacagc

SEQ ID NO: 2445 - DNA, 810 bp, Wuhan coneheads virus 1
  strain ZCM4592 hypothetical protein gene,1
gcatggggacgatatccccatgcgatcggcctgtgttaatcagactctgttatacctagtgtcttatttggcttccagtaagacacaatttggtatcagacaataattaacaaaacaaattaattttaaggtataattttaagtaacttagttcaaagggctattaaacccctgattagtaacaaaattataaaatactcggttctgaccggggtaattcttttaacaataatatatgataattttatcgaagataacagttagcacctaccagatggcgctgttgcgtagagtataacccccaactctacttcccaactttgataatttttaattatatttttggagaattatgtataaaaattgaggaaacccctcaggtttaactacgacggcgaattaagatgagcgaaagtaaagtgcttaccaaggaggcgtaataatagggacccctctaaccagcaaacactggacgttacttaaggtaagaattacattttattagtagccggcttatagtaggcgtttaaggttaagcgacaaccctagtggtttacagtattctagcctatgtgctaatcctcgacggcagtagatcgctggcgatcgggaatatacctggatgtgaattaagtaaatctataggtatggatactcttctgaccctccagttttacactgtactaatcagctgaggaagagcagattatttcctttttttttcttcttatggtgacaattttatgatttatttataaagttgttatttaatttgaattttattgtattgacttatatattttatttaaa

SEQ ID NO: 2446 - DNA, 811 bp, Beihai sipunculid worm virus 1
  strain BHNXC40689 hypothetical1
tatgcaacttcctattgaagttgcatcgagtgttgctgtagttatttgtgagctacgcattaaatttgactattcactaccaaagtagacgtcaatgtccctattggacttggctatctgctttatgttgtattttgaagcatctttgtgttgctcttctgagtagcatgaagtgttttcacctttatatttagttttttgcaatcttttgattgtcaaaccactaccctagtaaaattacatcggtaattcgtctttatgtttgtgggtctcaccacccactacttgtatattatatatgtttgatcggcattggttataaaaatttttgtatttttaattaattatttgtttaaaaactgtcaatgtcttaaactagtctttgtttctcatcttcggtgaaagttgttgcactttgtgctgacgacttttattatgcgaagtaggttgtatctgcctgagtgaggtacgtattcaaagattaagactgttcgaatcctgtagcgttccgtgattggtcttgagccatgagccgtccgcgtaacaaggtaaacagtaaacaaaaactgtaatagacttattatttaacactatcgcagtactgctctgatcaagcagttgattggtttcgcaagccatgacaaaagggtcatctatgatacagaaaatagacgttaagcaaggtccgaaataccaagggtcccgcttcaaccgatgaagccctggaaacaattattctctctgctgtttgaagtgcttaacaaattctcagtcattctccactgagtcttcttaattcacttccataatc

SEQ ID NO: 2447 - DNA, 812 bp, Plasmopara viticola lesion associated mycoophiovirus 4
  isolate1R
gacataaacgctaaaggcaagataggataagtggaaagtcacttctgacgccataaaaacatgcagtccctggaatccactatgacagttaaagaggctggagagctgttaaaccttatgctcacgcatcatggccaatctcggagggatatcctcattctgttcgctgactttttcatgaagatgtcaacggttgtagcagaaaggtcgtcaagtgcatggtctgagcggatgtcacgagcagcagcttgtttcaattctgtaaacggttctatgagaagtgaggaattcagtaaggagcgccttcaactttccactgcaatcatagcacttagtagcgcaacagatgccactccgacgctcgatttcttccggttgaacacaccagagatcctgatagaggttcaatctttccgctcaatgcaccaggttgatcaattgtccatccaactctctatgaggtctgtatttatgttctggcttgcattcgaccaactcaggattatcgaagagtcgcgctctatagtggaagatgcactggcaatgagcttgagtaaatttgtcgaagagaatgcagtagtagcaaggtggttttcattgatgatgacagagaagttcgatgcttccatatgtacctccgtactcgatgatactgtcatggtgatttccagatgattctgcgagttttcctttgtcgtccgagattcatttccatatgatcttaaaaaaactaagagaatgaatcatcacgattttatcattataagtttaagaacaatcactctcagcgaactacagattactacagaatc

SEQ ID NO: 2448 - DNA, 813 bp, Beihai weivirus-like virus 1
  strain BWBFG40821 RNA-dependent RNA1
gggtgaggggaattcggggcgtatgccgcgccacagtggcgtaattggcagcccctgcattaggcccaacagaaaaacctaaagagggccgcattttttccgggcaccgtgggcccggtgaaggggagcggcagggggacaatacctgtcgtgagatgaccgcctcgcatgtaacgggagtttaccgtctcacttggagttgtgcgagttgtaccgcgtcccaacgggagtgtcagccttgttcttccagccctagccggtccgcagccggtgggtcagagcctgagtggggtcctactccgcccctgaggtgtggccttgcacgaccgtggatatgggtcccacgtgggtttcgccagcccttaagtcgtgtatcccgagtcccccattgggaatggcccctccagagcgtgtacattttgagcgctcgtacgaggaacgtcgaagctggttgcaggcgcgaaatcgcctgcagttggttaggggaccagtgatgatgtctacggaaccgggggcggcggccgaaaccgccgcggatgacgcaggagaagcaacgtacccgatctgaccgagcttgagccggcgatggaaggacgggcaacctgctgtgtgagggtgcatcgcgtaataccgaccttgtcgggcccatcctccagtcatccacccatgtacagtctgcgggcgtctggtgtgcgaacccccggcccggtccgggcacaccagacgcatgtatagggccgttttggccatggctcaggcgatccccgcctgagacggttgttttgtttgttttcttttttttgtttggacgtg

SEQ ID NO: 2449 - DNA, 815 bp, Barns Ness breadcrumb sponge aquatic picorna-like virus 1
  isolate1
tcccgcgcacgcgaaagcgtgtgcggagttgttgttgtagttggcgtttatacgcccatcatgagttcaaagtaccttctttgctgcgttacgacgcagccccgaagttcttttaacttttgttgtttacgatatttatcagacccgttccctgggatagtgggacccctgtcatgaggataatcattactgacgttagacagacgtatgaagtatgataaattgtaataagtaactatgaaagagtttattcctcaaactcttaatgattagtttactaaattggtgtgtaccttcctttacggaaggcgcgtccattatgtttttaacatttatggattcacattttttagtctagtaatagactacgatttagttcaggtaagactgacttttctggaatcggttatggattgataatcctgacttgttttcaaatgatcttgattgatctctcttatgcctattaggcgtttatttaaagagtaagacgttgaattatgtacccttctagcatgggtagacttaattgtcacacattgttcattaagactgttaattccggcagtcagtaagaattcagtgttctgagggttggcacccgatgatgacactgttgctactttaatttaaacaaattttaggacatacatttaatttcacaataaattattgtcgcgaagtttggagtattcaaaaactctgtagttcgctacgtaagacgactttatgttttgtgtattgattttgtatgagagagctatttcttgtattatttgaaatcgagaaaccactccttttatcttggatacagc

SEQ ID NO: 2450 - DNA, 816 bp, Dinocampus coccinellae paralysis virus
  strain Quebec2013, complete1
aatccctccatacatcttaccctacaagggtcgtaaatctgttcaaagttaatttcaagcagagaacagtagatattttatttaattttaagacatactttagttcacgaggctatctatttattagaaccctctattagtaacaaaacattaaaatactcgtttcagaacggggcttcattttgaagtgaataaaatatttagataacttagtaagtacctgaacgaattataaatagtaaaagaacgagttcgttaggattgaatcgtaaattttaaataattcaattactatatgcttatgccaggtatagttctttctatatatttgacttattatatattatagtgtactagtctacataaatccattgtagatgatgaatatggcaagttggaaccagattactcatattcttgtggcgtagagtgctctccaaagctctacggtcccctataattataataatgatagtatatagaggagaatagtatcgtttctcttttgaatgagtataagtacgtaactttagtattcgaactttataaggatctcgtgggaacgctagactgcgacttaagtgaatagcctttaatcacttagtacaatttgtttcagtataaacatgtaggccggcttgctacgtccgcagaggagtcgttaactatttatcattttggtaacttagtcctcagacggtgacggatggaaagacatcgattccttttatatgcagacaacaattattgatttgattttatttccttgtttgatatacacttgttttatttccctttataatcaattttgttaat

SEQ ID NO: 2451 - DNA, 817 bp, Unknown
  Description of Unknown: DsRNA virus environmental sample clone smat.culi_contig1191 sequence
tagtgtgacgcctatacagcgtcacagatcttcctaccgaaggttggtgggttactatgcggagtcgcctgtcgagggccatccacaggagtgggcaaccctcgggagatgaaccggtgaccctttatcgctccgcttgggtcccggccctacctattttctcgttcacctggcgaggaagtaggggggtgggcgtatgcctgccgtacgagtaattgtacggcgtgatttcggtggggtacttagccttcctgctaggttcctcaccagaatttccccactagatctatccaatagttgtgggcagggtctatttttgcccagtgtatatggaaacactggagtctcttatagggtctgctcatgagagcactaactaagtcgatagcttactgatagtgagtaagtactccttatataacaccttatatgaccactcctgcgaaatgcaggggtacctgaagtcttacagcgccgagacaatgagattctcggtggccaaaacgtcggtttggtatgaccagggcgtgctaagtgatctggcgctcgtttaggcggcggttccatatgaaccccaccggctaaacttgcttccttcattggataagatctaaatgccgagagactgcaacggccacaatgttgtaggggaacagtccctccttacgttagggtaagggggcagttggtgccttcactgttataccgaaagatttatgacaagcgatttccaagtgattttttagattgagaaccgagcgagcaaatttgaaagccagcgttaagttgagaaaactattcgagcctattgggcgtt

SEQ ID NO: 2452 - DNA, 817 bp, Wenzhou picorna-like virus 41
  strain WZFSL80064 hypothetical1
cacgtgattcccggaatttttatcggcgttaacgcatattattacatttattagtacgtataatagcaatattgtattgtattagttagtgtagtatgtgtgttggtgtctggaatcgttactaagaaattagtagtttataagcagaaatgcttattctcaatttttatgtaggtaatagggaaaccgtcaaatgcagtcgtagggaataaataacttacaactgatacctacattaggattcaacgacgattacatagttgtgattttcgttgtcttaggaaatccggaaagtatttacataatataagtacacgtagttatcttgaagggtacccctcgtccgtaaggaagtcagttgtttccccttctgactagagccggtagctgactaagcccgatacgccttaactgtgttagtttaggacctttggctgcttagagtaacgtgctctcccaatggataggaactgcttttacaaattatacatattgagctataatgatttagctactcatttgtcgtgggtgtatgtataaggcgtaatttctaactcctatttggaacatggctagtttcgccgctagtggtgttgtcgtaaggccacagaggtaatgaaagtatttataagaactaaattaacggaacggattcaaatggattggaacatggactcaatatgaagataataatccaataccctcataggcagagtgaaataagagatagttatccattcaccgtctatttgtcgtagacacctatgtaacattggtgattattactcatggagagatatacgggcaacccccaaat

SEQ ID NO: 2453 - DNA, 818 bp, Sanxia picorna-like virus 2
  strain SXXX37883 hypothetical protein 11
gagcttccagtctatagtaagtccgcattgaacggccttatgataagtcttctgaagagttttgacttcaatgagtcgatgtttgagcgaatgctcacatccattttgtgatcacttttgtgatatttgttttaaataaatttaataaataaataaaaatgatatatgttaatatttgagcttggtaaagctacaatattgaaaatacgtttgagcgccaatatattgggtttgagcccttggccgggtgtcgtgattaataatcccatgccccaattgttgttgtttagcgtatttgataattgtaggatagagaccatacagcgctatacttgctgtaaagattatatactacagaagttcgtaaatgtgcttattgtaggagctctggaatatggtgcgcgttaaataggcgcaagtttcactggctttgtttagggtatttacctgacttgatgtatataattgtttatcaacggatgatatggaaaaggtgacgttctcacttttagatcgcagtcatcatagcactcctggaggaggctatagtatatcgcgaagacgtcattttgatatttgacggttaaggcgtaaagaatccaccctgttatagaatagatacgagtcgcacgtcgcgccagtagtgattctatattaaatgtgatcacctccttatttctcttggaggtttctagttcgagactacaggcattcagccaaccccccactttccaggaaacaatagagatttatatatttattattattattataatattcttcattcattcatttctctattgttcctattttatatc

SEQ ID NO: 2454 - DNA, 819 bp, Yonago Culex iflavirus
  17CxIT-T3-H35 gene for putative polyprotein,1
ccccttttcatcttcacaataatatctattatgaatctacactactagttggattttcattgccttacagaatacgtatagtgtattgctggactagatggtgtatgttgatatagaattattttgaagtaaagccccaaacaaagcaaccccgctctcttttagttcttaagtttaattattaatttattttaagttccctcccctattccaatatccctattatcctttagtttaaacaagttgataggcctgggaaccctggagactttgagaaaaacccataatgatttagcaatttcacatggaactgattgagtgactaagtgcctaaatgtaggttgagtttcgacaaaaagcctttacttagttagacaacactccgatgttaatctcggaatttcttgtgacggtttctatatttgttcctgatagtcagacgtatagattctaatgtacaagaccgaagacttaactacgtttagtggtagtatattatacacggtgtatgaacgatttattcaagtaaaagccgtgagttatataatatatatatcagattgttgagcttgatagcgtgcgaaacgtgcagtgattgtgattttggtttatcttgaaaagtatcatagaaaaatattaattattaatgtgctatggatagatgcgctacgccccaaatccttcagagctatcccacgactggcatcgtgtaattaaatgtggtaagttaatatgagatgactcactgtgtgcccggttgctttgctagtttgttcaccgtaaggaagaaactagttttacaaaccttccaattctttt

SEQ ID NO: 2455 - DNA, 820 bp, Weivirus-like virus sp.
  isolate zftfla02pic2 genomic sequence.1
tcattaccttgttgtttattatgataagctagagtcggcctctttcatagtgacttgttttgacgtagttccccgtatcgtagcattgctgatacgttcagttttcgacctaggcatctttaatgtagttcggttgtagattcagataaatgcacaacaaaatggttgtaaacaaccagaaaggaactctttgtttaattttcttaaactttgctaaagttttagttattctttgaccctggctcgttattatttcgcattactagaaagagaaatatgcgtgagccataaagttaatttattaactatgctttagaccaccttcttctgtaacaatatcgcagaagatagtcccgtaaatgatgattcactgaaagggcagtggtaacaccaccgtcggaatgaaccttttaacaggggattgacccgagtccttgacaacccaccatttgtagttgatactatatcctacaccatgctttatgggagcaccatccacggttcattagtagttcgcgaaattgaagaattaaacctgttatgaaaggatttagtaggacacgacctgtcttgatgtcattcgagtaggagccgttaacaatccgaaaggtctaagtaatgcagcttaattccataggtttctgcgggattgtcatttcgcctttctcatctccttagggaccagtatgctggtccctttggagccctttcatagtgcgctgattgctagtaacaatcagtgtactaagtttgggattctttcgatttaattctttagaggaatcccctcgcccaactttttatcatacagtacaacatc

SEQ ID NO: 2456 - DNA, 821 bp, Equine torovirus
  strain Berne 5' UTR and replicase polyprotein 1a1
acgtatctttagaagtttatgaagccttgaaataaaaagctataaaccttattacggttagtccaccacacggctaaattttcagtgcgcagtcactagtcagggaggttcagccctgtcttttacttctgtgtaggaatctgtacagatatattgtctgcatactagtagttacaagagagtgcatttagtacttacaagcgggtcaaaccgccctccggaaaggtgcactttccctcccgaacgtgtgtagaccgtgaccattgtgtctagctatctgtaacaaactatacggttgtattttactcaactttaaggcttttataaaacttgcaagtgccaattttggcatttgttctttagccttttaaacctcacctccctacgggcaggcgcttaagcgactaaacgaggtatagccaattagttgttactcccctccagctttgctgcaggcccttagtttgggactaaagtgagtaaacatactttttggattacatctttctaaactactgccaaactgttgttttatatatttaagttttgcggttttacgctatttacttacggttggcagtttgtttggttgtttgcacaattttttgttataccaatttttactgtgtttttactttttacagttaaggctattttttatcttcttaggcttgttgaattaagtttttccactttaataatttggcttatagaggttttaagaaaaaggaaacaacaatttagacgtcgttctttagacgtctaaattttaaatctggccaataaatatcaggttattgactccttgtggagcgagactt

SEQ ID NO: 2457 - DNA, 825 bp, Apple luteovirus 1
  isolate PA8, complete genome.2
tgataactttgcaaggtcccaaataggtagacgcagctccatcaccttcacccaagcctgacccaaaacccagtcctcctccaccttcaccgaaacccgcaaaggaaaggcgatttttcgcctactctggtataccaaagacgaagatcaaaactaaaggcaatgacgactccatcattgcctcctccaacttggagcagcaggtcttccggtatatagaggcaaacaatcagaaagacgtcacgttgaacgcgcgttggtattcgacttccacagtgaagaacaagccaatgattgtattcgacgtgcccgctggtgattggtttgttgatttcctttgtgagggttacatgcctattgaggcaataggtggtagtgaggaccagaagtggatgggaattgtagcgtacaacaatgataccgcggatatttggtccgtcggggtgtacgacaatgtctcaatcactgagctcaacataacttcctcttggaagcttggtcacaaagatttagagctcaatgggtgtcatttccatgacggtcaggttgtagagagagatagcatcggttcatgtaaagtatcatccaataccggtggatctctctttttggtggcaccatccattatgaagacagcaaaatacaactactgtgtctcatatggcgattacactgacaaaaccttggagtttggttttgtatccatggtgtttgatgagcgtgatggagctaacaccgccgttccgcacattagaagagagctcaagaatgttaaatatcttcggccttctcctgtgcgtctgaacgacggcggtgattatattg

SEQ ID NO: 2458 - DNA, 826 bp, Hepeviridae sp.
  isolate wpk139hep01 genomic sequence.1
actacacttcaccagaaagtgttcaaaaggtcctgccgggtaaacccgacagggccttttgaacactttctggtgaagtgtagtatcgccagtgggtttctccagccaaatctggaggagcgggctgcagcgtgactgcagtggtgtgacccggtaccatgattctgggaaatggtgtgaatgagaagtgtgattgagtgtttagccccgacccactggggtttcgctactgttggtgcagtggttgagcattgtggggtgaaataggggatacttcttttaggagcagtcttttagccatattggctgtgacatttaaattcttaatacgtctggttcttgataccagcgctcatttcttctttctatcattcttctcttactggctgtctaactgccaagagctgctaccgctgcgcccggcggggttaactccaggactagcctggagctgtggccgccaaaaagttagatgctgtgactaaccaggcggtgagctctcctccagtgtccacattgggggtccggtagcgatcggggtcgacaggtaggctacgggtgaaacctgtctgggttactactatgtaggagaaccactggagcgctaagcacgcggacatttgtgagatccaaagtcaggcaaaccagcttggtatgggtcaaaaacatctcaacgcgagtggggcggtgtctccagggccccgcgggacctattcccctggtgtggcgtagctggagctgcgcccaccttcctgtatgcagtactccccttgagggggctaatcaggggcatgttaggttttaaaccacaacagtgttgaagttc

SEQ ID NO: 2459 - DNA, 826 bp, Apodemus agrarius picornavirus
  strain Longquan-Aa118 polyprotein1
tttgaaaggggtgcggatatcatggcgtttctcgccatgatatccgcacattgcaaacccatattgcatacccactgggtatgcattatggggaggcccctttcacccctccccccccaattaccttttccccctctagtaaccatacgctttactcagcgtaactactccgggttacgtgatgaagaagaggctacggagattctcgggctacggccctggagccactccggctcctaaagatttagaagtttgagcacacccgcccactagggccccccatccaggggggcaacgggcaagcacttctgtttccccggtatgatctgataggctgtaaccacggctgaaacagagattatcgttatccgcttcactacttcgagaagcctagtaatgatgggtgaaattgaatccgttgatccggtgtctcccccacaccagaaactcatgatgagggttgccatcccggctacggcgacgtagcgggcatccctgcgctggcatgaggcctcttaggaggacggatgatatggatcttgtcgtgaagagcctattgagctagtgtcgactcctccgcccccgtgaatgcggctaatcctaaccccggagcaggtgggtccaatccagggcctggcctgtcgtaatgcgtaagtctgggacggaaccgactactttcgggaaggcgtgtttccatttgttcattatttgtgtgtttatggtgacaactctgggtaaacgttctattgcgtttattgagagattcccaacaattgaacaaacgagaactacctgttttattaaatttacacagagaagaattaca

SEQ ID NO: 2460 - DNA, 827 bp, Unknown
  Description of Unknown: Bryopsis mitochondria-associated dsRNA genes for capsid protein,1 sequence
tgtataatgggtttggaatccatatacatcctgaaatcgttcattgttgcatcgcgagctggagttatcgcgggggagtttatctcttctagggaaatgatggcgtgacttaagaccgaaaagtgtcgaaaagcgttggaccggcctctgtttacaagccgcctctattatgaatgtgctccttcctctgttagtgtgagagcttaagttattagcctaggtgacgccgtagggtgctctgtgcccggggattgttgctgtaaaagagtactgaagtgcaatcggctcagaaaggctatataagagtgcctttgtcaaacggcaacctgccgcttagttggtaatcaccagccccctggcgcctaagttaagcgtctcctaacccgtggcgtaggtatctaaaaggagctgtgcaccgtatagctggaagtttcggggggtgacgtcgctgtccatgtgacacagtaacccagggtgccttcgcaagggtatacctgtggtgctatcctcactcagtcggccgggttcaactcctttatgcttataccaagatatttcctacattatatcatactatagggtgctagttatagttttattcttaatatatcgataggccaaacattcttagtttgagctctttcgtgcatttttctcacatatgtacatatgtttcactatttatcagaatactcgaaaggtataccgtactgaaaaatcggataaagaggttgacgatctaatatggtttctcaaattggaaggacgtccgaaatgggttagctttgtaatgaagtgaccagggtgaggcatgatgccgccacttc

SEQ ID NO: 2461 - DNA, 828 bp, Beihai picorna-like virus 35
  strain BHZC37213 hypothetical protein1
gggagagaaccatggattaacatccatggttctctccctacatatgattgtgtgtcgtttcaccgcgacacccggcaatcatacatattcattgcagatctcgttctgctcttattttacgtagatatagacgtgttgaataggggtagaacccctaatcgcatttgctgtatttgctttaagagacctatagaataggcaatagcttaatctatagattatgagaatgtatattaatatgatatttagtcaccactccggaaattaaccacttctaagtgatgaccgtatgaatgaaacagttgtggctactgttttgtacgtttatgccgtcaccccagagagtcaactctgagaataaatcacccacttctgcgagaagttgtagcagcctgtaaggacgagctgtgtttcgacttgttcgcatagattattgaatctcatgaactgaagtttaatgactgataattaacgcttgtaaggttttttaatcgttggaatcccacctattagtttcgatttcgcttaactgatctccacccgcagtagggttgaagagagatcatagatctaacgaacttttaggaagaattggtccaccggttttaatttgactgacgtactagtacttactataagtgaacaatatagatttatatatgcacgtttacctcatgacaacctgagtgaggaggtttggtcacctaaatttaccgtgtctctgtatgaattttgaggttatcgatagttgttctactgatgtgattgagatgatatcgtcttggtttgtttagcccgttgaggttagtccctattcccactaaaatt

SEQ ID NO: 2462 - DNA, 829 bp, Hubei picorna-like virus 46
  strain spider133332 hypothetical1
gttacctggatggcgcaagtagaagttgctttgctcagtatacttgttcatataataactaaaccttttatgtaaacctttttatatgtgtttgtgtatgtttattgtgtttgtccctacactgtgtattaggacctctatgtacgttgtcataagtcccacagtaaaacaaatataatatcaggtaattctcatgtatcaatatctctacgggtattggggaagttttcaagttttgggtgccgacgaagatgccgacgacttaggaatcaaaatgcctttatggtcatggggtgcttaatatgctatcatacctcttgcggagcttttaaagccgttcaaagtccctgtatagcagcacctcgtggggtcatgccgttgttttcctatggctagatatagctactgtccttcgttggggaaccgccctctaggcgattatgggtcctttactgatgtggttattataattggttcacaatgttcgagaaatccttcttaagaccgcttaagaatcgtcgagaccgtgaactagggtacacgcgtggagacgttccgttgtgaatcaattataatcgacatggtattggtcatgagagttattgggtctcaccaaccctcggagtaatgtatccgaatgtcctgtaagttgtttttgagcaacctcttcaggaaggtgggtttctcaccaaagaggcggatgtggccggaacccggtgacgctactcaataagagtggggctctgcggagagacgtggtgacaccttggaatagacagggatttttcagttccaaattagctttcatgtgtttgtacaaattaaattt

SEQ ID NO: 2463 - DNA, 832 bp, Unknown
  Description of Unknown: DsRNA virus environmental sample clone pepp.ochl_contig321 sequence
ctcgtgcaatggggcccctgtcccctgaccatacctacccgcctccgggccacctgagtttctgtacagagctcagacccgggggtaacaggccccattgcacgagcaggtaggtctcggggtctacccctgtcgaagttccggcttcggcaggggctgggcgtaagccagccatcagagcgatctggtggcgagatttggcactccgttaacacgtttgtggaggcggagtgttgattcacccaatagcattcttgaccatcatgggttttcacccaccctttccccctagctataggctttggggtaagggtgtgtgtaaaacccctagtagccgattgccatctgcccacacaggctcatttgaaaaagcaccgaaagctctgcggagcaccctctatcccctgcgggatttgaggaagtttgaggctcttgccttgcctccaattgatggaggtggccaaattaccctctgatgggttcgagaggtaagctaagttggcttggtagttaggcggttgtactgctcgagggcaggtttccggctgctacctttaaggtcataaatgccgagagactgcaacggccgcaatagggtagggggacagtccctagttgagttaggtcaactggggtggtttgagcgcccccacaggtaatccacacacgttaggcgagtttttccaaaatatccaagttatccaggtgatcttcgagtgtattccagacgattagagtgtttactccagatttttaaagtgtacttcaagggaatttcgtataacaagcgtaaaaaccgttcttttaagaacgaaccgtatttattgttgag

SEQ ID NO: 2464 - DNA, 832 bp, Unknown
  Description of Unknown: UNVERIFIED: Macaque picobirnavirus 0 ORF1-like gene, complete1 sequence
agatgcatatggttttactaaacctatgcttcaaaaactcgagccatttgtattcaaagtggttagagtagaagcaacaacaacatccgtcacagaaaggaggaaatagtgtgacaagtaatcaattatcttatctagcgaatcaagaaacggttcgacacaatctagccgttgaaaatgaaactcatcgctacaacactgaagcactagctgaactaaatcggcataacttagctacagaacaaagtgcgacagtaacaaacgcaataaacgataacagccagaaggaaaacgctcgacacaatttatctcttgagcagatacaagcattagctcaaggtgaagtcggtagacacaatcaggcgagcgaagagttagctagcagtagtttgtctgagcaaatacgtcatgcgctaatttctgaagatactcagaatattttagcaggagcgcaggcacttaacgcgcaaactaatgcgttgagtcagcaggagacagccagacacaacttctcacaagagcaggtttctaattacactgctatggagcagcaccgccataaccaagcaggtgaagaactgtcatctgagagtaacttgttaagcggacagagaagtttattagactacacaacaaaacagcagaatattgatctgcaaaataatgtccttgatgaaacaaagagacataatactgttaacgaaatattaacaggggttgatcttgctcaacaaattgtaaacaaaaatctcgacagaagagatagaactacgaattccctatttaatggaattttccgaatagggtcaatggtaaaataggagggcatacc

SEQ ID NO: 2465 - DNA, 832 bp, Picornavirales sp.
  isolate RtMruf-PicoV/JL2014-1 polyprotein gene,1
ctagactttctaccctcttgaatggcgaattccagagtaaagtcacctctgccttgccgctatacacacccaaccaatcgattcggccccacgtgtatagccccttggtcaagtgacctcttacgtctggacgcggatttaagacctgaatatccgctgaaagttaacaccatgtttgccccgattatgtgatgtttctgctcttgctgggcggaacatccgtcgggatgccaaagcaatttgtgtccccttctttctttggacttcggtcccccggtcgaagccgcttggaataagacagggttattttccctccttcctctcttctactttgttaagctctatttaacaaaagggtatgtctggcccctcccttcttggggaatgtgcgcggcggtctttccgtctctcgaaaagcgtgcatgccagatgcaagagaaggtgaagaaagtaagttgtgtctaacgttaagacaggaacgaatgtgtctgtagcgacctctcaaaggctgcggtctccccacctggtaacaggtgccgcagcggccaaaagccacgtggttaacagccacctttgagagcggtgcaaccccagcaccacactttcgttgttgttttctcactaaccacaactcgcttctctgaagccctcttgtagagttgccaagaatgtccagaaggtaccccggtccacgggatctgatctggagctccatgcgtgtgctctacacacgttcgggagttaaaaactgtcacagcaactccaaactaggtggtcctagttttcacttttatttgtcaagtcatatggtgatggttaaaggagaacgaca

SEQ ID NO: 2466 - DNA, 832 bp, Shahe isopoda virus 3
  strain SHWC0209c10670 RNA-dependent RNA1
cccggcaaagccgtccgggtgcggctttgtacgagtgggcggtggtagaccgctcgctcgtggcgctagaagtgacagcgcggagcccgacattggtgaaacatgaacgctatagagttctatcggcccacgggccgggcctcactgtccatacgcctgggggtagtcctttgcggacgctatccatcgcgtcaatgtcagtggggagctcggggtgcagggagggtaccggtgttgcattgggatagactgttttgcgcgaaaacgcttgggtgtcgaccagatttatttctaccacaacatggctttaattagcgcgtgtggcagggtctcccttgtttaatctacggcttaggcagctcattggcattcacggtatttactcttatgcattagtcaccgcacgttgaggggcggttggaccacgggtagaattctgggtggtttcatcattcctgaatccggaaacgggaagttggcggcgataatgcctatacgacctgtggcccggggactaaggcggtcaaatcaaagaaaccgcttttccaaagccagctgtcctttagagggaggctggcccacgttgttagtgggtgacatatctttctgaactctgagctctgctcacgtatttttctttggcacacgtagggtccctcccgcttacagataagcagcttaaaacgtattgctaggtagaagagttctatctaaggccacgaaaagtccttcgcgtccgcgagtacggtgcttccctcgatcagcacagcttgaagcttagtatcggtgataccttgaagaaccagagtttagaaaacaacttttaccacag

SEQ ID NO: 2467 - DNA, 833 bp, Southern cowpea mosaic virus
  complete genome.1
gatggtagagatgggcttgtgtgacccggtgcggctttttgtcaaacaagagccgcacccgtctcgtaagttgaaggaagggaggtatcggcttatctcctcggtctcaatcgtcgaccaattggtcgaaagaatgctctttggagctcagaacgagttagagattgctgagtggcaatctatcccttcaaaacccggtatggggctttccgtcatccaccaagctgacgcgatattccgtgacttgcgagtcaaacataccgtgtgtcctgcagctgaagcagacatatctggttttgattggtccgttcaggactgggaattgtgggctgatgttgaaatgagaatcgttttgggctctttcccacccatgatggctagagctgctaggaacaggttttcatgcttcatgaactcagtcctgcaactctcaaacggacagttactccagcaagagctgccggggatcatgaaatctggatcttattgcacctcctccactaattcgcggatacgttgccttatggctgagcttattggttccccatggtgcatcgccatgggtgacgactccgtggagggttttgtggagggggctagggagaagtatgcggggctggggcacttgtgcaaggattacaagccttgtgcaaccacccccacaggccagttgtatgccgtggagttctgttcccacgtgattaaacgcaataaggcgtttcttacatcatggcccaaaactctgtataggttccttagcacgccgagggagacgctggaagatctcgagagagagcttgcatcctcccccatgtggcataagattcagagtt

SEQ ID NO: 2468 - DNA, 834 bp, Aedes camptorhynchus toti-like virus 1
  strain mos172CP87493,1
gagcttacgctccgttgggtatccctctcatacgctgttatgagacggaagggggtgaggtgttttcggattaatagcccctaaatcccaaagaggcttgtgaaacttcctgttctaaatagtcgtttcacaggccggtaatgctggaaggttatgggatgcaaccaccagtccccgcgagggggtgcgcttcggcggtctatagcagatctcgtaccggctataggcgaaatacgtaagtattccctgtatgaaaacccaaacctcctcgatcacaaaccgcctttatccccagattatagggggccctataaggccccatattaatctacgtgtacgtactactgcgagtttcgacttgtgaaatgtatgaatcactgtttactggctggactatcgatcgaggtttcggttatcataaaacaaaaactcagctgtgttttgatcaaatatcaaaacagcggctgggagtacctttcaattattgtcttcgggcaataactgatagttctttgcaagtaactttataggtagcggccttagttagggcgggacgtcctgggtggcgcgatgctggccaaaatctgttcgtcagtgctaaataggagttgggcaagtgcctgcttcttaaacgccgagagactacaacggcctcactgtgggaaaggatcaaacgacgtgatcccatggtgactaattttaggggtatagtccccctctgtgctaggaggggcttcctgcatactctatatctagcatatcgttacgatctttgaattttttacgcgctttaagtcttgagaacctactcttgggaattattttcggataatt

SEQ ID NO: 2469 - DNA, 836 bp, Beihai weivirus-like virus 8
  strain BHZC36478 RNA-dependent RNA1
accaacgccacggcttgcccgtggaatgcattaattcgtatcgttgtaattaagccattttggctaaagtcccaggccttgaggaggaaatgcctcaggggagatgacgtaggacaattgcatacccaggggatgttccgcccctctctccttgtccggggttctgaagggagaaaccctaacaagtcaggcttattcttgacccctcgcttgatgagcgcaagcagggtgcagcctgccggtccagtgggaaggagctggcctgaggtgaaagtcgtgccgaacgcgggttgacagccgcgtagggttagccgccttaatcggtacaggagttccccctctcccgcgcatccttaagggatgtgaccccagcacccaagccgtaatggcgtggaatgttggaaggggaactaaggaatggttgcgccgtgatccagcactgcttgacaaatctggactcatctagcagcaggaatgtgtattctaagccctccgacctctgacgagactatcaaacatccaaggtagcacgtgattaggttcaagtcaagtcggtgaaggtggtttcttgagccccaccttttggaaacaccaggagttgatcgccctggctcggcgccgaacggacagattcatttctgcccgatagttttggccgcgctcgtgtggagtacacattttggatgagatgtcagtgtgcctagctttcgcgagctttgcacacacaacgctctgtatatagtttcacttgtattccgtggaacgtcgaacatcgatggcccacgtggacctgggcgaagacctagttgtcgtctatcaagctttctgttttttct

SEQ ID NO: 2470 - DNA, 837 bp, Hubei picorna-like virus 1
  strain WHSF7464 hypothetical protein 11
gtttatagcgcatgtagagtttttttgaagattgatcaacctaaagttgagagatgagtatacttcgtgtagatacaaattgtgaaccgtgttcgcatatacgcgaagtatatgctttcacgtttcatgcttttgtctgcatgagttatatgtcattatgagaatgatttagtttgtctcggtctttgaaaacgtttttacggttctagcagaaactaccctcgcgaagtagggtccatctgtagtcctttcggacaaacgtgttaaccggaacacgtcgtaatgttgccttaattggcattttcacgggcttcttgacttttgctccggagcatcagttatatagaagttgggtctgacgagcccttcaccatagttgtgtacgtcttagatatacactacttgtccatatgtttggacaatacatagtttatggtttagatatatatatctatgttcaagctgtttgtcagcccaagggatcacgccattgatcctcctttaatatgggtgtaaatttcttcgcactttggaaacagagtgcaagtattggcaaaaaccctaagcctgtgatttgattcaggatagccaaacgatcttcaagatcatactttttcagggggcgaaatacccagaataatcaatcctgcccgggttcgcaagaacacggggtgttaacctcatgcaatgtacaagcgctgaccttcgctctctgcttggtacttccgacgccgtcattggttaggacatgtggtgctgggcaaccagaaatgaatcccaacacgggattcatggtttctcagcattgtgacatcttgtttgcaatgctgatttatc

SEQ ID NO: 2471 - DNA, 840 bp, Scaphoideus titanus iflavirus 2
  isolate St_USA, complete genome.1
cgtattttgaccgtatcgatctgtttatataatagcgacgtattttagtgagaatcgtttccttatataatatagttgatatgtgatatagtcaatatacagaagaataattgtttcctggtaattcatagcaaagtaaaatctgtccctattgtctatactagttttaagttttagttttaagacacctttcttagttttaaattttgtttgcatgttaatgttgttgaatctgcgagaaaatgttgattttgtatgaatgaaattttcctattaagttaggtccgtttgtgtttgaatgaagagtatgtattagtatgtttgtttctattcctaatccctcctttgtccttgataatctttattattagtaaattatgtagtagaactctaccggaattcgattttgtatagttcttacctgcagcggttagatgaagaactactttttctttaattattgagctcagccctgtgacgttgtatgagagtatgcttttgcattatctttactgaacgcatctatttttataggttacgatttgcgtgtttatgcattatgtcggtttaaccctataatagaagagcgttgtaatagagaagcattagaacttccttgtatgattagaatcagatcctggtaaagcaataattatagacgaagtaaagtacaattgacatgccccggtagtgaccttcagacaagtccccctctgaagttcgaatcattttctaaagtaataaagtattatcccttttcctctttttatccttggattgatttctttatttggacacgaccactgcttgtttttatgactattttgaatattttatgat

SEQ ID NO: 2472 - DNA, 840 bp, Beihai weivirus-like virus 10
  strain BHZY59101 RNA-dependent RNA1
gcggagcatgcttgtggtgtgttgagccattttggctcgcgctgtgtcgctaattagcattttgctttaattaaagtcccaggcctcagggaggaaatgccctgggggagatggcgtaggagtgtgcatacacggggatgttccgcccctcgctccaactccggggttctgaagggagaaaccccaacaagcctggcttattcttgacccctcgcccgatgagcacgggcagggcgcagcctgccggaccagtgtggagctggcctgaggtgaaggccgtgccgagcgcgggttagccgccgcgtaggattggccatccttaatcggtataggaggggcccctctcccgcgcatccctaagggatgtgaccccagcacccaagctataatggcgtggtgtgttggtagggcctccaaaaagtggttacgatgtgtcccagcactgcttgacaaatctgggcgcacctagcagcagcagcacgtttccaagcccgccgacctctcacgtggactatcaaacattcacggtagccgttgacccatttccagtcatgtcggttgtggtggctttggcttgagcgccaccattaggaaacaccaggatttagtcacctgcctgggcgccgaacgggttcgggattcttcccgtccgccgatagttttggcccagatgtgtgggaatgtgctgtgggtgtgggcgaccttcgattattgcgtcgttggtcttttgctctgtaaatagcgttcaacttttcgtggttccataagcggcccacgacgacctgggtgaggacttagtccgtgctcacgccgttgcagtgtgttagcatctcttccgcg

SEQ ID NO: 2473 - DNA, 842 bp, Shahe picorna-like virus 1
  strain SHWC13622 hypothetical protein 11
catgcacagcggttttcccgctgtgcatgtgtcttcacgttgatttttcttcgaatgcgtttattcgcattttgtcttttgaatcaactcgtattgtaagtgcaattgcttgctgtgatatttcgtatacacctatagcctttgtgcacgtgtgtagacgactgtttcagtatgtttgaccattttcaatacaaacaacaagttttatgacatttcttgtgaacaaataaatgtcaccaccctagagcattgctactaagctttgttagtagaagttgtttagagtcaaaacgacggacctctatttagagaacccgtgtccgatggtgataagaactttaatcgccccgggtgagttgccctcacatctttatgatgtgtagggcgctctcggttagtattgtggtggattttataaatacgtcagatggctcgacgttaaagcctatggttgtgaatcaaccagcagaagggaaaagccaacccaaactgctttgttaaaaactttgccgaatgcggaagtaccgtgaagcaaaggacggtaaccaaacttacatgtgactgcgacggaatagcatgtattttaatccaataacgttcaccagcccaggcgggaacctgagctcaaatttatttgactcgttggttaacgccgagaaacataatcaaggtgatatgtccatgaagtgggaagcttgcttcctgtgggtatctcggaaagtttggcccggaatttattccccccaaatgagtacaccttggtcagatagatgaagtacgcactatttttagtgcgtgtttcttctatcgtgtttcatggctatttatcatttaaatagatc

SEQ ID NO: 2474 - DNA, 846 bp, Chaetoceros tenuissimus RNA virus
  genes for replicase polyprotein,1
gaaatatatattatgtatttcgtgctctttagcactgatctaagaaggatcttattatagattgttactttgtagcacaggaccctttttagggtcctatgttagatcgtctaactttgtatattaagatgtggacatttcagttaactattgaattacgtattatgtaatcttggtgctccagattggtaatctggagcttccattgtaacttagaattaataaatatctaaaatttaccaccttgagtgtttattctacgaatattcactctttgctctcagccttgcgctgagagcttttgctccccatttatggggagctttttgctctacacttttgtgtggagctttttcctgcctttatggcaggattttcgatgttttatctgagtcgactacggtcaagtgtttatactcagacttatcatcacctatagaaatttcaaaaattttattagttgaatttctatgattcgttacctttataagaatggtttcgtatgttcgaggaatcccctcagtactatttagtaattttgtttattaaaatctccgacgaaaggagagtttatcagaaatagaactttagtgccgaaataatcggtcctcggctacgttttaagcaacgtatcgctacatttatattatattaggtattcgcaataccatttagagattatgtatcgtttaagcatcagttaccgctggtgtagggtgttggcactcccgacttttaaatacctctacctcttttgtgagccgatatcactagattttcgtaaactactattacgattgttttaaatatagtttttcaaacacaacccccctcttcacttttatc

SEQ ID NO: 2475 - DNA, 846 bp, Renmark bee virus 3
  isolate SA-4 nonstructural polyprotein and1
cgtatattctaccattttggtaggatatacgtgagtattagtttcgacctttacgggtcaaggataattttaaaccttctttatggaggactgaatttgattgcacaattgttgtgaaccgtaaggtcatttcaactttgtttatatcaataagtcacttattttgatttgtttttaaatgtctttgatcatttaattctaaaatagagtaaactatattatcaaatctgtacgggtcttttcagacccaaataactaaatgaaaccaacccttttatgtttatatgttgtagtgcgtttattttacacgcattgtttttataagtaaaattagttgatattaatctgcctttcttaagttcaaatcttttagatacctctcgtcggaaagacagcaaattaattattttctattgttgaagtttagtggatatgtacttcttgttttccaaacatccatcataaaatattataaaatatgcccctaaaaagagccaagtattgtttaatacatttagtattgtttaactcatttatgtttcttttgcagaaaactttttataaaattactacacacagaatagaatatttctggtgtgaaatctattagcaaatctcgcaaacgcctctccgttcttttatggacgacgcgaatcgtgtagagatgataagttacagcatcagttgatgccgaggactatctagcaagttagtaaccctgtgtggaaaattttatattaataccacatcaaagtaagagtcttagatgtatgttccagtgcattgcactggatatccttagcacgggagaaataaaactgcaccccaaaacctattagtacaacc

SEQ ID NO: 2476 - DNA, 847 bp, Kummerowia striata picorna-like virus
  strain pt119-pic-7 genomic2
gtgcaacccctcatctcaaccaggtgatttgaggtattttaattcctggggttcctggcgaagaagcacaactctcgccttgataccggtgtcggctagtagatccgatggttcacctggtgcgcagcccgttccttaaaccatttaatattgcaccttgtaggactgagccctcctgcaagtagtttagtggcttactgaagaaacatttcaaaaaacaaacttaggtgtctacaatcaagacacctcaacccctgttgttcaaacaggtacaacgtcatttgtggcagatccggtgtcggccatacaaagtgttggcaggtcccaagatgtgtacgatttgtacacgcctaatagcacaagcaccattgccgattacctggctaagccatatcaagtttttgccggtactttcactgttgttgattcaattggagctattttgtatgcttcagacacaaaaccgtattatacaaattcattgaaaataaataagttgcaaggcttctttggtttgcgttccactttgtgtattcgtctggatttaaatggcacgccttatcatgcagggcgtcttcgtttatgttattatccttgtttttccctcaatgtgaggaaggggagtgctcacatcacgaatgccattcctttgtctcagttacccggtgttgacattgaagcaaatgagtcgtctgttgttctgcgtattccgtatgtagctacgtcacagtttatcgaactgactggcggagcggtcgactggggtcgtgtatatattgccgtcttgtccccgttaaggacaggccctgacaatttgctcgaggttaattaccgcgtctggacatgg

SEQ ID NO: 2477 - DNA, 847 bp, Shahe picorna-like virus 2
  strain SHWC0209c12507 hypothetical1
gggggacacacccccacgcacaccgtagattaattgagacatcagttagtcttgttggaaccagttgtactgtcttttggagagttacgactctcctccagaccagacttcatgttccatcgcacttttctacaaaccattattctgaggttagccacctcgtgcaacggctcatagacgcatacatgctcagtatacgtataaaatctatgttgattttacagaaaaacatagtcgctattatagcgcaacaaagctaaatactagataatttctgtattattagaagtatttattcctatgaattttaaaggaacgggcggcacccggctatgttggtttatgttatgtttatttgcgcactccacgcaagattatttaaacatgtcctgtctggacactttaggttgacacctagtaatcggtcgaattgataattcacctattacaacatcgaactcattggagttccatgttccgcttcgtttgaagcaatccggagtgaggcgtttatttgcggacctgtcttgcagggttatcttaaaggataacgcaaatgattaggagtattgaccggtactcagtcggaattattgtagataggtgtggcaacccatgacctacaataagctactggaatgtgaatacgttgtcgggctacctctcgggagaaatcgtgagacttacgcaataggttcgaggtatccaaaaatccttactagtagtgacactgttgtgtgtcttgctagtgtaagccgtttggtaacgactattctgtttggctgttggaataaatttgagggacgtgtgtaatagtgaccacgcaccttttatctttgatatcgca

SEQ ID NO: 2478 - DNA, 848 bp, Potato virus M
  isolate VIRUBRA 4/035 223K polyprotein-like gene,1
catcgtgtgttttcaacatgcggtcctgtgtcgttttgcgccctacatgcggtacattgagatgaaagtgcatgaggtgctaccaaagaattactacatccactcagggaagggcctggaggagctggatgcttgggtcaaggaagggaagtttgacggtatttgcacggaatctgattatgaggcattcgatgcatcgcaagatgaatttatcatggctttcgagctggaattgatgaagtacttaaggctgccaagtgatctaatcgaggattacaagttcatcaaactagcttggggtctaaactaggcaatttcgccataatgcgcttctccggggaagcaagcactttcctgtttaacacactggccaacatgttattcactttcatgaggtataacatacggggtgatgaattcatatgctttgctggggacgatatgtgcgcgtcgcgaagattgcaacccacaaagaaatttgctcacttcttggacaagctcaaactgaaagcaaaggtgcaattcgtaaacaaaccaactttctgtggctggcacttgtgccccgatggtatatataagaagccgcaactcgtgctagagagaatgtgcattgcgaaagagatgaacaacctgagcaattgcattgacaactacgccattgaggtggcgtacgcatacaagttgggggagaaggctgtgaatagaatggatgaggaggaagtcgctgcgttctacaattgcgtgagaatgattgtgcgaaacaaacacctcatccgctccgatgtgaaacgagtatttgaagtgctttaattagtgtagcttaggtattgctattgtattgaatattt

SEQ ID NO: 2479 - DNA, 848 bp, Picoa juniperi mycovirus 1
  isolate ANK_VIR-89, complete genome.2
ggtgcaggaaaactttttcccgacgtgtccaaaatttcctatctagtgatttcgatattaatactcctgaacaggaggccattcgacgcatttttgtttttaccaactataaaaatgacgttgaaaaatcgaaattacgtaacttatccagtgaacgatgtactcctgctacgtttacttcattggatgagtcttttctttatgttgatttttcttccctttcaaaatctctcaaaatcaccagggaaccttatgatgcagtatctgcatatattctttatttcctttttgatcctattcctattgaagtatggaaattcattcctacaacaatcttttggtcagagaacttatcaattccattttcacaaaataattattctaatagaagctatcccacgcctactatcatttcgaaattccgtgaattatttccttctccaggcggacgtgcttatgaaaaatctttcattttacctcatgatgttctttcctctcttgaaaaacctaataaaactaagaatctctacagactcatatctcgtcttcttcatgtgaaatgggagcctaatgttgtttctggtcttttacttgcttgtatttccttgcctactttagatttgttctttaccatcattattaattgggatgagttttggcaatgtgataagaaacaattagttaaagtgttaaaggacttacatactgggattcgtcttacattcagtcttccaaacggagttaggttgacctcagaacagactagacatcactacggtctcgatgcactctacggccggtccgacactttaactaatttttctgcaaaagatgaaattgctcaaaga

SEQ ID NO: 2480 - DNA, 848 bp, Phytophthora infestans RNA virus 3
  complete genome.1
tgagatttacgcgcgagcgtagatccgccctagacgagtggtccaactggcagttaaagctagccagggactgctcgggtcaaagctagtcagttgccgagtggcgacggcggctgatactagagaaggcgacaccaagtgtggacgctgactcgcacgaccttaaacgtcttgggtgcgcgtaactgcaggttttggcaagcttgtagcctagcgtgagcttcagtgtcatggttaagtcaagaacataaaccggatagcactggagccgaaaggcgattacccgtagaagctggctttgccggtgtagtgttctggtatggacacgctaggggtgggtcgtcggttgtttaacgcgagtggggtatgctaaagcattaaccacttgaggcttagcgtgaaaaactaagcccgcgaatgaccatgctaatcggcaatagccgtgtagttgtgcacacaactatgtcacaggggtggccctgtataccggtatcttcttacggtatactaccaagttatgttaacctgcggtgcgatgaataagtatcagaagcagggtgtggcagcaggaggaattctgttgttgctaacgtacgctcaactggcctcacggcagcgggtaagaaccgtatgagttgggtggaacgtgccttgggcgatagacgtccagggtggaacggccggataacttggggaagcagaaagctgcggggattgaatggcctgcctacgggtgcctgatagtgacggaacatattggataacgttaatccaattttcaaataattaacctctccgcagcctagcagctgggatacatagcgggttaactactattaacgataaag

SEQ ID NO: 2481 - DNA, 848 bp, Beihai picorna-like virus 25
  strain BHJJX20433 hypothetical protein1
gtcagacgttaatattactttgtttaaagagtcttattattctcgttatctaacttattattcaatggtctccgttcatatagttgcttatgctatatgttccgcgattttctgacctaataagatgcttggttaagaaccataaaagtccccgcataggaatggggtggccttagggtctctacaacaacggtttcggcatttgctgagcccgtgtcttgatttgatttgtgaacgcgtaatttaaattttaaaagcattctggatcaaatctagttgccaattgaaatttagttaaacgcatattcattttttattcgaggaagaactatgcattgcgtgagtgtttccgcaaaatgaattggtgggatattccccatcacccaattctaaatctttacaattgcatgaatgtgcataaacacatttgaaacttaatgagtagcattagagtttaaagattgtggtttataccactttataacagtttgttttacaaggttagatctataacggatttccgggggtctagcgcggttgccacagactcaacatcctttctttttggaaatgatagtgtgtttgttagtgtacattactacggttgtttttatttaatttgggaccaacttttgttgaacttacattgatttacggatgtcaaccagttacaatttctttagtctgggagatagaacgccttgtaagtagactaaaactacagatcgggggcgcggattaatgctatcgtggacaatgatgtgtttcattgatttgtctggaaactttgtttcttccccttaaaaaccggcattccaactgcttttaagcatagtcgcgtgcagaca

SEQ ID NO: 2482 - DNA, 850 bp, Picornavirales sp.
  isolate ytb135pic02 genomic sequence.1
atagtttcactctggaggttacacataagtcaatttcttgaaatacacataacatagacgtgtcaattagcagatagaaatatggctttatgtgtatatatgtaattttgaatttgattgcgtgtattgtccattttctacagatagggactcaataattttgcagtgcgctccatctcccattagtgctgtataaattattccttttcctttttcccttccctttggatttataatgtgcttatgtttcacttgcataagcaaacttaaaattatatattgtattgtgattttccaatagtatataaatttaagtagacaagttgtgaacttactcttcggagtattttattctcttctgatatgatttggctttgtattttttcggatgtttgatatggcatgtgaactgattgaagggcttcggcaatatgtgaggatctgtaatggtatccaaatattctgatagtattacgcgtggcgaattgagatgtgacttattttaaaaagaaaactcactcacacatcactacgagtcgtacgtaattaactaaccgagttgtcccccctgttcactatcggctaacctgatgcctccaggcgttccgtcggaaacttcatcgctaagcctagcggctgaaacttacaatcaccctttccactgttttgttattgcctagtgcgagaaagacgcttttagatcgtgaatctataagctggagtgaagtacgcgtgagacatgtgttctgcgtatgaaccttcataacaaaattagtggtcggctattgacagtaagaccttcagtgactgcgaaaatggatcaagatgcccaaccttgaccaattggctg

SEQ ID NO: 2483 - DNA, 851 bp, Hubei leech virus 3
  strain SZmix63518 hypothetical protein 1 and1
atataattgattgatttcaattatattcgtttgacgtgttcgcacgttgggtgaaaatcctgtttccgagatttatatatgtatttgaaccattagctcttttagttcaaggtacagctaattctggcctttgttctactaaacaagattgatttttggattcttttaaggccttttcgtacagctcatctgtgcgttgacaagcttgaccgatgtttcaatgcattttatttttcccggaacagacataaccctgtttctacagcagacctatctgctatatcaaaggaaccccctatatgtttacagaaaaatattccactaaatgtagtgaagaagaatgccccgttggcactcttttaacgggaggacataaacctgattctttcaggcctgcccccccgttttacgggaggacataaccctagcttctactaggcctgcccccccgtgtatcagggcccctgccctgatacctctgtttttactttgaggcatttgtaagacctcaccagattcatattgttataaaaatacgaaaataacaattcctcaatatgaacgttccagattggaataaaaaataatctataccctttggtaatttatgtcgatctaagtttaactcgttccactttgtttggttttactcactgcaatctatgatgttcacagtataccaacttatgaaagcgcttgatactttatcgcgttatgcaccctagtcttttgtgacgccggtttgacatttcgacatattttattaaatacttatcaggttaaagtccagatatatcccaaggaaggggagaaataatactccatttaagactcagaattacaattttaag

SEQ ID NO: 2484 - DNA, 853 bp, Morelia viridis nidovirus 2
  strain F17-700-11, complete genome.1
ggtatatataatatacctccagacagtgatcctgtcaattgtgaaaaccatatttgttaaccagttaaataactgtttgaccgcctgctaaagtgggcaacttgtttttgctaaaccccaagacagtttagatcagtccaatttaatcaaacaaaacaattgaaatattttattttattgtcagagtagttaactgattgtttgagaattagtgtaccagcacaaccactcagccagcctaccaaaggcccttggccacttcccctctcacgacttataaaagtcgccacccagataatctacgaaagtagacatcactcctatttccacccataggcactaggagaacaggataaccccgaaaggggcatcctgcctgtgtctctcacattcgctagccagatatcttcacagactctgctaggcttgtgacccagtccgttcccaaagaccgttacctcccgagtagcgcttaggcgcgaaagggaagggagtacctcccgagtaagcgaaagctgaaagggacgggaaccacggcaagactaatcttagtcttacagtgtgggcaatctggtaattgtccccaacaatcaacccaatttgatgtgaaaacatctaactcggttggcttctaactagctataaactaggatatctcttaacggagactccgaggagggccaccaacagtccaccagtttatagtaagcaacaacaggggcgatcttccaagacacctctcaccacaagacacaacaacagtcttgtgaagccgacaatattgtctacggacgtattatcgagggttttaaaggaggagttagtgattaaactaatttcaacaccaataact

SEQ ID NO: 2485 - DNA, 853 bp, Scaphoideus titanus iflavirus 1
  isolate St_IT1, complete genome.1
atttgttcgactatacaatagcaacttatctttgtgagaattgtttccttgtttagatcgacttatgttggatgtagtcaatatatacgagaataggtgtttccttgattttattcgtttagcttagcttctcgcgtaatttcaatagcatggtaaaacgtatccctgttgctacattttagttgttaagttttagtttttaagaacaacttttaatgttaagaaattttgtttgcttgttagcgttgatgaatctgcgaaaaaatgttttcaagtatgaatgaaattttcctatttagttaggtctgtatgtgtatgaatgaagtgtgtgtattagtatgttttgtttctaacctttacccattcctgttcctttgtaattcttcctctacaagtaattttgttagtagtacttataaagaattcgatcgtatatagaccttacttgcagcagttagatgaaggtctacttttcgattagaaattgagctcagccctgtgacgatgagtgagtgtatgctttaatattatctgtactgaacgaacttaagtatataggttacgatttgcgtgtttatgcattatgtcggtttaaccctatcttaagagatcgttgtatttgagaaattttagttcttcctcgcttgtttagaatcagatcctggtaaagcaatttctttttgcgaagtaaagtatatgtgacatgccctttatatgacctcttgaataagtccccctcaagagtatgaatacattatgaaagttttggaataattaccctttcccttcttttccctcgactgttatcttttggacacgacccctgctttgtttaattgattttatagcaaat

SEQ ID NO: 2486 - DNA, 853 bp, Hubei leech virus 4
  strain CJLX30730 hypothetical protein 1 and1
tgtatatatttgattaactatcaaatatattcacgttttatgaaaggatgttgcttttagcaacatctaggaagtagtgcttacttctgacctatagcctggttttggcacgaacggataccgtatcgtcataatgcaactgggcctttatggtaccgcctcttatcattgtacgataatcactcgaacaaaccaactatagtcctggcacgtgcgtatgcatgccgtcactatgcagagggccttgaaggtaccgccactagtcattgtactgtaattacacgaacaaataaagcacaaccccatttaagttccctattcctgggttaaggaatgacgaactatcgtctaagcaaatagtgtgttgataatcactaaactatcatccccccttttttatgttaaatgtcaggtgtttcctgaccttcctcacaagggaatgcgttcttaacaattttatattgttaaacacactagtctttttagacttttattatctggttttatgaatactttgaccatgaccccatactacagaatgcgacgttcgcgtttgctccatagtatgtaatttcaaaggtatgttgtgggtttccaaccctccttgttttacgcgttttgccgaacttgatattataataacaaatttccatgtgcctgggtgtacttgaagatggaacgatgaactgtttcctatcacttcttgatataccccgcacctctgagttatttttaaagaatattgtttttagcctttatgactgcaaagatcagcatattgtttacgttatcccctatgtatgttaagggacactattaattgtagaaacaagtaacatatgtccatgacgct

SEQ ID NO: 2487 - DNA, 853 bp, Beihai picorna-like virus 32
  strain BHNXC41402 hypothetical protein1
ggaactccctgtaggcctcaaagcctacaggagttccctagagaaagtatattgtgtcgtttgaccgcgacacccgatatatgctttcacagatattcggattttatattccttttcaatgtgaaaaacattggcactggtaagtgctgtcgttactgggatgtgaaatcccggttcgtagtattttgctatatgtgtttaaaggagtctttgtatgctgctaacgcggcttcatcgcaaagtccttatttcatctgttatatttcgtcaccacccttatggtcacccgtaagtgatggttcatcatagattctatttgtggcgagtagagtttattattgatgtataccaccccggagagtcaacttcgttacgaaaatcaagccccttgcgctatcatgtattaggaaattgtaaggaacgtttcccgtattacttgatagtgtcgattgatgctaactcataagattggcttcatttgaggattatttatactagatggtttagtattcgtgaagaatcccactcacattatatgatttcgcttaaccaccttcactcgcagtagagttgaacgaaggtgtagatctaacatttttgtgagaagaattggtcttctcggagctatttgctcaacgtaccgagacattattgatgtatacaataccatattttacaactacgttttaaccagggacaacctgacctggagagtttaagccactcaatttttccgtagctctgtctgatatgtgaggtaatcattactcagaagaagtttcaactatgatgcagtagatatcgtagtattgtttagcccttgtggttagttccctattcccattttgaaatc

SEQ ID NO: 2488 - DNA, 854 bp, Beihai picorna-like virus 33
  strain BWBFG40845 hypothetical protein1
gggagagaaccatggaataactccatggttctctcccttacatatgtttgtgtagtgtaccgcactacccggcaaacatacatattcattgcagtacttgttctgctcttattttaaaatgcgtaaaggcgtgtcaaataggggtagaacccctaattgcacttcctttatacattataagagacctatacaattaccgaaaggcaaatgtatagattatgagaatgtatattaatatgatatttagtcatcactccggaaaaaactaattccgtaagagatgaccgcattgtcagctatagttgtggctactatagcatatgtgaatgccgtcaccccgtagagtcaactgcgtcattaaatcagcaccttctgtggaaaatcatagtagcttttaaggacgagctatgttttgatttgtccatatagaacattgaatgttattgtatgacattggatgactgagatttatgcaaattgttttgtattcagatgagaatcccacttttagtgtgtattactcgatttaacctatttccacccgcagcagggttgaagtgagatagtagagttaacgccattcgaagaagaattggtctcgtgtgtgtactttaatccaccgatatagagctatgtcaataagcctcttatgtggagctctggtatacaatatgcgtttatttaagtacgtttacctcatgacaacctgagtgaggaggtttggtcacctaaatttttcgtacctatgaatatttcgctgaggtctcacacagttagaaaatcgattgctttagcaggatttgttcttagttttgtttagccctttgaggttagtcctagttcccatttaaatc

SEQ ID NO: 2489 - DNA, 856 bp, Weivirus-like virus sp.
  isolate war204pic4nc genomic sequence.1
atgcctgaaaaggagtggtgaagatccaaaccatgttgatagtgccttgtttagcctcggagagcagttggcgactgtttgcaagcgaatgtttattatagtatttactaaagtatcatgtacctgtatcgtttacgttgggtacatagaagtggcgacgattcctgccttgtacttactatattagatttagcccgaagtttccgttgtaagatagctacttatatcaatccaaatataaatgtcccctttattttttataaagagtaatttcccccataccgctgaaagtgtctacaggtacgaacgttattaccagaatttattttggattatgcggaatgtggagtgtttcatgtatgtgttgctctatttactgtgtgaatgtgtgcgtatgtgacaggacctcttcttaattgaagaggacagacgagccaacttgattttcttgtaaaaacatttactgaaagtgtttctatctatgatttctacaactaggacctgcccgtgtagcctctggctagtagaattctccttcgcgagttttcgaacgctaatgcctcgtgtttgactcacttaagcctgatgagactttcgatttctctcaggagggtgttttctctctgatgttgagcctagaatgataagatagaagtgcgattaagacctgttttcggattattgacggaaccgttttccttgaatgtgattgagtgaagttgtctacctaacgccaaaaggagccatgtcataaactttgtttggccaccgatttagttaggaagttaaactctatgtgttcgccttaaccggcccaaaacccctttttgctggcgagtgcccaaacccttaaaca

SEQ ID NO: 2490 - DNA, 856 bp, Changjiang tombus-like virus 15
  strain CJLX30583 hypothetical1
ctggtggcctgtgtgcaattaattctttgtgttcatgcctcatcagcattgaacagtacttcaatattttgattatcaattctttgcacaccgcccaatgtatccagtgaaccatggctagacagcggattgctttgccaactgcggacgtcatcgtgccgagacgttaaaacgacgcatcgtctactgccagcaccgatgttaactgtgcaggaccccccagacaaaggaaaacatgagcgcactcgtacgtggattaaccaagtacgcgtgtgctggccttgccctggccactgtctatgctgcggatcaattggtgaagaggttccaccggcgacgcgctttgctgcgtgatgctaaggaggaccttgcagccctcaattcgccatcagtcatgcgtgggcctggtcttgaccaggtcccaggggtggtcactatgctggagcgccaaggcgttgctccagtggccgcctcttccaccactcatctcctccgaaacaaccataagtacttctgtgcgaagtgggctcgggcagtgaaggctcgctttgagtttgccaggatgtgtgaggacaccccccttaaccgtgctgctgtccataggtggctcctttctcagtggaaggagcttaagaacagcgctgggaaggggatgccgttgcatgtcatggacctttacatgaccgatgctatggacatgagcttcctgccaactgccgaatatatgcagagtgagtctaagagggcagttaggaagcgcgcccgcatggagtactacaacgagcggaaatttgtggagggatggaaataggggggcctagtgagggtaagggggtttgataccgtcccgcgattt

SEQ ID NO: 2491 - DNA, 858 bp, Beihai weivirus-like virus 3
  strain BHZY60776 RNA-dependent RNA1
ccatgccagaagacgaattcgatgttggccccgttcttttggggcctcatctgcatttgaatttattaagggagcgtcgggggaggaaatgcccccggtggagatgacgttgtgcgcaatatgggttgggggttcaaagcatcacccacccaggggatttcaccgtctcatccgggcctgcgcactgaagggggccgcaccccgagtcagccttgttcttctgccacgtgtttcactgtgcacggggtgagagcctgtagcggcgtgtcgagccccacgcctgaggtgaaggcttataggagactggatttcacccccagtttaggattggcctcctttaactcctatacccgagatgggcaatgcggtaggcaccccatgatgccccacatctgttgatgagttgttctttttaactctctcagatgggcgtagggatacggggagaagtcgaagctggccgccaagccgcaaggcgtggttggttggttacccatcctgtgttgaatggcgcggtaccgaggcctggcgtatccaggtaatgctttcaagaacatggttagagcctcgacggttgaggaaccggtcaccgaccaccgtatgagccagcggggaacccttcctgttccaggcttgttcgacccatgtttaagagagtgttggtgtgtatagaaatcagtgacgatgcaagtccgagcaggcaacaaaataaaagtaaaatatgcctgctcgtccattgtatagttttttccggacctgattctgtatgaacaggcacaagcgactcccgcttgagacgtgtatagtttttccgaaacgtcacagtagtgttcatccgagtgtacattctttaagaga

SEQ ID NO: 2492 - DNA, 859 bp, Beihai picorna-like virus 15
  strain BHXG24735 hypothetical protein1
cgcagataaagaactccacgtgcgcgtttcgcgcacgtggagttattgttgtatttggcgtttgactacgcccagtgtacttgttatgtagtgagttggggcgttacgacgccccctcttcctgcattagcagctacattgacttcaatttcatctttatcatacccgttccctgggatagtgggaccccctctgtcatgaggatagtcatttctgacgtaagacagacgtatgaagaatgacatattgaatataggtaacattgacgaactatgcctctaagttcgaatgatatgtttaccgaattgatgtgtaccttcttttgaaggcacgtctactttcttgatgagaccgaccgaaaggcggcacttgattgtagattcacattttatgtttctcgtgagagaacacaattcggtacaggtaagactgacctgtctggcaatcggtcagagattgataatctcgactcgatttgttgtgattttgtattgatcactttagcgccgagaaggcgtttgcaccgagagtaagcggtacgagacatgccctactagcatgggccgacgtaatggtcaagtgaaacttgttttaggctatctgttccggtagtcacgcagaattaagtgtactgaggggtggcacccgatgaaggcacttttgctactttgtgtaaacaaattctaggacatcattttgatattttgtcaataattttatcgctatgtttggggtatttacagaaactctggcttttgccgtaagacgatttatgagacattatttgagacttgatgtaagtgattgatcttttgatcagtaattcgagggactacgttccttttatcttgaacacagc

SEQ ID NO: 2493 - DNA, 860 bp, Wenzhou picorna-like virus 53
  strain WZSLuoI86067 hypothetical1
gctataggtctacctatagcaagtttcattcctgaagcagataagcctctcgaggatattaatttgattttatgttacactgtatacactagatgtgggtgttgttactcacacactagaagacggtggactaaagattttattatatattgtatacaatcaaccccaacctattggttgaaggcttccagacgttttacgcctagctggcaacaaattagtcaccagcgatccaaaacgaatttggagtgggtttgacatcccactaagaaattgtcctgcatagcagggaaactaacgtctggccaaaatcctattattaggtgcgcagcgggttcgctttaacctgccactcttgtttactgtcagtccgaaagagtaatagtcggacagaatatgtcaatgaattgaccggaatgaggaccaagttgattgagcctcgccctccgaatgggccaagaatattttcttatattcccacgtatatacacaatttagcacaatagtgtattaacccccttattgttttggggcattgaatattgtgtatagactttgtcatagagtcacacttgtggatattttctgctcgaaacgagtagatagggagattcatcacacaacctggataatcttttgattataaaccatatggaagtgtgggttgaagctcaagtgtgactggtctgagagcgtctatttgatcagtagacagcgcttgatgaagaccgcagttggtggattaacaaccacttatggtatatggcaacctgtgtgaacagtttctttactctgatcgtgtgcttcgtgcaccagggtaaagtattgtttgacaggacttgggacttttctatacaaaa

SEQ ID NO: 2494 - DNA, 860 bp, Beihai weivirus-like virus 9
  strain BWBFG39428 RNA-dependent RNA1
gcctgcgcctcgataacagtggtattacgtttcaccccgtgttgcttgcatttaattaaagtcccagggctcgaggaggaaatgcctcgggtgagatggcgtagagttcttataaaacaggggcacgttccgccgtcccctcctaactcggggttctgaagggagaaaccctaacaagccaggcttattcttgacccctcgcgtgatgagcgcacgcagggcgcagcctgccggcatggtgtaggagccagcctgaggtgaaagccgtatcgagcgcgggttagcagccgcgtaggatttgccaccttaatcggtacaggagtcccccctctcccgcgcgctccctaagggatgcgtgaacccagcacccaagctgtaatggcgtggcctgttggaagggggactaaagaatggttacgatgtgtgccagcactgcgttttgggcttcggttcattacaagacaaatctggacatgcctagtagcaagagtgcgtactctaagcccgccgacctctcacgttgacgtcgtactgtggttcgcccacggacgcagctgatcccgttcatgtcatgtcggttgaagggtggtttcttgagccccacccgtggaagcaccaggagttgatcgcctggcgcggcgccgaacggggagtttgctcgcccgatagttttggccgcgcacgtgtggagtacgtattttgggcatgctgctgcgtttgaggatagtcccattcgcaccacgctcttccttaagggaaatgaattgttttagttatgttgttactgtttttccagtgatgccattttggcacacgaagacctggagaggacacagtcgtcgtcttgagttgcttcaaca

SEQ ID NO: 2495 - DNA, 861 bp, Riboviria sp.
  isolate bpk205shi02 genomic sequence.1
gtccaaggggtttgaaggctcggtctaccactttgtggggataaattgtaactgcgagcaatggttgttggtttcaccctgaaacccgtggcggctgttaccccatctttgagttggtggtcacgctgcaaacgggctttcggtgaagccgtcctggagtctccaatactccagtctctttgctgctatgacagtagagaggtagagtcgtacaaggcggatcgcgaaatccgccatgacatccgtgaatccatgcgcacacatatgggttatggtacggctgctacttgtgttgagaatgtgatgttggaaacgtttaacaccaccggctatgatcttagcaatttctcgaccatccggacccagtgcgcggggttgcggaaaaccatgacacaatgggacgaattcttccagttgaaaggggttgacccattcaaactggtggacttcgagattctacccacttgtgttgtgcccaagttcgctgcgtcaatggccttgatgctgagaagcaaacttggaaggttagcaccaaatgatgctaacacgctccttgtggagagggagtacttgcgggtggcaaggaagttaaacgtgcgcgatgtggacatcgtcgcgcaccagcagttcgtgatgaatgctgtgttcggtgaaacgttgctggacagtgtagctttaaccaggagtcgcattccaaggtggatgcggtgggcgttcgaggtggaaacaccgacagcgcccgtccgcgtctgctaggggtgcccactcactgtgcgtggctgtgacactaaggttgctgatgagttgttagaacagatcagaacccaatgtctcggcaagttgtgcgcgcgcaggaatggg

SEQ ID NO: 2496 - DNA, 862 bp, Guarapuava tymovirus-like 3
  isolate GTV-like3_1 polyprotein and1
ctcacgcgccgttctacctgactcccacgaagatgagtctaccgacagcacaccccaaagcgacaatctcacaacctgccgctctgaggctagccctacaaccccggtccttgaacccttacccacctccgctcttgcacccgcccaaggcacttccgctgatctctatgaattgcctcctttcgtggctcaggcccccctcggtggcgccgccacctcggccgcccctttttgcacgcccgtcggcccgtcgctctctgaaccggaacgtccgtcagcgtcgagccctctcgacagcgacgtcagcgccgcgcctggcgtctccgagcctttctaccttcttcacaactttcccgccgccagcgacattctctggcccacgcgtcgacgagtcaacggcgcttcgaaccttcccgtcccacacaacaactgcctcctcgttgccctggccgaagttatccctactcagtctgtgcgctcactttggacccgcctatgcgagctcctccctgactcacaactcgacagcgaggagatccgcacaatcggtcttagcaccgaacacctctctgcactcgcctggagccttcaggtccatgtcaccgtcgtctctggcaataccagcacctacggcaatccactcgcctccgctaaagaccattacaccatttattacggcaacaatcacttcagcgcccagagggtgctccgcggcgccactccccaaaaatatcgcccggtccgacattcagactacgcggccttacacaagttcaccaccaacagcgggcatcgcctccccttcgacaaatttcacaagcacaccgccgaccgtcatcgtgccaagaacctaatctccaac

SEQ ID NO: 2497 - DNA, 862 bp, Lactuca sativa picorna-like virus
  strain pt151-pic-8 genomic1
gtaggtcatgtttgttgaattggaggcgaataatttccttgccgtctctaaacgcgctagtcagcgtggctttgcctatgacgaacctcggaagcataaccgagctatcaatattgctgaatagattacgtagatctattttaaagaagaatacggaccccataatacacatagagagatttgatcgtctatatgatttgagatgacttctttattttgtggttttttcgggcttttatttaaaagctccctcgggttggtctcccgagtgctttcgacattagtgtctaatgatataacgtttgagaagatattcagcccatcgtacgtacttttttccttatacggtagccccgtttggaattatttacttactggtggtattctcgcggtaaaatgactttctttttaattttcctttgtaaaatattaaatttttctctacctattttcattctatcatttatgtagttatctttctgtgtttcatatcactcggttttactgttggcaacacattgttttttacattatctcactcggtctacatggtggtacttcataacatttcactcggtctacaaggtggtacttcattttcattttcattggttatttgtccattgttgcgcacttcaacggttgatgtgtaattcgttgttttcccccagcgtgccgtagttcacggtaatatcatgaacatccacgagcgactgagcaggattagctttgacgttgctatcgccgtatattttatataatccgcgtgcggcaaacccataagtggtgcggaaagaacaaaaacatggaccattaaggccgtgagcatctttgtgatactactacaaacaaaaagcagacc

SEQ ID NO: 2498 - DNA, 863 bp, Beihai picorna-like virus 54
  strain BHNXC41489 hypothetical protein1
ggttaacaccgcatagcagtcactttctcaagaaaatcttcttagaagactttcctgacatgaacgatttgttagagatttataagatttatttgtgagtatagtactccttgtagctcggcgaaatcgtagagtgcttaactattgatatagtcaattctccttgcagctctacggatttgtctggagcttgattttgatatcattagacactttaagtatctcctaatagctttttcatgcagaaagttttaaactaaagtaaccaacaccttttgtatactgccatgttggcagctagatgttcctactttgaagtcgttttataccgcttctggtagtgttttatatttgttttaaaatataaaaatcgcttgtgtgattcccagtagggaatttctaaatagtggactccagagatgagtaatggccactttgatgaacctagaataagcagttgacgcgagatagcactttgtgtgaaacggtcctgtgataaaaagagaagccgcctgagtgggctagagcgtttggaagcgttcgtcatcaaagatgaagaccctttatgggtaggatacaccaaatattgcaccaggcaatgtgcaatctgattttactatttgagtcagttaaaaccaaggttgaaggccaccttgaggtctctgcggcagaaatcaccgttcaatgacaaattctctcgtgtaaagtgagagagacaacagcaactattttcatcagttctattacactggtgaatcttacataggataatagagcaacttcccggtagatgtacccggatattaacgagcacgccgtagcgtgcacatcatgaaattttgtctttcccattccattttgga

SEQ ID NO: 2499 - DNA, 863 bp, Beihai picorna-like virus 2
  strain BHNXC40556 hypothetical protein1
gatctccacacggtcctttcgaccgtgtggagattcagttaatttcttttgtcaaatagtttattctcagaagtgcatactatatgcttctgagactttatgtgtagtaagtcatactttagagttgagttattacactctactctactttatgatatatgtatgctatacttaaagtctatcagaattgtacttctgttagtgagatatttgatttataagaattacagtaatcgaaaccccgtcatttatcgactttctgtgtttgaaatgtcgcacagatcgtagttcctaaagttagacataacataatttaaggattgtcaaggctaatgattaagttgttaactttcttcttatgatttagttgtactttttaacttgatatagcgcacagcaccgtgcgcttccaatccgacctcttaggtttaatttgttagttcagtaaccgtcaattattgaatgtttacaaattaacccatttgtttattaacactatttaaacatcttatttataatatttttgatttagacataggacttatataacctgttgtatccccctactatatttcatacttgttttaacggaaaaccgcgtaaagagacgtataggattcccagagaatttgtcttatagtagaagaatcggccaatggagtatatttaacgaaacgtacatcgagatccaatgattgtcggaatatattaccaagatatgtatagtttaaggcatcgtacaccgcgatgttaaggtcgtcttacctgatttttaattacctctacttggaattgacccattaatagagtaaataattagtgtttatatattgtgatttacaataaagtattttgacgttttt

SEQ ID NO: 2500 - DNA, 864 bp, Rhizophagus irregularis mitovirus 1
  RNA-dependent RNA polymerase1
gggtgtagccggtagaaataccggttacatgtcaagttactagagcttggctctaatagacctgatgtaggagtttaactcctgaagggaaagtccgatcttggaatggttggacctaactattagctcacctggaatctagcaggtttgtgttcagaacctacctttggagcagggaaccgtaaatgggttttcacacctatgagcccggttaaagcttaacagggtgcccggccagggcctctgacagggtagataagtaatttggaaacaggttactaagaaaggagagagggtaatccgaactcctgccttatagacagaagcgaccgctcttaaaccggagcgaagtagtagagatgattctctgaaaggacagctggcaaagtcagttgctagattcgtaacgaatctgggagtcaaataggtagggtagcacccatccttactataaggtcccccgaaggggataaactgatcacaaggaccaactcattagttaaaaggagataaggtgcttgggtaaccgagtaccggggtaactgggatctttcgatccaacgattgaaggaaattacgagccttattcctgttagtctgacagggtaaggtgagaccaggtctctggcaaactcatagagttaggaccaaaggtggcgacaccgaactgaaccacagttgcctgcggcctgtccggactagtggattccctaggctcatgctgagcaagaggattcaaaggtccaagtaacgaaatcaggaagagttctgggtagccctgtatagggcatcttgagctttaactgaggacagaaaccgaaggtttcaataatcgacgctaacggtcaattcaatctactaatt

SEQ ID NO: 2501 - DNA, 864 bp, Shahe picorna-like virus 5
  strain SHWC13542 hypothetical protein 11
aatttttctgcacatttattgctagcgccttccctcggcgtaggacggtttgtctatcatctgtctgttcaatgccaaaccatgatgatcacgtattgtcatggtatgtatcagtcttaagactgctttgaggttttcaaatagagggtttgcactagctttgctggtgcttttggggagttatctccccttttagcgttattgcctcatgaaaagggctgtaacgcgtagttttcgctgcttttgactatgataaaagcagcatatttgcctttatggcaaagtcttttgttcttgactttactaagaacaataataggctagtatttgttgtaaatacgtatcgttccacgtattgtagtaaaggaacgcatgttttcaacatgtagggtgcaaatcccttgctggctctttgcgttttgatccactttatgccagtattgcctattgtatttttgagctttggatcagctcagttaagttttaaaaagaaataaaaattaaaaaatatctgtccaaataaaaagattatttttgtcatatttgttttaaaagctggacagcaaacagccattttaattaggtggagaaatagattttctctggttgttattatacgttttatgttcttaactgtcactgcatggaatatttccggttcacacaggttaaggacatagccaccctgtgagtttccggggcatgtttcaggccttgtaacgtattttgcatgcttcatttgattttaatggtttattcctggtaggtaagagtccaatcaggtcttccccgtgggatcacggggtatccctttgaccgggagaaataatacgtcatttacacgcctagagacacgaaacatta

SEQ ID NO: 2502 - DNA, 865 bp, Fusarium graminearum dsRNA mycovirus-3
  complete genome.1
gaataatagacccgaggagggtggcctgattcgagccaggtagcccctccgtctgttatgtgatgtcctaaattgttgggcctcacctcaaggtgcagagacgattgcactggctgaacctcggccgtaaaacgaaacccggtgctaaatcacaaccacttcattctttcattggttgagcgggtggatacccaacacttacagatgttgggacggttcagcgcgcgtaagtccgttagggtagggtggctttatagcatttagccacaccaggccagcggcgcgtagcctaacatttagaaaattcgttcttccattaataacggtatgctccgttagggagaacgatgcttttaaatcgagcgtgcagcaactccgacctgggcatgtcgttaaactacctaccttatcttcgggtgaagctggtccccggagatccgacaaagccagtgcagcctcctgtgattaaaccagcgagtagggaaccgacgccgacttccagatatggtcgtccgccgagggtgtgccaaccgatcagcgcttgcgctgccagtgtaaaaactgcgctcttgagattagagggttggtgctaacgtagagatggtgtccccgcgggcttgttcctcgtagatatgcgagggagcggcttttgcccccgatccgcgggcatatactaccactcgaacgtgctagacttaaaaactctagtggagagacaacacctaccgccccgacctgcgcaatgtcttcgactgttcaggaattacgccatggcgcccccaagtagcaatgcttgggccggtgtggttgtatagggcacagaaagagtccgctctcccttcatatcccctgaagggcgggaacg

SEQ ID NO: 2503 - DNA, 866 bp, Wenling crustacean virus 8
  strain WLJQ104142 putative glycoprotein1
ccacattaacttccgccccacgcacgccgcatgtggtataatattactccttactttatagttttcatttacacagtatactgcttcttgtttatcctccatatggtgttaaatatattagtagctcctataattgtactaatccttctcataataatcttgataattgttgcaggctgcttttccacagacttgagtgctaggtgttcgcctgagttgcctttatccaaatgctcaacacaacaacagtcagctggccttatcctcaatccataggatttgtgttgtatatatacgccttgtcgatacttatttcactatttgtatatgagcttttaaccctgctgcaaacaaagtccttcttgaggtttactatttacttgtctttcatactagggctggcttattacacacatcattatatggtacataatataaacaccattgatagttacaatcaaatgactaatgagtgatatagtagcatctatttccaatctacagagtgatagtctaaacttcaggtatagattcattatactcacaaccgtatcgctaagcagcatattaatcaacctactatctttgataggtttattaatttgtgagaagcattgttacttacctgtcactaactacaattgtgaagacatagactatatatattatgagtatatattctctcattacccttttataggattttacaacactttcagtagagaaggctgtgatttttatgttactttctataataaaatctgtgttagttgtgattcatcatcccgttgctataagctacaaggtgaaataacaaaaataggaaattgttttgctctagtgaaaagagactttagtgcttcagt

SEQ ID NO: 2504 - DNA, 867 bp, Beihai sea slater virus 2
  strain BHHZL10411 hypothetical protein 11
tgcgtagcgttacacgctacgcacgcttattttatatctcgtttatttgatttatatatatttatttagggataaatatgaagatttctttgagaaggtaggccttggcttagatttcaatatttcaatattcgagatccccttttacacccccctcttttctttttaattggctggtgttcaaaattatttattaattttattttattattcgtattagtatgtttggaaatctttaactattacgaatttcattaagttggagtttcaaaattttcatctcgttccctagattatgtatgggaaaaagttcgtaccctaacgatttattcaatgggtaagtttgattggtataaacacgttttcaattttataactaaatatacttgttaataatctcttttattagagttatcctgcgggatgtcttagacataaaattattaataaaggtatttattataaaattagatttctatccggtttttacttagatcatgggaaatctacagtttctataaagtatgtagtcctgttaattagagggcctcaaatattaggtacgcttgatatttgcctctaatgaggaggggaaaaactaaaggtgcgattcgacatcaaacctactcctgtattcatattcgtacgcgtaagtgcttgggatggataattgaatactgtcttatgtaatgtctggatgtaaaagatatgagcaaagtagcaacgtcttgttaaataactcctcttatcggcgcgtttagtcctagtcgcgcagggacacattcttatgttatgtttgtataagatcattatcagccaccgtgcatatcccctcagaaatagcccgtaaagtacgatttatataca

SEQ ID NO: 2505 - DNA, 867 bp, Shahe picorna-like virus 9
  strain SHWC0209c12638 hypothetical1
attttatcatatttagttttgctccggagaaaaccgggtaacaaatggacgacctttaattgtgagacacatgggggttggagccaacatgatattagagatcatgttcggtagatcatcttcggtctggcggtcatagacttccagggcttgatgtcgtccatggcgtgaataccagttaggtctaaaggcgtttgaacaaacaaacagaaaaatgatggtaaaccatcaccacctttacttcgttgtttcatcattgagacaggcgtgaaagaatgccatccgtggagtcgctttatacatactgcgctattctgaccaatattcgacatactagaaagagaatattgcttattgtagaccagccatatgagtgtaatcttggtgcagtccttgttacactatgatttcaactgccacgtaagtgatcgcgtcactatagaattccaaaaacattgttttgttctaccgtgtcaatttatcatcaggatacaatttttgcttaggcattcgatggttgtcgtcccttccatcgaacccgcacctcggagaaaggtgtgctcccacattacgtcaagttaaggtaaagctgctgttataacataatgagaatcaggagatcatttcctatggattagatattacgatttctgtagtatcctcatcatctgtatggatttgtaccaaatgtagttgtgtttattaagtggagcccgatacacttgggtcgtgtgatgagtaaacaagaaggtttggtcaccatttcttgttgggattatcgaggtccgagattttgcgacatttgaacaaatagtttgagagaattcccacttccatttattctagtgaattatagtgctttgcatt

SEQ ID NO: 2506 - DNA, 872 bp, Posavirus 1
  isolate Ishi-Im2/JPN/2016, complete genome.1
agaatttccaattctcatatcgtagactggctgaaaagttggtcttgacgtcgtgaaaatggcgttatattttgagtgtaagggtttcctgaaaaggtaattcttatattgctgtgaaaacggctttctctttttatctcctcaaactccttattttgcattctggctgttcaagcggcccaaatcgcaagcgtattacatttccttgcgtgcgtacccgaaaatttattgaatttggcttgaattataagcaatgcttcttatagcggacactttgagaatataatgcttgcatggattaatgtatactgtttcaaataacaaacctagacacgcagttgcgttgatggttgtatcaatcacatacgggtgttgaactcgtgttaatcctcgatcgctatatgtttgcctcctacttccaataaaatagattacatacgcgacatgcctttgtggtttacctattggcctctgtcaaaaacaaatcgttcgatttgtagtttcctggcctaaaaagctgggcgcggtctggctctcgtcggatggaaaggtccatcaatggctggttgagtgtaagctccggtgttctggttgtcgcaattccagacgtcgtaataacctatattgcatctgactctaattcttgtggctctactgtatctagttcttgttctactaactctaacaatgctactggttctatgtttgaaaaactctcctatgtcaatatagataatgtccttgatcccgatatccctcacatcactgaagttcatcgcaagcggatttcagatgatatcctcgaatctcaaggctgtacttgctctgaacctattctcactcctcgtgtgtttactttttcaactcttggc

SEQ ID NO: 2507 - DNA, 872 bp, Hubei picorna-like virus 37
  strain QTM27228 hypothetical protein1
ctaggaggcactcttttaaacactgtagatcggtcgggtaacagcgcagcgatacaagattcttccacagcccttcaggctgactggaagtttttcaaaatttcaaaaccccaacacttttaaatgtgatcactgctttccactataagactgcttgaacaacagtacgtggttagttagatttagttttaagtaaagaagagtaaaacatcaaagctctgacacggatgccgagcctgtgagtaagccagacaagcagcattaggcagaagtggtaaacgttcaccttgagaaacgtggacggcgcgtcaacgaagtttactttataagccatttgcaatcgcgtcgtgtgggaaattggaatgttttcttttatctaaagttcttgagtataaacaacccgaaaaggccgtagaaaccatgaagattacggacgagggggcgacaggctagttataactaagttatagcgaaatattagtgcccagttgtttaatatgaaagaatcgcggatttaagagaaagtaccatcgtacctgcgtaaatcgtataagaagattgaaatgagtttaagcaccaagcatacctagcgggttgcgactaggcaagtctaacttgacgggaaatttaaagcctcccatggtgtaagtaaatagcgaaagcgagggtctgacagtgtgcaagctcagatgctaacccttagttgttcttatttagcaaataagattaccctaaccaggtaacgacgtcgaaagccaatcaacataggtaaaatcttttaggccgttcatcaaaattaccctggcaggactttcaaaaagaacgttctgctttcaaataattgcacaacaataaaacaagtgaataataaa

SEQ ID NO: 2508 - DNA, 875 bp, Guangxi changeable lizard picornavirus 1
  strain GXSXC1289721
tctagccgcggtatggcaaccgcggcgcccaggccccgcctgttgttggtccttttcttaacccacttttgtggctattgcctgtctctgcttgcatacaggcatgtgtcctttagtgagttgtcttggactgtatacatgggcctcggtctttgccacctctcccatttttcaccacttttgtaactaagccttctttctcgccacaatataacttgtcacactagagagtattttctacttggcggctctctagggcttctttatgaacacagtgttgatcactgggagtccaccggctacgctaagtttccctttcccccactgcctcacggcagttgggttcttaccctcccaccccctcccactttctctaatctttgtcttctttcgtcttgtttttctgggttgtccccgtaaccaagtcgatcaggccgccagggtctgaatactagtagcaggattagcctcttctagggtagacgaaacacgagggataggaagaagtagatttttgagtttagtttaaggtgcccttaactgggtaactgtcttcaggtctttgtattcgatcgcgcggacaagagtaggctacgggtgaactcttgtttttgttggagaaatcctcataatgtagtgcgacctgcaagtgcattgattggccgtttggtgcattaagttgtgccttacggacatcctctaacgcttggggtacaggagtgctacaccgctcgcgagtacactgctctggaggcgggcctttcattaggctcacctctctcttctttctagcctgcaaggtgacgggctcttgccccgatccctgtcggccgcttcctgcctggcttttaggttttacccactttatagcattg

SEQ ID NO: 2509 - DNA, 877 bp, Rhizophagus diaphanum mitovirus 1
  RNA-dependent RNA polymerase1
cccaggttgtgaaacctggtaacatgtcaagtgactggagcttggctcgcagtgtagcttgactgaagggcttagaagcccggaagttaagtttgactctctcttctaacgaggatgagttctacacctgttaacccatctgaaatccagcaggtactgtttctatacagtcttcgtaacagggttgaaggagacacgcccgcggacgtgaatcttcttgaaaagtgaacttgggctggggccaccacctaaggcgaagacccatgaaggcaacaatgccaaaaaacataaagagattttctgtaaaagggatttctcgccatatgagacagaagcgaccgggttccctgcccgaagtagtaggaagtgtcagcgcaaacgcgagctagtttatactagtccgttcggccgaaagggccgttgggcactacaggttggttagtaccatccttacttatatggtcccgagagggataagtagaaacaggagaccaccctatagtgttggaccttagaatcgagcagttgtaaaactgtttgaggggcaaaaggattatggatctaggtgtcttacctagtttgtagtctatctaagctaaaactacttaggaaatggtcaaaggaggcgactccgatctgtaccacagaaacctgcagcctgaccgaagaaccgggatatccttaacaggaccccttgttcgccagaacccctaacggggaaggtaagcctttaaaggtaggtgagacctcctggtgatctattcaagtaaataaactccgaaggcccgttggtagccgaatggcatcatgggagataaagagggtcagaaactgaaggctatctattaactaacaatggaacaactaactctacatt

SEQ ID NO: 2510 - DNA, 877 bp, Picornavirales sp.
  isolate H2_Rhizo_Litter_7_scaffold_242
gcatgtcattttagtcgcgcgagggggacgacgttaactacccccgccggaatactaatccttagacgttcttccctttggattaagtaaatcttaattacttttaaatggctaatagcgatttaccggaatttttacaaaaatacgtcacaaattttcccaaggccagttctggattgaacaatcaacaaaagcaaagtattgaagaattgagaaaacttcccattcaggatacagactcacctcgtttaatttgcttgaagtgttttcctgacatctctttcgagtctatgctaaaagaagaggtgtttaagtgttgttggtattcatatttagaacatagcagtcagtggaaaaatcatgtccgtgaacgatacgaacgtagtcgacgaattcgtgaagaagagtctgcctctgggtctcctgaggccgattaattttgggacgaaggacattatctgctattatttcttgtgtgaatatacgcgggaagaaaatccatgcccgcttaataatcaacttgtagcaaccaattctcttcaagaaaaattgtgtccattttgtcaaagtaaacgtaggtgtgtcaaagcagaataccatattaataataaattggctgatgtacttccaaattcaatcatttttacagaaatcgaagaccacactaagtcgttgagaacattgtactttaaaggattttatccaggagacgcaactctcacaggcaagaaccatttcaacattcgagccgggtacaattatcctgacggtcgctgtgtggaatttcatcaacgatatggacctcctcaaaacaattatctccgaactcaattcagctttggccactccccctgccccccaatcagaggaaatggag

SEQ ID NO: 2511 - DNA, 877 bp, Aedes albopictus negev-like virus
  isolate Aa23, complete genome.1
cagactcccgaaccatataccaaattgctagatttagtatttaccaagtaccagaacgtcacactacaaattctgcaagatcccgttattcaaaacctcacatcttacctcacaaagaatctcacattgaattttacagcagaccctatagattacaacgctttgtccgcactactgaaccgcacccttgaagctttggtagtgaggttacccaacatgtcacagaccaccgattacaaaaattttgccaaagttatacatcaatccccatcaaacaccttatcattttggaaagaaatcatagactattttattgagcacgattacagtataactcacaaagtttacggacaacctgggacgaaaaagcggttctctgttgtaggctatttggaaagtgttttattgaaagttgcccatcggatcataggtacgttaaaggccgtgttgcacgatatcatagaacctatatttttaaaaattttacgcaccatagtatctcttaccgccgaaattgttaccgccgtatttcacgtaattaaggcattatggactgaaataaagacggccgtcatcgataatcctgagttagttcgtcatttttcaacttttgttaagtgggtcgttcagcttgttcgcgacgtttcccacgttctcgtggagcatctcgtcgagttgaatgaacagtataaggttgtggaattggtattgctatttgtcgtgtgtgttaggtatttgcgcggttacgtcatatctgcgtttatagtggccgccgcaggataccattttggatacgaacgtgtcacggaacataccataatagttatattaattgttattttttcatttatacacttcctatttccagatttaaaca

SEQ ID NO: 2512 - DNA, 877 bp, Beihai picorna-like virus 20
  strain BHJJX25607 hypothetical protein1
cccgtatgcacatttacatgtgcatacggggattattattgaagtgctggggattctcccagcaagatttttacacgagtacgctcggtatttatcttttgaatgacataagtacgcttttgttattcattcaaaatattattttccgaaatttctttatgtacgtttgtgggtatctaataaccctctttcatgaacagaaataaaaagtttagacctaggtatagcagaggagtctttaaaaggccttactggtcctgatcatgaccacttaaactgattattctaaacagaattcaaacttatacactgtcgggtgtttaaatacgatgtgatgaaaacacttataaaacatagtgtcaactgatacacttgtacacttatatacaagagatctaagctgtaattaacagcagctgctttgttaagtttacttctttgcagtgttttaacacggaattcacatattcctgcatctaaatgcaaatgtgatctttgcctatgatatgtgcatagctgcaccgagttaacgctgaacgtctctcacaatcgtgagaactagtatgtagggaacgcaaaacaaacgaggctcagtagcaagcgttttgaatttattaaggtaggcttgctcatttatataaatgagtttcatatctggaagtaatgaccccagtatgatgagaggccttagtagataagataagctaacttgtgagttgaggatggccatttgtccgtggaataacatccaatgatgctcctgacgaacgttctttagcctaaccagctatcgaacccaaaggtgctgtgccgactgtcaaagattttatctttacaggacacctgtacagatatctttgacacgttgcatttaaca

SEQ ID NO: 2513 - DNA, 877 bp, Hubei picorna-like virus 38
  strain spider133826 hypothetical1
gttagtagcccttcttttataaccccgtaacaaaaggttaaacccttgggaggacctgaagcacctaaaagcgcaagatggaaaagctactaaaacaaataattaagaaacagatgttataaaacatcacaccagcaataaaacattaacgttaactggttataagaactccttgagaaagagtatcccagttatattcaaaattttaaaagaggttacttaccaacttaaccgatatttcaaacgagcgcccgagttagccagacaaggaccagtagggagaaatagtaaatgttcaccttgagcaacacggaaggtgcgtgaatgaaggatttaatacaaccgtaaataatcgcgtcaagtgggaatctttacagagtgtagataagagaaaatttttataaactagagtccgaaaaacgactgttccgaacaaagtgttcacgaatacagttgtggggcgccaagcgagacaaattaaattttgtttgaccagttagtcccagctcttttaactattaaaattggaaactatctatcataaagtagagttagtacctttgtaaatcgtataagaagaatagttataggttaacttatttaggcttatttgacggatagcaatcaaactactagtattagtagacgggaaatttgaagcctcccaataaataagttaaatctagcataagcgtgaggccggcagcgtgtgagaccggataacacctcatagttcgcgacattgaatgtagagcaacataggtattttgtttcgaaactcgttcaaaattactctggtaggaattcaaaaattgaacatcctatcaccaaataatcacacaataataaaacaaacttaaataatcatatatcaata

SEQ ID NO: 2514 - DNA, 878 bp, Botrytis cinerea RNA virus 1
  strain BerBc-1, complete genome.1
tgaataaaaggccgaaaggctggattttcagagcatcgctccgaagtccagctaccttttatattgtccacttaattagctagtggatgatctcaggtcgggagacaatccggccagtgtagtagggggcaggaaagaactaagcacgtgcttatcggttgagctcacccaacttgggctaaactgtagcgtgtggatactcaaggtgtcaaggtgcggtcaacatgcaaacacgaccagttccgaaaacatccacaaaccttgaggcctactacagagcgtaagaatgctagggtagaaagagctggggctataacccccggatctcttatcaggccagcatcgctcagcccctctttttgtgtaaatcccacccggtctagcggagtgggacgcatataaaatgagcgtgtgaaatcgctctaaccgtccaagcacatgacactaaactgtactcgcccaggatatggcgttaaactgtaccatccgcttttgccagcggttaaaacaatggcttttcataacagccgcgtgtgagtccgcgggataataagtgttctaacagactcaaaaagacatcctatttccaagttttcgtcgctacgtcaaacgtcggcacttcttggatctggtggggtaacatacacgtcaagtatggtgtgaaccggggctacacaactaccggggagctaacgtaactgcgctggtgctctactttcaacgtgcttcaggaccgaaaccgtccgtaaaccaatgggttgcacagaaagtaaaggcgtagggaacgtgcctgggacaagaaccaggtggacagactgacactcaccagtgccttcccgatcgaaggcagtagcaaacagtcggtgcgggaactccgc

SEQ ID NO: 2515 - DNA, 879 bp, Frankliniella occidentalis associated iflavirus 1
  isolate1
cagggattttatccctggggctctttgagaagattcactaacactgcgttgtaagataaggaatactgtcattactcactcacctcctagatcattcgaaagaggtagtatgatttcagatatttaaactcgttacggcactgtggtagcttgcttttcaaactcgaatcaccattcgtttcacaaaattcgatttagtagtatgtctcattgactttacaagtaatcatataatacttgttgttttccatttgaggttttctacctcctaaatttaatcaaaattatgggttttcttcccgtgaaattcttttagtttttaggcgcttttcgaactttgtgcgaaacaaagcggaccgtgatatatagtggaagttcaatgtgaggtaacggaaagataaccgctgtgtaaaataggacttattctatgtgtgctctttgagaaattctttacctagtattttgaatgagatacgatggggaccacatagttttatcctagcttctaatatactctcgtatctgtttggagcgattgagaatagtagaagccataagttacttctgtgcacttgctagtaaaacggaaactagtcacctcttagcagtgagatactgttaccgggttggcatccggtatactgacattgatggaggttacctgatactggcgcagagctggtatggtgcattggatgagtgcttgcattcgccagtggattggtgtcggctgcacgcttataacgatgaactcgaagatgggatacctgtttaggtccttagtgagaagttatttgcctgtagacctcccttgtaatcgatgaaatctccggtgcataaaacgggctcagtgaagaacacagctactttgatttcaat

SEQ ID NO: 2516 - DNA, 881 bp, Ryegrass mottle virus
  genes for P1, protease and RNA-dependent RNA1
gttgatacaactaggtctttgcgacccagtgcgtctcttcataaaacaggagccccatccactcaggaaagttcggactggcaggttgaggctgatttcatcggtatccctgttggaccaactggttgagagggttcttttcggttttcagaataacctcgagataagccgatggaagcagtgtccatcgaaacccggaatgggtctcacttctaaggagcaatccgatgcgttgtgggacgagctgaagttcaagtccaccctagcccccgcggctgaggcggacatatcgggattcgattggtcagtgcaacattgggagctaatggcggatgtcgaaatgagaattcgactcggagacttcagcaaccttgctgcaagggctgctaggaacaggtttacttgtttgtcgaactcggttttccaactgagtgatggcaccctgatttctcagggactaccaggcctaatgaagtccgggtcttattgcacttcgagctcaaattcacggataagatgcctaatggcgaagatcatcggctcacgatggtgtatagccatgggtgatgattccgtggagggttgggttgacaatgctgtagaaaagtatcatgcacttggtcatgagtgtaaagaatactcagcatgcgcccggacatacgtgagcgggagcggagaacaaacccttcaaacggttaatttctgctcgcacgagttgtccgagggtaagtgtcatcttacgacctggagcaaaacgcttttccgattcttccatagtacggctccgtgcattaggagtctggaaatggaattagcgggcagcccccagtggcccaaaatctatcggtacctgcgtcgggtgggcttagcgcccgacaaag

SEQ ID NO: 2517 - DNA, 882 bp, Marburg marburgvirus
  isolate Marburg4
cattaagtgtgcaatgatgagaactttaagataattgctactgagcccttcttctgatctactgaaatcaacttgggagatttttgagaagctgataacttaatgtgaatcaacagtttacgtattatcgattattatggtttgagattcaactgttatcatcgtcaagagtgacctttcctatttgatgcattaatgttttaaactacctcttaagcctttgtggatggtctcaatatgcgcgtaagggttaatttaaagagatttcttgttgcatagtttttcgtgttactgatttaggcttgaagacatagttaagactggccgaaaatgctctccagtcaactccatttcctctcaggggagacgtgctgtccaaagagtcttaatccataatcaaccattgcaagaattaatttactttttccgttatacttatctacattaattctttaaatgtccagcattattaacaacttgccttacttcaatcttttggatgcaaatcataaggaaagatgagccactttccctctaccctaagctaaggaaatttctcttatcagctcaaaatatgatccgtcaggtcacgggccattcataatctgtttgagcgtgaatattgatcaaataaccaaatgatgttgcatttgtatagacgcaattatcctttattaagaaaaagacaaatagaacacagatagttgacaaaattttactttgataaattttgcgaggaattataaaaatcttgaaggataatttatagtagagtagaatcgaagaacattaagtgttctttgttagaattattcatccaagttgtttttgagtatattcgcttcaatacaactcctctttatatttgatttaagatttaaa

SEQ ID NO: 2518 - DNA, 882 bp, Barns Ness breadcrumb sponge weivirus-like virus 6
  isolate Z53,1
gcgccgtaagcgcgaaggaggacacaggtacccgatgctgtactgattaattcaggcattttgcctggtaaagtcccagggccatgggaggaaatgcccatggcgagagagggaagacgacattgcaaaaccagggtttgcccccctctgccggagtcgtccgggtgttggtagagtccacccgtagaccgaggcttattcttctacactcactgtgcccgtagtgagtggcgagcctgctgacgctgttttttccggagcgtctgaggtgaaggccgtgcgagagggggatttagtcacctccttggtttggccaccttaactcgtactgaacggggcccaggctctttggcacgccttttgcgtggcaacactggctaccaaccggcgacgggtggatagttggaagccccgaatggaatggctatgatgcgacctggcgcgacggtggggagtctcgttctgttacctggtttcgccaggagattgactccgtcacaccacatcaatccagggccatgctgttgacaccgtcagcacatccccagtgaacctctcatgttgagtcagggccgacgcattttgctaggccaggcagggtcgagccccttaaatagccagcagcgagcacgttgcctgatgcagagtgattcctattcatattatgttcactgcctcccattgcttgagggggagggttaagggggaggttgatcacctccgggactagtctgaccggttaggcatggttgactgtgggtaaccaatcccacttagggcgttttgcaacacttgagcccgtttggctcatgtgacctggtatcaccaccggttacgttactttaatcacggcgctgtctgccgtcattgcctttattaaag

SEQ ID NO: 2519 - DNA, 885 bp, Hubei toti-like virus 10
  strain 3mos6210 hypothetical protein 1 and1
cccaaaagggtctggtctatgtggcacccgattctcggtgcgggtccttgtttgcggatgccttgggccggccggggatcgttgcgacgggcaggtgctagccctagcgtagcctccttctacagttctcctggctgtgggaggaggtcggactgatgtcagctgcttgggtaaccaagcagcgtaacccgagcactctccttcgggagggtgtaaggtgtgcgcacactcttacacaactccttggtagaaacggcatataaaaaccgtggttatagcaaccatgggagactttttacccggccctttctagggcctatagtgatgccgatgtgaggaggtggagtgaacaggagataacaacatgcaactacaatctgagaatgcatttcaaaaatgacaccctcttgtagatgcccgtgtagggccagccaaaacgtcatctaagggcggggagctcgcagcgccccgctgatggatagggcgtgctaagtgtggggtttatttaatcctgctaaatgccgagagactgcaacggctgccaaaggctacaggggcacagtcccgtcgtacaggtgcgggcgggtgtttatacctgtagtgagtctgcgattttgacgagtgatattaacaagcgatattccaagttccaggtccctgagcaccttattcgagctatcttatatttcatacaaccattgtgtgaggcgttcttctaagcgttccgtcgcgtccttttcaggacgttagatttcgagtgtctttgaagtgaattaaacagttcttttcagaactacccaatcgcccttttcagggcggcaaggtttcggtgttttcaagtgttttcagttaggccatccaatttcaaacgcttctacttgttta

SEQ ID NO: 2520 - DNA, 887 bp, Beihai weivirus-like virus 19
  strain BHZY59816 RNA-dependent RNA1
gccgtagtgccaggttaacgtattaattaatgtgcgggacacgtatgagccgggcccgtttgggtcacgcggcacttgccgcattaatacctgttggttgacacagagccggcagggtccacgcgtctcgacgtttgcttcggcgggcaggcgtcgcaacacagagtgccgctggcgcgtggatgtgagaccgttccttgtttattgctttacttggataggggtggcggcgcggatgcgccggcccgagtcataccccgaaggttgcctcatgcctgagtagcggagggtagttccgtgaacagcctggaagccgggtagcgccggtgacggtgagggcgccgctgttaaccctgtgcgtgggttggtccctttggagggggaacgtaaaatggcggttccgttgtgtgagtggtgactcgaaggattcgagcctgcgaggccggcaatgctgcgcttgctacgcagcaaccgtgaatatgtgggttttcggtctggatgtttcgttcgcgtagcgcgcgcgggtgaataatcgcctagggaggggcgacacacacggacaaaatggaagtgcgggggtaacggcccgcttaacgcactgcatgggggacgcccccccctttcgcgtgtttcccgcacgccgtaggatattgcatgatagtctgctgggagtagcaaacccgttacagacccgtagtcggctgcggcgccgacgaatttaaagtattgtaggccatatttcaaaactgcgtcgagaacactaccgggcgggccggtggtttcctctaaggtgcatctgtgtcgcactcggcgccacgcctttttctccggctgccggtgggggcagcttgcgtttttcgtcttcgcaatcgggagtgtttttagcg

SEQ ID NO: 2521 - DNA, 890 bp, Pink bollworm virus 4
  polyprotein gene, complete cds.1R
cacgggttaatcccgtgcagcgctctagtagtatttcaaattttgaatcgttacagtgcatttttgttgactaattttgttatctagttcattgtcagttcgatttatcgttcgtgactataatgttcgtagaattttcacctttagtcttcgttaaatgtattgtttgttacaaaattctttgactactaaactttaggttagttatatattatagttaagataatttatatatatattataacgaaatatagtattaataaaatataaaatacaaggtaccgaccttggctatctctaacaactattaatgtaagtgttatgtattttcactgtcggccagtccaagctcttcatgggcgagacaaacagtgacaggagcacaatcatccctcctggcaacaagtacctctcacacttttattaatagaatgattgatagtgtataaataataattttaaggcaaggttagattgtattgtaaatgtctacgagtagatgaaacggtctttgataagtgtgttaaaatggggacccctccaactggtttgcagccagcgcctactgccaatagacataaaacgacataatcgaaagtgaccgctttatgtgcaatgctaacgaccactcttctgtaatggagggagtgtaattcggctgggcaagtcccaaaacctcgatgacgtgtttatccacggacttcgggaatatatctctaagatatagtcgaacttctgaaacttaaatttacggacgttttagtaggaagattaaaacgtgtccatttctttcatttcttttcttatggtgacaatttgagtgattatttcagagaatttgcgcaaatttataaaagttatttcccatacacatttttattcctatcacc

SEQ ID NO: 2522 - DNA, 891 bp, Rhizophagus diaphanum mitovirus 3
  RNA-dependent RNA polymerase1
ccggccttcctttctgtccctagccaggcagataaactctcattcctatctaaatcctaactccggtgaggtctctgttaacgctgagaaccggcaaaacgcactcaatcaatgagttggccacttgtgatgatgcgtataacccttcctactcttggctagaggaaagaagggtttcctatacatgctccctcttttcctttccaaagtatgttactgtccctaatcttaaacggctgagtagattgtctctctagtatcagcaatgcttgaccatcctagctctcccgaagattgatcgcttctgggtcttggggtgtccgagataggaacggacataaatatatcattaattacattcatgaagtaagactcctcttaactccctactctactctagtcctaacactgttgaggctaaggtaagactgcggtcttcttagatcaactacttgtccctaattgcttccacttcataacaagtctcggctatcacgagcctcggctccggtagagttacttgagtcccttaagtcccaacgtccctgtccttaatacatctctctgttccctttctctctttcaaaactcccctctgactccttgaaagcgtagattcaggtcttggtaagcgtggcaaggttaataactcacaaagacttgtaaaccgcaaatccttattagtagaacataaatgattgttgaagataagaaggtctacccctcatcacttgtagggtcaacatgagtgtgcccgtcttgggtatgttactaattcggtacctatacggggggagattaaagcccgcacgtaccatccctaatcgaagatatctgtgtgatcagattttaatggacttactatgataagtagtacagcagttttcagta

SEQ ID NO: 2523 - DNA, 897 bp, Hubei odonate virus 5
  strain HBOV5 205551 hypothetical protein1
gtgtttaaatttaggttaataccttcttttaaacactgtatacacacctaaaagcgtaaggtacaagaatcatacaccacctaaaagcggactgtatgtttaaaacaaaccccaaaatccaattaaaacaaaagcctagtcagttaatattaatctgatttaattcaagagatgtgggaagtctcgataatattaaccttttagttttaagttcaaagaagagtaaaacaactaagctctgacctcttagccgagccgtgaaccgccaaagaaaacgcagtaggcgacgagggtaaacgttcaccttgagaaacgatgaaggtgcgtaatcgaaaacttaattaataaattcatctcttgacaccaagttgagtgggaaaatttattagtttgaaactcagattgtaataaaattttgaaccgaaacgataagatttctatgaatgaataccttatcaagggtgcgccaagctagttagattaaattcgaaacgaaatactagtgcccattcaaaactataaaaacaattgaaactttaaactaataaaaatgtaccttcgtaaaccttgctcttttgagagatggatattataacacataattgcttgctagcgggtagtaactagccaatttattgaaggatgaaagccacatcccattatgtgattaagttagccttttggcgtagtgcaggaaccgtgtaagccctgataaaccactatagattatgacattgaattcagatcaacaaaggtatgcactttcggaaacccattctaaattactttggcaggacttcaaaattgaacgttctgctttcaaataattacacacaaaacaaaactttatttttcatttcaacttcgtttaatttgactttgaattaataatcaatt

SEQ ID NO: 2524 - DNA, 898 bp, Lentinula edodes mycovirus
  HKB gene for hypothetical protein,1
ttgcatgcctgcaggtcgctagaaaagacatggttctaagtatagtcgacaacggtctattgaagatctcttgcagatggaagatgccgttgatacatagccaaccttagtcgttagggtaactatgtatggagagagtttagtcagtctgatctgaagaactactctctgtcgaacgataacagccatttcattttcattttctttcttttcatttttgttccattaaattcttatttatttcacgttctgcgggataagaggccactaccgcgatagaaattagtgtggaattaagcatccaatcaagaagcagaagtccaacagccagttggatactgtaagctggaacgggattcatgtccgtgcaaggacctaccccctctacctttctggagctccgtgcctacaaacttacctgacctagttatgcctagggtggtatgctgcgtaggagcgaggagactggggagatgcgggacattaagagtaggcaccgagtgtaacgactgcgaagctttgttcttggttagggaacagtctctccggcatacccgggggtgatagcatgcttgtgggtcttaattggctcgctgcttgtaggttaagtaaccttcttttcctccttttccactacactagtagtgacgataaaggttgctccttcctttcacttcagttattcttccgccgtcagcgaggaaacagttggttgcaataatcttggacttaagtgtttgagatctattgactgctgcgtacaacgttgaggtatcgtttgattgatttggattcttcccgcgctaaacggttaattttagtatcttgaagtggtagccccacaaattttcaaactagcgtgatttgagacgccctgagtggttaatcgcgtttaaaa

SEQ ID NO: 2525 - DNA, 900 bp, Barns Ness breadcrumb sponge weivirus-like virus 9
  isolate Q25,1
tttcaccggcccttggttagggccgggacccttggttagggtcgttaatgttgtgttttgggattcgatgagagcaccattttggtattttgacaccgggcggtacctttgcgcgtggggcccgggtgcgaccagacacactcacgttgttgctcgtcaacgtgaggcaagatggagtgcggacgtctggcgcatgtgaaagatccgctcccctgcttggggagttgcgcggggccatatgccttaccccgcggccgacgataatgtctagctggtccgtcggcgtgaacccttatgcctcagtagctgcggtgctgcgcggtgaagagcctgggagacttggcacgtcttacggtgagggcggcgacttgccttcttggttgggttgggagttggagagctcccgtgaaagtcgtctggtgtggcggtaggccggcgaagcttgcgaagtatttttacagcaagtggattggcgtctgagtatcccgctcgggtgtctaatggttacgcatgtgaatacgttttgcatgcagaatacctccgtcatggcgttgtccgctttgtgagggcacgacctggtcgccgtctgtttggcttggcagagcgcgcgacttaccacaaaatgtctacggtttataaaacctcgtatgtggctacacccacttattaccgaatcctgagcactctttccacacgtgatcttttacttgcggcagtattagatcctttttcatattatgcccacacgtccatccttcgacgtgccgcactgatttgggcttgttttgatagtagcagccagcatggcttaaggtgcaacgcgcagttcactgctactctacgatatcgctgtcgcggttctggcgtccgtgactcagaaaacaatcatcgtcattcagt

SEQ ID NO: 2526 - DNA, 901 bp, Duck calicivirus
  isolate MW20 genomic sequence.1
cgatatggcatacgtaaattctttactcttatttttcctatccctccacaagatggctcacgagcttatcgtgtggagtctctttggggtacgggcgcgggttagccgcgccccaactcccctctttatttcagttaggtcccccacttcccggtggcctggctgtgccacctatacacctggcaccacttttgtggtctcgctgggtgaaggccccattggccgtctggtcacagcacggcccaacctagtacccacgaacgcacccaactgagcgtcgcggcgtcatgaggcgggcggagcacccccctggtaacagggtcctcccgggccacaagccacgtgggcagggcgaaggtgaaggaagggtcccccgacccaacctcaagcctgaacccgcgttcaccctcatgatcaggcaaacccagcctggcggttgtttgttagtattggcgaaaagctggcaccgactgttcccaagaccacccaatggcaagggggctggtgagtagatgccctgcaggtaccctttcggatctgagcaggggcccttgactataccgttccggtaaacagggggtaagaaccatgaaagcgcagcccccacaacgggttcgtccaagggaggggtacccaccccgacctcacgacacccgtcatttcctttttctttttcctcttgtttatggtgacaccaatggtttttgagtctctggcgacttttgtttgtgtttggctcatcttctttttccactcaattcgcctgggcgcacaactcacaaccatttttggctttttgattcgctatttgattggcgtttttctttggctttgtttggagtgcgtggactttagaccctggtttctttatactgactctgcatggtccagatagaatatc

SEQ ID NO: 2527 - DNA, 903 bp, Beihai mollusks virus 1
  strain BHHK131425 hypothetical protein 11
ggactctatataggtttcacaacctatatagagttccatttgattagatattgtccgcttagcaccggaccatgcttttcttaattttattgaatacttacattctgaataagtatagtagtctcctctcaggttattactataccctgtttggagtgtctactttattcctaataagtttcaccccttattagttatgtttaagttttagtgtctataagcaccttggtattaggttctttgaccctattaccaatgagtagcttacctaagtatacgtttttcgaaccgtataaattgcttaatgtattcattattatttattttatctcgttgataaagaattatcaaaaataagagagtttgctaaacttcttaaatcgtctacaaggcgcagtttattttatttctctgttaaaaatattaaccaattttattattgcttcaacggtaaatttgtacttgattaaaatcaggagtacattacccgtgtttagcttacgatttacgaatttaattaaattggaaatttgattgtaatgatttagatttgacatttcaattgcttagagaaatcccactttattaataagtttcatttacgataaatgcactcgcaaaggacgagtaaagcgcattttagatgtataactgttattgaagaacaattggttctctggattttgattaatgcgacgtacagcatgttataaatcccaatactctttaaagtacccttagcttcagcacgtaccagcgtgtagggagttgcttcccgtgattcatataaggctatgctttgagatgaggcatttagattgatagtttcaactttttatttatttttgtgattgttatttgttagcttttatagttactgatattaaccctttctttttaatc

SEQ ID NO: 2528 - DNA, 905 bp, Heliconius erato iflavirus
  complete genome.1
cgcgggtttatcccgcgcagcgttgtagagcataatttcactaatatttcaaagtgcatgtctattgtaaattatttgtgttagttcagtttgtatgttcctaaaggttcgatacttgttcgtaatacagagatgtttcctttgatggcatgtatttgaatattagctttgtatgtttacgtcatagttttaaaataaattattttgttagttattgtatatattatatcattgtatagtattaataaaatataatactcggtactgaccggggctatatctaacgacttattattttcacatcatgtgttttcgtagtcggcctctatataattcctttcagtgggtattagtaactacgacaccggcataatcacccccggtggcaacaagcacctctcatgtgtttataataagaacgatttatagtgtaaaaataataattttaaggcaagactaatttctattgcaaatgtctatgagtagatgaaacatagtgaagaagtaagtgtgttaaaatagggacccctctaagtggctaaaaccaccgcctactactttttcacgtattatgacataatcgaaaatgaccgctttgtgtagaaagttggtgaccctcattctgtcatggaggtgaggttaatccggctgagtttatctcaaaacctcgatgacatgtgtatccatggatttcgggaacatatctctaagatatggtcggacttctgaaccctaaatttacggacgttttagtaggaagaataaaacgtgtccatttcttattcattttcttttatggtgacaatttattgagtattaacattattttgtttgtttgattctatcacttttacagtcttgtgtattctttccactttattttgaatttattaaatctttaaaaa

SEQ ID NO: 2529 - DNA, 906 bp, Beihai picorna-like virus 46
  strain BHZC37388 hypothetical protein1
tctgtagattcgttcttatgaacgaatctacgcatatgcttgttttggctgcaaaaaacagccacttcgagaagtcgaagccatacatttagtaaatcgccgcactaccgtagcggataaatgatggtggaaaccatcacgaagttacgaatgtatgacaacgcgaagttatttccgtaggagcgctcactccgaatataaaatgagcaacacgtggaaaggaaaaaccacgataaaacaaaccggcaaaccatttgcctatatgtaatttgtctatttgcttttgcaaagagtaaccagggttttaacccactagtgtacaataagtttaaatcgaaagatacctctcgcaaaaacactagcttttataaagaaaacataaaacaaataaaaattatcgttattatgctatctgtatgctgaggtcacagctttacaaaagacctattaggtgatctattcaccttgataggagttaagacactcctccaacaacagtcatcatttagtccgtggctacttagagccacaaccaaacaaaccggagtggaaccggttgacacagccttgtgtgcttttatagcaccttggcactcaccttgtgagtgtgtcaaacctttagagtctcatggatataatacctgagaattacataggacacaaggaattagacgcgaaagtccacctcagagtggtagacgccccttagtttgttcctcctgttgaagacaacctttgacattactttgactagacaattaggtcccgatgaatatagagtgattagactcttgacataggaaagcctctgattgttgaacccttgtaatggataaggaagttggaaatttgagtgattcttggagaaccggtaaaaatagccgggcccttgacttgtaaatcaac

SEQ ID NO: 2530 - DNA, 908 bp, Riboviria sp.
  isolate nut157pic1nc genomic sequence.1
ccgtgggacttttcagacccgagctcaatcaactcgccatgatgcctgcttgcactattcattctacatatggcccgcttctggttttgactaaaaagccaatactgagctgcgtcaattccgataaaccgaactaaatcaatttatcagcacttcgttccagattctgtagggtagaagttacaagactacttcacctttcctagtggatagcacataagaaagtaaacatgcgttgatttgtttttgtgtttgctatattgcttcataggtaaataagagaagaatgggttcaattcaaacaaaagcatgctcgtgagtgaatcgaagagccgtgttctaatattatttagagctagacagcaatatcgtaaacacaaaaacaaatcaacgcatgtttactttcttatgtgctatccactaggaaaggtgaagtagtcttgtaacttctaccctacagaatctggaacgaagtgctgataaattgatttagttcggtttatcggaattgacgcagctcagtattggctttttagtcaaaaccagaagcgggccatatgtagaatgaatagtgcaagcaggcatcatggcgagttgattgagctcgggtctgaaaagtcccacgggtattcaggtgcaggttctcttgaaaggttttacttctttgaagtaaaataagacaccgagaggtgtgtcctggactatgctggttaccttagtggatatggcttgatgaactgagataagcaaacattcgtgtttgttgcttgagcctttgattgatgtatcgattttagtagatggtttgatgaaactcctactgcgagatatattttaacccttttatgaaccgacgtggaatttggtaagaagaaagggcgaacgatggctttttattttctctcatt

SEQ ID NO: 2531 - DNA, 909 bp, Hovenia dulcis-associated virus 1
  isolate DF-390, complete genome.1
cgtatcccttatgggatacggaccttttgttcatgtcgatttataatcagcactaaatacgtttagtaacgccattgtaataggacgcttgtcgactattatatataagagaattattacgcgtatcgtagtgtgaacatttcataacgccattgtacgtatcgtacgtttcaaaaccgcttagatttgttgtcgtacgtgcgtatatataagagaattatgccgtgttctggttatttattgatgtgttcatcaaaaacttttgataaaacacccattttatttcatttgtagatatttcatcattttagcttgtaaatatttaggtaattatattttgaagtgaatattatctgccagggcagcactgatatccaattatctgacctgacagcactgttattcatagatatttaataaaatgagtattatttgcctagacagcttatatctgcctagacaacactgtcactcaccaaaaacattttataaaatagaaaatggcgatctttgcatcttgttgcaattaagccaccaaaaatatatttatttgattaatgacaatatgtagccttttatcatttggcagatggatgaaggattactcacttgttgagcgtaccaattccacccatttgactataataaattagcgtatcatgttatcacccttattgttgttaataacctaggagtccagactcatatcacgggttagatgagataaaactggttactgcgtgtcttgcatagggctgcagcgaaaaatttctatgcacaagtattggatcttgtaaaaattcacgctttgacttttgagcgatatcacggtcacccataaattttcaattgtacaacctgcccacgagagttaacgttattttgtgtttattatacgattttattaca

SEQ ID NO: 2532 - DNA, 910 bp, Picornavirales N_OV_064
  putative non-structural protein1
aatcctagggggcccctattttaagggccccctagatcgcgtgtcgtacgtcttacgacttttcatttattattttatttgaagaatttcctataccgcccttcctggcggtttcaacatcatatgtaatatatttttgtcttaaatttagttttttgatattacatatccccgttattgctcatgtgtgtttctcttgaagattcacgtatttcgaaacaatttagttgttattctattgtcctggagcaatatcgtattcagcaatgcgtttagattatgccaaatcctttggcgataacaaactcagagcacctgtcgcatagacaggccccccattccatgatatcatatcatgttcggataattagaagttccgaacctctagcttttattatgagctgcttaaatattcataattaacccaccccatgcagagtagactgtccaaacatttcgttattcaagactttttatagctcgataaattgtcctctgactctcaatcttatgcgctagaaccgaaatcttagcttagttctgatcatcctatatttgatctgatgactataatagttagactcgaacctcgcttagtctttaaagaagaggtaaccgtgtattatttttaatcttgctttgctagcagattgcttatactacccacggtaatattaggattgcaaggccacattagtgcctcctgtttattacccggtatttcaaaaccacggtctgaccgaaacttgttagtagtacttgcagaaatcagcaacatgaatctgtaagtggttatgctacaggatctttcattaggtccgcaaaactttcttaaggtttcaattcccagcgtcctttcgtcttagttttatactacttcactggatactaaaacagttttaccttaacc

SEQ ID NO: 2533 - DNA, 911 bp, Beihai picorna-like virus 38
  strain BHZC37430 hypothetical protein1
cttgctatgggtcaaaccatagcaagttatactccgaagcagataagcctctcgggagttagtattgaacgattgtccagtgtgacgatttcgaattttatagatgtcctattggagattttctccagtcgaacttactagatattttatttcgtcatatttgggttttcttttagtatatattgtgttaaatcaaacccccccccatttttgagggaagtctttctacgtttttagactagccagcaacaattttgtcactggtgaaccaaaacgacggtatgacaggtttgacatcctgttgagtccgtgcctttttaaggaattgaacgtagagttctcaaaattacatttactgtggtttcaactgaaaagctctgtaagcagtaaaatgtgatttttgatagtgtttataagtaaaatattacttggtttagccgagtcctaggcgaaggtctgtgattagttgacctctatgcgcgacttacgagttgtgtttaagtaacaaggcgtcataggcttagccgcgcttatttgatagacgtgacgaccatctcgttatgttcatatttgtagatctgaagagtcatatcagactgattatttgatcaatcggtgtgcttacgctcaatatatgccctaagggagcaatctctccgagtcttacgagtccgttgagtgagagtgttatacaccaaatattgtgataatgtcatgagattatctactctaaatcttgtgttaaatatgaaccacctcttgattatttgtggttaaaataggcgctttactaaaagtagtaatttgaacagacacatgaaaagtggttttggtgattgccataagagcaaaattttcacccatctaggccgatgtaaaccttcccgtgtggaccgcgtgcggaacggggt

SEQ ID NO: 2534 - DNA, 913 bp, Picornavirales sp.
  isolate coa131shi1 genomic sequence.1
cacctgacgcctgtctcttatacacagcgtaaatcattaaggtgcaattaatcaatagttgcacaagaaatcctgggaggtgactcccaggatttcttgtgcaactattgattaattgcaccttaatgatttacgcctacttggtgttgacacggctttttatttcacgccgacttttttgcgaaacgcatagacgccgcattcttgtcgacacggacttactaagcacgctgactatatgtagacacggatgatttttgtttagatctgactactggaaagacagttgactcaaggaaagacttgaaaaaccccacattaccatacttaattattgtataagtggttttagtcgctgacgtaaccactacctctggattagttttagtcgttgacgtaactattctcctaggttaagtatttcaagaatatcaatcttggtacttttatactttaatttatttatcgataatacattagggtgttgttctttaagagcagcccgaccataagacgaaataggacacttggatatttattaccggtacttctaacttcttattgaggtaaggttttcggaccctcactttctaagatgcattagtacttgttgtaggtacccctgttatcagcctatgcccccgcaagaatcatacaaattcttttgaatacgatttggtttgacgacgaggcgcactatgactctataccgttaagtaggagagggacatttctatattatacttaggttgttaccatctctcttggcatatcggcctatgccagttatagtgtttgtaagcagtacagcgtaagtctgcaagaacttcgtaggagtatacctccgaacctccggttaaaggcgcgcacgataataccggttgcataaaaactgagcgcacaatgtatcaca

SEQ ID NO: 2535 - DNA, 913 bp, Wenzhou picorna-like virus 33
  strain WZFSL76563 hypothetical2
gcccatacacgcattcacgcagtacatagcgtcttggcggctgcgttgggtggcaggacagcctacccgttactactcagaggattcagagagtaccaagacacttacattggcttgtgcgagccatgtatgtacatagtagcacgcgacagatccagcaagaattgaagaatgttccactataagtggattagatgtacccagcaaagtccttgataatgctggagtcctgtttgctgatgaggcgagcatatgcgcggtggggcctggtggctctgagtcctcgtttttgcttgccgactccggtttgcaagatttgaagagtttcttttctcgaccagtcttgtggagtaggtccactttgagcacgaccccggctgtgcttacaacccacattttgacgtggacggagttgaacaatttgactccatcttggtccactaggctgcagggtgtcaggggtattcgtggcactttggtgtttaccgtggaacacaacgctaatccttttcaacagggattgctggttgcctcgtttcagtatggggacgaccagtataggcgggggttacggccatcattgtgtacgcagttgcctcatgttaggttagacattgcgcataacacttcagcatcactcaagattcctttcaggtcagagtttgagtatattggaagcgcctttagtgaagttaaccatgtttatggtactttcgctttgactcaggtgctgccaactccctctttgcccaattcatccttacctgtttttaaggtgtatgctcattgggaggatcttgaggtgtttggtagagtgccgctcaatggcaccacatttgtggttcctcagtccggcgccaatgtcaagccgcgcggattgactccttctgatagggagttagaggataatggc

SEQ ID NO: 2536 - DNA, 916 bp, Plasmopara viticola lesion associated flavi-like virus 1
  isolate1
caggaagttagttattttctgtgtgtattaccacgtgctaggtaacaatttttctattgttgttatcggtatatttgtatttagtttttagtttacattatatgtttagctaagtagcttttaataaatgtctgggataggaaatacctcttccaaaagtagcactaatcagttaggtagaaatttgcttaaacaaacagtgtataatagttcacttctctcttgctattatagacagccagtggtcatttacaatactgaatcgacttgcgaccgaaactttacaggagtatttggcaatatattttatgacattacccctctaaaggaaggcggagtcaggttatcatatcttgaccctttacttgctaggacttacaacgacccgaaaactctacagcaaactcttgtagatcagggtatcaccggaactcatttggttgggaaatcggtggtatatgtttgtgagcaggacccacaaataccagttcctgcttctcctccaggttggttttactctaggtagaccatcctgtagagtcacagacaatcgttgttattgtctttacggtagggtttggattgagaaacctagttattgtgaaggacttgctgattataacagtaagattgtaaaagcagtattatctaccgatctggaaccagatatgaatgcctctcaggcaatttctaagtgtttcggttccccaaagttggagtttgacttcacaaggtggacgccggaatacaaagaaactttatatttgtgttccatcctcttcatatactcattttttatgagtagaaatctaggaatttctggtctgggtttagccgttggcctctgtaccaaagccctagatataaagaaaacggctttaattgttctggctataaccgggtttagaacaaaaca

SEQ ID NO: 2537 - DNA, 916 bp, Beihai picorna-like virus 30
  strain BHNXC41477 hypothetical protein1
ggacgacaccgcgcggagtttcagttctaattgctgggtttgcccccagcaggctttgttccttgcagatatttctgcctagcttgcagttcccgggcaaaacccggataaaactgtattgttctaggatgaaattactgtattgtgatacattgtttattgaattgaaatggagttagctgctccttttttaatgcgtagcccctaggttgactacgtcgtaacaaaaccgaaccccccccttgtgcattggggggcttcggcccctcatgtgtgttttgtatattattgttcccaatgccgtttttgtggccttgtgccgcaggaattgtattcctgtatattattatttaacttaaaaaccgccttgcggagaaaaatttaaattttgggaggaaacatgtattagcgagaaaaatttatattgtatttttatttaactcaaaaatacgttaatacattggtacacacacattgtcaactaaccaccatcgtagggccgcccctacttgtgatggtgtgtgaaatttcagtgcttgaatgactgagagaacctgtaattgtttggttcttaactttgtgtggacagatctcttctaacgccgatgctttaaaagcagcagaggttactaagcggagatacttaattgatctgacagtctcagatgagagactagctggctggaaccagcgaagctaagatcagcctcggaggaaagaggtgaagaggacctaagagggtctagcagatggagtattagcatcgctaatgcgtagtgtagaattgcgaatcttaaatcaatccccccccttcaggtaacgaaggatcaggaagcattatctcattttgctttactgctgctacaaaaagtcagattattattatttgccttatctagtttgtcagtcccccatc

SEQ ID NO: 2538 - DNA, 916 bp, Beihai weivirus-like virus 2
  strain BHZC36779 hypothetical protein,1
gggcgagggtaattttgggtgtacgcttccagcatgccaccaatgtctcataaagcaataaagagaggcagggtttgtggtgtgttgcaatgagcggcccattgcatgtcagcattttgctgagtctttttccgcggtccgtgccgcgatgaaggggagccaccggaggataatgccgtgtggtgagaagaccgctcgtcgactataagggggaatttaccgtctcgcccagtgctgtcgtcgaaagccttgatccagaggttaggtcatccttattcttcaatcccgaccctgtctgcagcaggagggttagagcctggaggagcccagcactgctcctgaggtgtggctttgcgtgtgcgtcgatatgggtccgacgtgggtttgccagcccgaaacacgtaccccgagtcctccctggatatggcacctcgagcgcgagaccattttggcacgcgagtaagaggaacgtcgaagctggttgtgcacgcgtaatcgtgcacagttggttaggggaccagaggtgatgactacgctcccgcaggcagcgtgcgacaacgctgcggtgacgaatgagagacgaggtgaaccaagggctgcgagctccgagccggcccaagtggctttgggaatccttgtcctgtgaggttactctcatgtcgaagatcccgctttcgcgggtgaccgccctcaagtcaccacccatgtacagcatctgcagcgtcgcgtttccactttttgtctaccacggattgtagagtggttgcgcgatggtaccacggaacaaaaatcaaataaacaattgaaaacctaaatgcaaagattcattgttttgtttcggcgcaggcgatccccgcctgagacggagtcactttgtgacagtttttgtttgttttaaagcgcgtcggttttgctc

SEQ ID NO: 2539 - DNA, 922 bp, UNVERIFIED: Potato virus S
  isolate 18-1113-2, complete genome.2
gttcacaggtaaaagctcgaataaactgtttcacagagagaatgccgcctaaaccagatccttctagttcaggggaggtgccacaagctgtgccacctgcaccacctccgcgcaattcggaagggcacagatccgcgcaatcggaggcgccagggcaaaatgaagaagccatgctggaacaaaggctcgttcgattgattgagcttatggctaaaaagaggcacaactcgacattgagtaacatctcctttgagataggtaggcccagtttggaaccaacacccgagatgagaaggaatccggaaaatccatactctcgattctcaattgacgagctgttcaaaatggaaatccggtcggtgtcgaacaacatggccaatactgaacaaatggcacagatcactgcagatattgccgggctcggtgttcccactgagcatgttgctggcgtcatactgaaggtcgtgatcatgtgcgcaagcgtgagcagttctgtctacctagaccctgcaggaactgttgaattccccactggagcagtccctttggactccataattgcaatcatgaaaaatcgtgctggactgaggaaggtgtgcaggctgtatgccccggtcgtctggaattacatgctcgttcagaacaggcctccttcggactggcaggcaatggggtttcaatggaatgcacgcttcgccgcttttgacacatttgattatgtgaccaacggcgccgcgatccagcctgtcgaggggctaatccgtaggcccacgcctgaggagacgatagctcataacgctcacaagagcatggcaattgacaagtctaacagaaatgaaaggctggccaacaccaacgttgaatacaccgggggcatgctcggtgctgagatcgtgcgtaaccatcggaatgcagcaaacca

SEQ ID NO: 2540 - DNA, 922 bp, Grapevine leafroll-associated virus 1
  clone a, complete genome.1
gtattgtcctagtaggtatcgaacccgacaatcccaatcctaccattgctttccatttcagatctgaaatccactcttcttctctgctctcagctctcgggcatctcttctcgctttccttcctcgttaagacgcgctgaactacagttcgtctgtctttcctcatctcaaccgcttcttttcctttttctctcgtgtcttaactacgctctcctctagctcattttctccctttactttttcgtttcctttctatcaggggcgaaggtttttcttcatctcttaacctgtcttttcctcattctgctttttcctttctttctcgtcttctttttgtgtcgtaatacttcttcgcatactctcttccgctttcatttcctttcatcactctttctttttggttttctcatctcttctctttctactgcttttctttcttattcctttcttatctctctttacctttgtttcttctctttgttttacatatctctttctttttattttccttatttcgttttgtttcagcgggttttttcttcttcttttctctcgcactatccactgtttttccttatttcttcacttttctaactctcttttctacacgttttccaccgtctatttttatcattttcctttttgttcgtctaggttctcttcttctcttacccaggccttttccgcatataactaacatttcctttctctaaggatcttgggttttgtttaactgttgttacgttatcatctttgtgttcggttttcctttctttaattttagtttacctctttttcttcctacttacttcttttcttttattttaactttccttttaatttttctctcttgcttagcttttctttcttttcgtcgcctttatcttttactcttttcctttcattactttcaacccaaaat

SEQ ID NO: 2541 - DNA, 922 bp, Riptortus pedestris virus-2
  complete genome.1
cctcaaggcacgcacgcttattaacttatcagattatatggacgattatcactagtattgataccgctaaaccaaccctctcttcttttaagattggaggatgctttagtaggctctctactactgtttagtctaaatatacgctggtatgacctttatatatttaaatatccttttataattaagttaacaaggtggtaccttaagtagcaccattaggttaccctatagtcgtaagtataggttaagaattttcttcttaaattatatttaattttagttgtagatacccaaaaaaaataataaaattataaaaggctttgccacaaaaaaaattacatttagatttttgtttatttttgtatgcatattttttgtttgttcttactaatagaattaagaatcaaacaataaagtagcgctatattttggccgtttctgtaacagattccgcccgagtatagtatagtggttatgagtcggagttccactataaaccaactcaaagatcgcttagcaccggtaaagtgagcggggagtgaacagcgaataaagtagctgtaggcaaccttggctcggcctgcacgtacatgtctatgttgtaggtagtctaaccaactctattacccgtggtttgcatcggaccctctttggatgtttctaggaccccttacaggtattaaagtactgacaatgagagtaacactaaacactgttagacgtaggcgcggttggtttagcagcaggaagtagtaaacctgttgcgtcgcgctcaattgaggcgatccgtaattgctggtccccgttagattttatcgtagtcgaaatctaactatagtgtttattgtgaaatcgtgaggaaatttgtcttgtaagtagaaaacattcaccttcttttttctctttttatggttaaatatat

SEQ ID NO: 2542 - DNA, 926 bp, Unknown
  Description of Unknown: Translation control poly nucleotide.1 sequence
gaacaaacgttttaccggtttgtaaattggaattctcgaattcgccagtcgccttcttcgtatcaaggatctggaatttgaacggtatctttatcattttaatttctacttttcgtaccagtcatgggttttgtcaacttttcgctttttgatgtggacaaattgatggtatgggtgagcaaattcaatccaggcaagatattgtccgctatttgcaacttgggtatagactgctggaaccgttttcgcaaatggtacttcggtctcaactttgatgcacatatgtgggctgtcgatgcctttatgccactcatgccacattacacggagcagatggaacgcgtagtcggcgacctctgcagcgaaaccctagaatccaaattagaagactgtctggaattggacacttccgtcaaccagtattttgacgaagaagtgtacaaagaggatgacaagggcgtgatgaaactccaaaggagtgctgccaggaagcacattaaacgtgtgcgaccaggtatgatgacagcagccataaaagctgttgagacgaggatcagaaaccgccatgccattttcggagataacatgggattgatagacgaagctgcagttagagcaactgccagtgatatctgtggagagttcaaaataaatgaacaccacacgaggacattggtatacaccgcagcatatctttccatgacacctgaccagaagtccctagacagtgtcaagctcgcctataatccaaagagtcaagccagaaggactttagtgacagccgttcgtgagaacaaagctgttgctgggttcaaatcccttgaggatttttaggcggtccactcagctttccggttgaagatgccccatatcctattttaggcatcccggaaatcagggtagctgagaagcgggccagtagagtc

SEQ ID NO: 2543 - DNA, 928 bp, Solenopsis invicta virus 8
  isolate Formosa, complete genome.2
tgagaaatacaacaaattttgtacaagctagtttaactattcaaattacacttgctatgactgtgatgcgaaagttaaatatttctaagatttacgtatatgacaattcacacttctttgacaatgcaacgacacacattacagacaacgtacgatactctaaaagacaggaaaattacgctgtcctttctaaagccgcccaacaaactttaacgaaagaaaactatcgatctcatacgaatcatactcttctttcagatcatataggtttatatattacattgtaagtatggatactttgatcgcagtttgcggattgttatccattaggttaggaacagtaagcccattgctgtggttcagtaatgcgtttcatctcaacaatcccgtaaggtttgatggttgagaacctctgccttggcgagctttggtctattagttctagtgcaattgctgcagtacagtcagggacccagagagtaatcctctggtgttctaaagtcctgaagttgagaaggactagcaatccggatcaaccagagtggaaccctttaaacgtggacgccaccccagagagctccgtttatcgtgtcacctgcagtaatgaatggaatgaatgatagaagcgacccacctagggacccctctaggatagtcatggtatgtcatgaaagactccatcactgggttagaacgatctgttcaactggctttggaaagcttggcttgagcttatctagtctagggccagtataaaatataagccggcttcgtactgggacacacaagccgttagacttctttttgctagtctgtgagtacccaatttttacctttaaatttatgctgtcttattgctatctttgtgctgcctttgctactttactgctgttatttgtgccaaactactgctagaataatcgttgct

SEQ ID NO: 2544 - DNA, 930 bp, Thrips tabaci associated iflavirus 1
  isolate ThassRNAV51
gtacgtatttcgtacgtacagatccttgtaggagtttcaataattgttaatttcagagttagggatattcccgccgctagtattcacaatgaatctagtcgccagtttatctaaacctttggggtttctcagttatctttcttcttcatttccttttccaggatctcacaaaattcaatttgttaacttcaattttaattttcaatttgagattttaatctccaaaatttcttctaaattatgggttttctttcccgtgtaattttcaatgttgttgtgttttgaaaatcagaaaatcaaacaaagatgtgaatgtgtgtgtgaatgtgaacaagtcgagtgattctcgacagcgtatttctgacgtttaatacttatattaagattagttgaaaaacagtcgtcctgagtagcagtaagagcactagggccattttcaaaggcttaagagatgaactcctgtttctaatcaattctatgggagacatgctcttaagttgactggctaattgaaattgagtattttagtttggattgtgtggtctagttggacagacccctaagggaagtgccagtacctagaaattcgtaaggctatctttgtaccagctatatcgattaataaccggtatagttacgtctgggacccctagagggtttgggatcggcgtaccatgcagttttagtggcttcggcacttacttaaagtatgtgggaaccccatggaacttaggtagagcaagcgcattaattttgcgtagtccaatatagggacgtctattcctcctagagggaataggtagagagtcaacaacgtcatagacgaggtaattccgccataatatagtctggacagctagaatatggaagggcatctctacatgtagggatgggctctcaaaaccgatccggtgacgcaaggctgcctta

SEQ ID NO: 2545 - DNA, 935 bp, Warroolaba Creek virus 1
  strain WRCV1 205652 hypothetical protein2
taaaattttattcgcgatgaaacgcctccttcctgatgcacatcaggatacggagaagatctctgagattgttagagataagaatacaacattgtacggagctattagcgaggttagtaacactgacgccctacaggttgatctctcagagttccgagctcttctccgtcgctttaatgaagacgttgaagagtttcggggtgcgcaaaagttcttccagaccactttggattctttaggagggactgtagatcgcctgaatggttcttttgtggacctcaatgcttccttaaatgttgtaaaagaagatgtcaaacagctagatatagctgttgatgacaattcaaaacaaatccttgttttgatagacgagaataaaacatatgagtctaagttggaagctcttgataaaagagtttctaaacttgaagattctaatgtctcgataaatttggggatttaatcatgtttgattttcttaaaccatattttaaacccccgcctcgtaaggttttctctcgccctatggcccgtgctgccaaggatgagagtatttctgatgttataaaagaacgtaaccttactgagtatcaagctattgaacaagtgttctctgaacgcttatcatcgatagagaccttctccccgtccagacgatttcttcctctacacgacgaccagaaatataggttccatagcctaaaacttgagcgggattatgagtatagtgttatcaaaggtgttctctttgatcaggtctttttcggtacaacaattaagcttgacaacttctctgaagttattatttacccttccgatccagaagttgcaccatctgatcctaaatatttggatacagtgattattatcctggtgaaggtgaatggatctgacactccggcatccggagtgtataaaatttacagtctaatata

SEQ ID NO: 2546 - DNA, 936 bp, Lymantria dispar iflavirus 1
  isolate Ames, complete genome.1
cgattgtatcagagttttcaaattaattaatgagtctcttaagtgagttttatatttcttgagtttcatgttccgaaaaggttcgatgattatactcttggataatatttaatgacatttttggattggctcattattaagtcttttctctgtacttagttaaggtttatttgcttttaaattatatatattatacaacttatatgttttaaaaattgaaatactcggttcagaccggggctatatctaacaacttgtaataaagaatttacctattttcactatcggcctctcttattagtcttttagtagcatagagaaatagtgacatgagcataatcacccctcatggcaacaagtagctctttattttctattacaagtatgatttatagtgtataaaaattaattttaaggcaaggcaacataatattgtagatgtctatgagtagataaaacgtagttggaatgtgtgtgcgataaaatggggacccctccaactggctaacaccagcgcctactacatttcaacatattgcgacataatcgaaaatgaccgctctatgtgttatggttgtgaccactattctgatttattttggaggtagtgttaatccggctgagtttatctcaaaacctcgatgacaagtgtatccttggacttcgggcatatatctctaagatatagtcggacttctgaaccgtaaatttgcggaggctttaagtacgaagaataagcctgtccattttcttttttctttttcttatggttacaatctcagaatatactaaagcgttttcattgtttattgttatttcaattattctcaattgcaatcctattacccctttgttttatttttattccaaccttataattcttttgctaattgtttctcatactgattttaaatttgtatcaaaatatttttgaag

SEQ ID NO: 2547 - DNA, 942 bp, Hubei picorna-like virus 52
  strain QCM127295 hypothetical protein1
tagttgatgtttaaacatcaactatacgcgatatatggagcttggtatgctcctaccaatttaaaactagtaccaaataagggctgaaacaatgctacggtgcttattggaacaatactaggtaattactactacttgctgaaacgtaagatacggtgagtactgtaattttcactttggtttcaccaaacttgggtaacaccataaccttcagtatgaattttgtatgaatgtatgaatgaatattgagtacggtataccgaaagagactagaaagttgcataaattcttgcaatttggtgggattatgacacgaccaccacccttgagtttacgaaccgaggctttgtttgaaatctctctaggtattactggctgtgggtatatgaacttataagtaacagcatatggaactcttagtacgcttgggtagtatgaggagccgtggggaataaacttggtccacagggagtagcccgaacgctgacctgacgataggctgctatgtccgactataaacctattcaattaggggtggcacacaccatgcactagtgcgggacaggaacggttgacaataaggaggccttctctaagcccttacgggggtgaggaagcggaacttcagaacagcttgcggaaaagaaggaaatatggtctgagaaagtaacttatatgcgacgccggcccttctagttaaagggaattgcctatggacgagatagattaggtaattaccatcggcggctgggtgcaccgatacatagtacggagtgcgcttcacagtggacttatctacacagtggagtggatcttagcttagtggacagacagacgtactaagcgacctagatctcccaaagataacgactttatgggcgtagtccggtcgtgcaggggttaccccgcggacaacgcaaattttcttccaaactttcactt

SEQ ID NO: 2548 - DNA, 945 bp, Fusarium poae mycovirus 1
  genomic RNA, complete genome.1
gcgaccgttctttagatctttcgttcggacccccccagcccctggcggggcgtcaactttccacacgtcttagtttgctaagcggaccagccacaccgacacaaagagcttcggctctgggaaacagggcagactaccgcgatgtgcttacgatgatttgtggttagagcgcgcctcttgctaattctgaggtggtgccgcgcgagctttaggcccttttgttcggaactccaaaaataacttggctttccgctcagccctgagacaatagggttatccaacgacttggctattaatataacatcctccccactaacgaatcgcccttacactaacttagggtctttccgggggaaaggaacccgtaccgccatatttcaaaacacatggcttttcatggtccggggtcgttggagtaggtatgtgtgttagcggcagtgagtatatgaagcggttcatcgcggatttcctgctgagcaccctacgcccgaatttttaggaagaatggctcttaagaactaggtagccattctgcccttaaaatttgagggtgtggttatacgcgtccagcatgacgttaaaaggcacacttcgccttaggacggcgaaaaactcagctctgtagatctagcccgtgatccttctgcagtatcaacatatcgggaataagcatcctgtcgagttctggaaagcttgaactcagcggtggggtaaccaaggtacgaacttgggtgtgaagccattcaagacgtggatggtggagctaacgtattagtggatgtcatggtacggggtataggtccgggattaaccacccgggtgaacactaactcgccactacgaacgtgccagccttcgggttggtggacagactgacactcaccgcgccaagtcccggctaagggcggcgcagcaaacagtcggcgtgggaattattaccgcgtg

SEQ ID NO: 2549 - DNA, 945 bp, Nesidiocoris tenuis virus
  isolate SDQD, complete genome.2
ggtcaattaaggtgacgaagatttcgtcattacacgaactgccggcgccgggaccgaatgtccaagtcttgtgcttcaaacagtccgaaaagaaggagttgaagcatttgaacgcagtaactatccatgaattttagggtcaggaaagtgcggtcgtctggatcgtgagactatcatcgctacctaacgaacagatctgcaagagtgaagaacatcaggtggtggggattacaagacataagaaagagttaatatactacacggtcgtagaagacgatctcgcaagattattaacccaccacatagacgaaaccacactcaactccgccgttgggtcgttgaaaggaggaatgcttgaaattcagagagacgaagctattcttcaatcatgggactgtcacgatgtctctttcagagcggccataatcgattgcggggaagaggacctcccgtcgacaaaaatttcggaacccttcaaggaaccactcgcttgtttcaagcccggtcacgttactgcagacatattttgacgatctttttcctggaagatcagctgagatccatgatttcgaccaatacctttgcgaaaattccactaaatcatatgttttggaaaatgccagttttgggggaaaaggttgggtacctagggcacagttatatgataagaaaaggccctctctgttgacatccattcaatcaaaaagggaaaattccctaaatgaggtcttacttgcctttcaaaagcgcaacggcgcggtaccggaattggctctggattccgctattgaccaagaagcgagtgttttggtaaaaaactttgtaaacacagcggtggacaagtcaagattggatttgctgagacagtttcgagaggaccaaactgtgctaaattcggcgcagattcgagaatggttggactcacaaccacccggagtcgaaaac

SEQ ID NO: 2550 - DNA, 946 bp, Hepevirus sp.
  isolate RtCm-HEV/XJ2016 non-structural polyprotein1
gaccatagcccatgggagagttggacaagggatatccgcatggtcaaaaacaactgtggctctgtatggcccgtggttccgggcgattgagaaggctattgtggatcgactgccagacaatgtcttctacgcagacgcccagaaccctgatgtttttaatgcggcagtctcaggtctgacaggctatcaggtctttgagaatgacttctctgagttcgacagcacccaaaataactattcgctgtcgttggaatgtgcccttatgactgaggccggcatgcctgagtggatggtacgcctgtactggctcctccgatcagcctgggtcctgcaggcgccgaaggaggggctcaagggctattggaagaagcattcaggtgagcctggaacactgctgttcaatacggtatggaacatggccatcattgcatactgttatgattttgttggagagtgtgtatatgcttttaaaggagatgattcagttgtttgctgccaacgttacatccggcacggccgtgcagacgtcttgatcactggctgcggtctcaagttgaaggcagcctgttcttacataggtgggtatgccggctccatcgttgcctgcgggtgcggcgttgtgccggatatcatcagatttgccgcccgcctgacggagaagaactggaaaatcgctgataatgatgatggtaagagggcggctgagttaacaacagcagtgaaggatttcctggcaaaactggagaacgtgcatcatctggccataactttgggggcccgctatcacaacaagcctgtcgggctgctagtcaacctcgtcggtgccctcaaaacaatcgccgagggcaaaggccacctgaccaagcagattttaccaatcttgactctattgaaggggtttgaatgaataacatgtctttttgtgtggtatgagtgggtgtgcaga

SEQ ID NO: 2551 - DNA, 946 bp, Redbank virus
  strain REBV 205543 hypothetical protein gene,1
tacacatagtcaataaagaagaatgggcccccatccttctttattgactatgtgtattattttatgactagctcgtttaaccttccagcggaagctctgtgccagtatttttcatttaggtgcatgttagcatttttcttatttgcccacgtactctgtaattcattaaccgaccagcggtcgctctgttggattatgactgtgcaattttgttccctcttgacaatcttattcttatttgatgacgactttttaggccctcaattcttggattgatattttgttactacccggatattattatgatcttgtatcagaaccacgccgataagctcggataatattatccctggctctgcaatttattatgacgactattgagatgaacactattggactatgacttgacttattatttgttatttgtacgttagaatcaggcaagcttgcctatcctgtttacttgtcgattaatctaggactgaacgttaatacgaactacttatcgagtaggtaacccactaccgaaattgtggctaacccgaaacattaagtagaatttttgtatcgattattaagaactttgattatgaaaccgcactcagtgacgcaagtaatactatgaaagaagaaacggcttttatagtgattaggacgtgaacgcaaaatcgtaatgtttgcctatacattgacgatttgttctgtctgagtagttattacgttatagaattcctaaagtatcttggaaccctcgtattactctcacacttgaggaggtgtgttagtattaaggtaatccattgatatgtgaagaattcgactaacggtgttggtatgttaccggtaaggtttgtactatgatgtacttaagggaccagttaggttaactcttggtgccacggccaagacccgctcaacgcgcataccgcatgaatggaaatatttt

SEQ ID NO: 2552 - DNA, 950 bp, Ngewotan negevirus
  strain Nepal12 hypothetical protein 1 and1
gtgtcattctgacacacatcactcctctgtcacctatgagttttacaacatgacctttgtccctcagtcccttgctctgcgcgaacctcttcgtctctacaacaaggagtttaccgtcttgaagaacctcgttcccgtttccttcttcgagtggttcttccttgtacgttcagacgataaccgatttggtattgtgcccaggatttgtgacgaactttttcgcaactcaaccaggttgccaaagaatgtgcatgttagacgtgagggcaacgagttctgttttgttgaggtcagccacgactcctatacgtgtactcccaaactttacccgaatgttgcaactttgatgatggtccatgactttcctgttgatttcgacgacgtgcctttctcgcagggctcatacgcgtcgaccaacaataaggctatgggcgctgatcagtacctcgccaacaacgtcgcttctaaagtgtatgtcgttgacaaggtgggtgggtcttatatggtcacttatgacccccaagactactctggtccccgcttcattgttcgcagccacgggcatgttcccacggagaaaccgttctgttttgaccttgctacacactacgcgtcgcccattcactctatctttgcacacgtgacgaagttttttcacgaagcgctggtgtatttgttgcagttcctgaaagagatcgccgccgatctcgccctggtcctcttcaaagtcatcagcgaactatttgagattctcatgtcgatcgttccgtacaattcacatttctacactgcagggcttgtgtgtcttttcacgtatttccttttgcgtgacttgctcatctcgtccgttgtgtttttctgtgtgtacagttttaaaatctacactgattctctcatataaatgcttgttgaaactcttctcattttcttcgcgatcctcgcatactgcc

SEQ ID NO: 2553 - DNA, 950 bp, Shahe picorna-like virus 13
  strain SHWC13556 hypothetical protein1
tatgggagcgcttttgcgcttccatatttctattttaaatacatcttcggtactttagggctctcctttaatgttcttgccttgttaattcaccaccattactgcacccctatcttatcagagtgactcggttacttagatgttctacttaaccttgccccttatggcaacaggaaaagttccaaaactgctcgttccgggagattcccatccggtaaaaacccaagaccacactcaacatccggagtgtctaaacccaaggacgaccattgataatatttgtaaaattcatttcaacgtacttattttaaagcatcaagcgtcattatgtcagttgattaattagtttcactgattaattgagataacaaacaacttcctaaatttattttaagtgttttgagttgaagttcacaaatattatgcgatcatattactaatcaccgcctatttccatatcttccgatgaattccgtacaggaatgtaataatttttgttatttgtatttaatttataactttgatctatgctcatcccaccgtttagccattattaggttctgttatgaaactagtaattattgtttgaaaaccagtagttccagcgcgtcgtggcctattgacccccaaacaaagtctttgtctttccctaaaggtttggtcacctataagtctggctctaacatcgagtacagcaagtctgcccaacatttgttgcatctgactctgggggcaacaaatgtggcgggataaagttacaaacctgataacacaggtagctttagcacaaaaccccacattcccacccgagtaatgtcaattttattattttatgcactttataactatgttatggcaaatttattataaaaatgtatttcaactatccaccttcttctttcacctttactgtcgaaactcttttccagtcaagaaaatcttaatgaaaa

SEQ ID NO: 2554 - DNA, 952 bp, Beihai weivirus-like virus 21
  strain BHZY60867 RNA-dependent RNA1
gtccgctgccgtgcagtttaattaattcttttcgtgtgagctgcatgagtcggctccccctgtggggggcattttgtggctacggccacacaattacccatcggttgacacagagccggtggggtccgtgcgttacggtgtgtgcttcgacgggcgcacactggacgaaagagtgccgctggcgcacggatgcgagtaccgttccgagcttagagctttgctcggataggggtggcggtggcgagccattttggctgagtgacgtcatcggcccgagccataccccgaaggttgccttatgcctcagtagccgagggtagttcggtgaagagcctggaagccgggtagcgccggcgacggtgagggcaccgctgttaaccctgcgcgtgggttggccccttgggaggggggctgtaaaatggcggttctgttgtgcgagtggtggctcgaaggttctgggacctgctagtccggctctgcggcgttcactgcgtcgcatccgtgaagacgtggggaccgttccggatgttccgttcacgtagcgcgcgtgggtggataatcgccgaggaagccattttggcagaaggcgacgcacaacagacaaaatggactggcgggggttacggcccgcttttacgcgttgcaggaggacgccccctccatctttcgtggctcacacgacctagttttgcacgcccggtatgtttgtgggagtagtgacccgtgacagacccgtcgacttcaagtcggcactcaggaagagactggctcacccgtggttttgagcctgcttccgtaattaactacttaccctaaaacgagccgtgatttctctggtgggggccagagatttccttcaaggtgtatctgtgtcgcactacggctcatcacgttgcgtgtctggctgtctttgtcatactgacgccggatttgtcgtgctttcgttgtgaca

SEQ ID NO: 2555 - DNA, 955 bp, Apis rhabdovirus 1
  strain Apis/USA/A, complete genome.4
agtttcctttaaccctatctctccaacctgaacaagcaaacacacacgctccgccaacatagaagacagagagccaagacaagtacaccaacgcaaccagcaacttcttcactttcaacacaaaaggaaaatcaacacggaatgttcctgcgaagcatcattccccccctccgcacacccccaattttgggaaataaaatagctttgatcaatagataatccctcacccgaaatcggaataccgcacaacaccctcgatcccaattccctgcaagctccaagcgatccagtttaagccaaaccacaataaaacccttcaagcgacaaagataaaggaccgtcaaacatagacaaaagttcaccagacccgtcacaaaaccaaagataacgacactccgtatccagccatccagttagaactttatctacaaacagttgtaataattcttatgatctctatggtctcattatccccagaatatgtctctcacaaagcaatgccagaaccacacaactatcacaccaaaaaaacctcggcacaatcaggctcattaaacaaaaaaccaagaatttcgcaaagatccagctccctcgtcaaaactccaaaataaaattagcctggcaagtccacaaaacaccgtcacaaacacatcccagtatatcaccaatatctgcccccacacacgcccctccccaaaaaagacacaccagatgtgataagcaaatccctgtcaattttcggcaaacaagaccccttttgcttctttcacaaccaaaagcaaacaatcggaaaacagcccacaaagcgaacacccatcagcatactccggagttcaataaggaaatttctaaaacagactgtttcatactgcaacagtccaattgaacattacattaccaatttatttgagaggaaaatatataaattgcacaatagacatttaagaaaaaaact

SEQ ID NO: 2556 - DNA, 959 bp, Forsythia suspensa picorna-like virus
  strain pt110-pic-2-NW genomic1
tggagatccctctatcttgcgagtcactcaagttcctggtcgtgtcgaatatgattggcctggttggagatttggccatccaaatttttcttctacaacatctgaaattttggaaaaaccatttaaagcggctcaagcgttagcaagtggtggtgttcactttgacaaaaatggacacgctcgagtggaaattccatattactctaaattcgaacgcttgtttactcaatcaactaatccgtcgaataaggatgaccctaacgggttccaaaaatctatatctttaacagattctattggtatggtgtatattactgggtcttatcaaatcgatggtacactcacattttatccgcgagtgaccctcgagattaatcaggcgattggagatgatttcgaatttcaatatccgaaagcagtgccttgttttattgtagaatggtagttgttatattatgggttcttggtcttgctctgttattatcatgtatccttactggtataataggttattattttttaagattagtacatagaacatataattatacatgcagaaaaatacaaaaacatacatttagcttaggtgatgaggagatggcgcctatttataagccaactactcatagtgttcttgttccagtgcccttgtcctgacccttagtaccttacccagcatgaacgatctaagactaaccgagtggggtgcgagattaaaacttggtaacaagttctctcactatgaagccggggtctgatttagtagtgtgacaagtgggaacctggtgttcagcgtgctggagtccataacctctcccaatgtaaattctgcgtgaggcattggcaaagttgtgggtggctctggtggtccagtccggagggctagaagtcttcgagtccggagggtatcgtcaccgcccaatcttgtgacgtctttcttttaaatttactctacaatc

SEQ ID NO: 2557 - DNA, 969 bp, Pink bollworm virus 1
  polyprotein gene, complete cds.1
ggttaatcccgtgcagcgctctagtagtatttcaaattttgaatcgttacagtgcatttttgttgactaattttgttatctagttcattgtcagttcgatttatcgttcgtgactataatgttcgtagaattttcacctttagtcttcgttaaatgtattgtttgttacaaaattctttgactactaaactttaggttagttatatattatagttaagataatttatatatatattataacgaaatatagtattaataaaatataaaatacaaggtaccgaccttggctatctctaacaactattaatgtaagtgttatgtattttcactgtcggccagtccaagctcttcatgggcgagacaaacagtgacaggagcacaatcatccctcctggcaacaagtacctctcacacttttattaatagaatgattgatagtgtataaataataattttaaggcaagattcagattgtaaataatgtttataagtacatcttatactcctagtaagagtccttaatatatatagacggtatactgggcgtaataatggggacccctccaacctgcaaacacaggacgtaaccagtgacgctagattatgagtataagacgaaagtgaccgcttatttatagtcgtggatgacagaaattctattagatagattttcttaaacgcgttctgatcgtgagaatacttttgcgagttactcatggcggagatcgtaagcagatccagactggttacggtacaatacctaaatgatcttacagtgataggtattacgtgtcttactggcatcgagttcgactgttacgcggatgaagcagcgtagctgaatttttcattttctttcttttatggtgacaagcgatattgaaacattttcgatattttccaagtgattaattgcatctcttatttcatttttaattgtgacttatattatttcaacaatcatcaaca

SEQ ID NO: 2558 - DNA, 970 bp, Larsen virus
  isolate Antarctic83 RNA-dependent RNA polymerase gene,1R
cattttatgaaattacgacagaaggctttatcaagctgggaaaggccaaaggttttggtttttcgcagaacattggtaagccataccatcaatcatatagggatctgtattcaatcgaatggttggatactgtgacctgctatgagtggctgacgactgagttaacccttattaatccgaaggccgcttacgctaaaagtttgggcttaacaaacccatttcttatagtgaatgacctgatcccctggtcctttgtagtaaactactggactggtcacgagaagtggctatcctcactggatgcctttctcggactgaaacgtgagaacgagtgtaaaacgacaaaaatcgtttactacactgagtactcacgttgggataatcggaatgatccgcccactagggaggattatttaggggactacacgaagttcgatagaactgtcgaggagataaaagctcctgggcttacagacagagtgaaggcttggcctttctcttcgcagaaaagggccgtcaacatgtctgtcttaatcgcatcacaatttagaaatctttaattcctaaaaggagtacaattatgcaagctaaaagctttacagttacaggcggatctggtgaactcgaatttgaggttctatgtccagcgggcccaaaaagccctgctgaatttcgccttaagaatgaggagaaatccccactcttagcaccttacctttcagttctggctgacaaagtgaatcgatcttcctcacggaaggtttcaattctcttcgttaagccaattgaacaagaaggacaacgtgtcggtcaaaacgtttttaccgttcaagcaaaacttgatctgcgtagaagcgtcaccgatgcgaaaaaggacgttgaagatctactggctatcataaaccaggacgacttcaaagaaatcctcgcaaaagcaatttcaccaaattaacaaccggagttatttatt

SEQ ID NO: 2559 - DNA, 971 bp, Psammotettix alienus iflavirus 1
  complete genome.1
tctttaactcatcaactgtgacttacatatacgcaagtatccctgtaatttcatcacattgatgttaaaatcatagttaattactgtaagttgaagtatccctctttgaaatactatacaactgagtaaccctgtctatgatcttaggtttaagacttagttttaagaaatttttatttttaataaccaatttgtatgaatgttttcatgtatgatacgctgcaactccaataaggattgtacgtgaatgaatgttttccaaattgtgtgaatgaagcgaagctcaaagaagtagtacgatttattccgaagctttgagaagtagtagcttttgtatgcttgacgtaacgtatgtttgttttattattaatttgtgtgttttagttttaagaagttctcaatttattttcttacttcatttgctccaattatttgtttgagccaatttgaaactgcatagtctttattaagttacaaagtttaatttatgcctaatactgctgattcccagccttagtagatcttgatggcaggcttccaacttgttggtaaaacaagatatcaagatctcttcttctacttttacagagctcagccttacgaagcgatgtgatagtttatacttgtgcctagagcgtaacctctgtactcatagaaatactagttagaacttgtttcttgcgttataacgtattgttgagatatcagagcatcgtgtcgacttgttttctattgcaccgtgagatgtaaaacctggtaaagctgtaaaactagagaagaaaaatacttcggaccggataagagtaaacttcaggataagtccccccctggagctaggtatattttaacacttataaagattgtatgttttagattgaggatggattcttttgtatcacgaccactgctatggaccttgactaagggatgtgtgcttgcactgccctaattttttgaatttgttttatgaa

SEQ ID NO: 2560 - DNA, 972 bp, Lucerne transient streak virus
  isolate LTSV-Can, complete genome.1
gtaggcacggcgatcttgtgtacatagcagtagcagaaaggctaatagcgctgtccgaggccgacttggaagcccatccgaagcccagcgatttagttcgtttgggtctttgtgatcctgtgagattgtttgtaaagaatgagcctcaccctgccaataaggtgcgggaagggcgatttagactgatctcatcggtatcgctggttgatcaactagttgaaaggctgctattcgggccccaaaacaaggcagagatcgctttgtggcagtcggtgccttcaaaacctggtatgggattgtcacagaagtggcagttcgaggcgctgtggaaagatttgcaaatcaaacacgccagtgcccccgctgctgaggcggatatatcgggttttgattggtctgtgcagaaatgggagttagaagctgatgtgtgcatgagaatagaaaggggaaacttccctgcaagaatgaggaaagccgccttgaaccgcttcaagtgtttcgccaatgctgtgttccagctaagcaacggcgagttaatagagcaaggcttaccgggtctaatgaagtctggtagttattgtacctcgagtactaacagccggataaggtgccttatggctgaaataatacaagccccgtggtgcatcgccatgggagacgactcggtagaaggatatgttgagggggcccgtgagctctacggagaactgggtcacacatgtaaagattacatcccgtgtgctgctgagggagagatcctcaaggaagtgaacttttgctcacacagcatagctgcggatcgttgctatctccaatcctgggctaaaaccttatttagatatctggaacaccctgacgactttgaggagttggcagtggaattgcagggctgtccgcagtggccgcggatatacaagtacttacgtcggattggaagagtctccgacaaaattcccgaaccaagagaagaaa

SEQ ID NO: 2561 - DNA, 973 bp, Beihai picorna-like virus 51
  strain SCJXSX38939 hypothetical1
tgcagggttaataaccctgcacctcgcgattgacgatttggttagattgtgcgcattatgttgaagattcgggctgacttatctttcgagatttttcagctcttcttattttcatatttttgcgtaactttttagctttttctgatatcctagggcttggaagtgtgcccagattttctatacacttaccttcagctccgttcgtgaacttgcacgttcggttctatttacactctcatgaatactgtagtgatgagtaaacaacacagtactaaagcttcgctattcattgaagctatgacaagataaatgtctaaacaaaatgacggtaaaactctacttagaagtgattccgtaaccatacgatttggtaaatatgaatagcaatttttgtatttttaatatccctctaacccagggatttgtatatgtatatattttacacatgttgtagagctcttgttgggctctttaaagaacagatgattactagtggagataaaaataattcgaatgttacacaagtttttaaataaaatctaaaaacttcactagttggaacctcagcgcggatagcgattactgatcgagaaattcgtaccactttgtgccatcgatatatcgatcttatggaaagcagcaaaccatggcgatccggaggggatcaccgcgttgagaggatggtgtgcaacttgactcgtggaggctgctttgcagtcggtcacgtaagagatctgcatgtcatgaggtaaagtcaagcgtgacctaagcgcttgcgaccattgatcaggttaaaagttcgggtggggcagctggtacagccaggccgtaggggaacgggattcggagaataccgccaatcaagcttcagatttcaaagaagcattcggaagccattatctatttgagttatcttttcattcaaaatcatcaactattataatttgctgatatcaatgaataagacaccaat

SEQ ID NO: 2562 - DNA, 975 bp, Rubella virus
  capsid protein, E1 and E2 envelope proteins, complete1
tccgcatttccgcgcgatccagaagatcatcatgcgcccctgcgcccgcaattccttgtggccgctggccatacggagcccgaggtcgacgcctggtggcaggctcattacaccaccaacgccatcgaggtcgacttcactgagttcgacatgaaccagacccttgctactcgggacgtcgagctcgagatcagcgccgctctcttgggcctcccttgcgccgaagactaccgcgcgctccgcgccggcagctattgcactctgcgcgaactgggctccactgagaccggctgcgagcgcacaagcggcgagcccgccacgctactgcacaacaccaccgtggccatgtgcatggctatgcgcatggtccccaaaggcgtgcgctgggccgggattttccagggcgacgatatggtcatcttcctccccgagggcgcgcgcaatgcggcactcaagtggacccccgccgaggtgggcttgttcggcttccacatcccagtgaagcatgtgagcaccccaacccccagcttctgcgggcacgtcggcaccgcggccggcctcttccatgatgtcatgcaccaggcaatcaaggtgctttgccgccgtttcgaccccgacgtgcttgaagaacagcaggtggccctcctcgaccgcctccggggggtctacgcggctctgcctgacaccgttgcgccaatgctgcgtactatgactacagcgcggagcgcgtcctcgctatcgtgcgcgaacttaccgcgtacgcgggggcgcggcctcgaccacccggccaccatcggcgcgctcgaggagattcagactccctacgcgcgcgccaatctccacgacgctgactaacgcccccgtacgtggggcctttaatctcatctactctaaccaggtcatcacccaccgttgtttcgccgcatctggtgggtaccccactcttgccattcgggagagccccagggtgcccga

SEQ ID NO: 2563 - DNA, 976 bp, Euscelidius variegatus virus 1
  isolate to-1, complete genome.1
tggactcgtattttgacctcagccgatttgctgtttgagctagatctgatagaaatgcaagataactggcgtctcgactgttgtagtcaaatgtgttgctagatctgaaagaaatgtaaccttttgatctttagttttaaggaattttaataaacttaaataaactattgcgaacgatctccaagaagtaattttttgtaaagttttgtgtcttgttgaagccgaagcgaagtagtaacgaaagtgaagcgcggacgaagcagtatatcaagcacatgttttaaaattcaaaattaacatatagtcacgacctatttcttcgtgtatccattgtgcatatggagaaataattgttgcatatagtcacagtctatcactctgtgtatcctggtttgtatttgcctcaggagaaataattgttaccaaatacatcccaaaaaggggttaaagtttatccctggccatttgccttaaactgattctcgtgcgtgtcacaatttggtcaccgagatgatgtaaaactcttcacaataaccttttgtagcaatggaagttgtgtaagtattatgagtagctacctaggttttgcaagtgcgtggaataactcgtcatcttttagtgaagaactctgcaccgtaggaatcccttactgatatcttagcgctgataggcttttgtttacggacaaagtcgacagttaagatatgggctgggcagaacttaagagtaggcctgagaaacctgctctgagttgcggctcctgtacgatattcatttgatgacttgtgtttctataatcgcaaacacttagacgtcccccgcgcggtaccggctggacgaagaagtacctttatggtaggccgttctcccgtcgaacgacgggatcaaacacccaactaggtcctgtgtctcgccgttctcgtcttctcggcgactcactttcatctcaatttctttttctctatattttttcaaa

SEQ ID NO: 2564 - DNA, 982 bp, Wuhan pillworm virus 1
  strain WHSFII20185 putative glycoprotein1
gccccccccaagatactcacccaagtgtttaacaatcttgcttgaactgactacctacaaaaccggctgctacagtgactgtaacagtgtgtgagacataaagtcttaattactcactcttgccttaatcactgttatcaaagtggatttgacattctatataatcctgttttacgcagtattaatagccatcacatttgctctgttatactgctatatgaagtgattatgggccacaattcaggagtatagggtgtcaccaaacactattggacaccaatgtctggttgcttggatttaagttcagcactagaactggtatctgtgagggaatttgctgagaggattaataaggaggagtcaaaccttcaatcctttgtgagactattttattatttgaggaacaaagggttgactagtgaattggagaacgaatatagtagtatagtgaaaaggattgatgtgctgaggcctatacaagttctaggagaaggattaaactgttatacactaaatcaagaagtattatctaaatttgtcgtaagattgactattcattcagtggtgagtgatactggcttcagtagtaacagagtgaaggtagtttgtaagggaggaaagacagaaaaggtaaccggtatacaagctgtcagaaaagtactggaaccttgctataagaggagtagattgctagatagactcagcagaggctgtgaagcagttgtactttgtcagaagtggtttgtgacacttaaggtcattaaaagaggtagtatcagtaaactgcactgcctttgtagggatataaacatcacattgaataagaagcagctgagcttcttaggtatttataaggcaggttacgactacttctgtggggaattaaacttcttcctaactctgctagattatattagtggaggtagttttgatagaggcagtaacagcacacacataaaagaattgttgggtaaactaagtg

SEQ ID NO: 2565 - DNA, 983 bp, Hubei coleoptera virus 1
  strain QCM131202 hypothetical protein1
tgcatacgtacatatttgaacatattttaacgtaatagtgtgaatgtttctttatattatgtttactctctttaagtatgatagtgttattaatgtattgagtggactataaaaatcagtgttatattaatttttggtatgaatataacacgtttatttgcgtatggattttgcgtccatatgaatgattttaagagaggctattgagttttatatattacggttttgatgttcaatgacaatgggaaagactataaatttcgttttagattttataattaatgtgtgaatgtggtagttcaagggattttatactcctgaatagtaacaaaattataaaataaacaaaaatattatgttagatttagttagtacctagacgatttaatattagtaagatgaacggtacgttaagattaagtttttacataagaacaagcttaattattatatgcttatcccagtgagagtatattctttgagatgtattatacataaaataagtgcagacagtgtaacaaaaatccagttatgctgcgttataagcaagttggtaccagatgactttataactttctggcacgaaggattattccccgacttcgtggtccccttattctatgtatgatttcatttttttgaggtatatttcttgcgtaggatttttaattctgagggtaagtacgctgctaagtaatcagaacgtattattgatcctgtgggaaagctagactggatcagagaacaatagcctttaatgttcttgaatgtatgtatttgttccagtataatttgtaggcaggcttgttacgttcgcagaggagtctttagtttaatgtaatttacatataaatcctcagacggtgacggatggaaagacatcattttccttttttatgcagattttatattgatttttcttgtttgtcgaagttattctcagtgttttatccctttaacgtttttctttaatattttgtata

SEQ ID NO: 2566 - DNA, 984 bp, Southern bean mosaic virus
  clone contig608 polyprotein P2ab and1
agaggcacttagaattagttgctttgtgtgttaccgagagattgttcttactcagtgaagctgaggatctacacaataaatcccctgtggacctagttcagatggggttgtgtgacccagttcggctgtttgtcaagcaggagccccatgcttcccgaaaggtgaaggagggtagatttcgcttgatttcatccgtttcgctggtggatcagcttgtagagcgaatgcttttcgggccccaaaaccagcttgagatcgctgagtgggaacatattccctcaaaacctggtatgggcctttcgctgcaacgacaagccaaaagcttgttcgacgatttgagagtcaaacattctcgttgtcctgcggctgaggccgacatatcgggttttgactggtctgttcaagactgggagttgtgggctgatgtagagatgagaatagttttaggaggttttggacagaagttgtccatagccgctagaaacaggttttcgtgcttcatgaactcagtcttccagctctcggatggcacgcttatagaacagcaactgcctggtattatgaagtctggttcttactgcacttcctcgacaaactccagaatacgttgccttatggctgaacttattggttccccatggtgtatagccatgggtgatgattctgttgagggttgggttgatggtgcgaaggacaagtacatgagattaggccacacgtgcaaggattataaaccctgtgcaacatccatttccggtcgcttatacgaggtagagttttgctctcacgttataagggaagatcgatgttggttggcgtcgtggcccaaaactctgtataaatacttgtctgagggcaagtggttctttgaggaccttgagcgagagcttgggtcttctccccactggcctagaatcagacactatgtagtcgggaatactccatcgcccgacaaaactagattagaaaatttaagtccgagct

SEQ ID NO: 2567 - DNA, 985 bp, Barns Ness breadcrumb sponge weivirus-like virus 1
  isolate V92,1
actgccagacagatgaattcaccgtgccaccgtgcacggttgctctgaatttgtagggagcgtcgggggaggaaatgcccctggcggagatgacgctgtgcacacaacgcgactactgatctaagcatcagtgagtccgggggattcttaccgtctcgtccgagcttgtgcactgaagggggccgcacccctagtcagccttgttcttctgccacacttttcactgtgagtgtggtgagagcctgtagtggcgtactaagctctgcgcctgaggtgaaggcctctgggaaactggatttaacccccggttgggactggcctcccttaattcccatacccgagacggacaatgcggtaggcacctcttgatgccccacaccagatgtgagtcggcctttttggacttgcacaggtggatgtagggaacgaggagaagtcgaagctggtcaccaagcagtaatgcgtggtgtgttggctatccgtccagtgttgattggttacggtaccgtggcccggcgtttttccgggtgatgctatcgagcatgtggttagagctccgacagaatgaggaaccggtcaccgaccactgttgagccgcagggaacccttctgttccggcttgtttgacccacgtgattagagaaacatcggtttgtatagaaatcagtgacgatgcatgcatccgaagccccaaataaataaaatatagcggcttctgtgtacagtgcaggcttggtccatccccacatgaactccttcgtggttaagcgacattcgatgcgttcggaaactgcttctgcgcggggtatgattgtgtgggggtggccagactttgcccagggttggacgtctatcacgtggttaagcgacttccgatgcgttcggtcactgcttctgcgtggttatgcccgttctgacgctgccaagcgactcccgcttgagacgtgtatagttttttcggccttgccgtctgtttatctgagtg

SEQ ID NO: 2568 - DNA, 987 bp, Chaetoceros tenuissimus
  RNA virus type-II DNA, nearly complete1
catggacgtaatgtccatgcagagaattataatacttttatcagatatatctatgatattgtttcaagagttcatcttgaaactttcgtatgttagagcttgtatattgttgtcaatgtatgggttcttcccatacaacttcatatacaagatatttttcatacgctaagtttcgtaattgatagaatctcttgttgctttaagtagaatatttgatgaggtgttattattcgccccagttttctatctgtttacagctacgacttaaccattagtcgataacgcaggctgtatcctagttcagtaaagtacatagaatgcaaagatatttagactacttaagctactgataaagtttatactttcgcttttgatgtagatgttcatttacttaagtatagcgctctgaaccgagcgcttttgtttatgaaagaatttaatcaactctttcacccggccacacatctttagagatgtttatgacagtattaatttgtttaatactcgaggccaaatttcggtgtttttactaattgcaagatgtctacggactgccaaaatcttgtgtatttagtataaattcctctcccattttagttttaactatgaaattcttttattagttgactatttaggtttaggactttaacactgctcgaggaatccccctttatatgtgaaaattgcgatttaacacatactcgccccaaagaagggtttagagatgttagtaaaagaataacattttagagaagaatcggtccttggaggtgttttaatggaacgtaccccaagatcttattataaccggaatatacaaaggatgtatgtataatttaaggtatagttaccgctatgctagggccgacatgcccgatttttaattacctctacccgatgttgaccagtcaatatttttaaactaatgaattagttttattctaactttggaggaaagttatttggcacgccctttctattttaatc

SEQ ID NO: 2569 - DNA, 988 bp, Marine RNA virus SF-1
  RNA-dependent RNA polymerase and structural1
aaaataatgcatgaaatatagattttatctatatttcatgccacatttgtgacccttgagaaggtcataccgcattatgcggttctaagttaataactcacttcagtccagaagactgttaagtagttctgacggtggaaagccgtcatctgttacattattagttataataggatgtgtactcctaactagacgatctctacccttaagtcggaagccagcgtttagtgctgagtgcttccgtcacctttggatgacaaatcgtctacttcgactcattaatccgaaagttacctaattttcgtaacccctgtgtctgtgttcagtaaatgacagacagtttgagataaactaaaaatctcccaagtctccacaagtgacatcaatgatctgaactttatttttgacgtttgagatggtgaatgaaggccttgtgcctgtcctcactcttctttaatctttagtaagtcagtgactaacttgtgttatcctagttgattatactaggcttatcgttttctacaaaattttgatgcaaaatcggaacgaatttattcgtaacccgtgagcgtttcaaggtctttgcccttgatcctaaattttttgctatatttcgtgtcgtatcaagtcattttattaatactttttgacttgcctgaacgatgatgtctcgtttgggaagctgcgtaagcagttaactaacaaggtataccagaggatgtaatccccttccagttaccccttgtgttttgaagtactttttcgtaacttcgtgacattcgacctggttctaactcagatgtttgataaactttcgaactatcactgtgaaaggtgctttagcaccttacttgaacccgtcgtctaacacggacatcgttaacgtatgtagaatactatgagagatgttaaattcctcttattgaccacattggaaggcccttagaaaaggcccacactatagactggtgtctaagtccatcccgcc

SEQ ID NO: 2570 - DNA, 989 bp, Sclerotium rolfsii mycovirus dsRNA 1
  strain BLH-1-16 hypothetical2
ggcccgatagttaccaagcgcgcggtaatagactttaccgcttcagcaattcacgggtgcctacccctagtgtggatgaaggtgctcgcatttataatatagtacataaatatttgcctaaccacaaagttttaactggaggtcttccttcaagtagacgagctggtctcgattatttattgccacctgccctgaggagcggcaacgaaacggctggtccgttggcaggtagtacgctggacgtacgtgctcgaggcggtcctcgactcacggtcacgaagactgaggtcggtgttactgaggtaggagaaaatgttcacggtcccaagaatgaggatagagccctgtccccgcatgagactattacacgttctctttccggtgtttcgctgatcggaagtagtcgtggtagtgatgacggttctgcttcgtccccacggccgggtggtgttaccacctgccaacccccctcccctactggattatcgaggcaggcagtcaaagataactatgtgggcggtgtcgatgaaactacccaagctgcggatgtgacatcggcacgtatcggcaagcaagctgtgacaccggaagtatctgataacgaacaacctccaagtggtatcagatgggaacccttacgcagacaaggggcaaagttcgtcctgctcatcccgagtggagaaggtaaaacatatttggccgagacgtatcctgagatcttcaccgatcacgatgccctcgaggattacacaattgaggtccaaccgtacattgagcaggcacgcgaaagtggcgactggtcatacatcgatgcggtccaccgccggagtagcgccaagtgccaaacacctgtactactatcgtggaacgtttcgacatacgatcatacccgcttcgtgagtctaggtgcgtatttattgcgccaacctactaacattcgtgaaaacgagaataaccgtgccgctctgatcgcaacccacgattattgt

SEQ ID NO: 2571 - DNA, 992 bp, Wuhan japanese halfbeak arterivirus
  strain DSYS15584 1A, 1b1
ctgaaaagcatcccctaaacttcagttaaacgctgattccgagaaagaaataccctgctttctcagctacaaaatctgtctggctcatagtgctggttaatcacatcccccgtggtgtaacactgtgacacatacaatttgtagtccctctccttactctacccccgagtgtctcttatcggttactcaaaagttgtgtttggtttgtccgcttttcggattttgtgttagaattacattataaccttatcctagtttgtgttgtgattatatgtaaaaactcttcgtgtgaaagtttgaaattttgtgtgttcttattgtacctctttaacccacatatataatttctggcctcttgccttacctgtaggatttccaaagcctaaagtataatctccccgctagaggtctgttgtgtgaatcagaccattctttaacgtaaagtcacccgtatcgacgctaccatcacacagtaggatcaagattagctccggcagccctggggcgtcttctttgatacaacatcacctttgctggtgcttgcaccgcttgggtatatttttcggtacttgcaccttcgggtgttgtggcctcttactagtttttctcccccttacgtaccttcgccccttgggcccggagtccctgtaattggcatcgcaattgtggtgtcaccctaggcactgcctttattggttctgtctaggtcggtgtggtaagggtagaaaggcgataaacaccgtacattgtttattctattttatagctttcgctactgacttctatgactgattccctcctgtacttagcctcccacccggcggcacttgtcactcttacggctgtggttcttttcctttacctgtatgctggttgtcgtgcattgtttttagacggtgtgaagttagctagatattgtggaactcctctttgttggggtgttaagtgtctctgttgttttgttagaagaggtaagtcacctcgccaagaag

SEQ ID NO: 2572 - DNA, 994 bp, Sclerotium rolfsii hypovirus 8
  strain BLH-1-3 polyprotein gene,1
tataggtgctgtaggtctccccgtcgctcaccattacggtgttagcgtacgagctcgtgcgttgtatgcacgagtaccctacagacttcttaggtcttgtcgaccctgctggttgcgccgtcgtcgttagacggactctattcggacgtcatttgttttcgtccaaccccccttccaaaagactgcgtggagcggtcaatctagttacgggctgacagtagtggtgctgtcactaaggaacaccaggctggcctcagaggaaaagctgagtaataacaaacccgttaagtgatcacatagcctcgctagcatgtgacacagcgctatgactctgatgcgtcaggatgcactagcatcccaggaaagagtacgtgagacaatatgaacacagtgcgtgacctttgttcacctgtgcgattttggctccctagctgtatgccgcagcgacttgtcttgggttgatgtcgaataacccacgtagaatcttatccgaaacctctccacacacaaccgtcgacgcagcgacgttaaatacccggctatgcggaagtaccgaaagtcgggcgggcgtcaaatctacgccttaaggtcaaccaaaactttgcaattgcatcgtgtgtcagatgacacgaccatgagtcctcctggacacttctctagcttgctagagttgcccgccaccacagctgttataggcccttcggggatggtgcgactagtgttagcacccgtgtgaaagagagggcgcgttacgccctataaacgcttgttaggatagctttcccctggagaggagggactagtgtcgatgaaaacctcacaactcgaaagagtattgaagagcctcggcgcgtcaatcttaaaccaaacacccagtgccatttaaaacccgaaaagggtggatggtataaccaaagttctcaaaaggagccactgtgtggagtgcgacgtatagttcaccaggtcagccatagggttgtttacaaaacaacaa

SEQ ID NO: 2573 - DNA, 1000 bp, Agaricus bisporus virus 2
  strain C19-C23-C1, isolate AbV2-003,1
tcattccacagtggagtgtttgctgacggtgagttaaaatttttgcctctattcttcttcgcgaagtgtgttgatggtagcatatgcatccattattaaagacaagctgtgccgggtgtttcgttatatgtggacacgaagcgggtaatcctgtggaaaccacccccatcagaagtagcaccaaccggttatcgtggccgatttggtagttagtacctcgcggtagggcttcggcccgcgtaagacactagcattaggcagcgcagagacagtcagaaccatggaggccgtaatagccgttgaagtgtgatgatcctccagtgctcgggcgacgtgcagtacctaggcgaacgcgcgtaaatcttttgaaataagggtataagtgatatgacgaggcgggtagcttgacaaccacctagataagtcgaagaatatggaagaaggacgagaacgagtaagaaaatagaaaagcccaactttggcaagtttgtagaggatggggtgttttaggtcacaaatatggagtagggagcttcggcgaacctgcaaaacctacacatagtgctataagcgctgcccagcgtgaaaggccgtgatcataaccgtacgagggggcatcgagactggacctgtcgttacagcaagggtagacatttggggaaaccggcgatgctcatcgggtgtcgtgtcgctcctacctaaacttagagatgttaagttctggcggggggtcaacctatgtcgtgtcatttcgggtcaatttcactcattggaagtggaatccgctaacagagcatgcacggacgacgtctgtggtcaagcaacctttgtttgggaagaatcctgttatacaacttctacggttccttcgtctctacgaaccaatcgaagtctactgtttacctatctcgatgttactttacgacacacctccacgtgatcagtccgtcaagttaggtcacccatggtgaaaggcgatgtatgctaagaactcgaagcc

SEQ ID NO: 2574 - DNA, 1000 bp, Agaricus bisporus virus 2
  strain C19-C1, isolate AbV2-003, partial1
ggcagcgcagagacagtcagaaccatggaggccgtaatagccgttgaagtgtgatgatcctccagtgctcgggcgacgtgcagtacctaggcgaacgcgcgtaaatcttttgaaataagggtataagtgatatgacgaggcgggtagcttgacaaccacctagataagtcgaagaatatggaagaaggacgagaacgagtaagaaaatagaaaagcccaactttggcaagtttgtagaggatggggtgttttaggtcacaaatatggagtagggagcttcggcgaacctgcaaaacctacacatagtgctataagcgctgcccagcgtgaaaggccgtgatcataaccgtacgagggggcatcgagactggacctgtcgttacagcaagggtagacatttggggaaaccggcgatgctcatcgggtgtcgtgtcgctcctacctaaacttagagatgttaagttctggcggggggtcaacctatgtcgtgtcatttcgggtcaatttcactcattggaagtggaatccgctaacagagcatgcacggacgacgtctgtggtcaagcaacctttgtttgggaagaatcctgttatacaacttctacggttccttcgtctctacgaaccaatcgaagtctactgtttacctatctcgatgttactttacgacacacctccacgtgatcagtccgtcaagttaggtcacccatggtgaaaggcgatgtatgctaagaactcgaagccttggttgattgggccgctaccctctggggtccgtgcacggtctatttagccttggttaggggacaaccctgcagcaaactcaccctctggagaatcctttctttatgtatgaattacgcggatacaaaatctacaaaactacctaaagggccttgcaagcgggaaagccaaaaacgtcgatttcgaggcactcgaacggagagttgggaacagcgtgatctacttctcgactcccgtcgtcgaagtcggcgtgact

SEQ ID NO: 2575 - DNA, 1000 bp, Grapevine leafroll-associated virus Carn
  isolate Carnelian1
ctaaatcgcttcaaactgatggtgaagggtgatgtgaagtttaagggcgactcagaagcgttggaggagtttgctccgggacaaaacattgttttccacagccgactagtttgtgcgcacttcgcaagcgtattttgtgagctagtgaacaggttacgctcaatatgtgctccaaacgtaatattattcaatggcctatccttcgaagactttgcggcacacgtggactcatgtttggatggtgaacccctctataatttcaagagtgacgaaatagacatttcaaaatacgacaagtctcaaagcactttaaccaaagccatagagcttgaggtttacaggagattgggactggatcaacgcattcttgatgtgtggggatcgtcagagttttatggtagagcaaccacgggttcaagaagcttctctgcggagatattcgctcagaggcgtactggtgccgccaacacctggataggtaacacgattataaatatgtgtttattggcccagagcacagacccgagactctttaaggtggcgtgttttgctggagacgatagtctactaatctatcgaaagaaacccaccatacactttgagtactatgagacaaagttcgacttcgacgtgaagtattacgactctgcggcaatgtacttctgtggaaagtttcttatctcagatggggagaaaactcgaattgttccagaccccatgaaactttttgtgaaattgggaaaagagcggccctgtcatgattctgtattgttggagaattggaggtcattttttgacgtcacgaaagcgtatgcaaataacaccgttttggaacgtttggtggagcaatttgcattgaaatatacagaatcaccacaggcttatgcagccttttgtgcagtgaactcaatcagaagcaatccagaacaattcaagagattgtggttttctttgtatagtgggttttcgagcgacatcaagcaaagattgaggtgacttc

SEQ ID NO: 2576 - DNA, 1000 bp, Pterostylis sanguinea virus A
  isolate Murdoch-7 coat protein gene,1
tggtggggggttgggaaaaaataatccaaccccacagttgacaaaccaagcacagcgcaagaccaacaaggaaaattagtgggttattgtaagtgaacccaatcgagtatattgatcgagcgaacgaacaagatgtgatgtggcaaggcgtgtcgatgtttctaccatcctctgaattatagctgtgtgcggagtaattatgatggagctaagtcgtgcacttcccttgtgtggttgactggtggccgaggcgatttatttcgtgggcggtacagttaacctagtggtaatgcagcacggtagaccttttagtacataagttgccgtccggtcctaagcccgggtacatgcagaaggacacgcgttaagctgtaacgcgggttatgtcacagcagactccgacagaatctgcagccatccttcggcccccaatgcgcgggcagatgagtgtgatggatgcgggacactaacggaggttccgggtaatgggtgaaaccgagccgacgcgaaagcgacaggccccccggacatagggagcccactgaccctgaccgccaacacaaaggatgttggccagggaggagtggtaaactatgggtagtgacaacatactagagcaaggtatgttgattgcaagacgcggacggctatttaggggcgaaccctatctaaaacagtctagtgtaaccccatgcaacatgggcgcgctagctgggcaacgggaagggtggttctggaccgtagttcgtcgacatctgacagggcaagccccttgagatgtacacgaggctcgagaggacagaggcgcgcgtcggtctccctgacaaggaggcttaaggtgtaaacagcgtgtttgggagttagtggatattgaattctgtggatgcttacatcgcctaggtattaaattacggacgatggaagtgttcacaaagttccttataccctgcggccacggtcattgaccctaagcccgagctcccttcatgactgacattcg

SEQ ID NO: 2577 - DNA, 1000 bp, Haemorrhagic kidney syndrome virus
  capsid protein gene, complete1
ctcttgacgccagagttgctagtctccgtggtacatccaagaagcactctggggagccaggcaccatgcttttcaacactatttggaacatgaccgctgttttccacaccaccagtttcactagaatgaccctctagctcttcaaaggagatgactccgttgtgtgctgtgactccagcatgcccaccccaattgctaaggagttcatctctcagaacgggctcgtcatgaaacagaagacgtcccacctcggctccttcacatgcagtctcgtcacccgcacaagttatgtcccggacgtctacaggttcgcttgcaggctgaacaacaacgacttcacagataccaagcgcatcgaggatctccagagggccacagacgatttcatcaagagagcgactgtcaccaccaactacgggttccacttgctcgatcaacggcagatactacgtgtccttcggacaccattgagtgtgtcgttggcttcctccaagattttgctctcaccggaaaaatagacctccaaacatcatacaaaccaattttaaaatattaaaataagagaagaaattaaataagttggacattagttatgtgcgcttgagatagatacagtcactatggcagattccaaagcagtcgctccttccgtacaatctaaaccacgtcgcactaggcgtccaaagatggacccttctcagatcccagatacagtcaaaaccttccgtctcacaaccgaccctattatggcacctccacctggtgaagttgattcacttctctacacatcaggcctttcacctgcagttgtcctttccttctccccattcacctcccccgcagttgtcttcgccgccaactatgagaatacaagatcttatctttcaaagctactgtcctctccctagcaccagaagctatttccagttacaacctctctgtcgtctggttcccagatgcatcagaagggcccacctctcttcaagctacaaacttgtcc

SEQ ID NO: 2578 - DNA, 1000 bp, Xinjiang tick associated virus 1
  strain 16-T2 ORF2 gene, complete1
cccgtgcgggtttttctggtgctccttatgcaatgggcaacaaggtttacggtatgcatctgggtgcttcctctgaaaacataggctacgatgctggctacattctcatgaagttgaggggtttgaccgagtcatcaactgactatttcgagaaactcgtggacaacgctagacgccgcgggcgcaagcttgtggtgcgaaacactggtgatcctgacgttgttgaagttttcgtcaagggtcactacgtgcgtcttgaccgcgatctcttggaaggttatggggatgaggttgagtcagccacttactctcaggagagtgttagtcagggaaacggaaaggggccccgtgcggatgcgcggggccctgggcagaagacctctccggtccctgctcccgtcccgagtgggcaaagttctcccttaaccccgaaacagccgcaagctgcgacggaggagaagggtacggagtcccccgcatcgacgcctgtgccatcaagcagtcgttcgccaaccacgtccgcatccgtgaagcccaaggctctgctcgaccagcagggacgattgtcgaaagatgtcttgactgtcttgagcaaactttcggcgaatggaggttccggcctcaactcggccgaattgaaattgctaaggcaatacgcgaactcgactttacctcaacacccggttattgtcagttcagtggctacggcccaaccaacggtgccatcttaggatgggacgggttggactttaagcgtcgggatgtctatgaggcacttgtctctgcggtggagtatcgacttgggcaactcacacaaggaaaactagtctatgatcccatcaagcttttcatcaagcaggagccgcacaaacgggctaagctggaggaaggccggttgcgacttatttctgccatctctttggtggatcaggtcgttgaccgagtgttgtttggccgattggtggagagggttctctccactgttggccgaacaccttgc

SEQ ID NO: 2579 - DNA, 1000 bp, Trichoderma asperellum dsRNA virus 1
  isolate JLM45-3 hypothetical1
gtttctaatataatgcaaaccccgtaagttacgatgactggctcggccgttgtaactgagtatgttgttgaggtgagtgtaatgagcaggaccgcccggagaggatagtatttatccctcattgtagcttccaggatcacgaacgttagtctaagtattgacggttacttgcagtatttagttctggccggaatgacacacatggaccgtcctttatgtggacggagggcgttacctctaaacctagactctgcgctgcgagtcaggatgaggatgctacttcaatgtatcttcagcctgacactactgcagtgtcgggtctaggtttaaattgagccaccttagtgggtttcaccagtatgaaagaatatactggcacccgtgcaggcaccgtttcccttgggctgggagaaaaacgcatccggttcgaaacaccctaattggttaggcttctgcctttccggccactcatccgtcattgagttctattatgtttccttccctcgtagaagccgggggcacatcatgtggcaacgaaactaggcctccgtagcaatctcacggttaagatgattatcgcgcggctgaaaatagggacggggcgccgtacccgcgcattactgttaggcgtctaggcaaatattgggatagaccccagtagtttccacgcgcggtagggctggccgctaaatataaaacacagtcaaagtcatcgcggatagtggcctaaccagccgctagacctgctcaagggttccggaattcgcaagttttctgggtgtgctgtgtagtagctggacagagtagctgcacggtgctaacgtatgcttaggctgtccgccctaagtagaacgtgccgaaaggtggtctatcgtacgtaacgaaggagggacgtactgggtttaatcccgaggtagggagcgcctgtaggtggaacgactgcccctgagttgaatgcacggttgtgcacgcggaacagtctgctgggcatcccccagtg

SEQ ID NO: 2580 - DNA, 1000 bp, Fusarium poae dsRNA virus 2
  isolate SX63, complete genome.1
gcccgtgaacaccccctgtcttcctcactgggacgatcccaccagtataaaaataggtccgtctggctgcatgttaaacagcccaggtcagcgctgtcacgctgggtttatcacctaacaatacgacccctcgcatcacgtcgtaaaactgtgagagctcgtccattgctggcgacgaattaaacagcgtactgcaggcatggggtgtttaaaaggtaggttgcttaggctgtatgttgccgatatgatacagaaacccttcgcgctgatcaaaccactgggctcaaacaaaccagtggatgctgcagtcggtcaaattcacttcgttgaagtgcttcgggtaactcccgaatcatgaggtaactagtggaccgtcaacccctcatttactaccacacttgggacttttgagagcttccttgtgtggatatgttataaaatgagtgttggttcggcgtttgcgcgtcgaatttctaagattaacacctggtgcgcactcctccggcttcggccgggggtgtgcgtagcaggagtttgttttagaaatgcacttattcaattaactcaagtcctaggtatgacttaaaactacctccccccgccctaggtatggcataaaactaccttccttggcaccgtgaagtgtttaaactagcaacctcggtggcgtgggtagatatgctcagccactataagcgtctcgggcgtgacggttattactcaaaaatcgccaaaatccatcgtgtgagcgggagatgaccctgccggacgggaggtaacctagatgtcaactagggtgtgaccacaatgcggccaacgttgtgcgagctatcgtaaccagggacggtctggatgtagcgtacgggtgcaatctctaatgcaccacttctgttgctacccctggggaacgagccatgcttaggtatggtggacagactgacactcctgtcgctaagtttcatagcgcaccaaacagtcggctgggtctacgggcccagtg

SEQ ID NO: 2581 - DNA, 1000 bp, Fusarium poae dsRNA virus 3
  isolate SX63, complete genome.1
aaatctcggacggtgccgcgcgatcctaggcacttttgttcggggcgttgtatctcactcagcgtcctcctcagccctgagaccatagggttatccgacgacttggctataaatataacatcctccctttagtggaatcgcccttacaccaacttagggccttttccagggaaaggaacccgtgccgccgcgcaattcgcggtttaccatggtgcggggttgtcggagtaggtacgtgtgctagcggtagagagtatatgatgcggtttttcgctgatttcctactgagcaccctacgcccgaatttttaggaagaacggccctcaaaaacgagaaagctgttctgccccgaaaatttgaggggtaccaccatttacgtccagcatgacggaaaaaggcataccaaactctggtcactcgcgccctgggcacggcggtaaactgcaccatttgcgtgatctatatggtcgaaatagtcgcacacctcgttaaacctcctactgcacagctctattgatcgagaaccctttagtgggaatgcagagctcacactcggcgtgtggtcaggataggtgaggttggcttccgtttcagcgcatcctgtggtgagccccacacacataagctcaaaaaccagagtcctgccgcctaatacgcgggatataaaggaagcggaggggtcattcgctataataaaattagatcaaaagcatcgcggatagtgggctcaccacccattagacctgctgtagggttccgattcggagtaatccgatagggtgtgctggtagctagctggttagagtaggctatcggtgctaacgtatgcttgggctaaccgacccaggtagaacgtgccgaaaggtggtctctgcgcaagcccgaaggcgcggtttgctaggtttaatccaagcggagggagcgcccgtaggtggaacgactgccccacagttgacgcaaggttttgcacgcggaccagtctgccggacaacctccggtg

SEQ ID NO: 2582 - DNA, 1000 bp, Fusarium virguliforme dsRNA mycovirus 1
  putative structural/gag1
agttatcagtctctcatgttcgtagcgagtacatgagtatcacagctgaccaggtggcaggctaagaggaattcgagggtaaaagcagggtatccaacttcacccatcaagcaactatcttcgtgttcatttctccatcgtgctaaggcgacggtgtgtcatctctaattcttgattgtggtagcgattgtgctaaccatacaagataaaagccctcagttataaaccctgcagcctattacgtacatagccaggggcgctaactttaaattgagcgctgtaactgtagcctgtcaggatgggagcagagtctatatggcggtagtcgtcgtgatctgcgcatagccaacctctgtacatctctattgtgtcgcaacccttcagtgggaacggagagatcgcagcgaccgtgcggagcgtctggtgtggtgaccttcttctacaactatttccatctgtctcgaggaaagccgggacgtcagtaaactaggcccacgcatcaaaggcgtctaacatgaggctactaatgacaaaggcttaatcattagattcgacacgctgcccggccgtgcagccgctgtattcataaatcggcaatcgcttcgtctagtgggaactaaccattcctacgtccggtgtgagggttctccttttggaggtgtccacttcagatatcgcacaggagtttctgatttgggctaacgtatgcgtgtagctgtgcgtctacaagtagaacgtgccgaacggtggtctctgcagtgtctcgaaggcgcagatacttaggatagaatccaagcggagggagcgcctattaggtggaacgactgcccccatttccgatgtacggttgtacagacggaccagtctatcgggcatacccggtgaagcgaattcatatcatctagtggtgtccttaattaacggcgtcactttaatcccaaaaattgttgattagtgaaatttaagttagaagcttattttacgactctcttcacccacc

SEQ ID NO: 2583 - DNA, 1000 bp, Macrophomina phaseolina double-stranded RNA virus 2
  isolate Mp31
aaatatgcacgccccctccctgaagcttaatagtagtgatacccttggacctgtccagggccgcacgctgggcccgaagtagtcttcctgaaggcttaagagtttaggactcacagccgaggtaggtgactgggcttcaacacctctatggttcttttccctcctttggcacaggggggaactgattaaatagaggcatagcggtgacaatcgctatataaatatgacctactcgtagggccgcgagtataaataaggcttgccaagagcatcgcgtattcaggattaccagacctgaagtcctctgtcggggttccgtccctagtcatgctgcatgggttgccatgcggtaggctagcacacgggtgtgtttctaactggctatgcagagtaggttagaaatgctaacgtatgcttaggctgcatgtcctaagtagaacgtgccgaagggtggtctctggggcgagatggtgtcagctgctgggctatgtaaatccggggtgtcttagcttaaccagtatgcgggcgtgtgtagggtagtggcttgtaagtccgggggtagtcgtccaactaacagtgtcggctacatgcttagccttaagctaccttgcatacatctcttaaccggagggagcgccttagtaggtggaacgactgcccctgacggtgacgcttggtagcgacgcggaccagtctgcccggcaccaccgggtgatgctcttatgccatatcgccgagagataacgaacggcgctagcccctagatccgggctggctttctctccgcatatgctagggtggccagacgtcccttgactggtactcacttccgggccgcggcggcctttgtcacttctttgtccttccacggatgccagccccgttcaccacatcctcatcccctaggaaacttggggaaagtagccggtgtatagcaactctcaaggggtagtgggaggagatcggaaaaatcgagtcataaaagcctgcacgaaacatt

SEQ ID NO: 2584 - DNA, 1000 bp, Sclerotinia sclerotiorum
  dsRNA mycovirus-L,isolate Sunf-M, complete1
ttgggcgcgaatccagctagtgtagtagggggcaggaaagaacgaagtacgtgttaactatatgattcatccaacttgggtcatatacagcgtattgctacccaaggtgtcaaggtagtgtgtgcgatttacaacagcagcactactaaaaaacatcacagaccttggggcctactacagagagtacaaccgttagggtaggtaagggcaggagctacaacctcttgatctcttaccaggccagcggctctcagcccctgttttatatttactcctccccggtctagcggtgggggagtggtataaaatgagcggtcgcgctcacttgaattaatcttttacgtttacgcgcataaaatcaggacacatctcttgtatactttagtatatcaatgatgtttttgttttatgcgattaatcgtaagagaacttctttccatccgcctgtatgggcgggataataagttcaccgccttggtcgaggcgcaaacttgtatgtgcaaaggtgagctatatgctcgaaatagtcgtaactaacacacagccactacctgtagagctctattgatccggaatcctttagtgggaatgcagagctcacaccggacctgcgggtatcttcggcgttagggacttctgtttcagccttgaatcatttacctttataccttctctgaggcgcctgggccgggcgcgatattaagtacaagtcaaggacatcgcgggtagtggtctaatcagccgctagtcctgctggagagttccaacttagttgggtgtggtgcatactagctggatagagtaggtatgtattgctaacgtatgccggaggctatccgtcctcggtagaacgtgccgaggagtagtctctgcagacccccgaacgcgtggggtctttacttaaatgtaggcggagggagcgctcgtaggtggaacgactgcctcccagtcgaatgcaagattttgcacgcggaccagtctgcccggcaattcccgggtg

SEQ ID NO: 2585 - DNA, 1000 bp, Bremia lactucae associated fusagravirus 3
  isolate DML-A_DN432831
gcactaaattgataagtgaggtccgcaaatttgcagctacgccagcaatggcgtatgctgaacagcctcccgtcctggtgcgacctaaccaggggagttacaaattgccagatggcaagactgtgcgcagagcgcgggtcgtgtcgtctggtggtaacgccactcggaacagtgaggtttcgagaacttccggcccccgtcggaacgttaaaggtgcagtgatcgggggttccggtggagggggatcgtcctttcgcgcgggtgtggggaaggagagtggttctcacacggacgtgcagggtatcgtaagcggcgcgcttacgatggccaagcacccaagagtgatggcgaagtcactcttggcgattgggcgcgcagccctgaatgctggcagcgaggaggccttggtctcgctagccagatcgatccaagcaaggcaaaaacctggagtaggcttgggtccaaaggagcgggtgggcttatctgatctgatcagagaaggcatcggttctggagaactaagagtgggtgatgcaagaaacctgctcaagatagcgccggaggttgaaccggtgctcccagctgagattaagaatcagctgggaaattacaaatctttgtcgtttggcgaggttgaggtagaagttctatctccccggggcgtcgaggaattggagaaagccagccctgagttgactgatagcgctgcatatgaggcgcaatttgacgcagctgggcaggcgacggattttgctttcgagccaatagcagaaggcaagggccacgcggtgggcgcggcttataaagacgagggtggtgcccgactgggggtgctagatgatgttgaagccgatccggctttaaactaatctggcactcctcgtgcgcaccctttggcgaggcgcgtgcccgattacttttcaaatttgcctgcccactatttttaaaagaaatagttggttttttggagagtctcggttgcgatagaaccattacacgg

SEQ ID NO: 2586 - DNA, 1000 bp, Rhizoctonia solani hypovirus 3
  isolate BR16 hypothetical protein1
agtcttatctagtcaataagacacaagtgcagaaggggagtttatccccgcctgttgttcagctaatcctctcaaaggaggctcaccgctgggaagcgctgaggaattcgcgattaaataccgcgcgttcatgaagatgacggagtaaaccgtcatgctgttcatcataaacattaaatcttttggaacttaaaggtggattcaaccaccgagtgtgatttgagcctaaaagccatcgaggctgaaatggaaagctcagattgtgcgagcccccttagggggattttgttctgttcaaagtcgttaaaacaggagattcaaccgcagagatgattacgcatcgagctcaaggtggggggaacaccggtggtttcaagactacgctctgcggatggttgcctggactagggcagttgacgatgtcctcctagttcacgatgaatgacgatgcttttgactatttggcatatactaaatagtgacgctataccgggatacgaaccggaacccctgctcggagagctcgtttgatccgacccaagttgcctatacgacttccctaatcttaagacaccaacgcgtaccgtgctttgcctgaattctgacgctgagactcttagagtggctgaagataatctggtccaacggccttaattgcgaacggtcattgcttaaagccccccgaaggttcaaccacgtagggatctataaaggcgatgaatgaaatagtgccaggcacctcggtgtttgttggccgttcaatgtttctggtttaattttgtggtccaccattccgtaagtgaagccccaatcggtgggttaatacggtcgcgaatgtccaatgagtgttaaggatagtcatggttataatgctaaggattgaacacggttttatatcgtctggcgccctctccaaggatggcaatttgttttgcgaggaaccctagctataagaattgggagtccctcaaatgtacgcaggccaatcatcgatgcctgt

SEQ ID NO: 2587 - DNA, 1000 bp, Chicken picobirnavirus
  strain RS/BR/15/5S-1 capsid protein gene,1
gtgtagaacaatggttttacacaaaattgaaaacattcaatcaattctgctcctcagccacgcagttacactgtgtgtttgtagcagcagaataagtcagaatgtgttaggaggtgacacttatgactaagaatcaaattgagtatctaaaattattagaaactcaaagatcaaatgttgcaaatgagaagctcacggcaacaagagatcaaactactcgagaattaggatttgctaatctcgcagagactagtagacacaatcgccaaactgagcaacatgccgttaatgttcttggagaaactgcacggcacaatcttgctcaagaagctttaacttcaagatcacttgatgagcaggagaggcataatagagtctcagaggatttgggatatgccactctggacgaaacgtctcggcataatcaagctgtggagttggaaacttctttgcataatagaaacacggaacgtgagcaagtccggtctaacaaggcaaaggagttcgaaacttatcgatcaaacctggctaaagaagttgaaactagaagggcgaacgttgctagagagcaggaaactgcgcggcataacaaagcaacggaaaagcaagcttctgctgaactcgagtattcctatgccaacttggcagaacagcgcaggtatcactcacagtccattggtttgggctactctcaattggaggaacaggctagatctaaccttgccagagaggctgaaacccgtagatctaatatctcccaggaggcactacggggtaagcaactggctgaagaggaaagatccaatcgccaggatgaagccttgacctcataccgaaaccgtgagcaggctaggcacaatcgagagtctgaagagctagaggagatcagaactagaagccaaagggttcgcgatcttacctcaggatacaataatctaatgtctggtgcgatgagcggcatcagaagcgctggtatgctaatacccttattcggactgtc

SEQ ID NO: 2588 - DNA, 1000 bp, Potexvirus sp.
  complete genome.1
aacaaaaagaaaattggtgaaatcctctttgaaaactataagagagccatgcaactcccaaatgacccagtagcattctccagggagctttgggatgtgtgcgccgacgaggtccagaaaacctatctgtccaagcccctccacatgatcaagaatggccagaacaggcagtctcccgactatccaaaaaacttcatcaccttgttcctaaagtcacagtgggttcagaagcttgagaagctcgggctcccaaagattaagcccgggcagacaattgcctcctttcatcagatcacggtgatgctctacggtaccatggctcgctacctccggagaactagagaaacattccagcccgccaacatttttatcaactgcgagagaactccggaggatatgtccaagtgggtccgtgagcactggaacttcaccagaacctcctacgccaatgacttcactgcctttgaccaatcccaagatggcgcgatgctccaatttgaaatcatgaaggcaagattcttcaacatccccgaggaagtcattgaggggtacattgacatcaagtgcaacgccgaggtgttcaccggcgtcctttcaatcatgaggctgacaggagaaggtcccaccttcgacgcaaacactgagtgcaacatcgccttcacacacacaaagtataacataccaaaggaatgtgcacaactctttgcaggagatgactctgccctcgacttctcaccagaagtcaagcccagcttcaggctgattgaaactgaactgtcactgacagccaagcccgtacttaaaatgcaaattcagggacaatgggctgaattttgtgggatgctcattacccctctgggcgtcgtcaaggacccaatcaaactctgggcttcatgggtgagggccaggcaaacaggcaagctcaaagaggttgcggacagttacgagcttgacctttgcctagcataccaacaccgcgatctgttgcaagaggtttttg

SEQ ID NO: 2589 - DNA, 1000 bp, Tomato blistering mosaic virus
  gene for coat protein, complete cds.1
tggaaagcttgccaaactctggccctcatgcatgattacatcatcttaatccttggtccagtcaagaagtatcaacggatcatagatgccagagatcgccctcctcaaatttacatccactgcgggcacactcctcagcaactatcctcttggtcccaatctcatctgaaaggctctgttttccttgccaatgactacacatcttttgaccaatcccagcatggagaagctgtagttttagaattgctgaaaatgcaacgcctttcttttcctcctttcttcctctctctccatcttcatctcaagacttccattgagacgcagttcggccctctgacttgcatgcgcctcacaggtgagccaggcacctacgatgacaactccgactacaatctggctgtcatttattcgaaatactcgatctccaatcatcccatcatgatttctggggatgattccgtaatctgtggttctcctcctctcaatcctcagtggcccaatctccagaaactgctccacctcaagttcaaaactgagcagtcagaccggcctctcttctgtggctattatgtctcccccctcggagcatgtcgcaatcctctggccctcttcgccaagctcatgatttgcgtcgacgacctaaccttgccagacaaggtcctttcttatttgtctgaattctcagtcggccacgctttaggtgactcagtcactgaagtcatcccatcgcacctcatctcctattactccgcttgtcatgacttcttctgtcgcaactgctcaccttcccaaaagctcatgctgagccttgatccaatcccagagtccaagctcatcaagttaatcctcaaagttcgctgggcttcaaaaagtttcttttccatgctcccacaaaaggccagagacatccttgtttccactcattctttccaatccatgccttttgatcctaaagtttcccaactagagtcggaattgcttcccaattacaattgacacg

SEQ ID NO: 2590 - DNA, 1000 bp, Burdock mottle virus
  genomic RNA, RNA 2, complete sequence.1
ctttactgtccattgctgctggtgggagcggcttgtttttcgcgcgggcaaaagtaaaggagttcctgctgaagatgaaaggcaatctgttcaaacgtgatagtgagcctgacaacacaggcggttttaccggcgactggccgtccaggtcgtctggagaaatttctttacaagagttgagtagaccatcaccggagttccaagctccacggcccctatctccgagagtgagggacattttagacgatagacacctggatgtcttatatgccctccgtaatggtttggcgtattgtgccgggttgtatgggttcacagacaaattcttggcgatcagttatgcgttacaaaccgacaagactctaatatctctcctggaggacgatagtcccttggacgcgatcaagccatcagaagatgccatattggcgaaccatgagtctgaaattgcgctgctacagagggagctggagttggaaaaactcaaaaacgagttagcgttggaaagagctagggcagagattgaaacattaaaaatgcggaaagacgtgcaggcccaagaagaactaaatgagttagccataaaggaacagagactgaaagccgaaactgcagagttttcacggaacaaagaggaggctctcacaaaattggctcagatggacgcagactcatatcaagctagacacacgggaataaccagcgttgctagtattaccggtggatatcttatgggtagggccatgcgcgggcctaagatgagtgcgtacactgctggggttcagggggtttccaatttaagttctattgacagcagcagggcacgcgctaattcaggttctgttttaagtgggtctagggcttcagttgctgcttctgttcctattcagcctgtaacagctagtactgcttccagcagtagggcggggtcgaacgtttttaccattaaggatctaggtagtggtagattacatacacctccacccttttcacctgcagg

SEQ ID NO: 2591 - DNA, 1000 bp, Hepatitis E virus rat/R68/DEU/2009
  complete genome.1
aaggtgtgtggaccaaaagaaacatttgtccccggtcggcagctgcagttctatagacagtgtcgggattgggtgtcagcaggtttttatgtggaccttagagagctctgcttcgatcgtgagtacgcctgcccatgcctcccttttgagcgggcagtgcgtaaaggatgttgctgtgtcgcccgtaagttgaaacaggtttgtgggtgctttatgtctgatgttgtggagagtttagaggactcgtgtgaggatctgacagccgacttttaccccaaaccagaggtttacgagcccgctggcttggataattggaccatccgcgctctcacggacgccttccatcaggcctccctgcgcgccgtgaggaccggtgcaaaactggctgggtggccggagatagggttggcattctatatcgcccccgtgggtattgtctttcgcggcgagcccctactaggcccccccggtcgccgattagaggcggggccttattgggctgatgcgccgccgccgcccacgccggatgaagcgccatatcaaacaccggtgagcccggacggccctcccccgcctgcatcttggacgccggggccgatctccccgaggtacgttctccctacacctgttacgtaccgtgggcatctccccgggtctgcaggcttctgggagtcgtcctccgcttccacacttgagggctctctgagtcgtcacacatccctccagagtgtcaacttggaccccccccgtaaccctcgagtccagccggtccagagggtattactggagttgctcccggatggggcggcagtttatgaaggggatcttttcaattcagattgcttctggcttgtcaatgcggccaacgcccaacacaaccccggagggggcgtgtgcggcgcgttttacggacgctttccagaggcctttgaccgaacccaatttgtccaccctaacgggtcggtggccgcctacacagtgacacccaggcccataattc

SEQ ID NO: 2592 - DNA, 1000 bp, Hepatitis E virus rat/R68/DEU/2009
  complete genome.2
actgcggttctcaacttggatttcactgataaggcatgcactaggataacattctttcagaaggactgcaacaagtttaccacggatgagccagtgctacacggcaaggtcgggcagggcatttcagcgtggtcaaagacccttgtggctctgtttggcccttggtttagggccatagagaaggcgattgtggacacactgcctgagtggtgtttttatggggattgtttttcccaggagaaattggaggacgccgtggccggggcgaaagcctgccgcgttttcgaaaatgatttcagcgagtttgacagcacacagaataatttctctttaggccttgagtgcttattgatgaaggaggccggggcgccccagtggatgtggaggttgtaccacctgctccgttcggcgtgggttgtgcaggctcctcaagaaagcttgcggggtcgatggaagaagcattccggtgagcccggtacattgctatggaatacagtctggaacatggcagtcataatgcattgttaccgttttgatgggttagctgtggccgcatttaagggtgacgactccattgtgtgctgccgattctatcagcaagagcctcgagccgcagccctcatcaccggctgcggcctcaaattgaaggttaacttcggggatgttggctcgtacgcaggcctgctagttgcctgtggtcttggggtcacccctgacgttgttaggttcctggggaggctctcggagaagaactggggtccggtgaaagagcggaaggaagaccttgaacagtccgtgcgtgacttcgtggcaaggttgcgcaacgtcactgctctgtcgtgcctgctcgccactcgcttttacaagctggagcccggcctggccctcaatgcagtcgcaggcttgaaggcgatcgctgaaggccgcatggagctgaaagagtatacctggcctgttctccagctggaggggaagaaggaataacactctggcccgtagc

SEQ ID NO: 2593 - DNA, 1000 bp, Tobacco rattle virus
  RNA-1 complete sequence.1
gatgtgaaacctaagactgatttaacaccgcaatttgaatactcagctctacagactgttgtgtatcacgagaagttgatcaactcgttgttcggtccaattttcaaagaaattaatgaacgcaagttggatgctatgcaaccacattttgtgttcaacacgagaatgacatcgagtgatttaaacgatcgagtgaagttcttaaatacggaagcggcttacgactttgttgagatagacatgtctaaattcgacaagtcggcaaatcgcttccatttacaactgcagctggagatttacaggttatttgggctagatgagtgggcggccttcctttgggaggtgtcgcacactcaaactactgtgagagatattcaaaatggtatgatggcgcatatttggtaccaacaaaagagtggagatgctgatacttataatgcaaattcagatagaacactgtgtgcactcttgtctgaattaccattggagaaagcagtcatggttacatatggaggagatgactcactgattgcgtttcctagaggaacgcagtttgttgatccgtgtccaaagttggctactaagtggaatttcgagtgcaagatttttaagtacgatgtcccaatgttttgcgggaagttcttgcttaagacgtcatcgtgttacgagttcgtgccagatccggtaaaagttctgacgaagttggggaaaaagagtataaaggatgtgcaacatttagccgagatctacatctcgctgaatgattccaatagagctcttgggaactacatggtggtatccaaactgtccgagtctgtttcagaccggtatttgtacaaaggtgattctgttcatgcgctttgtgcgctatggaagcatattaagagttttacagctctgtgtacattattccgagacgaaaacgataaggaattgaacccggctaaggttgattggaagaaggcacagagagctgtgtcaaacttttacgactggtaat

SEQ ID NO: 2594 - DNA, 1000 bp, Providence virus
  isolate 14EPF155, complete genome.1
gatctgagcaggtgggacatgcacgtccaagttccgctactcaagcgagtactggaaatatacagtcagcacgtgacgtgcccgctactgctggacatgtgcagcaacctcctcaagaacgtttgctacacaaacaagggtatacgataccacgtcgatggaggaatcatgagtggggatatgacgacgggcctagggaattgtattgcagtacttgttatagttatgtccttccgggacgttataagaaggcttgctaccacgagcgaaagcaacacgctcgacgtgctgggggaactgccctcaagtacggcaacccaagatcaggagttagtccggaccttattagagataagtccccgtcttcgggccgctcagttgacactggggtggctcagcatattagacgatggcgacgaccacgtgataatttgcgagaaacaacatacgtggatttgcgagctagtcctccctctgtggtggacagccatgggtcactccctgagagtggacggcacggcggaagacttcgagagcatagagttctgccaacacaaaccatggaatggtgcaactcggcttaccatggtgcccaacccagcaaaagttttgcccaagtcttgcacggtgacagggaagtacatcagcaaaccccagtcgtatctacgtactgtgtggaccgcccgggctatccttcacgtggatatcccgcttttgggcccatttttccagaacaacgccagacagttgtctggggcccctctaatggaggtcatcagttcggagtttcagcacatcaattcgtccctacattacctaatgagataccacgcgagtggtatgtacctgccagcacagcagaaggtggacgagatggacagggtgctgttttggcgaatgtgggacatttcgccaacggagcaatgtaaatgggaaacgacacttgctcccaaaaacaccaacgtttccgatattgactggccgtcagggtattgagatc

SEQ ID NO: 2595 - DNA, 1000 bp, Erysiphales associated tombus-like virus 1
  isolate PM-A_DN312481
cctgatgtcaaatcactagggcagcagctcgactcgttccgtgctacgaggataaactcgcattggggtcagaggtggccattgatgcctgaccttaaacaaacgccggcttggctcgactggcccccgtagaggggctaacccccactttattacaattatggctacaactacatcgaacccagaaactgcctccgtttattctttcgatgctcctaagcctacaattcgtttgcgccttcccgggaaaggatgtgccacttgtggcatgtccaagcctgtggaagtagcgccagtggtggtacaaaacgacgctcccgtgtcgatggagcatcatgttcaaggggtcaaggctcgtgtgggaccgtggatggcttttaagatgttgttccgtggctatgttagcccggtggcacaactgaaggccaagcacgccctcgagacttacgacaaccctgattatgatgagccctctgatcatttcacggatgtcgtcagcggttgccgcaaccagggtgaggaggcgatccaggcgaagcgcaagcctcgcagggataacacttcctggtggacggtttattctctgcttgcacatgcagagtttaaccgcccctctttcacgcgggcgaacgaaatggtggtgtctacttggattcgcaagcagatggctgccgacggggttaccagggtagactgtgccaaggtgctgggtgccgctactcggatggcatttgtgcctaccgagtcggacatctttgccgcacagatggctcagacccctgcgttccgcaagagagaaggtgaggcaaacaccaaatggtggactgcatggtgggattgcagaccgcgtggctacgaaagtagccaatagggtggcccagttgctgtaccaggaagggaagccggcgtttcgctggcccccaccccttccagtttggtggtacatcgcaaagtgggacatgccaatcgcgttcgacgcacgtacttggtggggcaaggg

SEQ ID NO: 2596 - DNA, 1000 bp, Carnation Italian ringspot virus
  genomic sequence for ORF1-5.1
aagctgttgatggcgtattcggagagacgacgtgcattaagggatacacagccgatgaggtgggtgcaatttttcgggagaagtgggataggtttcataagcctgtcgccattggtctcgatgcatccaggtttgatcaacactgttccgttgaggctttgcagtatgagcatagcttctacagggccatgtaccctggcaacaagctcttgggcaagttgttggactggcaactccacaataaagggaaaggttatgttcctgatggaactataacctaccgcaaggaggggtgccgtatgagtggggatataaacacttcgttgggaaattatctattgatgtgcgctatggtacacgggtacatgcgtcatttggggattaatgagtttagtctggcaaactgtggggatgactgtgttcttatactagaacgcagaaatcttaagcaggtgcagaagaccctaccggagtatttccttaatttgggatacactatgaaggtggagccgcctgtatttcaattggaagaggttgaattttgccaggcacaccccgtacagtttcaaggtggttggaagatggtccgaaatgtccgcactgcgatgagcaaggatgtgcattgtgtcaataatatacgcgatctggcgacgaggagagcatggagtaatgctcaacaccacggtggattagcactcagtgctggtatacctgtggttgagaggttctactccaggttcgcactatatgatgtgcctcgtaagcatcaacgcattgacactgtcactaatgttcacaagtggcgtggatctggtggaagttatgttgtgactcctgaatctagggctagcttttgggctgccttcgggttgacgggggatgagcaactagctttggaggaccgtctggatagatgggagatggatctgtttggagaggagggtgttgacgctcatgagcccagcatcctcgactccgccgtagcttgaccaagcgagac

SEQ ID NO: 2597 - DNA, 1000 bp, White clover mottle virus
  genomic RNA, complete genome,strain: CD.1
gtgagccttgttgatcaactggtagcccgggttttattccaagaacagaacaaactggagattaatctctggaaagctataccaagcaaacccggaatggggctgtctactgactcccaagtgatagagttcatcaattctctgtcccacctcgtgcaaataccagttgaagacttggtatacaattgggaaaagcacgtggtgcccactgactgctctggttttgactggagtgtttctcactggctattgacggacgaaatggaggttcgtaaccgtctgacacgcaacaacaataccctcacaagaaagctgagggattgttggttaaaatgtttatccaatagtgtgttggccttttctgatggaagcctgtatgcacagcgtgttcctggagttcaaaagtctggaagctataatacaagctcgactaactcccgaattcgtgttatgtgtgcttattatgcaggtgcttcctgggccatagcaatgggagatgacgctttggaagcagtggacactgacctatcagtgtataaaaatataggtttaaaagtcgaggtttcaggacaactggaattctgctctcatatctttgagaagcctgacctcgccattccggtaaatgtaggaaaaatgttgtacaaattgatatatggctacaacccggaatgtggatcgattcaggttctcaagaattatatcgacgcttgcacttcagtgttaaatgaattgcgtcatgatcctgaattagttcagcttctctactcgtggcttctccatccagtgttgccacaaaagtaagcgagtaagagaagcagacagatagccggtatcagttgttgcaatagccggagtcttagtcaacgtacaatcgtgaaaattgattataaatttctcgccggatttaccgcgggtttcgtgacatcaattccaatatcagtttttgcgatttatatcatctacctcaagatttctgcccacgttagatcaatagtta

SEQ ID NO: 2598 - DNA, 1000 bp, Apple luteovirus 1
  isolate PA8, complete genome.1
cagcaacggtgctcagtggttacgataattttaaacaggggagattgatcgctggtaagtggaacaaattcaggaatcctgtggctattggagtagacgcctcccgcttcgaccaacatgtgtcgacggaggcgttgaagtgggagcacagcatctacaacaaggtttttggggaccctctgttgcgtgacttgttggactggcaaacagtaaacaagtgcagtctttttgttgaagacaagatgttgcgcttcaaggttaagggccacaggatgtctggtgatattaataccagtatggggaacaagctcatcatgtgcgggatgatgcacaactatttccgtgaacttgtagtgaaagctgaactttgcaacaatggtgacgattgcgtcatcatctgtgaacgcaaagacgaaaagaagttcgacggattagggaaatggttttgggagtacggtttcaacatggctattgaacctcctgtatactccctagccaagcttgaattttgccagtcccgaccggtttgtataaatgggaagtatagaatggttcgtcgtcctgattcaattgctaaggacgccaataccatgctcagtatgcagaatgcagaagatgtgaagagtttcatgtctgctactggtcaatgtggtatgattctaaattctggtgtccccattttagacgcttaccattctaatttgtatagaggttcgggctacaagaaggtatctgagagctttattgatcgagtcatatcttatgggacagatgagcgcctccagggtcgacggacccgtgttgaggaaccagtaactatggaaaatcggttgagttactgggatgcttttggggttgatccgcaaacacaggtccttgttgaacgttatctcaacaatttgcggatcggatgcgaacccctgggagtgaagatagtgactcctcttctcacaagcacgttgcttgaaataccttattttaaacctcttaatttagcacc

SEQ ID NO: 2599 - DNA, 1000 bp, Rose spring dwarf-associated virus
  complete genome.1
aaagtcccacaattctttccggttacgatagttttagagtaggtaggatagtggctgcgaagtggggtaagtttcgtgaccccgttgctattggagtagacgccagtcgtttcgaccagcatgtctctcgacaagctttgaagtttgaacatagtgtttacaatgggatcttctgtgatcctattcttaagaaacttctcaagtggcaactcagaaatgaggttgtcctttttgtcgaagataagatgctacagtttaccatcgatcgaatgcgaatgtctggtgacatcaatacttcaatgggcaacaagataatcatgacaggactcatgcatttgtacttccgagatttgggagtccaggctgagctgtgcaacaatggggatgattgcgtgattatctgtgacaagaaggaccagcgtaaatttgataatcttgccgcttggtttttggattttgggttttccatggctattgaagatccagtttacgaactggagaagcttgagttctgccagggacatccactgtgcatcaacggcagttacaggatggtccgcaaacccgagagcatgtctaaagacgcgcactctatgcttagcatgaaacaccacgaggatgtcaagacattcctcagtgccacggcacaatgtggtctcgttcttaactctggggtaccgatcctggaggcgttccataggtgcttataccgtacttctgggtacaagaaagtctctgagggtttgataaagaaggtgatcagttatggtcaagatgagcgactcggtggcaggcgtgccattcgcgaggaaccagtaactatgggaaataggatgagtttctggaaagcttacggagttgacccgagaacacaggtccttgtcgaacgatatttcgacaatttgacggtcaatatcgaactccgcggtgtaaagaacttgacacctcttttacaaagcattcttgtgggagtccctgacttccctgatttcagccaaat

SEQ ID NO: 2600 - DNA, 1000 bp, Rose spring dwarf-associated virus
  complete genome.2
atgcaaatggcgccacctggaatgtaggtgagtacaacaatgttaaaatcacaaaacttctcaacacctcttcttggaagaaggggcataaagacgttgtgctcaacggttgccattttaatgacggtcaaatcattgaacgcgattcaaccatgtcgttccactgtgaagtgggacatggcggaggtacaatcctcctggttgctccccctgtttgtaaaagtgacaagtacaactatgttgtctcttacggcgagtataccaccaaacacatggagtttgggtccattgctatatgttttgatgagaagaatgatggagcaagagcagggaaattcttgggcgctcctttcccccgtgcaggtcacgtggtgcgtgagcaacaaacagaaattgcccgatttccagcaggtagcgacgtcccgattgtaaagatcagtgacaatgactttgctacctctacacaaccagctgcacatattctccctgttccttcatctgttcaacttcctgacgatcctgtctctaagaaggtgcgatcttggatcgagaattcgagcgaggatttgcgcctggcgcgtgaagctgaacagactgacagcgactgggaaccccttccaccacctgcaccccctcctggacccaggcaattgcccaccgacacctcaggtgccactcaggctatccgcaaccagatcctgcgtgatcatacgcagccctactctggccctggtactccgcccgtcttcgatgatattgaggatacgaggtcaaccacccgtactgaaagttcgcggcggagttttctcagtggtgtcctcagaccccagctcaaaccaaagagtaatttgcgtccgacttcctctctcccgcgtaagctaactgctgaccaggaggcacgagtgaaggctgtgcgcgagtcttttgggtctgccgctgctaaacgtcttagagacgagtttcttgaggggaaggtcagtcccgatcagatctactgacc

SEQ ID NO: 2601 - DNA, 1000 bp, Torilis crimson leaf virus
  isolate RL5 genome assembly, complete1
ttaagtgccggtgtgggggttcctttcatctcgtatgggaaaagaacacaccgtgattggattgaaaaccctaccctcctccccgtcctcgcaaggatgacttttgatcgattacagaagatatcagaagccaactttgaaaatatgacgcctgaggagctggttcagaatgggctctgcgatcctatacggcttttcgtaaaaggtgagccgcacaaacagagcaagcttgatgagggacgctaccgccttatcatgagtgtgtcattattagaccaattggtagcccgggtcttgttccagtctcagaacaagttagaaatagcgctttggagagcagtaccctctaaacccggatttggcctttccacagacgatcaaactgaaaattttgtagattgtctagccaagcaagtgggtgagacggctgatgaagtaataaagaattggccacaatatttaattcccactgattgctcaggcttcgattggtcggtctctgactggctactcgaagatgacatggaggttcgaaaccgcttgacccacaactgcacccccctactaaggaggctccgtgcaggttggctcaaatgcatttccaactctgtcttgtgcctttctgatggcaccctgctggcccaaacaaaacctggggttcaaaagagcggatcttacaataccagctcttctaattctcgaatccgggtgatggctgcttttcatagcggtgcatcttgggctatggcgatgggcgatgacgccctggaaagcgttgacacggacctatccgtgtataaagatttaggctttaaagtcgaggtttcagcacaactggaattttgctctcacattttcaaggagagaaacctcgccattccggttaatgtcaacaagatgttgtacaaattgatttatgggtacgacccggaatgtgggaacgctgaggttttgtcaaattatctcagtgctgtggtctcggttatgaatgaattacgtc

SEQ ID NO: 2602 - DNA, 1000 bp, Culverton virus
  RNA-dependent RNA polymerase, nucleocapsid, and2R
caagtaatcacctataacaaacttgatagacaagattatctaacttatcaccagctctactatactctaaactttgtagctacccgatttgtgagctccactctacaatagatactagagtaggttatctctcaactggatcagagacctcatcgcgtatgcttgtgagtgttctaaattggttagtcacgacaagtgtactagctcctctgtacctctactttactgggttgagatttcaagacctatttgtgtacactccgatacccgtaggtatcgaccaacataccgaactggccacattcggtgcaagtgattgcaccaacaccgccaacacggtagcggctacattttccattactccttcagagatctgctaccttagtgcatccttaatcacttgtgcatcactatactttctatatcaatcttggaacaccatgcataagtcagtagtaagaagcttagaggagatccgccggaaagcagtggagcaggaacagaagttgccccaggtgtccctgactggtctggaagatatttcagctcacctccagggtattaccaaagagctgaaggagatacgcttgcagttagaattattaactgatcaagtcaatcaacctcctactagattggcagcaaccgcaccacctttaccggcatctacaccaccagtaatttcttactatccaaacttaaatgtcccatgaatagtgctgagggataaccctggactgataacacggatttgaccatacaaatatgaattgcttcatccattgcttctctctagttattacttagattttagattctatgctttaccttactccaccacgaagctatactggtttttttagttgctattaatctcccttgtatttgttctctcccctgcttgctttttaaaaacttactatgccaactctaacaacactcagttcaaatccatcagtaacaaatgtgatagacaaattaactattacaaaagatagta

SEQ ID NO: 2603 - DNA, 1000 bp, Human respiratory syncytial virus B
  isolate HRSV/B/Bern/2019,2
caaatcaacttacaacagatacttcaacatcacagcacaggctgaatcatctcctcgcatcatgctacccacacaactaagctagatccttaattcatagttacataaaagcctcaaatatcgcaatcaacactaaatcaacacatcattcacaaaactaacagctggggcaaatatgtcgcgaagaaatccctgcaaatttgagattagaggtcattgcttgaatggtagaagatgccactacagtcataattactttgaatggcctcctcatgcattgctagtgaggcaaaacttcatgttaaacaagatactcaagtcaatggacaagagcatagacactttgtctgaaataagtggagctgctgaacttgatagaacagaagaatatgctcttggtatagttggagtgctagagagttacataggatctataaacaacataacaaaacaatcagcatgtgttgctatgagtaaacttcttattgagatcaatagtgatgacattaaaaagctgagagataatgaagaacccaattcacctaagataagagtgtacaatactgttatatcatacatcgagagcaatagaaaaaacagcaagcaaaccatccatctgcttaaacgattaccagcagacgtgctgaagaagacaataaagaacacattagatatccacaaaagcataaccataagcaacccaaaagagtcaaccataagtgatcaaaatgaccaaaccaaaaataatgatattaccggataaatatccttgtagtatatcatccatattgatctcaagtgaaagcatgattgctacattcaatcataaagacatattacaatttaaccacaaccatttagataaccaccagtgtttattaaatcatatatttgatgaaattcattggacacctaaaaacttattagatgccactcaacaatttctccaacatcttaacatccctgaagatatatatacagtatatatattagtgtcata

SEQ ID NO: 2604 - DNA, 1000 bp, Mapuera virus
  complete genome.1
caaagagtccagccaggccgatggttatgaatatgactcttacttagcacaaaatgcaaaaaccaacattctcaaaaggtggacagatgtaagcggggatgttgagccgatcccgatgaaccccgaagtgtttaagaggggggcagacctcaccaagcccacaaatcccaatccaggtcatcgccgagaatggagcattgggtgggttgggtcaacagtcaaggtcttggagtggtgcaaccccacctgctctccaattacagcaacatcccgatactatgaatgtgtctgtggaatctgccctaagatctgcccccgatgtgtcggagattatggacatgttgagacggctggacgcaaggattggctcagtagaggcgaagatggatcggattctagcagtaggggcgactgtgaatcagatcaagaatgaagtcagttcattaaaatcgatcactgccacaatagaagggatgattacaactgtaaggatcatggaccctggcaccccgagccatatgagtgcaactgaagtaagaagacagttgagtgacgtcccactagttatcagtggacccggtccagtcccccaacttgaccccagaagagacttaattgccttagatgagcttgctaggcctaaggttgtgcagagccccccggttgcttctcccgcaccctccatggcctcccagctaagtgatggcacccgcatcatgatccttcagatgataaaagaatgcgtctctgatccgcttgaacaatccagatttgaaactaaattgagcagctgcacaaccgaggaccaagggaaagcaataaagatggaaatcttacggagagcaacctaaaaactagctgacacactgctcaacatcaaccacccctgcaacccacccacatgcgcaaccgcagcccagagcacacacccaacaccgactcaatcaattaagaaaaaacataggcccgactggctgcaaacccagtcggaaccccggcc

SEQ ID NO: 2605 - DNA, 1000 bp, Bat Paramyxovirus Eid_hel/GH-M74a/GHA/2009
  complete genome.2
agaacaaatcaagaagatccctgcaatggagaagaaactatcagacattgaaaagcttctgcttaaaaccaatactgcactctccaccattgaaggacatatcacatcaatgatgatcatggttcctgggaaaacagtgaacgaaggagagatacaaataaatgagcagttaaagcctgtaattggaagaaaagatggtgtgtacgacaaaatgatactcccacgagtagacaagaaaatctcacttgtgactgatcgtacacctctttgtgatgatttcaaagaagatccttacgtgttaaatgagaagcttatccttgaccccatcaatccaagcgtaaccaatgcctcggcgttcatacccagttacgacaatatatctcctgctgttcttcgatccctcataagaagcaatgtagaagacagagagacacgagtggagttgattgagttagtgaatcaagcaagaaatgattctgaactcaatgagatactcgcattagtcaatgacattatagattcaaatcagtctggtgtgtgattcccaaaatcactcaactaactcaacaaacaacacacaatacccgaagtagaaaacaatgacactagatcgctacataactgtttcgcagtagctgcaatagggacacatgtaaatcaccaccgattacacccaccaatctcaaatcacagctgttcacgcatctttactcactgcttaagcaatgatatatgcaagtataattaaacaaaacttagggatcaagcacgatccaacgccggagagcgacaaagaaaaaccaaaaccagagaaacaccaaccaatctcccaacgaaactaagaggaccccacaacagcgaaacccatccaaaaggaagaagtcaccccaaaacccaaacccgaaaagacaaagaccgtcccaccgctacatcagcagcgcaggagtccaaccagctgaggtcaagaggaggaaggaacagaagtagttctacggacgaa

SEQ ID NO: 2606 - DNA, 1000 bp, Measles morbillivirus
  IC323-EGFP viral cRNA, complete genome.2
agcaatacccgaaaacgacccccctcataatgacagccagaaggcccggacaaaaaagccccctccagaagactccacggaccaagcgagaggccagccagcagccgacagcaagtgtggacaccaggcggcccaagcacagaacagccccgacacaaggccaccaccagccatcccaatctgcgtcctcctcgtgggacccccgaggaccaaccccgaaggtcgctccgaacacagaccaccaaccgcatccccacagctcccgggaaaggaacccccagcaactggaaggcccctccccccctcccccaacgcaagaaccccacaaccgaaccgcacaagcgaccgaggtgacccaaccgcaggcatccgactccttagacagatcctctccccccggcatactaaacaaaacttagggccaaggaacacacacactcgacagaacccagaccccggcccgcggcaccgcgcccccaccccccgaaaaccagagggagcccccaaccaaacccgccggcccccccggtgcccacaggtaggcacaccaacccccgaccagacccagcacccagccaccgacaatccaagacggggggccccccccaaaaaaaggcccccaggggccgacagccagcatcgcgaggaagcacacccaccccacacacgaccacggcaaccgaaccagagtccagaccaccctgggccaccagctcccagactcggccatcaccccgcaaaaaggaaaggccacaacccgcgcaccccagccccgatccggcgggcagccactcaacccgaaccagcacccaagagcgatccctgggggacccccaaaccgcaaaagacatcagtatcccacagcctctccaagtcccccggtctcctcctcttctcgaagggaccaaaagatcaatccaccacatccgacgacactcaattccccacccccaaaggagacaccgggaatcccagaatcaagactcatccagtgtccatc

SEQ ID NO: 2607 - DNA, 1000 bp, Human parainfluenza virus 1
  complete genome.1
aacgaagagtcagcagccactccaaagaacaaccacaaccacagaaaaacaagatacacaacaaacaatgcaaacaacaacacaaaaagtccaccaactcccgaacacgacgcaaccgcaaatgaagaggaaaccagcaacacatcggtcgatgagatggccaagttattagtaagtcttggtgtaatgaaatcacaacatgaatttgaattatctaggagtgcaagtcatgtatttgctaagcgcatgttaaaatctgcaaattacaaagaaatgacatttaatctctgtggtatgcttatatcagttgaaaaatcacttgagaataaagtagaagaaaatagaacattacttaaacaaattcaagaggaaataaattcatccagggatcttcacaaacggttctcggaataccaaaaagaacagaactcactcatgatggccaatctatccacactccatataattacagatagaggcgggaaaacgggaaatcccagtgatactacaaggtcaccatcagtcttcacaaaagggaaagacaataaggtcaaaaagacaaggtttgacccctctatggaagctctaggaggtcaagagttcaagcctgacttgataagagaggatgaactgagagatgacatcaaaaatccggtactagaagaaaacaacaatgagcctcaagcatccaatgcatcacgcctgattccgtccactgaaaaacacactctgcactcactcaaactagttatcgaaaacagtcctctaagcagagtagagaagaaggcttacatcaaatccctttataagtgtcggacaaaccaagaggttaaaaatgtaatggagctattcgaggaagacatagattcactaactaactaaacatgaatctacaatttcaaccagcaatcaaaatcaatatccagagccaactcaaaaagctccctcaaaacaattaagaaaaacttagggtcaaagaaattttgcccggagaaaggaa

SEQ ID NO: 2608 - DNA, 1000 bp, Rice yellow mottle virus
  from Nigeria, complete genome.1
gagctggtagagaaaggtctctgtgaccctgtgcgcttgtttgtcaagaacgagccacacccacggaagaaattgcttgaacgcagattcaggctgatctcttctgtttctctagtcgaccagctggtggagcggatgcttttcgggccccagaacaacaccgagatttcgacttggtggcagtggccctcgaagccgggcatgggtcttctgacccctgaacaaatccgtttggtgtgggacgacgtgttccagaagcaccaggcccaccctgcggctgaggcagacatatcggggtttgactggtccgttcaggactgggagttgtggtcagacctcgcgatccgtataaacagagggaatttccagggaaacctcaggagagcggctatcagccgctactactgttttatgaactctgttttccaactctcagatggaactctcatccagcaggaattgcccggactgatgaagtctggctcttactgcacctcatctacaaactcgcgcattcggtgcctcatgggtgagcttatcggctcgccgtggtgcatagcgatgggcgacgattcagtggaggggtggattgaggggggccagtccaagtacgccgcgctaggtcacacctgcaaggagtactacccatgtaagaccagagggcgcgagctcttggaattcaacttctgttcgcatttgatcaggaggggtcatgctgagctaacttcatggccgaaggcgttgtttcgctttctgtccagcaagcatgaggactttgaggatctgtgggttgagctccacacgtgcggggtgtggggccggatcgaacgatatctgcgtgggatagggcgtgtctcccacaaagatagccaggaagggcaagaaaaccaaccccaaccaggggcagcaaggaaagaagaagagccggcgtccacgtgggcgttcggcggaaccccagcttcaacgggctccagtggctcaggcctcccggatatctggg

SEQ ID NO: 2609 - DNA, 1000 bp, Colobanthus quitensis associated barnavirus 1
  strain CqABV-UTus4531
cgtgcgcaatggcgcgtgtgatccggttaaactattcatcaaaggagaaccacactcgcagaagaaaatcgttcagggttttcttcgaatcattgcaagtgtatccctatgtgatcaacttcttacgcgtacgattagtgcgcgtcaaaataagactgagatcatgaattgggaaacctgcccgtcaaaaccgggtatgggtcttcacgatgaaggtcttgccaaactctccgagaatgctcggagaatactaacggaaggtcgcatcatggcgactgacctatcaagctgggactggacagtccaagaatgggagctggaggtggacgccaagaggcgtatattactggccgggattgatgaagatcacccaatggccaaactcttaatggcgcacgcccacatcgtcgccaactcggtctatgtggattcggcgggtaacatgtttgcccagacaattcctggaggtcaactctctggggattacaatactggatcatcaaactctgcgatgcgtgtaatcgcgactcaagctgctaggcttaaggtaaatcaagaactttaccttgagcgcatttcggctaaggagttgcttgtatgctcaatgggtgacgatacactcgagttggaagtcaccggcgtgccagaggtcttagaggagatcgggcatattgttaaggatgtggaattccatgagacactgcaagatgtagagttctgttcgcaaagatttaatgcggacggttcagcctatccagtggattataacaaaaccctttacagattcctttcgcacgctcccgacgacgtagagtactcctcctacaaggctcagctcatgtacatattccgacacatgaatcaggaggctcgcgataaaattgagcacacagcactagtccgggttgagcgggctagaaaattattctgtgagaaaaacaaattgtaagttaatatacaccatatctactgtgcttcgacatatatttggtagcttgca

SEQ ID NO: 2610 - DNA, 1000 bp, Linepithema humile polycipivirus 1
  putative capsid, hypothetical2
tcagattcgagttatcgtgaagttcagcaaaattcttttattcccgcagatactagcatgttccggcatattgagttgacaatgccatatgaatatcccaccccgtggtatgatcagtttgcctggatgtcccgtagagtaactccctcgcgttatgttagaagtggtgacatttctttcgacacattcgcagccccccttacaaatgagcctcatggtgacaatttcttcgccatgggacttcgtggaaatcttgcagccacccaagaaggagctcagatcgagttcgagttagaatatcgagctgtggaagggtttcagttcgctgatccttaccttccaccagcatattttgcaagtactcatcgtgatctcctcattaatgactttgacaagattaagcgggttccagatccgactttgacttcagatggtcttagtaaaatcactaaaacaggttccaggactgtaagatctgtttcatctcaatctatagctcaaaggagaaaggctgatttgaagctagatctttctggaatagatttaggagaagatactgtagaccccgtgatgcctagtggatatggatctcgcgaacgggaatttactttttagagtttaggtcatttttcattcatgttcattttcagttttaaaatgaaactcttcatgcataaccatgagttggctaattacgtgacggttcctagttatgagcaatctaactccgaatatagaggtgaaactcttgacggccgggaacaagtagcgtgctttagtcgagcccgtaagattgaccaacgcaattcttgtatcagaaaaaggagtttttatccctagactcattgtatgtaatgctgacctagtcaagtcttaggacgcgctgtacaataaacgtctatgcaacgtctcggtgggcgttgcattcagggtgcagtctaacctgcattactcccttgatctgtgtcggagcagtagaattgtgggcggactaattaac

SEQ ID NO: 2611 - DNA, 1000 bp, Polycipiviridae sp.
  isolate nut158pol1 genomic sequence.1
atctaatatggtaggtagtatatttggacccgcaggagttttattctcctcaatcgcttcgccctcggatttcgcatcacaatttaatacaaattatcaagttgaaacaccatctggcgcctttgtaaatgctcaagatggatcaaatattaatgcagatagttatgtcggtagcaccagttagaactccagcacaggcaccattacagcctatgcaaccaaatccccagacagcctgcggaactttggatgacggatgtgtttataacactatggatattcatttaggaggacaacaacctaatgaacagttttgggctgcacgtagtgaatattgtaatcaagtacaatggaccactcagcaggccataggaacgaccctggcaacgattgatgttttacgttattgtggagatgatatgaataaccctgacaaccttaatgcaaatggaggattacaaactagatccagagcatatggtagagtaatatggccaagatggttaattacgaaatcgtcgacttatatctctgtctctgttaaatatgacttctggcttcataaaccagtaggtccagtagtaggaggtaagttgaggatatcgtataatcctggtataagaaagaattggaatactgtgctaaatagcattggaagcactattgattcctatcaagattctctgttcagagaaaatttatgggaatgggatgtaaaagcttctgatacttttagtgtcacacttaatggcaatataccaactaaatacattactagtaccataccaagtacaagattttcagaggttgcagatccacgcgagtgttttccagcatttatgacaagttttggaacgttagagattagtgttttgaacaattatgtagcaggttcagtttttgctgattctgtatttatatctatttataaatcatttccgtctttacaagcttatatagttcgtggccaccgaaatgaccaattcttaactgcaattta

SEQ ID NO: 2612 - DNA, 1000 bp, Sapporo virus
  isolate Hu/GV/0003/Sollentuna/2016/SWE, complete1
aagcaatggaaaatggggcttcaccatcacacctccttccacgcaggctccagagggctcgtggcaacagagctggtggttatgccgtgggtatggtgattgttggttcggcacaccaggtcaaccgccacttcacggcgcttggcacaacttttggctggtccactgctccttatgagccaatgcggtgtgcgtttggtggtgtgcacactggtactgacacctctcccaaaattggctattattgggaagtcgggtccgaccaacgtgggcccatatttccccatatagtcaatcattggccagattttgctgtgaacaacacctactcatggccaggctcggagtttgtccctcaaaacgccattgtcggtacacttgtctcctttgctgacaatggtgatgtgtccgagaacgaggtggtacccgcatttgcggttacaatgaacactccttccaccagcactcgaggcaccgtccgtggctcatttgacccatccaccatgcatttggtgcgtactaacagcactggacaaccatctgggtggccatctggcccaaacaatgggaatggatatttcacaccaatgtggggacatggtcagggcaatgctattaatgataaaatcaccaacatggagggtgtgaattacaccttcggaggctctggccaaaacaacattgtcttgtggattgagaggatcttctccgaccaccccggaaaaacaaccctgtactcatctcagctggacagtactgccacaatatttcaatctggtcctgtcaacatccctgagaacatgatggccgtgtataacgtcaccactaacggagctgacttccaagttggcattcgacgtgatggctatatggtcacttctggagcaattggaacacagcaagagcttgaccccgacacttctttcacttatgttggacttttccccctttctgcctcacttgttggcccacatgggaatgctggacgggcacacattgc

SEQ ID NO: 2613 - DNA, 1000 bp, Nilaparvata lugens honeydew virus-1
  genomic RNA, complete genome,1
tcaaaccttccaacctttcttagttttaagttgtatcgattgtatttgtgtgattattcataataattgcccatcttttctttcgcaaatacatctcttctctaagtgtgaatgtttctgaacgttgtatgaatcagtttttctcttccaatttatcgaacttgtgtatatgtgagtgtgaactaatttttgattctttcttttcgtttcgatgactaggactgattaccctaccattgatcctaacaatagtcacgacgggatagactccgtgcagtgtttttagaaatccggttggactccggtagcacatacgatgacaccacactagccagagtcggcgtagtcgtattgtgttgtgttccctactagagacccaaagcagcgttctcttattcattatattcttgtgattctgaaatgaggtttgttgatttgcttgtggtagtgttgattgagacccgtttccggtaagctgcttggtatcgtgatggcatagtgatgcttgatctgaaatcacagactcgtgttgtcgcccgctacataatttaaacgtattatggaactgctagacatctactggtcaaatgggagaagcaacatgaggtttgtttcttttgtttgggatcacggataaacagcttttaagaagtccctgcgctccctagcttgcagctctatagcgataagtcaagtgaagttagtaaactcttcttagctggtaatgagtatgtgctatatatcctggataagtcccccccagggttgatgctaatggtaggtgcacaacaggcaggtgcacctttgtcgtgggatgtgaattcgttctgcccgggcaccatagaatgactagtgagtagcaatcgatgtagtaccctttcaatccatatagtctcaaaattacctggcagttgttttcaacgtgaacacaactgctttcgttctgcctaatcctatattttaaagtttttttttaaattttgtttgtttgtgttacaat

SEQ ID NO: 2614 - DNA, 1000 bp, Iflaviridae sp.
  isolate ybb117ifl01 genomic sequence.1
aggtttattttgaagcgttttgttcgattccgatcgaccatagaaaaggtatattatgttcgcatctgtatcatcgcttcaaatttaaagttttaaggctttttattattggagaacttttgaaatttatttggtgagcctttagtctttgagttcgatacttagactatttaatttccagatatctatcgtccaagtagaatctgaggggtttaaagcaggagccgtgagtcagcccagacaagcgtagtactgttttattccgaagtttgcgttgagcgaccggcgtcggtgcgtcaaacaaaattccgaatggagttgtggttcgagcgagtatctatacacgcggatcatgtgggaagttttgcttactgaagttttcaatgatatctaacattggccctcggatcaacctaaagactggaagtacccgaccaacgcccagctagtaagagtttaaatactcgcgagcagttagttggcaatgttatttggatttgtttatgaatgtttgagactccgtacctatacgatgcgttgattaccatcagaaaaagctctagtaatgaaataattatagcggtttcctggactatggtgtaatttcagttacatagtgactactttacaatcaaagcctaaacaggcattactataaaagaaccgtcgtgttagcattgtgtttggctaacatcccaacgatagttggcgacattgaactgagagcaacatacgttaccaattcgattatcgttcaaaaagctctgggcaggaatttgaaaaatcaaacttcctgctaaagttaaacacacaaaccttattttattttcctaatttaacgtttacgttattttatgtcagttgttcgtttgatagaagaagttgaagaaaacagtgaagaaatacatccgtttcaacaacgattacaagaagcaagtacaaatttccaattacgtcgatcaaattatccaataggcacaacaagattatacaatcaaca

SEQ ID NO: 2615 - DNA, 1000 bp, Iflaviridae sp.
  isolate rfb094ifl1 genomic sequence.1
aggttatttaatcggtgacagactgtgctctgcacttattatttagcataacttgtacatatataagaatctaattttaaatgaacttacgaaaatcaacagtccacctgaagattgattaggtttagtatagaggttttaaatgatttcgatcatttatataaaagatgtattatattcgtatctgcatcatccttttatttttaggttaaacagccttggtgacggcttgagttctgactatgtacacccacgtagccgtggtaccgcttttcagaatccaccctggcctctctcctttttaagggagtttcctggagagagtaatttgcaccgccagtatcgatcttacgataactcctcccttaaaagcaagacatagtttgagtatatcagacaaacgttatattatctagttgcatcctcaatgaacaaggtattctgcatccttaactcgcaagggttattgaagcctcatatggacgagtccaacccatatgaagtgtccagttactttatttcgcctctcgcaagggaaaagtaaagtaatgcactaatattgaccttcaaggttgttggttattattagtagagcctttgataatataatcgtatttgaattctcctaaatattgtgtatgtaaggcgctcacggtcccgttggggtttatgcatcatgtcggccacgtgagtatgaagtggttctagtttactatgatactgcaaggcaggccggtgtggatacaccaaaaaccaaaacataaatacacctttagccatcttttgccgctttctgcgagttttctgcgagttttattattccccaaagccattattagctaccttttatgtcaacagtgcgattaatagaagaagttgaagaaaactgtgaagaaatacatccgtttcaacaacgtttaagagaagctagtgcgaattttcaactgcgacgatcaaattatcctattggaacagctcaactttatagacaaagagaaca

SEQ ID NO: 2616 - DNA, 1000 bp, Picornavirales sp.
  isolate H4_Rhizo_43_scaffold_10 hypothetical2R
gcagtgagcaaattccattgcagtcgaggtttagcctcgccattcgtcttttaaaattagtttcttttaagatgctagaagataaaacacggtaaaaaattgtatataacgatataggtctggagtatagtaatcaatgttaattcgttgcattggtgataacgacatactgtatactcccaactttcgcgccggacgattccggatatattgtacgtgataataatgtcttcttaattgagactgactttttaagtcaattaaacaactctaccagagcctacgcgttctatctctgacacgggatagttctcagggttgaagattccataggtcttcagcctgccgaaactctgtgctgtaatgtagggtcgactaccatctacctatttaggtttgaatcggtctgagataatttcaatacacgaccggccttaaaatagttcttcagagccaccggatggttagtttagatgtggcatagcgaaaaacgcagcacactgatgatattctttcaaacgaattttgttccctcacgatcggtgaggacctgcttcaagcaggagataatggatttttgcttgcccctgttatattagggcaagctcaagaaactcatgtacatggacctactattgtacgtgattttacagattgggacgcctttaatttgtggcaggtcccagatctttattatgatggtccggaagcagatttagctgaacgagatggttttaataactatcaaaatgaagcaaatttgcgacagactataactaccgtcattgaaaaagatctacctccttatgaggtgttgatttttagtgatgaagaagaaagttctcgaactttcttttcctgtgagtcggataatgaagggtacactccttcgtcttctgattcacaagaacagatgcctgatatcatatatcagatgccctttacagctacttctatacaaaaagaacctgaccaggttcagcagaagttagttaaaagg

SEQ ID NO: 2617 - DNA, 1000 bp, Picornavirales sp.
  isolate H4_Bulk_Litter_22_scaffold_31
ccttcaatagaaaatatgcgtaagttaatttgtatgttttaattttagactaaaaatataaacattctgtactatcaagttagtatatgtaaaatctttatcagacgatcaatctgattataaaagatttgtacatataaaaccttgtgtttgtacacgcttatgacgtgagaaagtgcattgagcgatatcaatgtggatagcttactatagctatccgttagtcttgaacgatcaaattcaggagctataaatggacattagtccaaggtctttaatcatgtaggaccttctttttaagtaaaggaaacatgagaaccacacatgggaagttattgccctcatgtgagtccagctaaatagtttggcattaggtaaagattgcagtgagcaaattccattgcagtcgaggtttagcctcgccattcgtcttttaaaattagtttcttttaagatgctagaagataaaacacggtaaaaaattgtatataacgatataggtctggagtatagtaatcaatgttaattcgttgcattggtgataacgacatactgtatactcccaactttcgcgccggacgattccggatatattgtacgtgataataatgtcttcttaattgagactgactttttaagtcaattaaacaactctaccagagcctacgcgttctatctctgacacgggatagttctcagggttgaagattccataggtctttaacctgccgaaactctgtgctgtactgtagggtcgactaccatctacctatttaggtttgaatcggtctgagataatttcaatacacgaccggccttaaaatagttcttcagagccaccggatggttagttcagatgtggcatagcgaaaaacgcagcacactgatgatattctttcaaacgaattttgttccctcacgatcggtgaggacctgcttcaagcaggagataatggatttttgcttgcccctgttatattagggcaagctcaagaaactc

SEQ ID NO: 2618 - DNA, 1000 bp, Picornavirales sp.
  isolate H2_Rhizo_32_scaffold_97 hypothetical1
acaagatagtggagcttctcaggttagaccgtgtaatgacgttacctgagtgatatgtatcccaactattgtttataacaatgaaccgggttcttggtatggtgtgtgagggtcagcctcaccggagtaatgaaccgtacgaccaagaactgctggaatgctttgttattcacacttaattgtgtgcaattgtgagttgccatacaactcgcgtatattaaattttacttgtttttggataaacatgataacacatatctttcattccgattatcccatgtcggggatatgatagaataaaggagtgtacttgatatctatggcctggagctagtatgtccaggaataaccaactatcaaatacggcaggaggaattattgtctagccgacaatcctctgaagatttaggttaccagccaatttagattgaaagattatgacccagaagtcgctagagctactaagctcgcgcacgtccgtgttttacaacaacaaagagaccagttcctttctcataggaaggagcaggtccaagaatttggagccgattttgtcttggctcagttcttaaataagactgtagaacctatatctacttctccgggcgatataccagaaaagtataggagaggaaactttccaattcgagataattatttgtctttatcgttacatgatgaatataaactcgatagtgactctattcgtcactactccttaaacgaccgaagctcgaggagtcaaaaaagagctaatgataaattacgtgaaaagtatgatcctaaatacttagtagcagtggttcgggtgctcaaaaaacctgaacctaccgaagatcagttacgtcgtcttcgaagattttggaatctccttgagggggttccagaatttgatattgattcactaaaacaatatttctttactgtaaatcatattttgtttaagaacaattggttttccaaagttgaaacttggaagtcaagaagtttctttacattt

SEQ ID NO: 2619 - DNA, 1000 bp, Picornavirales Q_sR_OV_041
  putative polyprotein (Q_sR_OV_041_gene1)1
ataggagatacataacaaagaaaataataaaaattcttttgtacatatcaaaggtattggtttgactgagcacttggcgagcgagtgcaaggttgcaatgtcttaattcacggttttgaacatgttccaccagggatcgtacctgcatgttttgtcgccttaagtggcggactataaatatactatactcaagtggtgtgagtgtatgtttgtagcgcagttcgagagccgaataattcttaatattgaattgtgatgtgttatgttttgtgtagtttgtattttaattgtatgcgtagtaccaaacgctcttttgtgtgtttatgcgatcacacttactttgttggagcgatacgatcaacgaagttaatgtcttaatctaaggcctttgccgcatgtggaagaaccaatccggcatcgtattataccccaaccgctaatgaggttggatgagggcaaaatcgtagctcatctaccttctacccttttaaaatggaggagagatgctatactagggccactacaggggcccgacccccaaacctacgtggtgatgtgtgactttggcgagatggtaacttgccttgtccggtaccatatgagctacttctacattagatatagaatgacgcgtttagctgaagacccttagtacctccggtgaaagttgtgcccggaatgtggttgaatatatcttgtggttttagagtagttatgtatgggctggaactgttgtacacactttgatgagtgctccgcattttccctttgcgaataagagcacaatgattctatacgtgaagctgatacattttcagagacttatcgtgaatgatatacgtttttgtagatttgaagggccctgaaaaggtttaccctagtctgaattcctatgtcttagcggtttgagatggaatgttgttgcctatagtacgtaaggttgaacattgccataggcaatcctcaagggattggcttggcgatgtgggaataaacttca

SEQ ID NO: 2620 - DNA, 1000 bp, Picornavirales sp.
  isolate H1_Bulk_28_FD_scaffold_4 hypothetical2R
tgcagtaaccgctgcagtgaccagtttttaggtccctatagtttgacctagaggtaatctaacagcaaatagggattctccgttaaatcggaggccagctaggaggccaatctttgtggaagccttataggtggcacactggttgactatcggcctatccatgtggaagctatcccggtttcataccggattctatagtggcatatgtgtagactaggctcgtaatatccaaggaggcctgttgcggtcttaaccgtagcagactatcgtttgttgttcttaggctctttgcgttctttgggaagttttttctttgtccatttgacccaaaaacccagttcggcccttatgttatgttgatccggtcctttaggcctttgtgtgtgtaccacgtagtttaatagtgcaccttatcgtatggataccaagtgcgattcgtattttaagattggaattttgcgccacacgtcgtatgttgcttcacgtgtcttgtagtgtttatacttagacattattcgtagtttaataagtagagagtgagcctcgatttattcgtgacactgctctcacaatcattgactaatatacaggtattggaactatcttcttatgtttcagtaggctgatgtctttgaaatccctttttatgggtgtcccccacttttaggctgtcagcgatcttgctgccaggcaaaattatagagggctccgattgggtgaattgtgaattaccccagtatgagtttaaacaaatacccgcacagcaccatctcaaattattgatggagcgcaactcggtcgccttgtaaccgatacccccgaaacaaccgcgaatggtaacaattccctggtaccccccccggcccttatcaagcacaagaagtctgcagaagaaattaaatttgaatctgtagatcctactttatttgatgagtggattcaaaatgttgagattgagcaagaacctccaaaatctattcatagattgcggaaatgtttg

SEQ ID NO: 2621 - DNA, 1000 bp, Barns Ness breadcrumb sponge aquatic picorna-like virus 2
  isolate1
ttgtcctttttaaacataaattagattgattcttctcttttgagatgtagaactatacctggttactaatttaagtcgattttaatttcattattttgcatttgttttagagcgcatgaagctcactgaataaggtttcagtcaattccttttcagctcttatttatataagatataaacattttcattattttggaaaataacgtaataaatttcagtattttatatgtgtgtaggccggtaccgaatggataaatccgatgtcctgatcattatataccttattgcttgtagaacactatatgaccgaatttgaagaatagggttaagaaagttccccgttctatcaataacaataaaccacccttcatgagaaaaaagttacttacagaaaataaacgaattattggtggtaatattgacaacatgggttttattttaaaagaaaaaatggacccatcctccgcaaaggagacgcgacgaattaagtttcgacgcaaaaaaatacaacgagcgcgaagcagctcgcagaccttttaaaaataataaggtttggaaaaattcgcaaaaatggaaactagagtttgaaactcttcctgaactggatatcatttccgaagagtcctatcagccacactttggcttagagactatttcagcagcgtcattttcgattgacgctttggcaaaatttgccaatattgatattccagataaagttttaagagaagtagaaggagttattcttcttctagtaaatctttcacaacaaagtacaccattgggtgtcattacgtcagttttgacttgggctcaaggtcgtaccacaaaatcactttttaaaacagtgaaaggatttgttgaggaacttctcgtttcaccacaatcaagcgcaaccccagattggttggattgtcttcgtgatgtccgccaaaattggcaattgtgtaagactaatagagcattcaaacaagtgtcaaaacttcttggttgtctcgtc

SEQ ID NO: 2622 - DNA, 1000 bp, Picornavirales sp.
  isolate H1_Bulk_30_scaffold_14 RNA-dependent RNA1
gatgatatcctctccttagtgaaagtattctaccgtttgtaattgaaaattgtaaagttggtaaggtatgtcggattcactggtattttaatacctctaccgctgatcgaatggtgtaagatcagggtcatgcggggcagtgccgcaatgctacaccatgttcaacccttttgtttgacgcccccagggcttccgaacacacatggaaaaactaaaccccccctcctctttctcgattgaagttttgaacagagtaagcgctctgccaaatgtggatttgactgttgatggcaaaatgctcccagttgttggttcaactggcggtggtcctcgcaagccaaagttgcctgccaaggacttgtgcctccgtgaatgtgcacgtgaaggagaaaggaaaggtgcagtgaacctgaaagagaaatctagtaaggccttttccaataggggaagcgttgagccggtgggttttactcaatcccgtttgaaagcgaaagcaagtaatagggagcagagtcttcaaaggcattgggatacgtcgggcattactgccccccgtcaacatcgtgaaatgctgcagcgtttagctgcagagagacgcgttgttgaagaatggaagagcaagggaaaagttgaacgtaagcgagagattctgcttaagcgtgataagcgttctggcgttgggattgagttccagagaggtaggtttatgcctgcttcgccggaagatttgttgcctgatgcagaagctcaggcgaggactgatattttacatgcgtgcaccgagaataaaatgccgtttgttcgtgatgttcgtgacattttgcacacatctgcgatggcacacaggatgatgactgagtatggcgaaggtgaggatcacagtgagttatttgagtttttaccaaaacatattagttccaagttgaaaccccgttcttttgagttacttgacgttgaatggcagtctggtaaggttttaccagctgttgcaggagtagcc

SEQ ID NO: 2623 - DNA, 1000 bp, Auricularia heimuer negative-stranded RNA virus 1
  isolate CCMJ1222,1
cagtggcggaagtccgacaccagctcggccaggcaccgacgcaggcggtgatgaatgctcttgcagctcgcggggagaccgcatcccagacggccccgacgccagagtggcagcccgaagagactcgcgaggctgacgacgaggacgacgcgttccaccacccctcatcgaacgcggacatgatggagaggatagagtcgctgtcgcagcagctcgggagcctcaccgagtggaagtcctccatcgaggagaagatgcaggccctccataacgatagcaagagggccgcggacaacgcctcgtcgttcgagagtcgcctcaaggaggtgaacaagggcattcatagccgtctcgaccgcatgtcggaggccttagagagcctcgggaagtttgtcaacacccagcggcagatcctgccgcagcgaccccgcgcgccggaagcacaagcgccagcgtccctacctgaggacgtcaaggtcgaggtcatccacccggacgctggctccctgctggatgcgcctggccgcgcgtcgcaccaggagcagctgctcccgaggtccctacgtcccgcgccgaaagcgcctgagacgtcgaagaggacgacggccgaggacaagaagaagttctcagcagacgctgcggcggctctagcaactcgccaggagtcgtcccctcgcgcccgcgccgcgggagcgaagccgttcgaatccacttcgaggcggaccgcgcttccccccccgcctccccctatcgctttcgacgactcctcggacgaggaggacaaagaggaagtgggtgcggtcgaggggtacgacgaccttgagtgagctacgccctgccttccgtgcgtcagcgccacgatagcagctcgagaatgtacttgtaagattagacgcttgaggatgccggcctggacgcgcctctatcactttgatgatctcgccgcttagaaaaaaccaagagacaaatcgatagatattgtctctggtatctcgccgtg

SEQ ID NO: 2624 - DNA, 1000 bp, Auricularia heimuer negative-stranded RNA virus 1
  isolate CCMJ1222,2
agttgcttgttccctttccgcagatgttaaaaaccaaggagacaaaactgatgattgcgtcttggttgaacgctcagcagccgcgcgccgggataagcatctccggagggaacgagtatgtggagcagtccgacttcgggtccgagcccgctctgaccggccagatagatgacctcagcgcgatctacagcttgtaccagaagcctaacaaggtcatcgtgggggcggacgtactgccgaaattcgcgcactcggtggatcaagacgctcctcaccccgcccctcatctctggaccgaggatatccgtgctggcacctggcatcgtggaggtctaaccctggctcagtgcgacttcccgaatgtcgatgctgttcgacgagagctcgtcaagcaaaactcttccgagatggagcattggaccagaggactgacagcaattcgcctcgtgaaacgcacgcacgctctcgtccggaagattcacaacctgcttaagagcactctctgggccttgatgactcgcgtgtacatgaacagcacgacggacgctgacatccatcgtctgctcgaggagaatcgccttgagtctcactccctggcggagtacacgacggcgatcaaaggatacacggagcatatgcacgagatggtaacgacaacctcagtcgtagtccctcagtctgctcctccgccgtcgtctgtctcctcgttgtcttccctcccgccgcctgatgcgtactcccccctccgaggggctcctctcctccctcacttccaggagcatcgcaaccgggcctcaacccccagcactcctcgagctcgctaagatgatgtgataaggcgttgcgtgctctcgttagaggacgctcgcgtacacatctgatttatgatctgttagaaaaaaccaagaggaacaaaaatgcagctgcttggtctggtaccacacagcgtgagacaaaccgacaagcattatcgcgtctgtcgatcgcgcctccggccact

SEQ ID NO: 2625 - DNA, 1000 bp, Picoa juniperi mycovirus 1
  isolate ANK_VIR-89, complete genome.1
gttctgctccccctgatgagctgggaccgaaataagctggacttatcggggtttagactgttgtccttccacacttcggtgaccaggatcgacatctgcttagatagccagatagtgcatgtgtgttcgagcatcgtttattcgattggctcagatgttcacaatcacttacaaccctatctatttgatcactaattccgtaccacccgtagcactaccgctaggtaagcgcagaacatcgaggttgtcccagttatgggcgtattggtaggggagtcactgttgtctatgacgcatcgaactcgtcccagcgatccattaccctagggaacctaactgcatgcgaaccatcaggttttaagctatacatgggtggtaggttatattaaatagaggtatcagtgctgaccgtctagtcctcagtatgacgttaaactactcaccgtctgtatcttgggacattaaactacaagtaggtattctagcgagcatgctgatccggcactcgtagaaaaggaggttcgcaaccttggaacatatctcgttccttaaccagtattgaataccattccatccgttgaccggggctatacggtccatcagtgtaattagtataatagcgagtaatggacatgcggtttaaacttggatgtagaataagtagataactgctttctattatggacgggctcacctactgtggttacgttgttctgaaacatgttggttctaaatcatgattggttcagtcttcttaagcacttacaaagtgaccgacccttccccataatatgttagatccaaacagttaatcgaagtatctcatcgacataacgattaaaaatcgtgtttaaacttagcataataaagttactttaagttatatgaacgcgcaggtattttgatagtttatcctaaatattaaactatctcggccggcttgttgtttgcggggctagaaatacgaagcaaggatcaccaaaaacttttttactcaatc

SEQ ID NO: 2626 - DNA, 1000 bp, Wenling crustacean virus 5
  strain WLJQ103138 hypothetical protein 11
aggtttgcacatttgcatcaagtcactcttgctctccacttgtgttaatccgattgattgttaggaaaactgaaatcgtccagtattcatccccctttgtaacatatcttgagtctctcttgagttccttagggcatatgtctctgacgtccagatacgggattagtagtgttttccctgaatctgagactaggcccggaatgggtagacctacaccttggtggatctcatatgcttgtcacgctactagctgtcttgccgttgagattggcgttttaaaagagaattcccaacccccaatttatccctacctatttagggcgatgtatttgtgaaagcttgcatcgccaccattttacacacctttttgattagcaaaaagaccacacatgaaatatcatcttgttgcactcctatgggtggttagtcttggactagcaatttgataattttcatcatacactatgtttacacattttactttgttcgtctacacatttatatgtttgttttcgttctgagagacatttagtgcagatttatttgcctctctaatacatgttattaacttttagtctgtatctttctcttctactatttatatttcctttatcttgttttagaattgacgctgtagagtggtctcattccccttcagcaagtcttttaagacatcctcctactatcgatgacgaaaattgtcccccaagagttaactagttaacgacactcttgggtactgaagttccgttcgattgtaagacctagaagcctgttttatgaatactatcttagataagaggcgttagaattagtcattgattagtttacaaataacgttagatgcaagtaggacctacttgtatactattttgttgtgaataatcaaagactctttgctaaaatctctcgactgttagtccatttcgtcgcggacaactaagataagatcatattacaatgctgaaatttaactaggcatgtagagcgcacataccgt

SEQ ID NO: 2627 - DNA, 1000 bp, Beihai picorna-like virus 52
  strain BHNXC41485 hypothetical protein1
taggtacttggaaggaatcagatgattagctagaaatgagtctgaccccgatagatttcgggacccaacacttgcgaacttatgctttaattcgcagcatgtagggaccgtggacttagtcttgtttgttctgagtgaacttacaattctttgctccccctcatgtaggaagaaagcaaaacgtagaggtacagtttctcctattaatgtacagaagaaacgaaaattctcaacgatggtattgactatgtcgaatccatgtccaactggatcaagttgggattttgatgggcttttagtttagccctttagtacagtaaaactacagcaaggtttgattagccttgagaagttcaattaatcacattgtttattagagaattaattattataaaactccagaaaaatatgtgtattattagtgtagagttagcatcactcattagaagatgccagttcgtttactgatcactcatccgaatagaaatagatatgagagaactatgtcctaattaaggatgcgtcaataaggtgctggagatgctggtagatggaaaattgtccgccagcgacggctatgcttgtataagctccctggtaaatcaagtgtagttacctcatctttgcagtacggaagtaaactgccgaatttctttcccagggtcgggaggggccctagcgggcacctcgtctgatctcaggactaaagccgcttgagacgacattctttttcaaatgcggatacccgtatcctcgtgagacctttgtcaattaagttcagttatttaacactgcgcgcattgatgatgaaactcaggaacggattctattcttggatcgtaagaaagtctgttttaaataacaatctcctggttaacggtgattaagcctggggtcgccttgtggttttcacaatccccccttggggtattgtgttccgcaaggctgatctttcaagtatcagccgtggaacattgtaccctcccactttcatgagaat

SEQ ID NO: 2628 - DNA, 1000 bp, Goji berry chlorosis virus
  isolate CY1, complete genome.1
ataataatggccatgttttagcttgtcaattttggttgaattgttgtgttgcaaataagattgccgttggactgtcatctgttcgttttaaaacacaaactgggagagatagtgtttttacgatgctaaagttttctggtgcgttgcagttttcaaagtatgaacgatttccaaatggtgcatcagtgagtcttaatacccctgctatctttgacacgttgtgtgctattgctgctgctgctgcttatagagatagacttttggagaaaacccatgggcataagatggataaaaggaaagataagattgtggaggacttttctactgctaattggtcttataatgattctagtactgcttatcacaagtctgtcgtgctactcaaatcacttttcagacaaaggtgtgttggtagaaataaatttgaacaatcttataatttaaaatgggtaccagctggcacaccaattttaacacttggtgatactcctacccttggttctcttaatcttgctttatctacttcttgtcttggactttggatggagggggcgtttctggttagtcaagacagattgactgatacttttaaatatggtgataacactttaatgtttccagtagatccttgggatactcctgttcactgtgatggatttctatatatccctaggaaaaatggaaattttgatgttgtaccgtataaatataagtgcagacagtttgtatttggagatatagattctaccattcgaggtaccagatctgatatgcttgctttcattgattctgcactacaattttataagtctaaggaaggagatgaaatcgaatgtcctggttggctcgatgttgtaaagaagatacttggtgacaaagccgccgaagaattacatgacacacacgataaggaggataaaactgttaaaccaccgttgggcgataaaacaactgaaattggtgaaacttctggtggtgtggacactgaatcataactgat

SEQ ID NO: 2629 - DNA, 1000 bp, Brejeira virus
  strain BrMS-MQ10 nonfunctional hypothetical protein1
ccgaaaccgaacttgactgtggatgcaaccaaaagttacttggcgttgcagaccattgtttatcacgaaaaacccatcaatgctatgttttgctccattttccgtgagataaaaactcgggtcacattgtccctaaagaaacatgttaagatcttttgtgatatgtcagctgaagattttgagaatgtgttgaacagagacatacgaccgagatcgttgtccccttttctcgagaagttggaaatagacattagcaagtatgacaaaagtcagagagaattggcgctcgaattcgagtgtaaattgatgtcgtattttggtgtcgacgcggatatcgttgaattgtggttcaatgctcacgtgttaaccgaagtgtatgacaaaaccacgaagatgagagctcttattccgtatcagaggaaatcgggtgacgcatcgacattcattgggaacaccttgttcttgatggctgtcgtgtgtgatctggtgcctgtatctgaacttgagcttgcattgttttcgggagacgattctctcctatatggtcacgatatggatgtttatcgtgattcgcaacatttcggtttgaagttcaatcttgaaattaagtttttctcttttgaaatgtcgtatttttgttcgaagtttctgttagttgtcaatgataaatggacgtttacgcccgacccagtcaaattcatgactaagctcggtcgacacgatctggttaatcctctacatgttgaggagtaccgtatctcattcgttgacactgttagaaattatcgcgattatcatgtatgcagaaacgtggcgaaggctttaattgagcgttatggaattgtgactgatcacacatcttttttgatgtctctggacgatatgacttcaagagaaaatttttctctgttgttttattcgttgtcaggtgataaaatcgactactctattactttcaataaagacttctaatctacgagattcgttcatataagttaaa

SEQ ID NO: 2630 - DNA, 1000 bp, Shahe heteroptera virus 2
  strain SHWC01c3694 hypothetical protein1
gcacatttttctgattgccctttctttgggcgtaactcgttggcgccatcgtgaacaaatttcgaccgacgtctgcctgctacgctttgaagagaaggtggcctcaattcaatgcttatattgcttcagcccgaaacgacatactcaggataagccctgtttattagtgggtcgttgtaatttgagatattgagttgtggtgtttaattgtctcaattaaactgtaaatatttttgttttcttttgttttgttcattttattagtacaatagttttatttttcttttgtttcatgccggtacctatccgcgtccgatgtgggaaagcacttcactagttgatcttagctttataaatctatcaagcggtattctagtgggctaggtacgtcttggtagtctcacttttgtgagtgcagtattaagcccggacctcgctcaggtgttgtcagtaaggggattcgtccttctgaaacttcgtaaggcgaaaagggaagtacggtttttgcaatagataggagaaatagcagtgtgcctttaaagtgctgcaaataaaataaaataaaaattttggtttaatacttcccgggactcatttagataaggcggtgtgcaggggtgacctcctatcggatcgaattatctccgactggaaagagagctgtaattgtaaacttcccgagggaacaggattatcgtgatcctggtgtgtaggcccattaacgttcgactgtcccaacttagcggcaggaaataagaaaaattcggcgttagtaaaacctatgatctttgtcccattcgagccaaagcatgtttatgttaggcttgacggttattgttgctataagaacctactgaagagatccccttccatcttttaaataaccagtaggtcgcagtatttcccctgggtgctctttggacttgtctgggggtttgggaaggcaactcatgcgcctccctcactctacgagcatactaataagcatggggccctcttc

SEQ ID NO: 2631 - DNA, 1000 bp, Manly virus
  segment 1 RNA-dependent RNA polymerase and glycoprotein1R
gacctctcttaaatccaaaccaagagatcaaaatttggccatagagaaattgtcgttttgcaatcaggaagtccgcatgaaaggatatgcaagaacctcagtggtcattcgcctttctgaccatggatgtgatccggcggtggctcttcaatatgtgctaaaagagaaagcagaggatttgatgttgggtgacggcctttccatcgataagaaggttcattggttactaacaaaacatgagcccgcacgaaagctccttggggcactttcggcatcagcctacaactagcacatgaaaaaaactaacagacctcactatgaggcgcatttttggtcgcttgctgcccgaagctccgaacatggctgttgttcctgcggcccaagcaggcccggtccgccgggtcaatgaccccctggagggatgggggcgacaattcgtgatggtccctcccgacccacaacccgttcccaacaccgtcaccagcaccacctatgacattgtaggtgagctggtggtgaacacacccctccagtccgacgatctcgtcctcctcggccagatggccatgaatttccctcactactatcaaggggatatcaccatgaaacctttccacaccgctgtgttctgcctgttagtgtcagaactcagatgtcggaccaccctcttccatggccgcattttcgccagtcgtgtggcggaatgtgtgaccttccagggagaacccagagagctcccccatggctcatctgccctgttcagagaaacgttcacctggcccctgcgaggagaaccttacgtctgggccgtgaacatctcttggactagatcctacatgccgggggtcgccctccatgagttcatccgtccccacgtcaaccccctcatgtcagccctaggcgtttccactcgttggaatggagtggataactacctggtcctcgtggcctagggtcccatttgcaatatggaccatgaaaaaaactaacagtcctcacc

SEQ ID NO: 2632 - DNA, 1000 bp, Wenzhou picorna-like virus 6
  strain WZSBei69574 hypothetical1
accactctcttcaacagagtgtactaatcacactttttacgtagtgagatttgaaactgtaatcgacagtcgcatacttataatctcaagtatgtagtaattgagtagtcctagaatttggattcaattttgaagaaaatccgccacgtggccaaggcgaaacttggcaagtgctaagcatggccgcacgttactgatcaaccacacgtggtagatccgcagccgagagagacggcacccggagtatttttgtttgtaattagatagattcattgagaacttatttccttcgcgccctgtaaaaagggaattggaatttactcagagcgtcaactgagtagtacgaccgcggtatggagcagcggtaatttagaccaatgatgttcttttatgaacatttataccagacatttctgatacataattgagagatggatactcaatcttgcagtaatgttccggctagtaggcaataacccaaaggcttgagggtcgcctgactagtataagaaaaatccacgaatggcgctggggagggttaatagcccccctagcatcaaatagcaatgaagttactaaaagcgtaaaaaccggacgaacccctatttccaattggagaaacacgaatcaaagatactgtcctacgtggactttgtccactaggatcagtgaaaaggtggaagatggacgttatgtgtacctcgaggatattctgttttcaaacaaatttttcgaggattcatacacagaaaggtgtattaaagatagtttcttaatcgataagagtgtaaatcgattgaggaagaaagaggcggaaaagcgctctcgtgattatcacagagcgtgtattaacccgtggctcgctgggaagaagcgagtcaagaaaagacacagtgatagtgaaaggcgttatcgtaggattttggaacaagttcgtgaacttacagatgtttcagttggttccaactgcaatgacgattcaattgactggtctgatgat

SEQ ID NO: 2633 - DNA, 1000 bp, Beihai picorna-like virus 41
  strain BHJJX25957 hypothetical protein1
attttctcgtacattttaagtttttgcgcgactttattgtcgcgtctttcacacgcatctagtgtgtgtgtgtgttatttttctaaataattgtttttcagtatgtttttagcatacgcttttcaattattatatgatgtctttgtatgactttattgttgtacatccttttgaatttttagtgcgattttatgttcgcacattgtgaccaggtttatacctggtcattttattcagcacgatctctgatatcgtgcagtaattctttatgtttgttagacataataatgtagtatggaattttgtaaaatttcgctcaaaagattgtttaagtgcattgtttgacatgtgtgagactcgagtactcgatgttatacaaatatgtactaagactttctttaagtgattgttataagatctctagctttctggaaacagttgactacgaagtcgtaataagcacattattcctaatataacatgaagtggggaattttaaccgctatacagtcgaatttactttcgattctgagtggctgaagtgatctttgtgaagctacccttcttgaaatcttacaataacctggaactcattggagttccggatactattggttttcgttgtgaaggatgcaagatcttagaaagaaattcagcagtcgctaacttacctgctcacgacgttgaggaggtagatttgactgtaatatgttaaaaggactaacagcattatacctattatagaaagtatcaataaaatccatttggtatggtaggtatgtgttccgctctaactaagcgtgccgagaggcagtctttgtttgaggaggcgttgttcccaccgtctccaagtatacgcccacgcgggagagtatgcaggtgaaacataattcggggtcttccatgaatatgggagttggaaatcgactgatcggtcgagcttctgtaaaaaacaaaatagatcgctcaacaacaaaaaacaaacaacaacaaacaaaat

SEQ ID NO: 2634 - DNA, 1000 bp, Guinardia delicatula RNA virus 01
  isolate GdelRNAV-01, complete1
agagagaagataaaagactccacacgggtattccccgtgtggagatcaataaacttttatcagtagtaacaatttgttactcaagtctgcgaatgacttttattaggtattcgaaactctttatatacaaccatgtctattaggggttttcccctaatagttatttgtttttctgagtttcaatgaattgttaataaatgttatttaaacatacttgtttaatgtattgaaaattctattgatgtgtttatgatcgaacccaagttttttcatctgtaatcgtttcacttttcgttaagaaatttgtcaagctggcgattacgtagtccttctggacgccaagcttatttatgaaccgaattggattataactggattatatggcattagtcttagttgtaattgttctttaacatttcgattccggtgaaccccggaatttgttcaggccttctggccacctcaaacgcttgcactcatgcatacagaagcgtttttaaaatatgtctgtacgatgtaatactgtaattacagaacttatcaaataaggaagaacctatattgatatttcatctcgttgtaatgcttagcgcttgcaataagagccccctcgtttatacggctgaaaatagtataaacctagtttaatatcacgctaagatcctgtgatattcttaggtaacctatcttatgatatggggaccgacccttagacaagactcattagtcggcgtattgtctaaacttatagttaggaagtaatgaccctaatttcacttgagaattcttgttggaaaactattaagttaaacctttaccaaccgatgtacttagtgtagcgcctctgcctgcggcgaataatacatgcttaaagtacgtaagtaagttcatcctcttaactgagtggtgaagcaaagcttttgtgtcgaagcacaattggattaccaattttgcgggctttcgcgaattggttcctctgtgcttgtcgctttcaaatttt

SEQ ID NO: 2635 - DNA, 1000 bp, Wenling picorna-like virus 1
  strain WLJQ101464 hypothetical protein1
aatcaacagcgatccttcggcatgaagtaaactgaccaaaatagaacctgatctaggtgtttttaagtcatggtaagtccatgagaccaaaaacaggcgttgctaacccgttacgaaaaagcggaaattattatcatagggatgatttgcaattcccaatggttcagactgcatatgtttgcggcatacacaaattcggttgtgtaacagctgtttattttgattctttgtctatagaaaatagacgaacttcctcctgtggcgcccggtaatagggtaggaggtacattgggcgtggaaccccagtgtgagtgtgaacgacttggagctgtgtcccactattgtgggtttagactctatttgttagtcattgaatcaattgaaccagcttgcctatgatcttacctatccacgtaggtattgcatggcaagtgctgtccttgttatagctgatgaaggcttgagtcagcttaacgttcgaggtaagtttgtagctctttaagagctagtgggaagacctggcgctgtcgtggattaatcgtcccttcagcatcaatatagcattgaagttagtaatagccaaaatcttttatccagaccatctttttcttcggatttagaattgcctttatggctttttaattgttggttgctacttaatgtagcaattagtgtgtacactattccccgtgattgtttcatttgggatattgtgtatggtgtgtttttcatttgtgtttttgtattgaccatctatttgtatgtttacagcattttattgatttggaaagctatatttggtccgcggcgtagaacttttgaagaacaacttggattcaggttaccgtcgtttgttacacctgattttgttgcacgggagaccactctgctattagcgttgaaaacgagtgtttcttcgagtcggaataaggcaggtgtcatatcagcgttggtatcttacgcacaagctcacagtcaacgttcccttttgggtcactta

SEQ ID NO: 2636 - DNA, 1000 bp, Wenzhou picorna-like virus 14
  strain WZSLuoII97619 hypothetical1
agggaatttatattccctacataccctatactttttagttgtaatctaaatgatgactctcttttgcagagaccctgtataaagatcgagatctgcgtctcgtgtttcagtcctaggattacactaggaggttagcacgggagcatgaaccatttattttgctcaagaaatttatacttttattcttttgtctggtttgctgaagccgaaatttcagcaccccctttttgcctgttatcaaacaggcccccgctttcgagcgggtgattggagactgtacaatcttgtgctgtctccatgctccggttttccggagccgcgatattatatcgcaaatcctcaaccgaggataatatcggttggtcccaatttttactcatttggataatgagtccctatttttgagtaggtgattgaagtgatagcacttcacctgcgcttccgagcgcactgctccctttgggagctgcagtatttatactgcaaacccccagccgagggttgtttcggctggttccattatattgatgtatctttaataattattttacatttgtttttgaattgcaaacggctcttctataacattcaaaagaaacccttgattcaaatgtttacatttgtaacttatgttttctgataccttatatactggtaaaatagaggattagcgtacctctcctcaagtagtttcagctcactctctttgagagaactgacgtccatattgtgatctagcttgattgatataagcggtaagtcaattaagcccattatgatatgttcggaaaattgtacacataatatacaggaagactatgtcctatggtgtgtacttcagtaagaccttagccggtcgcaattgttacgtgaataataggtagtcacgcgtaacacatttcacttgtggttgactcccacgagtgatcttatctttattgttactaaatttttacaacccgcttttgatcccgtcttcactgattttcgggattcaact

SEQ ID NO: 2637 - DNA, 1000 bp, Changjiang picorna-like virus 4
  strain CJLX29654 hypothetical1
ttttattcgcatcttgtagtgttcgcgagaaagaatctactatttagtgatcacaaacatattgggttgtttgtttgtgttcacccgaggtacgaaatgtaccagtcctgtttattaatactttggggataaaaagcagaattttctgcaccgtatacggtattgaaatgtatagtcgatattttaaggacattattaaatggacgtgaaagtctgttgaaactgctctgttttgaatattgctgtttgagggttgggaaaccctacttttgttgcgatggtagcaaatgcaccgtttagaccttatgacatttcgagtcactattggcttctgggaaggttgattaccagagtacgtgagcctagatctaacatgaggaggattgtgctggagcttgagaacatttggctagttgcgcatgttctgacaaaaacatcaatggggaaaggcgttaggccccacgtataagacagaagacacgttgttatcagaatttctttaaaccacatttatcacgtcaacccactccacattatttgtttagtttcccgtaaaccaatttttataggcgaacagccttttgatgtttattatgcagattttaaatttttaaataaagtagcgtatgtagttgtttcatattgttgtccagtagaaacactaatattgacattaaatgaatatgtaaacaccgaattaatagagttagaagagccattttatggcaattattttatagattgtaaacccattcgaagcggtttgaccgtttgtgcttatggggatattacaggtaagaaaattacaactaacattggccgtttatgcggaggttatcgtgatccttatcgcttgtatcatattattttgcaatgtgagaaacaagtattattagagaccttgaaacttcaaggtgatgaagagttcgcagaacaagttcgtcaagaacaatataaacaggtgcaacaagataaagtttttagaaacatattgcgtttt

SEQ ID NO: 2638 - DNA, 1000 bp, Alternaria tenuissima negative-stranded RNA virus 1
  isolate1R
gatccttccacggaagattacctcttcgccgccaaggttgatccgatggaactcgcagcttatgctggaattcttgcatatgcgattggcaagcagccgactgcggagaacatggatgcgttcaactctcgccggcgcaacgccatctcccaattccttcctgcaggcgatctcaagatcttcgttgatgattccgagttcttgtccatcgacatccttggcaagattcatcgtgcgttcaactccgtcacgatcgatcgagcccttgtcatgagtgcgattgtcgacaaggatgctgctctagttcagggacgcgagaaggtcttttacatcatcttccgtctcggatctggtgcctcgctcaatccattgctgatcatcacgcgctttgcgcgcaagtacccgtacttctattccgagtttcccgatctcgagaccgaataccatgccgcggctcatgcactccagcggttctttgatgttcccgagaagcgtcgcatgtacctcaaggtcatcttcgggagcgcctacgttcctgtcgatcgcacggatgtgaacgaacttctcggcgtctctgtctttgcacttcagcagtcagagccctcgcttgccaattacaacggcggaactctcagtgtcgtccatcgccagaagttgattcgcctcttggaggttgcttcaactaatgacgaagaaatccccgaggagcaacttgctgagtaagtgtttccaccactcatctccttattaaatccaaggatttaataaaacttaggagtaatcaataagatgaagctcgctgatgcacttcgactgtatgtcgaaatgttcgaactgattaccgcactcgtccaacgcgtcatggacgataagacattcgaagatactttcgacattgtctcacttgactaagttcacgtactcagttgcaagagttatttaataaaacttaggaaataacaaacgcatcgtctcgcactcaacctactcattaagaaat

SEQ ID NO: 2639 - DNA, 1000 bp, Ubei picorna-like virus 3
  strain WHCC101453 hypothetical protein 11
tcccagatgccatcgcgcatctcaacttgaatcctctacggtgaaaagccgtaccacatcagcctcgaccgataattaaagtaggtcatccgttttctacgaccaactggctgatgtgatgttcaacgtctacagccggtccatcatgagtatggacgtgcaaaacctgagtcgccacctttcgaagttggtgtgatagtcgtaggccgaccctgcctagcagttaataaataaactagcgtgagcctgcgataagggccaatcctcgggatgatctacaagtgattacccgcactgaagtcaacaaatttgattcgtttccacctgatctggagaaaccgatttgtaatggcttgcgccacggcgaagagtgaataactctgagtggctgccaccttgacattaagtgtgtgttctacacctgtattattaggacatgattatggtcctgtttatgttttctacaacctacgctgctaatcaacgctcatcgagcaccgcgtgcgattggagggactctgtttctctcctcttagtagtttgctatatatttatattgtctcgtatagacgtcaacccgcgtctctaaataaagctggataaaaagatgtattattcatattttcatatcacatcgtaccacatttatgaggggaaactctggaatggcattagccggtcagagtataaagaaccgtcagaggggatgtgcgagtttccagtcacattagtgatactggaccacattaccgcgccctggggacttagaggtacagtggtgtacgagaggtgtgtgttaggcgtagcctgcactcactttctcctctgcccaccgaggcctagtcatctttatacaatgcctagagaacaaccaaatgaattacagaacacgtgaaagtcgagttctaggtcggggcccctgaatgggtccctatcccagcgacggggagaaataatacgtttttaagaccaagtacgacataccatttaccgatttatc

SEQ ID NO: 2640 - DNA, 1000 bp, Thrips tabaci associated dsRNA virus 2
  isolate THR-E_DN239551
cacatcggtggcttgcgagggaactcactgcgctgcaggaaacacccaagtgcgttctcgcaaaagcaaatcaccaagcatccgtcggttgccgattggcaatcgctgggcctttatcccccctccctccttcgagcgggggggtaatgtgtgaatgtgataatgacggcttaggattcttaagccagagtgaatgtgatccgacttacggatttgggaaggcaagtgcgtccactgagcggttagaacgcctctgggcaaaggccgggctagtcccccggtaacacaactgcggttgttgcaaagataggtgcggtgcgcgaactctggctcctgttatacaggagtacagttacactcacgactctccctatcagagcacttgtcggctcaaatccgacatcggatgtatgatggctccccgagctaagcaactcgggttggggtgtgaagccgaaaggtcaccccgggccaatgcgtgggcggcatgaaactgccccatcggcaagtaagctgtgcatcatgccgatgagtgctggtcgaacctggggttggaccaacaaggaagaactccgtatgggcggggtgtggtacgtagaggaacttggagtgctgtactttcaggtaagcctggcaggaggactataaggatttagttcggcctgtggcctttggagggcagggcgtcttagcgcggcgagcaaggggtagtacaactaccgctcgtcgggcgggcgggtctaggtctatggctttaagtatagcaacaagaaatcgcgtgccacccttgttgcttcaatctcagaggcgaggactgcgcatgggcggtgtgggcacagcccacaccaccccacctctcagcggggggagggggcgtaaggggcgccctccctgcctagagcatcggatgcagccccccacttaaggaccagctacgactcattgatttattgattattgagtgtgaatatagtgcgattcagtgcgattattgtcctag

SEQ ID NO: 2641 - DNA, 1000 bp, Shuangao Insect Virus 5
  strain QSA09 polymerase (L) gene, complete1
atatgctatgttctcgcactcaactctatctcgcatcgcaggtgaagaattacctcgggtatgtagattgctccaacagatgatattagatccatactgtgcaatgttatccaatccgatccccgtgcgaacatatgcgaatatagcatacattgcctgtaaactcatatataaatctaatgttgttgccagtgacttgaccatgaaggtcactggatatgtgaacaccttacacacaatgatcacaatcgatcaagggttgttggatacagatgttatcaatatacgcgaatcacagatccaaatcagtggagatagagcttccttagtgaaggtgctggctaagcggcacgggtatcatataagttccgataaaaacaccatttttgagaaaattgaaccagaacctacatcttcagttcaatctacatcgcaatatgacatgctacctattaaaactcatgatatgatgattaatgacaagaagtatagagaaattgatattggagagaagtacaaggacatgaggacaaaagaagacatagcttttttcaacctgtgtcagcaattcaaaaatacaatgatgcaaacagtgattcctgacggcgcttcttatatccccggttccaaattgacacttactgaagatgagcataaatatctacacctcgataagtttaatgaagaaccaacggaatataaaagcactcaacacatcatcaccgataacatacgtaggtcaggttcggttttaatcagtgatattttgtcattagctaagggagttgggttgaattgggctactactgtagcgacgcctgtgatgcctgctgcttcttccacccgagcagttgttagaaccccggctgaagaggaggaaatgggcatttaataagtgtaaacaacgtgtatcaggtttttgatcatagcctcttaaaggatatgtggtgagattgcaagtgttttcctgattattttaaaaccaactctggtgtttacc

SEQ ID NO: 2642 - DNA, 1000 bp, Beihai picorna-like virus 22
  strain HOU126951 hypothetical protein1
attagactacccttcgaccatttgatttccatgctaatgcatgtactactcatatcgtgacaggataagagttaatatcgtaattaacgagaacccatcaatggaaattggccatcctctggtagaggcgtgtaaagaaccacgttagtgaaacggagtcgacattaggtccgtcaaccctgatatttgcgcacatgcttgtgtgcatatagcgaaatatgaatctacaagattgagccgaataaaaatattttgtagtgatccgtgttacggtaattttccgtctaagatttgtatgataccaggtatccgaaagctattgctggaggaccttgatgtaacatttatatgtagaccaacatactatcattccgatattatcgaacattaactataatataaattgtgaaactcgatgagctaggtgacacatttgtgtttaatcatctttgacatttgtcaactctgaggacgagaggagcagcggcacaattcatttgtgtaagaagcaattttgttaatagttattaatggtgtttgatcttgattcccttgggaaaggaattattgcatccacctaggatctatgcgtttggaaagtaaaggttgatattccatatcgtattgcccagtcacaattttgtggcccggtcggaacaggctaataccctgagctcggacttacatctgtaagtgaccggtatacctatcagttacgagtaccttcaaacctagtaaaccgctatattgcaacgaggaatttgttgataatcgtgtcctgagaactgatgctaacatcgttttggagggatacgaccctgagttggagtgccaggtaggcattggaagctttgtgagtattggaactggacttgatgtcctatccaaagcttcagggattgatataccagattggattgtcagtgagatagaatcaattatctgtttgtttatctctcttactggacaaacgactacgcaaggtgctttagccacaatt

SEQ ID NO: 2643 - DNA, 1000 bp, Fuchs virus
  isolate Antarctic41 non-structural polyprotein and1
gcaagcctatttggtactgtttcctcaagaatgaaattctgaaggaaaagaaggtcagtgagaatgacatccgagtgatatcttgtacagatcccgtctttgtgcgtataggagctgcgctggatgaacaccaaaatgctaggatgaaagcaaagacagagacgcatcatgctcaggtcggttggacaccctttaggggtggccttgacaggcgctgcaggcgcctcgcaaagaaggacgtatttgtcgagcttgattggacgcggtttgatggcaccattcctccttggctcttcagaagagtcagaatgatacgctggtatctcatgaatggagaagaccgcgagcgctatggagacctagcacggtggtacaccaagaacctgttgagtcggttcacgctgttcccaactggtgaggtcacactcatcaagaaaggaaatccttcgggtcagtattctaccactgtagacaacaacatggtgaatgaattccttactgctgctgagtttggctacctttataggaaggccaatggccgcctacccactgtcgaggagtaccgggcgagcgttgacatgctctgctacggagatgatagactccttggctttcgcgcggggttcgtcgactacgagccaaaggaagtcattgacttctacaagcgcgtcttcggaatgtgggtgaaagacgagaatatcaaggtggcgccctctcttgagggacttagtttctgtggttttacccttgtaagagtgaacggccggtactatggtacgatgcaggccgataagatcttgcagagcttgaagacccccacgaggtcattgcctgatgtggagtcgctttgggggaagcttatttcccttcgtatacttttacaccatagcgaccctaagcacaaggagtaccttgacaggcagattgccaaggtggaagagtacgcccgtgctgaaggtattgacctacccgaagtcgggcccgacttctataccaccat

SEQ ID NO: 2644 - DNA, 1000 bp, Fusariviridae sp.
  isolate H3_Rhizo_Litter_15_scaffold_561
tggtgctgaagagtgcttttgccgaaacgtcaagtacaccatgtatttattaaatactaggccttttgtatggctatataagttgtttttggtcttgatgttaattttgttattgacctcaggagtctgttttgcgtggcttggcgtaggctttgccgctgtgattttggtttttctcgccagtaatgctagccttgttggcatagcttttattggactgtttggaccttttgcacttatttattgtggcttcatctttgagcaagctgtgcgtcgtgaggcacagttgatcagggacgttggtgctgatacagctctgtgggcttttcttgataagaagcccattggtttcactatcttttcaaagctcacattgacacatgcagttttggcggggcatgataagtcaggccgacttttgtctgccagttttcgtgtcttgggcctaccacaagaaatacaagatatggtggaacctgggattcttactatggcttcaaggctctggtccaatcttgtgttgaatgttgactctttatatgatggcagagcatcatttatcgtgagtcttgctgcttattggtacttgcaacgaaaattttctgtttttctttggcgtaggtttgaaacctttgtcaaagttttgtggattgcatttattgtcttgtggtttgttaaaccacaacacttcctttttgccttaatgcaggtttttagaggtgttgtctttttctcaaaccgtgagcgtgtttctgtcttttcattgtggctcaagtggcgtctcacacatttaattgtgaagttgatagcatattttgagtctttcaatgcctcttttcggaaataccatagtgagcaactagacagtagcagaaagactctctctgcacattttagaaattttgtgatgtctgctgctgtttatatttctgatttgggcctaccttcttatgttcgtggtggtttcgtgccttacaataaggaaactttggaacaatca

SEQ ID NO: 2645 - DNA, 1000 bp, Beihai picorna-like virus 40
  strain BHNXC39087 hypothetical protein1
atggaatttccaaatacagacgacgcgatgttgtttcgttaacgcaatatatgtacttcgcagaggattcgcgtttcctcagcggcaaatacacagtagtgctgtgcgcgtaaccataatgggttacaacacgccgttttagtactgaatttatttgaagaatacaagaacttatacccaggcttgcggctaaaaccgtttgggtattcctcatattatgggtgcgctgaccctaatgaggagagtgatgtacgacttggagcagtattgcaatcatttgattgtatgagactgtattctgacaatattggaagactaatttatccggtctaagattgaaccctcccacatgttcgatgggagtggcgacttagatgcgtggcttgtttaactggtgcgaaagcttgagcaccgacctttcgagcaaagattatagaacgaaaaatggcgcctgaggtttgggttaacaaccccccaggcatcaataaagcatgaagtctctgaaagccaaactttgaatcagatttcactctctcttctccaagagagagctacctttatttcccgtcaaaacattgactctgttaaagagtcctgtcatgactattctttgaaattgaaagatttcttgagcgaaattgctcctggttttgaactaccggaacaattcgctttcttgaaggagcaaactatagcttctctgaacattctactcggtctagtgaaagatttatatgctgtcactaaagaccaccttgccgacattggatcggctctcatccatgttatcaatttttacattggaacacggaattctaccaactggacggatgtgtccattggttttgtgtcgttgtgtttgtccttattcaaattggataccattaaagattcagctaagtacgttcagcaaatcgttggtgtctttgtggacaagcttcgaacttattttgtgaagggcgaatctgccgagaaggagattcgttcgttttggtcggac

SEQ ID NO: 2646 - DNA, 1000 bp, Wenzhou tombus-like virus 6
  strain WZFSL85189 hypothetical protein2
cctcaaagccaatagctcagggacaatcaaattcggaccggatttatcggcatgtccagcgctttcaggcggaatactcaagtcctaccacgattacaagatcacagctcttacggtcgtctacaagtctttcgcgtcctcaaccacgtccggtgctatcagtattgaactcgacaattcgtgcacacaatcaaccctcggttcttatgttaactcattcaccgtctccaagacaggaaccaagaagttctcggcttcccagattaacgggaccaagttcatctcctcgacggtgaatcagttctatctgttgtacaagggttcaagtagttcaactgatacagccgggcaatttgtgatcactattagggttgtcaaccaaaaccctaaataggtagaagaccttccacctcaaccaactccaaccccaacgccgcaaccacagccagaaccacaaccgacaccgacaccagttccatcaaaacagttcttctgctgttacaccggaatccctattgtcaacatatcgactagggaaacgtctgactcaatatctgtaggtaagttatccacacagaccttcagatatacatctgatgaaaaatctgaagacagagacgttagatcttggtggtacagcaataacaatgtctctgcacaagcagctttcatatttcccgtcccaaaaggggagtacagtgctacagttgtttgtgaaggtttacaatctgtagaccacattggaggcacggaagatggacagtggatagggattatcgcttattctgatgattccactgacaactggggtattggtagatatcaagactgcacaatatcaaactaccaaaaccagtcgtcttggcggatagggcataaagacttgcaacttaatggctgtaagttcactggccaggctgttgagagagatgcattttgtacattccacatatcagcaacctccaacgacgccagtttctacattgttgcgcctaggacc

SEQ ID NO: 2647 - DNA, 1000 bp, Unknown
  Description of Unknown: Symbiodinium +ssRNA virus TR74740 c13_g1_i1 non-coding RNA gene,1 sequence
gccgagagggagattagaacaccgcgggctcgaacatcagtatagcgagtcattatgggaatgaaggtagtccgaccacggatatatcgcaagttaccgcgaacttcattttcttgtagggtgggcttccccgaaggtgtgaccttatggttcagtaggcgttcactgcactgaacgttgaagagctaggcgatgtactgacatctgcggaggcggttagcggttgtggtagtcgcgccgtccggtgagggccagagcaacatggagtagcgcccatgcgagtttgccagctcggacattttgttttgctcccccagacctgcatgcgcattctgaggcttggatcggcatggtcgaaggtgcgtggtggggtggttgcctgaagcaagtgtggttaagtgattctaggtattattccgtatgaatcttatgggaaggcggactcattgggttgagcctcgattcccatgccacaagcaacccagtgggaacggctacgggtgcgcttaaggtgcagcttggttatgtaagagcgagttaaaggagcggggttgtggcttgtccgtccccagaatccttcatcaagtccgcgacataacctgcaagtagcatgaattttgatgcattagtgcttaagcataaatggggtccactaactatattggtgagatgcgagtgtcattcgtttgggacaacttaacaaaacacttttgttttgatgaatgtgtggctatgcgtgttaatcctaatcaatttacgattattattccaagtgagtatgacttaccagccgatggaacaaccggggctggatatattcattctgttttgtttggtgaaatgcgtttttcatctattagacgattacgatatgcaagaaatcaagccatactaaccgttgacactatacccattcctcgtagtgaggaaagtgcttaaggcacaaattttggagtctagccgctgacaattttgttcatgcattcccaggtcataattt

SEQ ID NO: 2648 - DNA, 1000 bp, Hubei mosquito virus 4
  strain mosHB232766 hypothetical protein 1,1
aggaccccagatgtatccaataccgtaataagcggtatggtttacgtctggccacctacctacacccgcttgaaaaatatgtaatgtcctggacccgcaacggcactcacatctttgccaaggggaggaacatgaggcaacggggtagggatatcgcccacaaatttaacaggtacgaagagtgcgctgtggtctcccttgatcatagcaagtttgactgccatgttaatgaatccctattacgtgctgagcattggttttacaatcaatgctacggttcggaggagctggaatttttgcttgagctgcaggttcgcaacaaaggcatgactaagaatggcactaagtacactactagagccactcgtatgtcaggcgatcaaaacactggtctaggcaactgtttgatcaactatatgatgaccaagcagttgcttagtaagttggggatagggtacgatctgtacattgatggcgacgattttctaatcttcatggagaagagacacgtcccactcatcgacccgagtgcttattccgtcttcggtatgtcaacgaagttggagagtgttgcatacaccattgaacatgtggatttctgccagtgcaggcccgtattcgatggtgtgggttacaccatggtgcgcaaccccgagagaatgttagctagactaccctggatagtaggacctgtcgaggatagtcgagctaacgatattgtattctctactggacagtgtgagatcgctcaaggcttaggtctgcctattggccagtacatcggccagcgaatgtgtgagcgaggtgggaagatggttcgcatcagacatcgggcgtggttggagaaaatgaaacctggaaaactccaacctatagagcccatgggtggtgtgcgtgagagctatgaaagagcttggggtctgtcaatagccgaccaactgctaattgaacagactagtctggtggaacccgaggagcatttcgctccgggtattctaca

SEQ ID NO: 2649 - DNA, 1000 bp, Beihai tombus-like virus 10
  strain BHZY59908 hypothetical protein1
gcgtcgccaaaggccttaaccatagacaacgcgcccaattattaatcgataagttagcccgtttcgaagatccagtcatactttgtctggacgcccacaggtgggatgctcatttgaaaaagaggaagttagaggcagaacatctagtttatgtcctctgctccgctttttatgagctagctgaattgttgagaatgcagttgagcaacaagtgtcgaacccgcaatggcgttaaataccgtaccaaaggtaaacgcatgagcggtgatcttaacacagcacttggcaactgcctgatcaatattctaaccattctttgggtgtttatgggtattattatcgattttatggttgatggagatgatggaatagtcatcatggagcgcaaagattggattaagtttaaagatcaaattaacgaaaggtatggtaagactggattcgtcatgaaaatggaggtcgttgaccgattagaagatgttgaattttgcaaatcaagagttatacgtacacatttaggtcccagatttgtagtctatccaaagcatgtcctcagtgggagcacggttggtgtcaggccacggcatggtacttattgggttaagcgcatgcgagccgacgcgataggtctctacgccctataccaaggtgttccgattttgcaggactatgctctggctacactcgaagccacacagcaagtggtaccagcagaccttacaggagaggatgcatggtttcaatttagattgcatccagcgtataattatatggtaaatttgaaaaagattgacatcagtaagttagaccaattcatctcaccccaatctcgagttgatttcgaaagagcctttggaatatcaataggtcagcaaatgctaattgagcatcaattgagacaggcacataaagggtacctctgtgaggtcgcatatcttaagaaacatccttttctgttcacagtcgaacaaaccaggcatttattactcaaactttggta

SEQ ID NO: 2650 - DNA, 1000 bp, Riboviria sp.
  isolate bsk136shi04 genomic sequence.1
tccacaaagggggccaccctatcggaatccgcagccgggtggctaccagcccgaaaacaactatctgccggctgggcctgatgaccaggacagaccctacaactactatgcgccactgcgcgacatctttatgagaccacgcttacccaacctcttgggccccactatcaccatcgctgcttcggcagccatgaaggccatgccacacaacttggtctcaggggtcgtgaccacctatgccaccaaatatgcttataggagcatctggtccacagcctactatctagccggtaatgccctcattagtgtcagtcgcatagccacaattgctgctgctgtccgtggcttgacaccaacagccatgactgccagcattgcaatgagggcagcagactttggtggcaatctgttgcaacacgcagcgcgggtaactcatcctcgcgcaatgcatgtggcggccattgttgatggtaccatggccgctgccaacagacttgcctacccaatgctctgcatcggggctgtctggggactgtatgtcctggccaggcatgccatagagccaccaccatatgaggcaccacctggctgctatcccaatggtggccccatcgtggagattacgcaggaagaggcccccaatcgtgaaatggtctttacctgtccagcacccctcgcccggctagtccaagagagagtgctgctctgtgagagggacccaacaatcatccagaaggtcaaatcaattgcctcccgctggtgcgatgcagctggcatccaaggaaaccaacgctatgccgccatctgtggcgctgtagcctctgccttgaccgtaccagttaatgaacagctggtcttgcaactctcacagacacatgcagttcaaacacagtactcaagactagcacgctatctctctggcatcaaacacacccatgatgcctggtggactaagtacttctccatcaggcgctaggccaggtggagggatgctgactgc

SEQ ID NO: 2651 - DNA, 1000 bp, Sedov virus
  isolate Antarctic40 RNA-dependent RNA polymerase gene,1R
ttaaagacttctccatgcgaaacatcatatggcttattgaattctgctatactatgctatctaacatttatacaaaaactagaaaaatcatacgccgcttacttaaacgtctcacaacgagcacatgctcatccctcacagcgatactggcctgccttacgttattctgtcgcgaaattcatcagtatgttagcaatttccagcctggtaatacccctacaggtatacttcttaaccctgtcctactctgcattaaacacatggctgaattcatacacaaatctattccagctatattcccgtcggtttatgcctggatcaaccacgatccttatgtcagcgctatacaagattctctcatctccgaccatggaacaactattcaaactcagaactctcagctggatattaagtttgtacaacatcgcattggcgctgtatttcggattactacagaatcagataccaggtatgtatactgcggagatgaagtcacagcggatatccatatggctaagcgaggagcccgctatgctccagttgatggaactagtacctttgaatgcacatccgaccctgatgagacccttagtaaggttgatgagacctacattacgacaattgtaaacattgtggaagaaaaactgaaagacaatgagaaaattgcggaatttaccctagtacactttgtacaaacagtacaatctactggtacccgaattaggaagacacgagcagatatcagtcctgaatttatgagtaatggtgcctcttaccaaaatagtggcaaactttctatagacgttaatgtcgcaagacaaatggtaactcaaagagccactccaaacctggtccaatctcaccattacggttttctctaccttatggcctatgtatcaattaactccgagcaaagcgtaaattttcaaacacaaaaacagtcgattgcatcccggatttaaaaccccgaggcatatccacagtagtagtaaagaaatac

SEQ ID NO: 2652 - DNA, 1000 bp, Beihai weivirus-like virus 20
  strain BWBFG40173 RNA-dependent RNA1
attagcctaatacgtgaagtgtatgagccgggccctccggggtcgcgctcggcggcggtttaggtagaggtgggagcgcacggcccaactccctaggctgccccgagcaacaatacctgttggttttcgacacagagccttcagggtccacgtgtccggtgcgcgcctcggcgggcgcgcactgcaagacaggagtgccgccggcacgtggatgtgagaccgctccgtgcttattgctttgcgcggataggggtggcggcacggcgggcattgaggagcaagggccggtgctcctcattgccgcgtgccggcccgagccataccccgaaggttgccttatgcctgagtagccgagggtagttcggtgaacagcctggaagccgggtagcgccggtgacggtgagggcgccactgtttcccagcgcgtgggttggcctcttgggaggggggccgtaaaatggtggtttcgttgtgtgagtggtggctcgaaggacacaggcctgcgaggccggctctgcagtgttcgctgcgctgcaaccgggatatgtgggtactggtctggatgtttcgttcgcgtagcgcgcgcgggtgaataactgctggatggctgcacggcgggcattttgccgcgtgacggcttgaaggtggcgcacaacgacaaatggcatcgcgggggtgacggcccgcaacaacgcgcgtgcagggggacgccccccccattcgcacttcacgatgcatgtgggtatgtggacttagcgaatccgttgcagacccgttagctggtggcggcaccagctgaattcaccacattacaaaacaaaaatcgcaaaacgaaacttagcgacggggcaagccccggaagataaaaatagcataagtaaaacccaggcgtcctcctcaaggtgcatctgtgtcgcattctgacgcctggtcgttgtctccggctgccgccgggggttgaacgctgcgaagtgatttccgtattgctggtcgtgaaacg

SEQ ID NO: 2653 - DNA, 1000 bp, Beihai tombus-like virus 7
  strain BHBJDX18773 hypothetical protein1
aggaaaaggccttaataatgtgcagcgtgctttccaccttgaagccaaaatggcagacttcacccacccagtcgtctactctatcgacttgtcacgctttgaccaacatgtatcccgtgaactcctcgagattgaacactctgtctatctttcgtgcaatagcaatgactattttcgtaatcttctcaaggagcaattgaacaacttgtgctttacgcgcaatggatggggatataaagtgcgtggatgtcgcatgagtggtgatatgaatactgggttaggtaactgccttctcatgtacctcatgacaacgtcagctatgaggtaccttggcttagcaaagtatgagctctttgttgatggtgatgacacgctaataataattgaggaacatgatgagtggaagctttcgggcctcactcaagagttcctccgttatgggcatgaaatgaaactagaaaaccgtgcgacctcaatctccgaagtcacctggtgtcaggcaaaagtcgtatatgtcgatggcgtaccaaaatttgtggctaatcccactaaagtcctttcgacagctgtagctggggtgcgccattggcatgacaagggacgccaaaacatgggctattcccttggacaatgtcttttgtccttgtacgcgggtgtgcctatcctccaggctttctgtgaatctttaacatcacgaggtaggtggaatgatgaggtcatgtggcgcgactggatttatcggctaaccatcgaacaggcgaagaacgcaaaagttcgcgaggttagtatcgaaacccggttagctttccaacgcacgtggaaaattagccccgaggagcagatggctgtcgagcgccaactcctcgactgggatataactgcagatccagtatggtgccagtcacaagtgcgacagggttggttcatcgaccctgatattcgtgctggcccatgggcgcgcggtgggtatgacaacccactgacaacgttctagtccact

SEQ ID NO: 2654 - DNA, 1000 bp, Riboviria sp.
  isolate bpk205shi01 genomic sequence.1
gggtaggttagcatctgccaccatgatcgtgtgttaggcacgtaaaacctacgttgtcagtacggacatcgttaccaaaatcgtacggagtgacgtctccatctcagtcatccgtggctggacaaatagctaacaccttttcactgttactatggccacaactaccgattcaccgctactgcccgtcgggctcaacactcccaggttgtccacctggaaccgcgcactcattgccactaagaagtggtggcaaaatttgtgcgagaaatcggaagttacacagttgttgtgctgtgttgacgccactgaggccgacaattatcgtcgagacactcgtgtgcgatcagagattcgcgaagctatgcgctcgcagatgggcttttacggtcagcccacatgcattgcagcggtcatgcatgaaacaaagcaggagcataattatgctctgggagctgagcaggaggatgtcattcgtatgactgccgctcaatgggatgcactttttgtgcaataccgcttccatgcgaacacaccttcagcccaaattttggctgtggcgaagaaggtggttgcaccggcgcgtgttgtgccgaagtttgcagccgccgtcacgctccacatcaaggccaaactgggtgtgctcgccaagaccgaggcaaacctgctgcttgttcaacgcaagtatcttgaggtttgccgggaccaccgtgtgcgtgatgttgacgttgtgtcacacatgcagtttgtgcagaacgcatatttcacggaagatgtcctcgagcggctcgccaaaacgcgacttcgcgcacctgcgtggttacgccttttcgaagagaaggagcgtaccgccacgcttgaggtgtgctgagggcgcccggttcgggttcagggccagaacacaagtgtgtcaccacagcttcggttgaagcgtgacaccctgtgtgctggtaagttgtccgttcacaggaacgggctgctcgcaaaaccacgccaatttgtg

SEQ ID NO: 2655 - DNA, 1000 bp, Melipona quadrifasciata virus 2
  strain MqV2 nonstructural protein1
aaccgcaggaagatgatgtgtctgtagctgaattaaatacccacttttccaatatgatcaataagcatggtcggaaaggctacaaactatcattcgacgagggtcagaaacgagtcggattactcaaacgtcccatgaactgtacttggaacaaatttctcagtttgtggagacggcctgtctgcgtgatggataggtggtgttcaaaatactttgacgtatttcgtcttttcaataaacttgttatttttgatgtttatgagaagatagattctgataagtatactgtaatgttgaaacataagatgcgagcgaccaaatattgcagccgcgctgatgttcatgctgtcatcgatttcaaacatttcgaaaagatagtcgattgtcaacattttatctacaaagaatttgacgtagctactaagatgcttagggccgcacaaccaaatatttttgaactccaccaattcatggatgttgaaacagctgaggccgaattgacgatgaaagagagtaagttggaattagaattgttcatccaactcactcatattggtttacttgatagtacgatgacacctgaagatgcgcatagggcgatagtaaggaatgcaaaacgtttatgtactgttaactacaaccgataccgtcatttggtcacaaaccatcttcaagtgatgtcacttcattatgctaaggcatacttcaatcatcagttacttgaagttgtttcaactctggattttcaccgcgcctccccacaaacacgcgattctttgcgcttggttatcgctcacgggaaattagagagctttctgcacctattcaaacgaaaaacgggcttaagtttagaaatgttaggaacatcaactttcgtcctgttcgtggtgtggaaatggtttctacgggtcctcatgttgaggggtattgcttacctcatatcgacacaagagaccctgcttccctgtttgatggcgtgcgtgcacgtatggggaaagtg

SEQ ID NO: 2656 - DNA, 1000 bp, Changjiang tombus-like virus 12
  strain CJLX27860 hypothetical1
tcactactacgctttcgtttgtgtgggaacggttggggtcatattattcagcgaaagttctctgtttgtttaagcgagtttcgctgcatgcctcattacaatgaggtctacgctgtccagctttattccagctgcggccgctacatcatccaccttcgattcaggcttatagtcacgcagcgctcctctttggtagtgagtgttgtgcccatagccattcataccaccagggccacatgagtagtggcgcttctatagcgcttacatttctagtggtcatcctcatatttgcctgcgggtttttcattcagtggtgtctcatcaagcgcaactagtagccatggcaatttcttataagtttgtcgcgccgctggccattattccttgctattatgcgggacgctgggcgctcgtgaggtacggcaactcacatggctggtgggataccaagacagcttgctctgatgctgtcattggcattgccaccgccattgagcagcggtctgccggtagggacccctccgaccttctcagggcgttggagttcgacggggaggtcgctgacaatctgcacgaggagctggccgaggctgcgttctacgagcgaaagtcctacgagagccggcacttctaccgccactggattgcagccgttcgcatggagtttcctcttcggagtgatcgtccatccgataaggcctgcatgacaaagtggttggtgggcaagatgagggcaaagggcattcgcatcactcacattgaggatgctgtgccccggatcgtggcaatggccatcaaccccagccgtgctgaggttgaggctagggagatggccgaggctgccgatgcctggcgaaccccccccgcccttacgtgggtggagtggttgctaggcatgacgccgaagccgacttccgcgtcgaagtgggaatagtggtgccctgtggctgcgcctcagcgtgctggcgatgttggtggcattgcgcgccatctcgccgac

SEQ ID NO: 2657 - DNA, 1000 bp, Linepithema humile C virus 1
  hypothetical protein genes, complete1
tcccgtgtcaggcacccccagttttcggccttgaagcacaactgcatccccacattggatagcgcagacatatggcgaaatgctaagtacccatcgagtccgtttgacagttgcaatggcctggcacaacattgcccagtaaagtcatccttcccaggggctgctttaatacattcagattattatctgagttctgaggacttggcagccgtcatcaggtcgcacactttcatagtcacccacccatttgatggggaggaagggtgtttcaatgacgagttacattggaggaaagagggaccgtacatacgtgcgtggactgatgatggcacgccgtacaagcacttgtaccaccattgggaggctgaggggtgcataattgggagacatggagccgccacttacgtgagggtgcacagggggccgagcatggatgtgtactactgctttccatcaccaggcgtctaccgatcagacgacccgctcaggttgagaaggagtgacgaagtgctgatgcaccgattgcctagcgggaatttttattcagtgactaatggtagtgcgaagatctatgaccccgattttaaagtgttgcaagagataccgcatggcatcttacaacgagtggcagccaggtgtgggacagccgtccgtgatgagaagtttctaccggcgctggttgcttatacaacaacaaggttcacagcagacaaccaagacttgcatgtggtggaggatgtcatatcggtggccctgcggcatagcgacatgtttgccttgaatgtgtcttccaggtacattaccaatttcgatcccatgcgaatcaccaactttcagaggctggtgtgggtgtggaatgacttgcgctccagcttgagagggtattggaggttgcccctgacaactagcaacccactagtcaaccgtgtcactaccccttgggcatttagtcgtatatccgtcaacagttacgttcgtttcacccattatggactggtag

SEQ ID NO: 2658 - DNA, 1000 bp, Beihai mantis shrimp virus 6
  strain BHXG24422 RNA-dependent RNA1
accaaagtgcaagagttcgtttgtgcctcggagcaggtagtcgagggagactactcaaacttcgatggcagcgtgtccgcggatgctcagaagtgcgtgatgaacgccgtttatcacaggtatttccggagtgagttccaagaagaactcaccggctacaccagcatgctcatcacttgtcctgctaggtccaaaaccttcgggttcaagtatgacgctggtgtcggagtcaagagcggctccccaacaacctgtgacgcaaacaccgttctcaacgcctttctgcaatacatagccgtaagacggacactgccagagctctcaccagaagacgccttcctccaaataggattggcgttcggggatgactctctttgcaacagtcagttctccaaggcttggaccaaggcagccacccaactagggttcgcactaaaagtcgaaaagtgcgctcctgacacgggtgtgacattcctggcccgggtctacccagatgcgaaagcaagcctgacctccttccaggaccccgtgcgcacattacgcaaggcacaccttaccgggcgggacccaaatgtcccactcccggatgccgcgtgcgatcgcgccgagggttacctggtgaccgataaggagactccggtactgggtgaatacttccggttcgttttgcgccactatggaccgcaacggaccgcgaaggtgagagccgacagttgcagtgagaagccatactggctgacgcaaggcggaagctggccccaggaggcaaaggacttcgacttgatgctacactgcatggcagcacgcacaagcttcgaggtcgagaccttacgcgccatggaacttcactacaagagcgcgaaggacccctggacccccttaccttgggtgctgggagatgaggacccgacgcgggatacgcttaacgccgagggtctcccaagcacgggggcggtggactcacgtacatatgaaaaggacgtggagagagtaatccgtg

SEQ ID NO: 2659 - DNA, 1000 bp, Barns Ness breadcrumb sponge weivirus-like virus 2
  isolate H35,1
tgagtgtaaaaatgggaggcccgtcccagtccaccgaattaccttctttctcacacttcctcggtgtgggatatgagccaatttgcgggccgctgccgggcggctgaaggtgaaggccacgcccacgccacgacccgtggctattcggggcgcatcctgcatcctatcgggattaaaggttgaaggagcttccaagtaacccaacaggggctctggaacctagatgcagggtgggtgactacggcccgacgatcacggaatgagcacccgtgtgtcactcatttgcacggcaaggtgggcatgccaccgtgtagagtacgtcggttgggaacatgtcaagaggtggcttctcggctaagccgatggccagggttttagagcgcatgtatagaatgttgctagtgtttgctgtagtttttggtgtgttagaaatcttttgggttgcgtttgggtttgggtgtgcactccttcaaattaataggttacccctcgcctactgttgcaatcagcttcgttctcggtgagctcaacagcgactgtcaaccgacgcggtgtggtgagccgtcattggaggagtggtctcctttgattggcacgtactctagccaagaggtgcgactggtagaaggcatcgaacattgttaatcgtcctgtcttgtcattctcgtccatgacaagtttcgcatagaggccgtaatcagttcgattctttcctgggtgagctattcctgcgcttgtcggaataactctttgcggtggaagccacatcggtgagctcaaatgtgttttgggtcgcgacgcgggaagcggaggaggggccgaaaggccactcgtacgaagccaagggtattctgattgttgaggttgggtcgggcagcacccatcgccattcctcaatccacatgatttcacacacacactcacacagccacaacagcggcatgtattttcaagtgtccctcgcgcattgggtcttaggattttcggaacattcttcacc

SEQ ID NO: 2660 - DNA, 1000 bp, Barns Ness breadcrumb sponge weivirus-like virus 3
  isolate E6,1
gggggctggcgtgcgctagcgttgtcaaggacggcaagctggtgcgacagaagttattgcaattggatgagattgcacggggcgtggacatcactgatgaccacctttacgaccccgtgcagtatctgtccatgttcgagttgggcccattggagccgagcttctcgaacgtggcaggacggctctcaaaagctgttgagtacaacaatcgcgcaggcctcccgctcgaggatctgcgacaaaagcttattgagtgcgtgtcgagtgggcagaagtgtgcgaaagctcagggccaacccggtgcacaccattcccaggacaagggaaagggccggggagcgcttggacgcagcggtaagggggggcagacagccgcctcccaccactaggtggtcatagcctcctgttgcaaacacgcagtgcttcggcactcgcagcaggagggcgttggagcgtggggatcgccgtcggtgtgggaatccggcggtgacggcgtcagtcgtggggggttcggcccttatacgacaggctgatgtacgaagtaactggtggcttaggctaccaccagcgaaagaggcccgtggctgcggtcgcctcttttggctgcttggttgttgaccgaagtgagttgcgctactttggatgttgaatttagcctagtgcttcattcgacgccagttttgcgcgatttatcaacaatcgagttccccgaaccgacaccctgtgggtgctcagcttggaagcgggtcgtgatatatgattagcaaatacgcgggctatacttgagccgtccgtgatcactgcaacggataatgtcacgccgtggaaaggtgaaccacctatcacgttggtaagggtaacccggccgggatgggagcacattcaccatgtgcccggccactccatgtagctcaaaggcacagattaaccagctacaagcctaaaggaacctctcctgaacgcaccgctgtcgaacgacagctacaacgactttttcgct

SEQ ID NO: 2661 - DNA, 1000 bp, Filchner virus
  isolate Antarctic89 RNA-dependent RNA polymerase1R
tccttacaggatgggttaaaagcccttgaacctgttaaagctacatttttgcgtacgcgcaaacgtgatagtttcactgatgaggatacaatcataggttccccttacgggtcccatcaattgtctccttgtactgccagctttagtcgtgagactgtggctcgtgcacaagtgtatactattttaacagctgaacaggcaaaaatgaggcgttacttacttggtccagttacaaccgcatgggaacttgttcctttgtcttttgttgttgattgggtcgtacaagtaggcgattttatcgcttcatttcgtatgctccccaaagagtcacagggaataactttttctgtgaaagataaggtggaaattctagcggtcgctagtgcagactctaaactaatcatacgttcggacggttatattgtgtccagaattgatggtagacagagtttgagctactccaagcaacgttacacgcgcggggtaattccaaatgattttaaacatgaaatcccggttggcgttcaaatgaacctgtgtcgtactattgacgcattttctctcgcttataaaatcggactaagccaattaaaaaggagacattaacaatgtcacaatacaaaacgcgtactcgcggagaagccaaaactgtgcttgttaatccgtcaagctataaatcaacgcttgaggttatccacagtttcaaacgagacacagcccttaatcaggaccaagtccgaatcggtgttgcttcggcatatactgatgtagttaaaacctgcaaggactcctgtggcgtgccacgtcgcgagctggttaagcttgaaatgcctgttttattaggcatggacgaagcttattacaccagaaagaaacaacagctgactgacgttttagcgtcgggtcagaaacttctcgaagcattcgatgatgtgcagattggaatcattcctgatctgaacgtcgaagctactgtcgcttaacaataaggaatataatt

SEQ ID NO: 2662 - DNA, 328 bp, Picornaviridae sp.
  isolate ybw202shi02 genomic sequence.1
ttcgtccgaccactacatccaaccaacctcctcgcttgattggttgaagtatcatactgtccgtggtcccaaaaccttttacatcgagattctctcatcctgtgctagtgcccatttacttctaattactactcgaaaaccttcttacatcagcgagagcgccgactttgagacaccaacttgcgttgagctacccgctcctctagacgtctccattccccttcgagatcgtcttgttccgaagaaagcatatgacaatgcgtttgtctatgttcgtgctgttcgcacccttcgcaagactgatccagccggctttgttcgcacccag

SEQ ID NO: 2663 - DNA, 354 bp, Bat pegivirus
  isolate PDB-694 polyprotein gene, complete cds.1
acgacgcagtctcaccaatggactggcacggtccacaggagttgtcccttccggtgtgaataaggggccgtcacgagcggtgacgtaaaactgagggagattaggccagggtaacttggcgtgcgtacggccacgtcgcttctagatttcaatgccactcttgtggggcgagttgtcaaggccagcacggcggggcccccatactggttgggggtactcaatcgcctagtccagattatgccatgtttcccccaggcgggcgtagcgctacatgcggccaagaggaaaatccctatgggtgacctcgggggaaccttttcttttttagcggtcatggggtggtgtaccgcaacc

SEQ ID NO: 2664 - DNA, 365 bp, Pasivirus A3
  isolate CS15-4016, complete genome.4R
ccatcatcaaatatatacggagttttacgacacatacaacgacgcatgcgcaaccccacctacggttgcccgcgcatgcacagttgctgacatgcgcagtaaaaccaggaaatgactttgcattttcaagaaggtcacacgtaagcggatctctccgggtttttaaggctttttaagcatttttaccggatttttgacgtttaattattatctaaatgactcatctcatccctttaaatgtgctaacctgcaaggggacggtagagctgctttcctgcgactggtggaggtctgcgttggtttcacagtgggtaagtgagcctttttctgcctacttttatttctagacagattctgagtggctt

SEQ ID NO: 2665 - DNA, 383 bp, Rodent pestivirus
  isolate RtAp-PestV/JL2014 polyprotein gene,1
tgtataaggaaggggtgggagccttccctatacttgtttacaaataccatacagtgttacagcagtgtgtagtttactatgcaggtttgaagggcggggatagtctgtgccagcagacgtgtaccagcacttcagaaggaacctgcaactgcgaaccgggagagcatctagagcccctaagctgtgagtacacagcagccgtcagagagtcagctggaaaggatcacccacctggaagctctcgtggacggggtcatagaccaagggcaactctattgaggaggtggggtacctcttcatacaccccagtggtgtgatgtgctgcctgacagggtcccggctgatggcccggctagcagtataaaaatcagttgtaatggcac

SEQ ID NO: 2666 - DNA, 397 bp, Chicken proventriculitis virus
  isolate CPV/Korea/03 polyprotein1
gtaggttatatggagttcatgctcgttctgaaccgggaatggcacaacccgtagtaggatcttgcctctgccatattaatctgcgcctgttgcttctagactatgggctgctaaggatgatgttggaactcctttttggatattccatatcaagtcaactgtttcacctggtgtacgctggaaatccatgctttaagtcctcatccggaggtggtgctgaaatattgcaagccacggatgactcttgaagcctggtgccgctactaggtgttacaccctttatgggcaaatgttgaaccttagtggacgcgtgagatgggaatccacgcctggccatagactggctgataagctcgcggctgatcgagttgcaacagtaatcagttgatttgccact

SEQ ID NO: 2667 - DNA, 415 bp, Turdivirus 1
  strain 00356, complete genome.1
tcctcacccatgcttttcctacccccaccacgcccgcatgtttactgctttccttgatgctgcccgtgactacttccatgacctccccaacccaaacctcaaacgccttaagctatcatgggctctctatcaccaatccccttccttcccacccagaacccccccctccctcccctacaacgtgtatgagcaagacgagtttgacaagctcgccgaagccatgctcacccactctcccttccccacatcccattacctcttccaccccctcccgtccaacgcccgcaccatcgtcgagcgtgaggctgactgggatggctgtgatctagaaaagaaatggctcgacctcgtcatagaggacgatgccaagttccttctggagaacggctctctcccgtttggctccacccttgcc

SEQ ID NO: 2668 - DNA, 415 bp, Turdivirus 1
  strain 00805, complete genome.1
tcctcacccatgcttttcctacccccaccacgctcgcatgttcactgctttccttgatgctgcccgggactacttccatgacctccccaaccccaatctcaagcgtcttaagctgtcctgggccctttatcatcaatccccctccttccctcccaaaacccccccctcccttccctacaatgtgtatgagcaagacgagtttgacaagctcgccgaagccatgctcacccactctcccttccccacttcacactacctcttccaccccctcccctccaacgcccgcgccatcgtcgagcgtgaggccgactgggacggctgtgatctggaaaagaaatggctcgacctcgtcattgaggacgatgccaagttccttctagagaacggctccctcccgtttggttccacccttgcc

SEQ ID NO: 2669 - DNA, 425 bp, Duck picornavirus TW90A
  complete genome.1
cccccccccataccttttccccctctttaacggcaatggttaatggactaaggataaaggattatggacttatatgatgtgcccgacatggaattcgggaaatctggatctaagggttacctcaaaggtagtgaaattccctcgcaggggtatagtagctagctttgtgccttagtgaagggaccgtgtgttctagacatggtagttgtgtaggtacaagaggacttcatttgaatatcctcgatcccggacctaaattaccttgtggatttccggaggaatttaggaaaccacctccttcgggaggctagtaggagcttacatgactctcggattgggaagtccgagctggaccatgactgggtgatagcctgccggctggcgcagttcacatggtatagtcagttgaaaataaatagaaaatc

SEQ ID NO: 2670 - DNA, 430 bp, Picornaviridae sp.
  isolate cftwhg06pic2 genomic sequence.1
ccacccccctttcaacggctggcccacgatacgggccacaactttcctatcatcttctcatttcctataggttcggtttaatggttttgacttctgcattaataatggttttgtatgtggatgaccgtactatggatttggtgtgttaagctcacgttaaaaagctaggtggaatggatttgctacctggatggtcccccaggattaatggtaactccctctttcaccgaagtcaggaggaagagtagatgcttctagagttctgtgctctgtattacacagcaccgctcagctggcgtggacttccggccattggttgagttgacactaggagtagccagtactgggataactggcctggtctatactgctgataaggtgggttgcctgaccctctaaacctgactataattcaggctgtcttgatgcg

SEQ ID NO: 2671 - DNA, 461 bp, Turkey hepatitis virus
  2993D polyprotein gene, complete cds.1
ggcaagttgatatactggctctgatcacggactattctggtgttggtggacactctctccacaagtaggcgccgtggagttcatgctcgttctgaaccgggaatggcacaacccgtagtaggatcttgcctctgccacgtgcacctgcgcctgttgcttctagactatgggctgctaaggatgatcacagactcctttttggacaatctgtgtcaagtctactgttacatctgatgtacgctggaaatcctcgtactggaggcaatacctggaggtggtgctgaaatattgcaagccacaggtgtgtttctagtcttggtgccgctatcagatgtcgcaccctctacgggcaaatgtagaaccttagtggacgcgtgagatgggaatccacgcctggccatagactggctgataagctcgcggctgatcgagttgcaacagtaatcagttgatttgccact

SEQ ID NO: 2672 - DNA, 493 bp, Foot-and-mouth disease virus
  - type Asia 1, isolate1
cttgaggaatacttgtacaaacacgatctacgcaggtttccacaactgacacacacaccgtgcaatctgaaactccgcctggtctttccaggtctagaggggtgacactttgtactgtgcttgactccacgctcggtccactagcgagtgttagtaacaggactgttgtttcgtagcggagcatgatggccgtgggaactcccccttggtaacaaggacccacggggccgaaagccacgtcctaacggacccgtcatgtgtgcaaacccagcacggcaacttactgtgaaaaccactttaaggtgacactgatactggtactcaaccactggtgacaggctaaggatgcccttcaggtaccccgaggtaacacgcgacactcgggatctgagaaggggactggggcttctttaaaagcgcctagtttaaaaagcttctacgcctgaataggcgaccggaggccggcgcctttcctttaaactgttttaactta

SEQ ID NO: 2673 - DNA, 502 bp, Simian enterovirus J103
  isolate cg3697 polyprotein gene, complete1
aaaacgatcgttacccggctatctacttcgagaagcctagtaacaacattgaaactcttgagcgttgcgttcagcacagtaacccctgtgtagctttggctgatgagtctgggcactccccactggcgacagtggcccaggctgcgttggcggccaaccgatccgggcaaccgggtcggacgctcacttgtggacatggtgtgaagagcccattgagctagatagtagtcctccggcccctgaatgcggctaatcctaactccggagcaaacgcacgcaacccagcgtgtagtttgtcgtaacgcgcaagtctggagcggaaccgactactttgggtgtccgtgtttcctgttttaccttatttggctgcttatggtgacaatctagagttgttaccatatagctattggattggccatccggtgaatagatctcgatatattttattgcacagccttttatagcttgaattcataagtctcacttcaactcagaagtaatc

SEQ ID NO: 2674 - DNA, 506 bp, Foot-and-mouth disease virus
  - type SAT 2, isolate Buffalo 10 QE1
acgaaacgcgccgcctcttttggacttcttgtacaaacacgatcttgaagcaggaatcctcaactggcacacccgtgcaactgtaagtttcgcctggtctttccaggtctagagagatgagcagctgtactgagactaactccacaattggtctactagcgggtattagtaacactcactttgcttcgtagcggagcacatgagcgttgggaactcccccatggtaacatggacccaacgggccaaaagccacgcctcgtgcctcatgtgtgtgcaaccccagcacggcaatttgtttgtgaaacacaccttaaggtaacactgagattggtacttggtttctggaggcaggctaaggatgccctttaggtacccggaggtaacaagagacactctggatctgagaaggggaccggggcttctataaaagtgcccggtttaaaaagcttctacgcctgaacaggtgaccggaggccggcaccttttcccatctacaacttttatct

SEQ ID NO: 2675 - DNA, 507 bp, Foot-and-mouth disease virus
  - type SAT 2, isolate Buffalo 6 QE1
acgaaacgcgccgcctcttttggacttcttgtacaaacacgatcttgaagcaggaatcctcaactggcaaacccgtgcaactgcaagtttcgcctggtctttccaggtctagagagacaaacagatgtactgagactaactccacgattggtctactagcgggtattagtaacactcactttgcttcgtagcggagcacatgagcgctgggaactcccccatggtaacatggacccagcgggccaaaagccacgccttgtgcctcatgtgtgtgcaaccccagcacggcaacttgtttgtgaaccacaccttaaggtaacactgagactggtacttggtttctggagacaggctaaggatgcccttcaggtacccggaggtaacaagagacactctggatctgagaaggggaccgggacttctataaaagcgcccgttttaaaaagcttctatgcctgaataggtgaccggaggccggcaccttttctttttattaactttaaatct

SEQ ID NO: 2676 - DNA, 507 bp, Foot-and-mouth disease virus
  - type SAT 2, isolate Murchison Falls1
acgaaacgcgccgtcacttttggaacacttgtacaaacacgatctaatgcaggtttccttaactgacacacccgtgcaatttgaagtttcgcctggtctttccaggtctagagagacaacactttgtactgagactgactccacgattggtctactggcgggtgctagtaatgactttgttgcttcgtagcggagcatgcaagccacgggaactcctccttggtgacaaggacccgtggggccgaaagccacgttctctgaaccttgcatgtgtgcaaccccagcacggcaacactgttgtgaaacacactttaaggtaacactgagactggtacttggtttctggagacaggctaaggatgcccttcaggtacctcgaggtaacaagagacactcgagatctgagaaggggatcggggcttctgtaaaagcgcccggtttaaaaagcttctatgcctgaataggtgaccggaggccggcaccttttcctttaacactacttacttt

SEQ ID NO: 2677 - DNA, 508 bp, Foot-and-mouth disease virus
  - type O, strain O/KHO/IRN/L5/2010,1
acgaaacgcgccgtcgcttgaggaagatttgtacaaacacgatctatgcagacttccacaactgacacaaaccgtgcaacttgaagctccgcctggtctttccaggtctagaggggcgacactttgtactgtgcttgactccacgctcggtccactggcgagtgttagtaacagcactgttgtttcgtagcggagcatggtggccgtgggaacccctccttggtaacaaggacccacggggccgaaagccacgtcctaacggacccaccatgtgtgcaaccccagcacggcaacatttctgtgaaagctactttaaggtgacactgaaactggtactcaatcactggtgacaggctaaggatgcccttcaggtaccccgaggtaacaagcgacactcgggatctgagaaggggactgggacttctttaaaagtgcctagtttaaaaagcttctatgcctgaataggcgaccggaggccggcgcctttcctttaaactgtttcaactta

SEQ ID NO: 2678 - DNA, 512 bp, Foot-and-mouth disease virus
  - type Asia 1, isolate1
gcgcacgaaacgcgccgtcgcttgaggaatacctgtacaaacacgactcacgcaggtctccacaactgacacaaaccgtgcaacttgaaactccgcctggtctttccaggtctagaggggtgacactttgtactgtgcttgactccacgctcggtccactagcgagtgttagtaacagcactgttgcttcgtagcggagcatggtggccgtgggaacccctccttggcgacaaggacccacggggccgaaagccacgtccttgtggacccaccatgtgtgcaaccccagcacggcagctctactgtgaaaaccactttaaggtgacactgatactggtactcagacactggtgacaggctaaggatgcccttcaggtaccccgaggtaacacgcgacactcgggatctgagaaggggactgagacttctttaaaagtgcccagtttaaaaagcttctatgcctgaataggcgaccggaggccggcgcctttctccttaactaccacttctta

SEQ ID NO: 2679 - DNA, 514 bp, Foot-and-mouth disease virus
  - type O, isolate AMU_200, complete1
gcgcacgaaacgcgctgtcgcttgaggagaacttgcacaaacacgactcacgcttgtcttcacaactgacacaaaaccgtgcaacttgaagctccgcctggtctttccaggtctagaggggcaacactttgtactgtgattgactccacgctcggtccactggcgagtgcgagtagtggtgttgttgtttcgtagcggagcatgatggccgcgggaactcctccttggtaacaaggacccgcggggccgaaagccacgtcttaacggacccatcatgtgtgcaaccccagcacggcaaccacaccacgaaaaccacttcaaggtgacactgatactggtactcaaccactggtgacaggctaaggatgcccttcaggtaccccgaggtaacacgcgacactcgggatctgagaaggggactgggacttctttaaaagtgcccagtttaaaaagcttctatgcctgaataggcgaccggaggccggcgccttttccacaatttaatacttctttt

SEQ ID NO: 2680 - DNA, 516 bp, Bat pegivirus
  isolate PDB-303 polyprotein gene, complete cds.1
tcctttagaattaatggaacgctaggcttccggcccgaaagccgtggatctcccctgacagggttcttcgggtaaatcccggggggagtggtagcggtattagggtaggtcgtaaaaactgccccagtggggctacctagttgttaccggcaggacgaacggcgcgtcctgaaggactggcacggtccacaggtgtggtccctaccggtgtgaataaggggccgactcaagcggagtcgttaaactgaggctctagtgtcaagggtaacttgggcttgtgtacgtccacgtcgcttctagagttcaatgccagcactaggctggggcgagttgtcaagggcaacaggcgcgggggtggattattgttttccaccactcaatcgacactcgggtaatatgccatgctccctcccaggcgggcgtcgcgctgcaggcggcctagaggaaaaatccgaaaggtgacctcgggggggacctctcttctcttagcggtatgggtgtggtgttaccgcaacc

SEQ ID NO: 2681 - DNA, 520 bp, Goose megrivirus
  isolate HN56, complete genome.1
ttcgggacactggatgggcgactcggtggggctgccaccccgtcttgacttctcgttgttgaccctggaattctagaacattctcttgtcttctgcgtctggtccacggacggactaattggaatgtttattggttaagcctcgttctgaaatgccctagccaatgggctatagtaggatcttggtgtttccagtgaacctcttccgaccatagtagctagagttatggctgtgtaggatgtgggtaagaccgctttttgcgtatctcccacaagacaccggatcatgggtgtgtccgctggataaggctcgaaacctcccaactgacggtggtgctgaaatattgcaagcctaagttgtgtagaggcaagtagatgcccgccgcgacatctgtgatccgcccgtctgggttagtagtgtacctacatggacgtggggttgggaatccccacctagcataacactggttgatagacctgcggctggtcaagttactatggtataaccagttgaaatggct

SEQ ID NO: 2682 - DNA, 522 bp, Foot-and-mouth disease virus
  - type A, isolate 4235 polyprotein1
gggacgtctgcgcacgaaacgcgccgtcgcttgaggaagacttgtacaaacacgatctacgcaggtttccacaactgacacaaaccgtgcaacttgaagctccgcctggtctttccaggtctagaggggcgacactttgtactgtgcttgactccacgctcggtccactagcgggtgttagtaacagcactgttgcttcgtagcggagcatggtggccgtgggaacccctccttggcaacaaggacccacggggccgaaagccacgtcctaacggacccaccatgtgtgcgaccccagcacggcaactttactgtgaaaaccactttaaggtgacactgatactggtactcaaacactggtggcaggctaaggatgcccttcaggtaccccgaggtaacaagcgacactcgggatctgagaaggggactgggacttctttaaaagtgcccagtttaaaaagcttctatgcctgaataggtgaccggaggccggcacctttcttttaaaccacaactatcctt

SEQ ID NO: 2683 - DNA, 527 bp, Foot-and-mouth disease virus
  - type O, isolate O/K/52/19921
tttgagaaatgggacgtctgcgcacgaaacgcgccgtcgcttgaggagacttgtacaaacacgatctacgcaggtctccacaactgacacaaaatcgtgcaacttgaaactccgcctggtctttccaggtctagaggggtgacattttgtactgtgcttgactccacgctcggtccactggcgagtgttagtagtagtactgttgcttcgtagcggagcatggtggccgtgggaaccctccttggtaacaaggacccgcggggccgaaagccacgtcctaacggacccaccatgtgtgcaaccccagcacagcaattttactgtgaaaaccacttcaaggtgacactgatactggtactcaaacactggtaacaggctaaggatgcccttcaggtaccccgaggtaacacgcgacactcgggatctgagaaggggactgggacttctataaagtgcctggtttaaaaagcttctatgcctgaataggcgaccggaggccggcgccttttcactaaccactacttttt

SEQ ID NO: 2684 - DNA, 529 bp, Goose picornavirus 1
  strain goose/NLSZK2/HUN/2013, complete genome.1
ttctttgaaaagggtactgggggggtcgattctagacccccacctagcccttttccccgtcagtggggggcttactcactgggcatctgttaatctggcctaactagattgacaccactcccttggaacgtaactccacgctaactcactggctctacgcacagacacacggtctttctgctatccccggggaagataccagatggcgaccggctgtcccagcggcctagtagctactcgggttgagtacccaccacggttttgacgcctgctaaaattcaagagacagaggtaggggtgcttagtgtgtgggggaagttcccacaagcgaggcaaagcattgctccctcgcgtcaccgggtgcaaggtaaattggctggacttccgctctacccttgctactcgccctcttcggagggttcgaagtgacactaggtatacgcatggttgggaaaccatgcctggcctactactgggtgatagcctggcggcgggtccgtctcttggcttatacccgttgatttgggat

SEQ ID NO: 2685 - DNA, 529 bp, Foot-and-mouth disease virus
  - type O, isolate O/K/109/20001
tttgagaaatgggacgtctgcgcacgaaacgcgccgtcgcttgaggatgacttgtcaacacgatctacgcaggtatccacaactgacacaaaaccgtgcaatttgaagctccgcctggtctttccaggtctagaggggtaacactttgtactgtggttgactccacgctcggtccactagcgggtgctagtagtggtaccgttgcttcgtagcggagcatggtggccgtgggaattcctccttggtgacaaggacccacggggccgaaagccacgtcctgacggacccaccatgtgtgcaaccccagcacggcaactttaccacgaaaaccactttaaagtgacactgaaactggtactcaaccactggtgacaggctaaggatgcccttcaggtaccccgaggtaacacgcgacactcgggatctgagagggggaatgggactcctttaaagtgctcattttaaaaagcttctatgcctgattaggcgaccggaggtcggcgcctttccattaactatcactcactat

SEQ ID NO: 2686 - DNA, 532 bp, Foot-and-mouth disease virus
  - type O, isolate O/U/25/20061
ttgagaaaaggggcgtctgcgcacgaaacgcgccgtcgcttgaggatgacttgtacaaacacgatctacgcaggtatccacaactgacacagaaccgtgcaatttgaagctccgcctggtctttccaggtctagaggggtaacactttgtactgtgattgactccacgctcggtccactggctggtgctagtagtggtactgttgtttcgtagcggagcatggtggccgtgggaatccctccttggtgacaaggacccacggggccgaaagccacgtcctaacggacccaccatgtgtgcaaccccagcacggcaactttaccacgaaaaccactttaaggtgacactgaaactggtactcaaccactggtgacagactaaggatgcccttcaggtaccccgaggcaacaagcgacactcgggatctgagaaggggactggggcttctttaaaagcgcccagtttaaaaagcttctatgtctgtgtaggtgaccggaggccggcgcctttccatttaactattacccaccat

SEQ ID NO: 2687 - DNA, 550 bp, Foot-and-mouth disease virus
  SAT2/GHA/Tul/5/2018 gene for1
ttgtaaccgcacggtttgccttcctgggggaagtaaaacacccacaagcttgacagttttgcccgttttcacgagaaatgggacgtcagcgcacgtaacgcgccgccactttggaatacttgtacaaacacgatcttacgcaggtttcccaactggtacactcgtgcaacttggagtttcgcctggtctttccaggtctagagggacgacactttgtactgaaaccagctccacgattggtctactggcgggtgctagtaatgactgtgttgtttcgtagtggagcatacaagccgcgggaacccctccctggtaacagggacccgcggggccaaaagccacgttctttgaaccttgtatgtgtgcgaccccggcacggcaacactgttgtgaaacacatcttaaggtaacactgagactggtacctggtttctggagacaggctaaggatgccctccaggtaccctgaggtaacaagcgacactcaggatctgaggaggggactgggacttctataaaagtgtccagtttaaaaagcttctatgcctga

SEQ ID NO: 2688 - DNA, 555 bp, Picornaviridae sp.
  isolate zftwig06pic1 genomic sequence.1
ctgtgccttcctggtcataattggctccggctggttttgacttcggaacactggatgggcgattcggtggggctgccaccccttcttgctttttcggtgtgacattggaattctagacccttctttgtccctcgtgtctggtccacatacggactaaatggaatgtttgccagctaagcctcgttctgaaatgcccttgccactgggctgtagtaggatcttggtgtttctggtgaacctcttccgaccatggtagctagagctatggctgcgtaggatgtgagtaggaccactttttgtgtatccctcacaagacaccgggtagtgggtgtgtccgctggatatggctcgaaacctcccaactgaaggtggtgctgaaatatcgcaagcctaagttgtgtagaggaaagtagatgcttgccgcgacacttgcttcccacccttctctgggctagtagtgtacctgcgtggacgtggagttgggaatctccaccatgcatagcactggttgatagacctgcggctggtcaagttatcatggtataaccagttgta

SEQ ID NO: 2689 - DNA, 562 bp, Simian enterovirus 19
  isolate cg4006 polyprotein gene, partial cds.1
ccaccaacccaggtgggttttccgtcaagcacttctgtctccccggacttagtaccaataggctgtacccacggccgaaagggaaaacgttcgttacccggctacctacttcgagaagcctagtaacatcattgaatgtctcaagtgttacattcagcacaaccccagtgtagttcaggtcgatgagtcaccgaattccccacgggcgaccgtgtcggtggctgcgttggcggcctgcctgcgggtctcactcgcaggacgcttgattcatgacatggtgcgaagagcctattgagctaggtagtagtcctccggcccctgaatgcggctaatcccaaccacggagccatgcgctacaatccagtggtgttgtggtcgtaacgagtaattctgtggcggaaccgactactttgggtgtccgtgtttcctgttttatttaccttggctgcttatggtgacaatctagagttgtcatcatatagcgattggattggccatccggatatatcttttgtgtgatttacctcttgctaccaagcaattgtcacttgttaataatacc

SEQ ID NO: 2690 - DNA, 566 bp, Bat pegivirus
  isolate PDB-491.2 polyprotein gene, complete cds.1
cgtaggcgcctgggggttcgggtgcaagccccgaaaccgacccttacttcgaacaaccgttctagaacggctgggtcaactccccctttagtcaaaagcccagtgttgctggggtgccagggttcttagggtaaatcccggccccagtggatctgggaatatgataggaggagcggtgcggttcgaccaccgcacgggaccactgaccggcttgacgaagcggctagtagttgactagggcacggtccacaggtgtggcgtaccggtgtgaataacggcccgtctggagcgacagacgttaaactgaggggggtgtgaggatggcaacgcggcccgtgtacggggacgtcgctaaataccttcgggaacagctatgcgggttgtcaaccccagcggtggcgcggcctacctactgttggcaggtgccagttccctctcaccctcgcgaaagcagcacggggccccccagctggcgcagcgctacatgcggcaagaggaaaatccttcgggtgacctcggggggcatgtcccaaccaaacatgatactaggggtagcaactgccaag

SEQ ID NO: 2691 - DNA, 570 bp, Picornaviridae sp.
  isolate pst217pic01 genomic sequence.1
agatgtgtataacacacaggcccccttttcccgaccggtttggcacaccgggcggttaccctgattagatgtctgggaattgctggacttcagtggctattgctgctgtcttctggcttttctgaactgggcatctagttgggttctttgccatccacactctaattcccattacgttttctctaccccttgattggtctaactggttaagtgactccttgcctgcttttgactattcttggtgctggtggacactctttccacaagtagatggtatggagttcatgctcgttctgaaccgggaatggcacaacccgtagtaggatcttgcctctgccatactcatctgcgactgttacttctagaccataggctatataggatgatcttggacctctttttgagcatcctggtcaagccaactgtgtcttgcaacatgcacgctggaaatcctcgctagaatgaaatcctgatggaggtggtgctgaaatattgcaagccacatcggctttcattctcttggtgccgctgtgttgctacacaccccatgtgggcaaatgttggacctat

SEQ ID NO: 2692 - DNA, 579 bp, Murine kobuvirus 1
  isolate MKV1/NYC/2014/M014/0146, partial genome.1
gccaggtcgcatcgcctggttggtgaccaaactgctagatgctcctccctttccctcggggttggcgcaccgccatccctgcatcctccccccagcctgacatgctacaggctgtgcaagaaccccgcgaaagctgccaccgtggcaattgtgggtccccctcttgtcaaggcacagagtctttctcccttaaggctagacccctctgtgaattcagaggcggcaactagttgtgccactacatgcctcagacctcggtcgcggagtgctgttccccaaaccctgacactgccgcgtgagtatgctgcttggcaagcattgcctggatggtcgttccgctggggctgccaggtctggtaacagaccgctccagtgtgcgtagaccatctccagcttcggctggtgctcacaaggtaagactcggtgtaaggttcatgtgccaacaccctggaatgagtgaaaactctactgccctaggaatgctacgcaggtacccctgctcccttgggagccagggatctgagcgtaggctaattgtctgtcgggtagtttcatttcccaccctctagactgttcacc

SEQ ID NO: 2693 - DNA, 581 bp, Human rhinovirus A
  strain HRV-A43_p1224_sR3080_2008 polyprotein1
ttgtgtttgagtgttgtatactgttattacggtaaccttatacgccagttttatatcccccttaccccaatgtaacttagaagtttgtacataccgaccaacagtaagcaatcatccagattgtttaaggtcaagcacttctgttaccccggtcagcgttgatatgctccaacagggcaaaaacagcaatgatcgttatccgcaagatgcctacacagagcctagtagcactctagaagaattctggttggtcgctcagttgcaaacccagcaatagacctggcagatgaggctggacgttccccactggcgacagtggtccagcctgcgtggctgcctgcacactcctttggagtgtgaagccttaatttggacagggtgcgaagagccgcgtgtgctcatcttgagtcctccggcccctgaatgcggctaaccttaaacctgcagccattgtttgcaatccagcaaatatgtggtcgtaatgagtaattgcgggatgggaccgactactttgggtgtccgtgtttcttttatttccatttgtatgcttatggtgacaatatatgatatatattgacacc

SEQ ID NO: 2694 - DNA, 584 bp, Avihepatovirus A
  strain SH02 polyprotein mRNA, complete cds.1
ttcagctggtatggcatgcatgcatcgactgcttgggggtgtccctgacccccttaattcaacgtctagcccacgatacgggcaccctatccagtttatatccctttacctcccatggactgacttgtatggatttggatctaaattggattatcatttatttgtggtggttagccaaccatgctctggtgcaatgattccatgtattcatttggctaggtgccgacctaggaggtggtgctgaaatattgcaagccactggtgtcgttacttagcatctggatgcatggggttgattgcattctgtacagaggaaggctagcttatgccttgggctaatagtctttgttgtgaaacggattaccggtagtagcatcttagaccaccaaggttataggtgagtgtgtggtctagagtaggcacacatctgtccaggcacatgtacattgttacaactgctccagactagttcctgagggacagatgttgtggggggcttgggaaaacccccttaacctacactgcctgatcgggtcgcggctggtcgagtcccacacactataataccagtagaccttcatgca

SEQ ID NO: 2695 - DNA, 584 bp, Ljungan virus
  64-7855 polyprotein mRNA, complete cds.1
ggtcgaagccgcttggaataagactggtgctgttcacagtgtgttcacgatctatgcaacttctgtcttccatctgtgtctatgcaggtggataagggctgtacccgggcggtcctactctccacaggggcctgcgtaggtggctttcacctctggacagcgcaccccaccccgcctactgagtgaagggcatacggcttttctattgcgaattgtattgaagtttaggattaggtgtagcgaccacatgtgtgccagcggatctcccctggtggtaacaccagcctctgggcccaaaaggcatgtctctgaccacacatgtgcacaaccccagtgataatcctttttagtaaatgcttagtaacagtggattagcagtgctcctcaagctcagtagggcttaggtatggcaggttgaaggatgccctggaggtacccgcaggtaacgataagttcactgtggatctgaccaggggcccaccgggaattccccgggtagaagccttcgggccttgggttaaaaaacgtctagacctgtcccccagagggatctggggtttcccttttaaccccaattattcaat

SEQ ID NO: 2696 - DNA, 587 bp, Leveillula taurica associated picorna-like virus 1
  isolate1
caatagggtaacctattgtaacttggacttattactttatcatatagtttattgtttaaatcggaactagtgtattatgtttaaataatatgtgttagcctttaaactttattctattatttgataaggttcaataagtttgtatgactagatccagtaactattgctcaattttaaaacaatcttaaaaatctgtatgaaacgcagatcaatttaatattttagaactacccgtatttatataggctcttctaaaatatgaattgttatcgaaagataccttattattggttgattaatttcttaatgtgcatggtggcacctttaataagtagatttccgtcattctctatttagagtacttttggacgttaactaatgctccattcagtctagaatgtatgataattaaactctagattgtataaactatcattatcgcaagtaccacatcaaataaaacttatgaaaaaccgcaattactcgatgataactttgctcctgatgttagtgatattactaatactaactttctcgaggaaagggtagtcgaaactagggaagcatatccatcaacatctcttact

SEQ ID NO: 2697 - DNA, 591 bp, Feline sakobuvirus A
  isolate FFUP1, complete genome.1
tcacgcgcttttccggtggtcacccaccgttagggagcgccagcgttcgcgcttccgctaccaggtgacacactcctttcccctcccccattcccgttcccatcctctggactggtttctcctcacgattgaccagcagctgggagctgttaccagacgttggacagtaagtcccggatgcactatagggctggtggctagtgcttggtaagcactcaacgccatacctaatgtgtacctcggcttgccctcctggtcgtggtgaccggctgtttctcttcccttggctctagacgggctggtgtcctaccaccaccgttgcatgcagacctccccctgcgcactcgaacgccctgtcccagcagggttagtatgtgctgtgcagatctgcatgtgacaccccatccactggtagagcaggaagttgccctagctaacgcggcaagtattactttccgctacacgtccttgagattcctcggacctctggaactagggtgactgtgggcttgggaaaacccaccttggtcctgtactgcctgatagggtcgcggctggccgaccagtggatgtagccagttgttttgggat

SEQ ID NO: 2698 - DNA, 593 bp, Foot-and-mouth disease virus
  - type O, strain O/KAB/AFG/LI-709/2009,1
acgaaacgcgccgttgcttggggaaaacttgtacaaacacgatccatgcaggtttccacaactgacacacaacgtgcaacttgaaaccccgcctggtctttccaggtctagaggggtgacactttgtactgtgattgactccacgctcggtccactggcgggtgttagtaacaggactgttgtttcgtagcggagcatgatggccgtgggactccccccttggtaacaaggacccacggggccgaaagccacgtccagacggacccatcatgtgtgcgaccccagcacggcaactttactgtgaaaaccactttaaggtgacactgatactggtactcaaccactggtgacgggctaaggatgcccttcaggtacctcgaggtaacacgcgacactcgggatctgagaaggggactgggacttctttaaaagtgcccagtttaaaaagcttctatgcctggataggcgaccggaggccggcgccttttcttttaccactactaaatttatgaatacaactgactgttttatcgctctactgcacgcttttagagagattaaagcacttttttcgtacacggacacaaggcaag

SEQ ID NO: 2699 - DNA, 593 bp, Pacific black duck megrivirus
  isolate1
acgatggcgtgacgaaccatcgtgcgtgactctgctaagtcgtctgtgcctctcgggcatgttgtggctccggctgcaacatgcttgggacattggatgggcggcttggtggggcttagtcaccccgtttaggactacccggtttgatttctttattggattttgggactggtccaccgacggactaattggtatctgcaaggactaacagcctcgttctgaaatgccctagccaaagggacgtagtaggatcttggtgttccccttgtagctctgccgaccatattagctagagctaggactgtgtaggatgttctagacctctttttgagcaatctaggacaagactccggatctagatgtgtacgctggataaggctcgaacactcccgcgcgttaggtggtgctgaaatattgcaagccgacgtgtgtgtagagttagtagaagcccgccgctacatcgaaatccgccccttccggggttagtagagtacctgcatggatgtgtggttgggaatccacaccagtgcctagtgctggttgacagacccgcggctggtcgagttaatatggtataaccagttgatttggca

SEQ ID NO: 2700 - DNA, 610 bp, Human rhinovirus C
  isolate LZ269, complete genome.1
ttaaaactgggcatgggttgaccccacccatgccacccaagtggtgtagtgctcttgtatttcggtacatttgcacgccagtttgccaccccttaccccaagtaacttagaagcatgtaactttgatcaatagggagtggtaagccataccacttgagatcaagcacttctgtttccccggctctagaggaatagaccttgcaaagggttgaagccacgaaagtcgttatccgcacacatactacgcaaagcttagtatttccttgaaagctcgccggttggtcactccgttaataccccattaacagacctggcagatgaggcaggaaactccccactggcgacagtgttcctgcctgcgtggctgcctgcacaccctctcgggtgtgaagccgactagtggacaaggtgagaagagccccgtgtgctatgtgtgagtcctccggcccctgaatgcggctaatccaaccccacatctgtcgcacacaatccagtgtgtaggcagtcgtaacgggcaactgtgggacggaaccgactactttgggtgtccgtgtttcctttatttcttttatgaatgcttatggtgacaatatcgagtaatattgttacc

SEQ ID NO: 2701 - DNA, 611 bp, Rhinovirus C
  isolate 3430-MY-10, complete genome.1
ttaaaactgggttgtggttgttcccaccacaatcacctacgtggtgttgtagtcttgcatttcggtgcatttctatgccagttttatctccccagcccccgtaacttagaagaaaagaacacagaccaataggaggtggtcacccagaccacttacggtcaagcacttctgtttccccggttgatctagatatgctttacccgaggcaaaaactaaatcaatcgttatccgcaaagtgcctacgggaagcctagtagcactctgaaagcctatggctggtcgctccattgcaaacccagcaatagacctggcagatgaggctagacgtaccccaccagcgatggtggtctagcctgcgtggctgcctgcacaccctcatcgggtgtgaagccagaaagtggacagggtgtgaagagcctactgtgctcactttgagtcctccggcccctgaatgtggctaatcctaaccctgcagctgttgcacacaagccagtgtgtatgcagtcgtaacgagcaattgcgggatggaaccaactactttgggtgtccgtgtttctctttattccttatgttgacctatggtgacaagtgtgcaattcacgtttgtcact

SEQ ID NO: 2702 - DNA, 613 bp, Human rhinovirus A39
  strain ATCC VR-340, complete genome.1
ttaaaactggatctgggttgttcccacctagatcacctacagggtgtagtacactgttattacggtaactttgtacgccagttttatatcccctccccgatgtaacttagaagcaagcacaaacgtccaataggcggtgattatccaaatcacttacggacaagcacttctgtctccccggcaactgctgatatgctccaacagggcaaaaacagcggaagtcgtcatccgcaaaatgcctacgcaaagcctagtatcactctagaaggtgtgtggttggtcgctcagccgtgaacctgacggtagacctggcagatgaggctagaaataccccactggcgacagtgttctagcctgcgtggctgcctgcacaccctcacgggtgtgaagccattcattggacagggtgagaagagcccagtgtgctcattttgagtcctccggcccctgaatgtggctaaccttaaacctgcagccaatgcacacaacccagtgtgtatttggtcgtaacgagcaattgcgggatgggaccaactactttgggtgtccgtgtttctttttattcttatcatattgcctatggtgacaatatatactgttatatattgttatc

SEQ ID NO: 2703 - DNA, 615 bp, Porcine pegivirus
  strain ND/33/2017 polyprotein gene, complete cds.1
ccgctacccccccagcccgtgtaccggccctcgggccgcacgggatggggggggtagcgggggccggaggcccccgcgttctagaatggtgtgatcggttgccgctccagcggaaagcgggcgggatctagtggttagggttgttcgcgtaaatcccacactagtggtacgctcgtataacgtgggagcagccgggggggtcggccccccccctggcagctgctgagcaccggacgaagcgcggggggtgaacgctaacccgcagcccgggatgccaacgttaggcacgtcttggctggaagacgttaaacacagggccctccctcaaccccgatccgagaccagagttcaaggtacgccgcccttttaaaggcgttactcgtccaataggtctctccggcgggttgtcaaaccttgctggttccggtgacggttacgaggcagggcggggtggggatttaaacccccatccggcacgggggtaccaagctcggcacgcccagcacgcgtggcgtaggggaaaaatcctgcgggtgacccctggtaccataaagtaattaacatgagcatgccgctagggtgtgctttttccttccttgggaaggcggtggcacc

SEQ ID NO: 2704 - DNA, 615 bp, Human rhinovirus 45
  strain ATCC VR-1155, complete genome.1
ttaaaactgggtcgtggttgttcccaccacgactatctacggatgtagtgctcttgtattccggtacgcttgcacgccagttttgtcacccccccctacattgtaacttagaagattaacacaaagaccaataggcggcaatgaaccacattgtcaacggtcaagcacttctgtttccccggtcaatctagatatgctttaccaaaggcaaaaactggagcgatcgttatccgcaaggtgcctacgggaaacccagtagcattctttatttgatctggttggttgctcagccgttaaacccaaacggtaaacctggcagatgaggctggaagatccccaccagcgatggtgttccagcctgcgtggctgcctgcacacccgaaagggtgtgaagccttttcaaagacagggtgcgaagagtctactgtgctcaccttgattcctccggcccctgaatgtggctaatcctaaccccgtagctgtggtgtgcaatccagcacattcgcagtcgtaatgggtaactgcgggatggaaccaactactttgggtgtccgtgtttctctttttccttttatatatgcttatggtgacaattatacggatatagttgtcatc

SEQ ID NO: 2705 - DNA, 615 bp, Human rhinovirus C
  strain 024, complete genome.1
ttaaaactgggctcgggttgtacccacccgagctgcccatgtggcgtggtgctcttgtatcccggtacacttgcacgccagtttgcctctccttaccccgtaacatatctagaagaatgtgcataacggaccaataggtggtggcaacccatgccactgacggtcaagtacttctgtttccccggtgtgatgtggaatagactctctcagggttgaagccataagcatcgttatccgctacgtgcctacgcaaaacctagtagcattttgaagcttacttggttggccgctcagccactaacccgtggtaggcctggcagatgaggctgggcgcaccccactggcgacagtggcccagcctgcgtggctgcctgcccctctttgaggggaagccatttaagtgacaaggtgtgaagagtctcgtgtgctccacgtagaatccttccggcccctgaatgtggctaatcctaaccccgcagctattgcacacaatccagtgtgttgatagtcgtaatgggcaactgtgggatggaaccaactactttgggtgtccgtgtttcctgttttctttaaatacttgcttatggtgacaaatagtgtatactgtttgacacc

SEQ ID NO: 2706 - DNA, 616 bp, Equine pegivirus 1
  isolate C35 polyprotein gene, complete cds.1
gacgcgcatcccgggtgaaagccccgggcgtacgacctggttcgggatgattcccgttctcagtgcggaggccccgcaaaccgagccgccctgtaggcaacttctagaatggggagttaactcctggcactggcccgaagcatgaactgatcgcggtggcagggttcttcgggtaaatcccggccgcgtgttgtgattgtgttagggcaggtgacagtcggcagggtcgaccccctgcttcaggaccactgtcttcctggacgaccgttgctgaaaaagggccgccacggtctgtagctcgccgacgcttctaattcaggccggaggaccacgctccgtaatcgagcccaagtactcaaaccccagcacccctgggtcacgccctacgccgcccttttaacgcttcggctaatagggtctatccggcgggttgacaaagggcgcagggttacctggtactacgagcttgggtgtccctgggagtaatcccagggtgccatgctgcagcgcaggcgggcgagggtggtgcctcggcctaggggaagagcgcaagtgaccccgtgctgcataaatcccccccctttttttctacatgggtgttccatgtgccgccaag

SEQ ID NO: 2707 - DNA, 617 bp, Pegivirus K
  isolate PPgV_903/Ger/2013 polyprotein gene, complete1
ggctccccccccacctcgcgcggcccgagggccgatacgcgggttgggggggtagcgggggccggaggcccccgcgttctagaatggtgtgatccgtcgccgctccagcggaaagcgggcgggatctagtggttagggttgttcgcgtaaatcccacactagtggtacgctcgtataacgtgggagcagccgggggggtcgaccccccccctggcggctgctgagcaccggacgaagcgcggggggtgaacgctaacccgcggcccgggctgccaacgttaggcacgtcttggctggaagacgttaaacacagggccccccctcaaccctgatccgaggccagagaccaaggtacgccgcccttttaaaggcgttactcgtccaataggatctctccggcgggttgtcaaaccttgctggccctggtgatggttacgggagggggtggggcggggagtagaagccccgcccggcatgggggtaccaagctcggcacgcccagcacgcgtggcgtaggggaaaaatccttcgggtgacccctggtaccataaagtaattaacatgagcatgccgctagggtgtgctttttcttccttccttgggaaggcggtggcacc

SEQ ID NO: 2708 - DNA, 617 bp, Picornaviridae sp.
  isolate LoPV-1, complete genome.1
gccccgacgagtcccgtgggatacctggtacgtgccaggaaaatcccacgggactcgtcggggctttacccctaatttcaacgttggtccacgaaacggccgttctttcttttttcttctattttcaatcttgactccgcactgatcttttggttctagacacaggcgcgtttggttatagagtaggatttggatatagttatgagagggttagccaacccattctgaaccactttaagtatgtcaatctgaattcatcagtaatatagcacaggaggtggtgctgaaatattgcaagccactgttttatttatatgaagaattcaagaacctacttaaggtggtgatgaaaaggctaggtttatccatagtaatcccttgttctgaaaaggtaatgcacagtccttagtaggatcttgggctctgcaactggctctaaaccgaccaatctaggtagaggcactaggtgtaggacttgccatattgtattacaatctggtaccgacaaaatgtctggaaactccacactgagggtgataggggggggccccttcacagttgtgctactgcttgatagagttgcggctggtcaacttagattggtataaccagtagaa

SEQ ID NO: 2709 - DNA, 620 bp, Foot mouth disease virus
  A12; L, P2, and P3 polypeptide coding1
taccgcccatcccggtgttaaagggtgtaaccacaagatgcaccttcgtcccggaagtaaaacggcaatttcacacagttttgcccgttttcacgagaaacgggacgtctgcgcacgaaacgcctgtcgcttgaggaggacttgtacaaacacgatctaagcaggcctccccaactgacacaaaccgtgcaatttggaactccgcctggtctttcctggtctagaggggtgacactttgtactgtgtttggctccacgctcggtccactggcgagtgttagtaacagcaccgttgcttcgtagcggagcatgatggccgtgggaactcctccttggtaacaaggacccacggggccgaaagccacgtccaatcggacccatcatgtgtgcaaccccagcacagcaacttttctgcgaaactcacttcaaggtgacactgatactggtactcaaacactggtgacaggctaaggatgcccttcaggtaccccgaggtaacacgcgtcactcgggatctgagaaggggactggggcttctataaaagcgtccaggttaaaaagcttctatgcctgaataggtgaccggaggccggcaccttttctttacagccactgacttt

SEQ ID NO: 2710 - DNA, 622 bp, Human enterovirus C118
  strain PER161 polyprotein gene, complete1
ggacgtcagtacaccggcattgcggtgcccttgtatgcctgttttatattccccccctgtaactctagaagaaaatgaactctgagctcaacaggcgttacgtttccagcgtgactacgagcaagcacttctgtttccccggttgcgccctatatgctgtgtgaacggcagaaaggggcaaaatcgttatccgcttgactactgcgggacgcccagtatcaccatggattgatttgagagttgcgctcagcacatccccagtgtagcctgggccgatgaggctccgaattccccacgggcgaccgtgtcggagcctgcgttggcggcctaccctcgcctcacggtgagggacgctcacttcatgacatggtgcgaagagtctactgcgctagttaagattcctccggcccctgaatgtggctaatcctaaccactgatcctgtaagtacacgccagtgcccagcaggtcgtaatgcgcaagtcggtggcggaaccgactactttgggtgtccgtgtttcctttatttccttattgaatgtttatggtgacaattgttgagtacagttgttgccattattgcattctacaaacagtgaacaaaccacacaccaatatagcaca

SEQ ID NO: 2711 - DNA, 625 bp, Eotetranychus kankitus picorna-like virus
  strain EKPLV.abc9,1
cctattgagaagtgaactttcattttctatacaaagtgctatatttcgagcgacagtgtaaaactaaacaatagtgtacataacttattactcaaaatatagttaagacaaaagtcctctggaccccagtccagaggatctttgtcttaactatattttgagtaataagttatgtacactattgtttagttttacactgtcgctcgaaatatagcactttgtatagaaaatgaaagttcacttctcaataggagtatgtacttagtagattatataacagctgattattattggctgaaataatccgtaataatcgtaagtcgattatataagactacacgctcattttgtggttatttcaaatttaacaacttttgaaaccactttcattttaagatgtgtgttctatttatctagacgcatattcatattcacttgtttagtaatttcaccctactaaactcgtattcacgatacgtattttccagaattagtttactaatgagattatacgcattaacattttcgttagacttttgatacatacaaatctaacccttgtttggtaggcaagtacaacctactggtttcccgagacctatgaggggcccaataaatatgaaag

SEQ ID NO: 2712 - DNA, 625 bp, Coxsackievirus
  A16, strain CVA16/Homo sapiens/VNM/11.1/20141
gctctgcagatatcaatagcaggcatggcgcgccagtcatgtctagatcaagcacttctgtctccccggatcgagtatcaatagactgctagcgcggttgaaggagaaaacgtccgttacccggctaactacttcgagaaacttagtagcatcattgaagctgcggagtgtttcgctcagcactcccccagtgtagatcaggtcgatgagtcactgcactccccacgggcgaccgtggcagtgactgcgttggcggcctgcctatggggcaacccataggacgctctaaagtggacatggtgcgaagagtctattgagctagttagtagtcctccggcccctgaatgcggctaatcctaactgcggagcacatgccctcaacccagggggtggtgtgtcgtaacgggcaactctgcagcggaaccgactactttgggtgtccgtgtttctttttattcttatattggctgcttatggtgacaattgagagattgttaccatatagctattggattggccatccggtaaccaacagagctattgtttacctgtttgttggatacgtccctctcaatttcaaagtcattaaaactcttgattatatattactcctcaactgtgagaa

SEQ ID NO: 2713 - DNA, 627 bp, Duck hepatitis A virus 1
  isolate JX1405, complete genome.1
tatgaaagtaactggaaactgggaggatttcagggggaggtaaaaaaggtatgacaagggtgcatcgactgcttgggggtgtgcctgacccccctaattcaacgtctagcccacgatacgggcaccctatccaatttgtatccctttacctcctatggacagacttgtatggatttggatctaaattggattatcctttatttgtggtggttagccaaccatgctctggtgtaatgattccatctgttcatctggttaagtgccgacctaggaggtggtgctgaaatattgcaagccactagtatcgttacgcttggcctctggatacgtgggattaattgcattctgtacagaggaaggctagtctatgccttgggctaatggtctttgttgtgaaacggattaccggtagtagcatctcagactaccaaggttgtaggtgagtgtgtggtctagagtaggcacacatctgtccaggcacatgcacattgttgcgattgctccagactagttcctgagggacagatgttgtggggggcttgggaaaacccccttaacatacactgcctgatagggtcgcggctggtcgagttcccacacactataataccagtagattttcatgca

SEQ ID NO: 2714 - DNA, 630 bp, Duck hepatitis virus 1
  strain GHZ04, complete genome.1
ttttgaaagccgggtgcatgcatggccattttccagcacaggttcagctggtatggcatgcgtgcatcgactgcttgggggtgtccctgacccccttaattcaacgtctagcccacgatacgggcaccctatccaatttgtgtccctttacctcccatggattgacttgtattggatttggatctaaattggattaccctttgtttgtggtggttagccaaccatgctctggtgcaatggttccatgtgttcattctggccacgtgccaacctaggaggtggtgctgaaatatcgcaagccactagcgttattacacttggcctctggacacgtgggattaattgcattctgtacagaggaaggctagtctatgccttgggctaatggtcttcgttgtgaaacggattaccggtagtagcatcttagactaccaaggttgtaggtgagtgtgtggtctagagtaggcatacatctgtccaggcacatgtacattgctacgattgctccagactagttcctgagggacagatgttgtggggggcttgggaaaacccccttaacctacactgcctgatagggtcgcggctggtcgagtcccacacactataataccagtagattttcatgca

SEQ ID NO: 2715 - DNA, 633 bp, Rhinovirus B
  isolate BCH214, complete genome.1
ttaaaacagcgggtgggtatcccaccacccgacccactgggtgtggtacactggtactttgtacctttgtatgcctgtttgcatcccttttcccttcacctaacatcctcccccaaagtatattttgcggtaacgttagaagaagtgaactcagtgcaacaggaagtatcaccaccagtgatataacgcacaagcaattcttgttccccggagctggatatagactgctaacgtggtcaaaagtccttaaccgttatccgccagctaactgcgagaagactagtaacatcatgcacatttctagacgttcgatcaggtgaataccccattcactagtttggtcgatgaggctgagagttccccacaggtgactgtgtctcagcctgcgtggcggccaacccgacttatgtcgggacgcctattaatggacatggtgtgaagatcctattgcgcttagctgtgagtcctccggcccctgaatgcggctaaccttaaccccggagccttgtggtgcaaaccagcatttgcaaggtcgtaatgagcaattctgggatgggaccgactactttgggtgtccgtgtttcctttattcttattatttgtgtttcatggttacaagcatagtttgtaatc

SEQ ID NO: 2716 - DNA, 636 bp, Chicken megrivirus
  strain chicken/CHK-IV-CHV/2013/HUN, complete1
ttcccgaccggtctggcaaaccggacggttatcctggttagatgtctgatggttgctggaacgtggtggctattgctgccaccttctggcttcctttattgggcatctagctgggtcctttgccatattccatctaactctcttcccattttctattacccaggcttgttgtaactggtaagttgactcactggcttcgttttgagactactctggtgctggtggacactctttccacaagtggattgtatggagttcatgctcgttctgaaccgggaatggcacaacccgtagtaggatcttgcctctgccataccaatctgcgcctgttgcttctagactatgggctgctaaggatgatcttggaactcctttttggatattccggttcaagtcaactgtttcatctggtgcacgctggaaatcctcgtttctaggtcttgtctggaggtggtgctgaaatattgcaagccacggatggttcctaggacctggtgccgctatcagatggtacaccctctatgggcaaatgttgaaccttagtggacgcgtgagatgggaatccacgccggccatagactggctgataagctcgcggctgatcgagttgcaacagtaatcagttgatttgccact

SEQ ID NO: 2717 - DNA, 642 bp, Melegrivirus A
  complete genome.1
ttcccgaccggtctggcaaaccggacggttatcctggttagatgtctgatggttgctggaacgtggtggctattgctgccatcttctggctgcctttattgggcattctagctgggttctttgccaaaattcccatcttattcttattcccattttccttacccaggcttatttacaactggtaagttgacccactggttttgttcttggacttctctggtgttggtggacactctttccacaagtaagtattgtggagttcatgctcgttctgaaccgggaatggcacaacccgtagtaggatcttgcctctgccacatttacttgcgcctgttgcttctagactatgggctgctaaggatgaccgcagacccctttttgggcaatctgtgtcaagtctactgcttcgtctggtgtacgctggaaatccctgttctggatgcctatgcttggaggtggtgctgaaatattgcaagccacaagcatacctctggactcggtgccgctaccaggtgttgcaccccttgtgggcaaacgtagaaccttggtggacgcgtgagatgggaatccacgcctggccatagactggctgataagctcgcggctgatcgagttgcaacagtaatcagttgatttgccact

SEQ ID NO: 2718 - DNA, 643 bp, Turdivirus 3
  strain 00742, complete genome.1
gaaagggggcccggcggggcaatacccgtcggtccctctttccgtccaagccgcggacgttaaattgtggcacggttgtgcttaggcgcaaccctgctactaatggcggtatccctgcccttagtatgcatgtttgtatgaatggaatctgtagtgatgccccgctttggggtctcagaaacacactacagtgacggctagagttcctctactccggctaccttagtagcgagcattggaagtatattgtgaacagggttccacgcccgataaaggctgatattcccgctcatggagtggacctaggtaactagggccatgagtgtgtgtgaatcagcacccgcaagggataacagtatatggaaggtgctcgtgaaacggcaagtggagttagcagcagctctcagcctcaaggtcagcttctagacatgtgccgcaggtaccccgcaagggatctgagcggtagctaattagtccctggaagttggctgactttcttcttatttctttcttattgtgaattgtgtgcattggcattctttagagtttgggagttgtcttctattggatttatatcttactctgtatcacactcaatcacggctctttggtcagttaagaaaaccatttatagagtaataaa

SEQ ID NO: 2719 - DNA, 646 bp, Turdivirus 3
  strain 10878, complete genome.1
gaaagggggcccggcggggcaacacccgtcggtccctctttccgtccaagccgcggacgttaaactgtggcacggttgtgcctaggtgcaaccctgctactaatggcggtacccctgcccttagtatgcatgtttgtatgaatggaatctgtagtgatgccctgctttggggtctctaaaacacactacagtgatggctagagctcctctactccggctaccttagtagtgagcattggaagtatattgtgaacagggttccacgcccgataaaggctggtattcccgctcatggagtggacctaggtaactagggccatgagtgtgtgtgaatcagcacccgcaagggatagcagtatatggaaggtgctcgtgaaacggcaagtggagttagtagcagctctcagtctcaaggtcagcttctagacatgtgccgcaggtaccccgtaagggatctgagcggtagctaattagtccctggaggttggctgactttcttcctatttctcttttcactgcgaattgtgtggattggtattctttagagcttgggagttgtctcatattgaattcatatattttactctatactacactcaaacacggctctctggtcagttaagaaaatcatttatagaataataaa

SEQ ID NO: 2720 - DNA, 651 bp, Picornaviridae sp.
  isolate w3chi091pic1 genomic sequence.1
cggcctcttttcccgaccggtctggcaaaccggacggttatcctggttagatgtctgatgattgctggaacatggtggctatagctgccatcttttggctttctctattgggcatctagctgggttctttgctaatcttccatcttactcttatccccattttctattacccaggattgttcgtaactggtaagttgactaactggctatgttttctggctcttctggtgctggtggacactcttttccacaagtaggttatgtggagttcatgctcgttctgaaccgggaatggcacaacccgtagtaggatcttgcctctgccacatatacttgcgcctgttgcttctagactatgggctgctaaggatggctacggacctctttttgagtaatccgtgccaagtcaactgtttcactctgatgtacgctggaaatccttgttttggatgttatgtccggaggtggtgctgaaatattgcaagccacggacattcttctgaacctggtgccgctatcaggtgttacaccccttgagggcaaatgttgaaccttagtggacgcgtgagatgggaatccacgcctggccatagactggctgataagctcgcggctgatcgagttgcaacagtaatcagttgatttgccact

SEQ ID NO: 2721 - DNA, 652 bp, Duck hepatitis A virus 3
  strain DN2 from Viet Nam, complete genome.1
tttgaaagccgctgtggtgtagaccattttctggcgcttggctcagccagtatggtctcaccacagtctgcttggggttattcccaaaccccttaattcaacgcctagtcctatcaatataggaccccctatccacttattttacctttaccctccattatatagtctgtttcctggctattgactttggcttttgtttttgacctacgtctaagtctcaatggattttgtagtggttagcctaccaccccttggccactaatttttggctctctgtttggggacccaccacatcttggaggtggtgctgaaatattgcaagccacttgatatgtgtgtgtcctccagacatgaagctttgatgcagtggttttggacaaggaaaggctagtgtttggtctgggcacaaacccttgttgtgaaacggattaccggtagtagcatctagtggttccagtccataacatgagtgtatggtctagagtggacacagcttggatacagacaccttcagtattactgggtgttccagactagttcctgaggtaccaagttgtgaggggctatgggaaaacccctttgatccacactgcctgatagggtcgcggctggtcgagtcccatacactataataccagttgattttcatgca

SEQ ID NO: 2722 - DNA, 653 bp, Duck hepatitis virus 1
  strain 04G, complete genome.1
gaaagcggccactgtgtagccattttctagcgcttggtacagctagtatggttacacagtgtgcgtcagcttggggccattcccaggccccttaattcaacgcctagctctggcgatacagagccccctatccaattctatgtcccttatcctccacaggttgattgtctttcttgttctgactcaactgcctgttgtattggacttctattggattacccttttgtatggatggttagccaaccatgctctggttactagccattctatggcaggtttggcttgatactggtggatggaggtggtgctgaaatattgcaagccacgtctcccattgtcaatccaacccatcatggaatgtagttggtaattcctgtacagaggaaggttagtgtataagagtgggtctaataccattgttgtgaaacggattaccggtagtagcatccttggtatccattcttatcatgagtgtgtggtctagagtagacatgtattctcacaggtgcatgcagcattgctgagcactccagactagttcctgaggtgggaaatacatggggggcactgggaaaacccccttgatctacactgcctgatagggtcgcggctggtcgagtcccacacactataaaccagttgatttgcatgca

SEQ ID NO: 2723 - DNA, 654 bp, Sicinivirus sp.
  strain RS/BR/2015/7S polyprotein gene, complete1
tgcaacccccactagtactcgtgcacatccaatggtgattctgccctggcagcatctaagtgcccagggagctcaactggtaacagttgccctggggcccaaaaggctaggtggcaaggacctggtcaagtaaggggttcccaccccgagctgaacccgcggtcctgaagctaccctttagatggaggtttcgcacccgattgccattctttttgcctgaagaacctggctggaaacatttagcccacggatttgctggtttgtggtgattagtagaccccctggaggtacccgttttggatctgaccagggacccgtgactatgccgttccggtaatccgggtttaaaaccatgaacgtcaccacctatcttcttttccttgctttgaattcttttatctgagagtagtgaacgagtgttgatgttccctgacttttgcatttggtctgcattctcagttatacggtttgactgggctgggttgtttatttagatgtttctagagtctctgttggtagctattacacttgttatagtagttgcttcccccagtgagcttcatcagttatttactatttgtgtttataatttcgccttaatcttcctctggctggttgaaatcctagagcttcctaattaccctgccatccaac

SEQ ID NO: 2724 - DNA, 654 bp, Tupaia hepatovirus A
  isolate TN1, complete genome.1
gtttttcccggacccctctttggacaaccttggtggggggttgtaaattaccccaccctcgtttgcctagagtttaggctaaattccctatagtaccctttatatgtaaatatcaattcctgcaggttcaggtttcttgaatgtgtctctctttaagagcactcattttactctcagaatttctctagagtccagacacttgagggctctttttctcctgcactatcatctcgattccgggctctcgtggtgccaatggaacgaccgatgcgcacgtcggggttaacccacagattagctgtgggctgtagttgctaaaagccacgatctctgaatgccctctttgaatgggggtggtattaactgaacacatgaaaccacattgatcttgctgggagggtaggctacgggtgaaaccctccatattaatactcatattgagagatatatctggtaggctaatgttggcggataaggctgagtttcacgacaaaaagccttcaacgcctgtggaacaggtctcaccagcagcatgccttgtggcgtagtgtgctagggccatcttcatttcaggtgggagctaggagactctccccgtaagggttggaggggtagttcaggtgcatttaggtttttccacattcaataaaaaca

SEQ ID NO: 2725 - DNA, 657 bp, Chicken megrivirus
  strain RS/BR/2015/2R polyprotein gene, complete1
tttctgaaggcctcttttcccgaccggtttggcgcaccggacggtcatcctggttagatgtctgatggttgctggaacgtggtggctattgctgccaccttctggcttcctctattgggcatctagctgggtcctttgccacattccatctcactctttacccattttctattacccaggcttgattgtaactggtaagtttgacccactggcaatgttcttaagaccattctggtgttggtggacactctttccacaagtaggttacgtggagttcatgctcgttctgaaccgggaatggcacaacccgtagtaggatcttgcctctgccatgctaatctgcgcctgttgcttctagactatgggctgctaaggatgatgttgggactcctttttggatatctcatatcaagtcaactgtttcatctaatgtacgctggaaatccttgtctcagggttctatctggaggtggtgctgaaatattgcaagccacagatgaatcttgcggcatggtgccgctattggatgttacaccctttattgggcaaatgttgaaccttagtggacgcgtgagatgggaatccacgcctggccatagactggctgataagctcgcggctgatcgagttgcaacagtaatcagttgacttgccacc

SEQ ID NO: 2726 - DNA, 662 bp, Chicken megrivirus
  strain RS/BR/2015/3R polyprotein gene, complete1
gtgtgtttctgaagggcctcttttcccgaccggtttggcacaccggacggttatcctggttagatgtctgatggttgctggaacgtggtggctgttgctgccaccttttggcttcctctattgggcatctagctgggtcctttgccacatcccatcttattctttacccattttctactacccaggcttgcctgaaactggtaagttgacctattgaccatgtttttggactactcttggtgctggtggacactctttccacaagtaggttgcatggagttcatgctcgttctgaaccgggaatggcacaacccgtagtaggatcttgcctctgccatgttgatctgcgcctgttgcttctagactatgggctgctaaggatgatgttgagactcctttttggatatctcatatcaagtcaactgtttcatctggtgtacgctggagatccttgtcgtgaggctgtatctggaggtggtgctgaaatattgcaagccacagatcagtcttgtaacatggtgccgctatcaggtgttacaccctctactgggcaaatgttgaaccttagtggacgcgtgagatgggaatccacgcctggccatagactggctgataagctcgcggctgatcgagttgcaacagtaatcagttgatttgccact

SEQ ID NO: 2727 - DNA, 663 bp, Chicken picornavirus 4
  isolate 5C, complete genome.1
gggggctctcccccacggcctcttttcccgaccggtctggcaaaccggacggttatcctggttaggtgtccgatggatgctggaacggggtggctatagctgcctccttctggcttcctttattgggcattctagctgggccctttgccaaaattccatcttaatcttaaacccattttctatacccaggcttgcttgtaactggtaagttgacccactggcttgtcttaagactattctggtgttggtggacactccttccacaagtaagtattgtggagttcatgctcgttctgaaccgggaatggcacaccccgtagtaggatcttgcctctgccacatatacttgcgcctgttgcttctagactatgggctactaaggatgactacggacccctttttgggtaatctgtgtcaagtctactgtatcatctggtgtacgctggaaatccttgttctggaaactgcgtctggaggtggtgctgaaatattgcaagccacagatgcatttctggtcttggtgccgctactaggtgttacaccccctgtgggcaaatgtagaaccttggtggacgcgtgagatgggaatccacgcctggccatagactggctgataagctcgcggctgatcgagttgcaacagtaatcagttgatttgccact

SEQ ID NO: 2728 - DNA, 663 bp, Chicken megrivirus
  strain RS/BR/2015/5R polyprotein gene, complete1
gtgtgtttctgaaggcctcttttcccgaccggtttggcacaccggacggttatcctggttagatgtctgatggttgctggaacgtggtggctattgctgccaccttttggcttcctatattgggcatctagctgggtcctttgccacattccatcttactcttttacccactattctattacccaggcttgatcgtaaccggcaagtttgacccaccggctatgttctaagactattctggtgttggtggacactctctccacaagtagattgcatggagttcatgctcgttctgaaccgggaatggcacaacccgtagtaggatcttgcctctgccatgttgatctgcgcctgttgcttctagactatgggctgctaaggatgatgttgggactcctttttggatatctcatatcaagtcaactgttccatctgatgtacgctggaaatccttgtcccagggttgtatctggaggtggtgctgaaatattgcaagccacggattaaccttgcgacatggtgccgctatcaggtgttacaccctctatcgggcaaatgttgaaccttagtggacgcgtgagatgggaatccacgcctggccatagactggctgataagctcgcggctgatcgagttgcaacagtaatcagttgatttgccact

SEQ ID NO: 2729 - DNA, 664 bp, Picornaviridae sp.
  isolate phe068pic1 genomic sequence.1
agatgtagacatctaaccaggataaccgtccggtgtgccacaccggacggttatcctggttagatgtctgggaactgctggacttcagtggctattgctgctgacttctggctcttctgaactgggcatctagctgggtcctttgccacccataccctatctcccgttatattctctttgcccttggactgttgtaactggttaagagaccctccgcatgttttgtctatgactattctggtgctggtggacactctttccacaagtggatgatgtggagttcatgctcgttctgaaccgggaatggcacaacccgtagtaggatcttgcctctgccatactcatctgcgactgttacttctagaccataggctgtgtaggatgactatggacctctttttgagtatcctggtcaagccaactgtgtttataacacgtacgctggatatccttgttagggtggaatttcagtggaggtggtgctgaaatattgcaagccacattggattttaccctcttggtgccgctgtgttattacgcaccccttgtgggcaaatgttggacctacatggacacgtgtgatgggaatccacgtctctgctatggactggctgataagctcgcggctgatcgagttgtaacagtaatcagttgaaaagccact

SEQ ID NO: 2730 - DNA, 668 bp, Canine picornavirus
  strain 325F, complete genome.1
ttatttttcaaaatgccactggcattacaccatattcgtatggtgtaatgtcagtggttggatgcccagtcctgagggactgtgcatccagtggttaagagccacactctttatttatcaactattgatctttgtaactaagaaatgtaccagagttctattatggctccaaacccattggggtctagaacaagcacttctgttaccccggtcattattggctgttaggatgtacccacgtctgaaggccaagaagatcgttacccggctgttgtctacgggaagactagtaacttttgttgaaaggtaatctcattgatccgggtggcaaccccagtcacccagaaactagtgatgagtgtccacattcctcctatggtaacatagggtggtcgctgcgctggcactagggccttaaggcatgagagaaccaagacacaactgtgaagatccgactgtgcacttcagtattcctccggcccctgaatgcggctaatcctaacccacttgcacacgctcgcaacccagtgagtggtgtgtcgtaatgcgcaagaagtggacggaaccgactactttgggtgtccgtgtttctttttttatttaccaagtctcttatggtcacaagcattagaaacaagatgcctgtgatcactcgcgagacctccaac

SEQ ID NO: 2731 - DNA, 670 bp, Human rhinovirus A
  strain HRV-A76_p1194_sR844_2008 polyprotein1
cttcacacccgttaaggtgtgcaggcagccacgcaggctaggacactgttaccagtggggaactcctagcctcatcccacctggatctcctacaaggagttgtactctattattgcggtaattttgtacgccagttttatctcccctccccaatatgtaacttagaagctgaacacaaagaccaataggcgacatttaatccaaaatgtcaaaggtcaagcacttctgtttccccggctaaagctgatatgctccaacagggcaaaaacagttgcggtcgttatccgcaaagcaactacgcaaagcctagtatcaccttctagagcatatgactggtcgctccactataaacccaatagtagacctggcagatgaggctaggagttccccactggtaacagtgtcctagcctgcgtggctgcctgcacaccttaacgggtgtgaagccatatgtttgacaaggtgtgtgagccccgtgtgcttgctttgagtcctccggcccctgaatgtggctaaccttaaccctgcagctagtgcacacaatccagtgtgtggctagtcgtaatgagcaattgcgggacgggaccaactactttgggtgtccgtgtttcttgtttttccttatatttgcttatggtgacaatatatatataacatatatattggcatc

SEQ ID NO: 2732 - DNA, 671 bp, Picornaviridae sp.
  isolate wbp226pic1 genomic sequence.1
gccgcaggggataacccctgcggaccccttttcccgaccggcttggcaaaccggacggttatcctggttagatgtctgggatttgctggactttagtggctatcgctgctatcttctggcttctctaaactgggcatctagctgggtcctttgccatccaattctttattcccatctatttttccacccatggactgatgtaactggctaagaaatcctctggttctcactttggccacgcacttgtgttggcggacactctttccgcaagtgaacagtgtggagttcatgctcgttctgaaccgggaatggcacaacccgtagtaggatcttgcctctgccacatcctgtttgcgactgttacttctagaccataggctgtgtaggatgactttggacctctttttgagtatccttgtcaagctaactgcaattacaacatgtacgctggaaatccttgtctgaaagtagatcctagtggaggtggtgctgaaatattgcaagccacactagattctctttccttggtgccgctgtgttgctttgcacccctagtgggcaaatgttagacctacatggacacgtgtgatgggaatccacgtcttggctatggactggctgataagcccgcggctgatcgagttgtaacagtaatcagttgaattgccacc

SEQ ID NO: 2733 - DNA, 672 bp, Foot-and-mouth disease virus
  A gene for L, VP4, VP2, VP3, VP1, 2A,1
ccccccctaagttctaccgtcgttcccgacgtaaagggatgtaaccacaagcttaccgcctttcccggcgttaaagggatgtaaccacaacgacttaccttcacccggaagtaaaacggcaacttcacacagttttgcccgttttcatgagaaacgggacgtctgcgcacgaaacgcgccgtcgcttgaggacttgtacaaacacgatctaagcaggtttccccaactgacacaaaccgtgcaatttgaaactccgcctgggctttccaggtctagaggggtgacactttgtactgtgtttgactccacgctcgatccactggcgagtgttagtaacaacactgctgcttcgtagcggagcatgacggccgtgggaccccccccttggtaacaaggacccacggggccaaaagccacgtccgaatggacccgtcatgtgtgcaaacccagcacagtacctttgttgtgaaactcactttaaagtgacattgatactggtactcaagcactggtgacaggctaaggatgcccttcaggtaccccgaggtaacacgtgacactcgggatctgagaaggggaccggggcttctataaaagcgcccggtttaaaaagcttctatgtctgaataggtgaccggaggcaggcacctttcttttaattacactggactt

SEQ ID NO: 2734 - DNA, 673 bp, Rhinovirus C
  strain 20692_39_HRV-C polyprotein gene, complete cds.1
ggcgcacaggtttccaagcagagtgtgggagcacatgaaaccatggtacaggaataaaaggaaacacggacacccaaagtagttgttcccactataaccacccacgtggtgttgtggacttgtatttcggtacacttccatgccagttttatctccccccctgcaacctttagaagacacgtactttcagaccaataggtggcggccatccaggtcgtcgacggtcaagcacttctgtctccccggtggtactggatacgctttacccaaggcgaaaaccgggcccatcgttatccgcaaagtgcctacgagaagcctattagcactctagaagcctatggttggtcgctccgctgcaaccccagcagtagacctggcagatggggctagacataccccaccagcgatggtggtctagcccgcgtggctgcctgcacaccctatgggtgtgaagccagaaagtggacagggtgtgaagagcctattgtgctcactttgagtcctccggcccctgaatgtggctaatcctaaccctgcagccgttgcacacagcccagtgtgtatgcggtcgtaacgagtaattgcgggatggaaccaactactttgggtgtccgtgtttccttttattcctttacttgcttatggtgacactgtatagttatacattgtcact

SEQ ID NO: 2735 - DNA, 675 bp, Foot-and-mouth disease virus
  - type O, strain HLJOC12/03 polyprotein1
aaccacaagtcttgcaccttcttgtccgaagttaaaggactgtaaccgcaagctttgaaccgcctttcccggcgttaaagggctgtgaccgcaagatagaccttcacccggaagtaaaacggcaactcccacagttttgcccgttttcatgagaaatgggacgtcagcgcgcgaaacgcgcagtcgcttgaggaggacttgtacaaacacgattcacgcaggttcccacaaccgacacaaaacgtgcaacttggaatcccgcctggtctttccaggtctagaggggtgacactttgtactgtgattgacaccacgctcggtccactggcgagtgttagtagtagtattgttgtttcgtagcggagcatggtggccgtgggaccccctccttggtaacaaggacccacggggccgaaagccacgtctcaggacccaccatgtgtgcaaccccagcacggcaaccttaccacgaaaaccactttaaggtgacactgaaactggtactcaaccactggtgacaggctaaggatgcccttcaggtaccccgaggtaacacgcgacactcgggatctgagaaggggactggggcctctgtaaaagcgcccagtttaaaaagcttctatgcctgaataggcgaccggaggccggcgcctttccttaactaccactgtttac

SEQ ID NO: 2736 - DNA, 675 bp, Parechovirus A
  isolate HPeV-16/CMRHP2/CMR/2014 polyprotein gene,1
cgtcgggccttataccccgacttgctgagcttctctaggagagtccctttcccagccctgaggcggctggtcaataaaagcctcaattgtaacaaacatctaagcttattacatataaccacaaccctggtccccaccagcttaaggcatcttgcaatacagtgggtggactcaggacgcttaaaggttgtagtacataatcttttctaatccaactatgttggagtggtggacagcgcaccataactctatcagtgagataccatgcttgtggaccttatgctcacacagctgtcctctagtcactaagtgtggaaactaatgaaatgtgggaacttagttgaagtacacacttgcttatgcaccaattagccagcggatcaacacccggcaacgggtgcccctggggccaaaagccaaggtttaacagaccctaattggttggttttaaaacctgagcgtgtacggatgctacttagtacctgtggatttggtaactgtgcttatactagttgtaaggccctcgaaggatgcccagaaggtacctgtaggtaacaagtgacactatagatctgatctggggccccatacttctctaaagtgatggggttaaaaaacgtctagagggccaaacccaggggggaccctggattccttttattttatttagacaat

SEQ ID NO: 2737 - DNA, 678 bp, Foot-and-mouth disease virus
  polyprotein precursor, mRNA, complete1
actagtgattttaccgtcgttccccgacgtttgaagggaggaaaccacacgcttgcagcaccactcccggtgtcaacgggatgcaaccgcaagatggaccttcgcccggaagtaaaacggcagctttacacagttttgcccgttttcgtgagaaacgggacgtccgcgcacgaaacgcgccgtcgcttgaggaacacttgtacaaacacgatttaagcaggtttccacaactgataaaactcgtgcaacttgaaaccccgcctggtctttccaggtctagaggggtgacactttgtactgtgctcgactccacgcccggtccactggcgggtgttagtagcagcactgttgtttcgtagcggagcatggtggccgtgggaactcctccttggtgacaagggcccacggggccgaaagccacgtccagacggacccaccatgtgtgcaaccccagcacggcaacttttactgcgaacaccaccttaaggtgacactggtactggtactcggtcactggtgacaggctaaggatgcccttcaggtaccccgaggtaacacgggacactcgggatctgagaaggggattgggacttctttaaaagtgcccagtttaaaaagcttctacgcctgaataggcgaccggaggccggcgcctttccattacccactactaaatcc

SEQ ID NO: 2738 - DNA, 679 bp, Chicken picornavirus 5
  isolate 27C, complete genome.1
aaaaggggtccgtgggggttctcccccacggctccttttcccgaccggtctggcgaaccggacggttatcctggttagatgtctgatggttgctggaacgtggtggctatagctgccaccttctggcttcctctattgggcattctagctgggttctttgccaaaattccatcttactctttacccattttctctacccaggcttgcttgtaactggtaagttgacccactggctttagttcatgattattctggtgttggtggacactctttccacaagtaggtagtgtggagttcatgctcgttctgaaccgggaatggcacaacccgtagtaggatcttgcctctgccacacttacttgcgcctgttgcttctagactatgggctgctaaggatgactacggacctctttttgagcaatccgtgtcaagtcaactgtttcatctgatgtacgctggaaatccttgtttctggatgattgtatcctggaggtggtgctgaaatatctcaagccacaggtacgcttctggacttggtgccgctgtcaggtgttacaccccttgtgggcaaatgttgaaccttagtggacgcgtgagatgggaatccatgcctggccatagactggctgataagctcgcggctgatcgagttgcaacagtaatcagttgatttgccact

SEQ ID NO: 2739 - DNA, 682 bp, Foot-and-mouth disease virus
  - type O O/JPN/2010-1/14c (CV_d1)1
gggaggtaaccacaagatttgcgccttcttgtccgaagttagagggctgtaaccgcaaactttgaaccgcctttcccagcgttaacgggatgtaatcacaagatggaccttcatccggaagtaaaacggcaacttacacagttttgcccgttttcatgagaaatgggacgtcagcgcacgaaacgcgcagtcgcttgaggaggacttgtacaaacacgtctcacacaggtacccacaaccgacacaaaacgtgcaacttgaaatcccgcctggtctttccaggtctagaggggtgacactttgtactgtgattgactccacgctcggcccactggcgagtgttagtagtagtactgttgcttcgtagcggagcatggtggccgtgggactccctccttggtaacaaggacccacggggccgaaagccacgtctcaggacccaccatgtgtgcaaccccagcacggcaactttaccacgaaaaccactttaaggtgacactgaaactggtactcaaccactggtgacaggctaaggatgcccttcaggtaccccgaggtaacacgcgacactcaggatctgagaaggggattggggcttctgtaaaagcgcccagtttaaaaagcttctatgcctgaataggcgaccggaggccggcgcctttccttaactattactgcttac

SEQ ID NO: 2740 - DNA, 682 bp, Enterovirus B88
  strain NIV-17-3150-2, complete genome.1
cctgtgggttgttcccacccacagggcccactgggcgctagcacactggtatcacggtacccttgtgcgcctgttttaacccccctcccctcagaagtaacttagaagcataaatcaaacggtcaacaggtggcctagcgcaccagctgggtctagaccaagcacttctgtcaccccggactgagtatcaataggctgcttgcgcggctgaaggagaaaacgttcgttatccgaccagttacttcgggaaacctagtaccaccatggaagttgcgcagcgtttcgctccgcacacccccagtgtagatcaggtcgatgagtcaccgtatcccccacgggcgaccgtgacggtggctgcgttggcggcctgcccatggggtaacccatgggacgcttcaatactgacatggtgtgaagagtctactgagctaattggtagtcctccggcccctgaatgcggctaatcctaactgcggagcagacacccacaagccagtgggcggtctgtcgtaacgggtaactctgcagcggaaccgactactttgggtgtccgtgtttccttttattcttatactggctgcttatggtgacaattgaaaggttgttgccatatagctattggattggccatccggtgactaatagagcgattgtttacttgtttgttggtttcataccaaaa

SEQ ID NO: 2741 - DNA, 683 bp, Chicken megrivirus
  strain Chicken/MG9567/Brazil/2012 polyprotein1
gaaaagaggccgtgggggataacccccacggaccccttttcccgaccggtttggcaaaccggacggttatcctgattagatgtctgatggttgctggaatgtggtggctactgctgccaccttttggcttcctctattgggcatctagttgggtcctttgccattttcccatcttactctttttaacccatcttctaccccaggcatgcttgtaactggtaagttgacccacttggctctgattcatgattctgtttggtgctggtggacactctttccacaagtagattgtgtggagtccatgctcgttctgaaccgggaatggcacaacccgtagtaggatcttgcctctgccacattacatctgcgcctgttgcttctagactatgggctgctaaggatggtttggacccctttttgggtaatccaaatcaagtcaactgtttcatccaatgtacgctggaaatccttgttactgggtgtttacaactggaggtggtgctgaaatattgcaagccacagttgtgcacctagtcctggtgccgctattgggtgttacaccctttgatgggcaaatgttgaaccttagtggacgcgtgagatgggaatccacgcctggccatagactggctgataagctcgcggctgatcgagttgcaacagtaatcagttgatttgccact

SEQ ID NO: 2742 - DNA, 687 bp, Enterovirus A
  strain CHN/BJ/2018-1A, complete genome.1
gggttgttcccacccacagggcccaagcggcgttagtactctggtatcacggtacctttgtatgcctgttttacatcccttcccccgtaacgttagaagaaagcacaaacgacaaatagcaagtccaccaaaccaggtgggtttttgtcaagcacttctgtttccccggacatagtaccaataagctgtacccacggctgaaagggaaaacgttcgttacccggctacttacttcgagaagcctagtaccatcatgaattgtttcaagtgttacgttcagcacaatcccagtgtagttcaggctgatgagtcaccgaattccccacgggcgaccgtgtcggtggctgcgttggcggcctgcctgcgggtattactcgcaggacgcttgattcatgacatggtgcgaagagcctattgagctaggtagtagtcctccggcccctgaatgcggctaatcccaaccacggagccatgcgttgcaatccagcaatgttgtggtcgtaatgagcaattctgtggcggaaccgactactttgggtgtccgtgtttcctgttttatttaccttggctgcttatggtgacaatctagagttgtcatcatatagcgattggattggccatccggatattatctttgtgtgactcattcctagtccataagcattccttgtaatttacacattcatc

SEQ ID NO: 2743 - DNA, 696 bp, Foot-and-mouth disease virus
  - type O,strain O/VIT/8338/20171
acgttaaaggggtgtaaccacaagcttgaaaccgtcttgcccgacgttaatgggttgtaaccacacgcttgtaccacctttcccggcgttatcgggatgcaaccaaaagatgaaccttcacccggaagtaaaacggcaaccacacccagttttgcccgttttcatgagaaatgggacgtcagcgcacgaaacgcgccgtcgcttgaggaagatttgtacaaacacgatttatgcaggcttccacaactgacacgaaccgtgcaatttgaagctccgcctggtctttccaggtctagaggggcaacactttgtactgtgcttgactccacgctcggtccactagcgggtgttagtaacagcactgttgtttcgtagcggagcatgatggccgcgggaactcccccttggtgacaaggacccgcggggccgaaagccacgtcttaacggacccatcatgtgtgcaaccccagcacggcaactttactgtgaaaaccactttaaggtgacactgatactggtactcaaccactggtgacaggctaaggatgcccttcaggtaccccgaggtaacaagtgacactcgagatctgagaaggggacaggggcttctttaaaagcgctctgtttaaaaagcttctatgcctgaataggcgaccggaggccggcgccttttcccactaaaccactactaacttt

SEQ ID NO: 2744 - DNA, 697 bp, Foot-and-mouth disease virus
  - type Asia 1,isolate1
ttcccgacgttaaagggatgtaaccacaagcttaacaccttcgtgtccgaagtcaaaggactgaaaccacatgcttgcaccgccttttccggcgttaatggactgtaaccacaagatggaccttcacccggaagtaaaacggcaacttacacagttttgcccgttttcactagaaacgggacgtctgcgcacgaaacgcgccgccgcttgaggaggacttgtacaaacacgatctacgcaggttcccacaactggcttaaaacgtgcaatttgaaaccccgcctggtctttccaggtctagaggggtgacaccttgtactgtgcttgactccacgctcggtccactggcgagtgttagtagtagcactgttgcttcgtagcggagcatgatggccgcgggagtccctccttggtgacaaggacccgcggggccgaaagccacgtcctacggacccatcatgtgtgcaaccccagcacggcaactttgacacgaaaaccactttaaggtgacactgatactggtactcaaacactggtgacaggctaaggatgcccttcaggtaccccgaggtaacacgcggcactcgggatctgagaaggggactggggcttctgtaaaagcgcccagtttaaaaagcttctatgcctgaataggcgaccggaggccggcgcctttcctttaattgccactaactac

SEQ ID NO: 2745 - DNA, 701 bp, Foot-and-mouth disease virus
  partial polyprotein, P1 region,strain1
ttcccgacgttaatggggaaacaaccacaagcttaacaccgtcttgcccgacgtaaaagggctgcaaccaaaaagcttgtgccgcctttcccggcgttaatgggaggtaaccacaagacaaaccttcacccggaagtaaaacggcaacttcacacagttttgcccgttttcgtgagaaatgggccgtcaacgcacgaaacgcgccgtcgcttgaggaggacttgtacaaacacgatctatgcaggtttccacaactgacacaaaccgtgcaacttgaaaccccgcctggtctttccaggtctagaggggcgacattttgtactgtgcttgactccacgctcggtccactagcgagtgttagtagtagcactgttgcttcgtagcggagcatgatggccgtgggagctcccccttggtgacaaggacccacggggccaaaagccacgtcctaccggacccatcatgtgtgcaaacccagcacggcaactttactgcgaaaaccactttaaggtgacactgatactggtactcaatcactggtgacaggctaaggatgcccttcaggtaccccgaggtaacacgcgacactcgggatctgagaaggggactggggcttctttaaaagtgcccagtttaaaaagcttctatgcctgaataggcgaccggaggccggcgccttttcactgttttactactgtttc

SEQ ID NO: 2746 - DNA, 702 bp, Human enterovirus 92
  strain RJG7, complete genome.1
tttaaaacagcctgtgggttgtacccacccacagggcccacgcggcgttagtactctggtatcacggtacctttgtatgcctgttttatctcccttcccccgtaacgttagaagaatgaacaaaagacaattagcaaatccaccaacccaggtgggttttcgtcaagcacttctgtttccccggacctagtaccaataagctgtgcccacggctgaaggggaaaacgttcgttatccggctacctacttcgagaagcctagtaccaccaatgattgtctcaagtgttacgctcagcacaaccccagtgtagttcaggtcgatgagtcaccgaattccccacgggcgaccgtgtcggtggctgcgttggcggcctgcctgcgagtttcactcgcaggacgcttgattcatgacatggtgcgaagagcctattgagctaggcagtagtcctccggcccctgaatgcggctaatcctaaccacggagccatgcgtcacaaaccagtggcgtcatggtcgtaacgagcaattctgtggcggaaccgactactttgggtgtccgtgtttcctgttttatttaccttggctgcttatggtgacaatctagagttgtcatcatatagcgattggattggccatccggatattactttgtgtgatttatctcttgctcgtaagcaattttaaatagtttatagcatcatt

SEQ ID NO: 2747 - DNA, 708 bp, Coxsackievirus A14
  isolate SEN-14-254, complete genome.1
ggggccggagctctggtgatacgttacctttgtgcgcctgttttatttccctaccccggaacaatctagaagcaacgcgctactggccaatagaaagtgtagcaaaccagctacatcccggtcaagcacttctgtctccccggaccgagtatcaataaactgctaacgcggttgaaggagaaaaggttcgttacccggccaactacttcgaaaagcccagtaacaccatgaaagttgcagagtgtttcgctcagcacttcccccgtgtagatcaggtcgatgagtcaccgcgatccccacgggcgaccgtggcggtggctgcgttggcggcctgcctatggggcaacccataggacgctctaatacagacatggtgcgaagagcctattgagctagttggtagtcctccggcccctgaatgcggctaatcctaactgcggagcttatgctcgcgaaccagcgagtagtgagtcgtaacgggtaactctgcagcggaaccgactactttgggtgtccgtgtttccttttattctcatattggctgcttatggtgacaatcaaagaattgttaccatatagctattggattggccatccggtgtgcaacagagctattgtctactcttttgttggatttgttccattgtcctctttcaccacactaaatactctacagtatatactttcccttaattcaaggaaacgatc

SEQ ID NO: 2748 - DNA, 709 bp, Foot-and-mouth disease virus
  - type O,isolate O/VN/SL21/20061
aagttttgccgtcgttcccgacgttaaagggagataaccacaagctttgcaccttcttgcccgaagtaaaagggctgcaaccgcaagctttaaaccgcctttcccggcgttaacgggatgcaaccataagatggaccttcgcccggaagtaaaacggcaactcacacagttttgcccgttttcacgagaaatgggacgtcagcgcacgaaacgcgccgtcgcttgaggaggacttgtacaaacacgatctacgcaggttcccacaaccgacacaaaccgtgcaatttgaaatcccgcctggtctttccaggtctagaggggtaacactttgtactgtgattgactccacgctcggtccactggcgagtgtaagtagtagtactgttgcttcgtagcggaacatggtggccgtgggactccctccttggtaacaaggacccacggggccgaaagccacgtcttggacccaccatgtgtgcaaccccagcacggcaaccatactacgaaaaccactttaaactggcactgatactggtactcaaccactggtgacaggctaaggatgcccttcaggtaccccgaggtaacacgcgacactcgggatctgagaagggggctggggcttctataaaagcgcccagtttaaaaagcttctatgcctgaataggcgaccggaggccggcgcctttctctacttactactgtttac

SEQ ID NO: 2749 - DNA, 712 bp, Foot and Mouth Disease Virus
  A L-fragment of RNA genome.1
taagtgttaccgtcgtgcccgacgttaaagggaagtaaccacaagcttgacaccgtcttgtccgacgttaaagggctgtagccacaagcttgcaccgcctttcccggcgtaaatgggatgtaaccacaagacacaccttcagccggaagtaaacggcaacaccacacagttttgcccgttttcatgagaaatgggacgtctgcgcacgaaacgcgccgtcgcttgaggagaacttgtacaaacacgatctacgcaggtttccacaactgacacgaaccgtgcaacttgaaactccgcctggtctttccaggtctagaggggtaacactttgtactgtgtttgactccacgcttggtccactagcgagtgttagtagcagcactgttgcttcgtcgcggagcatgatggctgtgggaactcccccttggtaacaaggacccacggggccaaaagccacgtcctcacggacccatcatgcgtgcaaccccagcacagcaactttactgcgaaagccactttaaggtgacactgatactggtactcaaccactggtgacaggctaaggatgcccttcaggtaccccgaggtaacatgcgacactcgggatctgagaagggggctgaggcttctttaaaagcgctcagcttaaaaagcttctatgcctgaataggcgaccggaggccggcgcctttccacttaccaatactgtttt

SEQ ID NO: 2750 - DNA, 713 bp, Coxsackievirus
  A2,strain USA/2014-19510, complete genome.1
ccacagggcccacggggcgctagcacactggtgttacggcacctttgtgcgcctgttttactcccctttcccctgtaatttagaagtatcgcaccacggatcaatagcaggtgtgtcgcaccaggcacatctagatcaggcacttctgtctccccggaccgagtatcaataggctgctagcgcggctgaaggagaaaacgttcgttacccggccaactacttcgagaagcttagtaccaccatgaacgttgcagagtgtttcactcagcacaaccccagtgtagatcaggtcgatgagtcaccgcattccccacgggcgaccgtggcggtggctgcgttggcggcctgcctatggggcaacccatgggacgctctaatactgacatggtgcgaagagcctattgagctagttggtagtcctccggcccctgaatgcggctaatcctaaccgcggagcatgtactcacaacccagtgggcagcatgtcgtaacgggtaactctgcggcggaaccgactactttgggtgtccgtgtttccttttattcttacattggctgcttatggtgacaactgaaggattgttaccatatagctattggattggccatccggtgtccaacagagctctgatttatcagtttgttggctttgtgcctttatcacctacagcctactcaaccttagtgtttttgatacaccttaacaataggaa

SEQ ID NO: 2751 - DNA, 715 bp, Ljungan virus
  strain 340 polyprotein gene, complete cds.1
ggtggggtgggtacgtttctcgctcattgagtgggggcgtggctcaccaaccacacctggttggttcccaggttcatacaataaccacctctttgtaacaactacacctaagcttaatttgcccgcttgaactggacgaaaccgcttggaataagtttggttctcttttgagtgtgttttgtgttagcataatttctgtctctagagtgctttacgctctagtaggggctgtacccgggcggtcccactcttcacaggaatctgcacaggtggctttcacctctggacagtgcattccacacccgctccacaatagaagataatgtatgtctttgtttgtgaaatgcttatgaaacgagtgtgtaggcgtagcggctacttggatgccagcggaactcccctagtggtaacactagcctctgggcccaaaaggcatgtctttgaccattcaagtacacaaccccagtgatgcacacacctagtaatggcttagtaatggacattgattgattatcagacaattgctaggaggcttaggtatgacgggctgaaggatgccctggaggtacccgcaggcaaccttaggagactgtggatctgaccaggggcccaccatggaagcatgggtagaagtcttcggaccttgggttaaaaaacgtctaggcccgccccccacagggatgtggggtttcccttataaccccaatactacact

SEQ ID NO: 2752 - DNA, 717 bp, Echovirus E6
  strain GHA:CEN:ASE/2017 polyprotein gene, complete1
acccacagggcccactgggcgctagcacactggtatcacggtacctttgtgcgcctgttttatccaccttaccccactgtaacttagaagttaaccaaacacggtcactaggtggctcagtataccaactgagtctagaccaagcacttctgttaccccggactgagtatcaataggctgctcgcgcggctgaaggagaaaacgttcgttacccggccaattacttcgagaaacctagtaccaccatgaaggttgcgcagcgtttcgctccgcacttccccagtgtagatcaggccgatgagtcaccgcgtacctcacgggcgaccgtggcggtggctgcgctggcggcctgcccatggggcaacccatgggacgcttcaaaactgacatggtgcgaagagtctattgagctaattggtagtcctccggcccctgaatgcggctaatcccaactgcggagcagatacccacactccagtgggcagtctgtcgtaatgggcaactctgcagcggaaccgactactttgggtgtccgtgtttccttttattcttatactggctgcttatggtgacaattgagagattgttaccatattgctattggattggccatccggtgacaaacagagcaataatctacttatttgttggtttcgtaccattgaactttagagtactgaagacccttaactttatactaattctcaacacagcaaa

SEQ ID NO: 2753 - DNA, 719 bp, Foot-and-mouth disease virus
  - type Asia 1,isolate1
cccataaaggttttaccgtcattcccgacgttaaagggaggtaaccacacgcttgagaccgtcttgtccgacgttaacggactggaaccacaagcttataccgcctttcccggcgttaacggaatgtaaccacaagatggaccttcacccggaagtaaaacggcacacacacacaattttgcccgttttcacgagaaacgggacgtctgcgcacgaaacgcgccatcgcttgaggaggacttgtacaaacacgatctacgcaggtttcccaaccgacacaacccgtgcaacttgaaactccgcctggtctttccaggtctagaggggtgacattttgtactgtaattgactccacgctcggtccactagcgggtgtttagtagctgtattgttgcttcgtagcggagcataatggccgcgggagctcccccttggtaacaaggacccacggggccgaaagccacgtcctaacggacccattatgtgtgcaaccccagcacggcaacttactgtgaaaaccactttaaggtgacactgatactggtactcaactactggtggcaggctaaggatgcccttcaggtaccccgaggtaacatgcgacactcgggatctgagaaggggaccgggacttctttaaaagtgcccggtttaaaaagcttctatgcctgaataggcgaccggaggccggcgcctttcttttgattactactgctttt

SEQ ID NO: 2754 - DNA, 719 bp, Coxsackievirus
  A16,isolate C138/CHW/AUS/2016 polyprotein gene,1
ccacccacagggcccacggggcgctagcacactggtgtcacggcacctttgtgcgcctgttttatttcccctcccccccgcaatttagaagttttgcactacagatcaatagcaggtgtgtcgcaccaggcacatctagatcaagcacttctgtttccccggactgagtatcaataggctgctcacgcggctgaaagagaaagcgttcgttatccggccaactacttcgagaagcttagtaccaccatgaacgttgcagagtgtttcgctcagcacatccccagtgtagatcaggtcgatgagtcaccgcactccccacgggcgaccgtggcggtggctgcgttggcggcctgcctatggggcaacccataggacgctctaataccgacatggtgcgaagagcctattgagctagttggtagtcctccggcccctgaatgcggctaatcctaactgcggagcatgtactcacaatccagtgggcagcatgtcgtaacgggcaactctgcagcggaaccgactactttgggtgtccgtgtttcctttttattcttatattggctgcttatggtgacaattgaagaattgttaccatatagctattggattggccatccggtgtctaacagagctattgtttacctgtttgttggatacgtccctctcaatttcaaggtcattaaaactcttaattatatactacttctcaactgtgagaa

SEQ ID NO: 2755 - DNA, 719 bp, Swine vesicular disease virus
  strain SVDV Itl. 1-92 polyprotein1
cacccacagggcccactgggcgctagtacactggtatcacggtacctttgtgcgcctgtttgaccgacccaccccgaatgcaacttagaagcacaacttggatggtcaataggcggctcggtatgccaactgagtctagaccaagcacttctgttaccccggactgagtaccaataggctgctcgcgcggctgaaggggaaaccgttcgttacccgactaactacttcgagaaacctagtaccaccatgaaagttgcgcagcgtttcgttccacacaaccccagtgttgatcaggtcgatgagtcaccgcaaaccccacgggcgaccgtggcggtggctgcgctggcggcctgcccatgaggcaactcatgggacgcttcaatactgacatggtgcgaagagtctattgagctagttggtagtcctccggcccctgaatgcggctaatcctaactgcggagcagatacccacacaccagtgggcagtctgtcgtaatgggcaactctgcagcggaaccgactactttgggtgtccgtgtttccttttgttcttattctaaccacttatggtgacaattgagaggctgtgaccatattgccactgagttgaccacccggtgacgagcagaacagttgcttacctgtctgttggtcacgtatcattaaaccacaaatccttgaacgctctcctattttgtcataacgcccaacacgtcaaa

SEQ ID NO: 2756 - DNA, 720 bp, Foot-and-mouth disease virus
  - type A,isolate TUR_004/20031
ccccccctaagttttaccgtcgttcccgacgttaaagggatgtaaccacaagctagaaaccgtcttgcccggcgttatagggctgtaaccacatgcttgtaccgcctttcccggcgacaacgggatgtaaccacacgattgaccttcacccggaagtaaaacggcaacttcacacatttttgcccgttttcacgagaaacgggacgtctgcgcacgaaacgcgccgccgcttgaggaagacttgtacaaacacgatctaagcaggtctccacaactgacacaaaccgtgcaacttgaaactccgcctggtctttccaggtctagaggggtgacactttgtactgtgcttgacaccacgctcggtccactagcgggtatgagtagcagaactgttgcttcgtagcggagcatggtggccgtgggaactcctccttggtaacaaggacccacggggccaaaagccacgtcctgtggacccaccatgtgtgcaaccccagcacggcaatttttctgtgaaaactaccttaaggtgacactgatactggtactcaaccactggtgacaggctaaggatgcccttcaggtaccccgaggtaacacgcgacactcgggatctgagaaggggactgggacttctttaaaagtgcccagtttaaaaagcttctatgcctgaataggcgaccggaggccggcgcctttcttttaaacactactagacta

SEQ ID NO: 2757 - DNA, 726 bp, Enterovirus B84
  strain GHA:BAR:TES/2017 polyprotein gene, complete1
ggttgttcccacccacagggcccattgggcgctagcacactggtatcacggtacccttgtgcgcctgttttatacacccttccccaacgaaacttagaagtaaagcaacaaggtcaataggtagctcagtgagccaactgagttatgaccaagcacttctgtcaccccggactgagtatcaataggctgctcacgcggctgaaggagaaagcgttcgttatccggctaactacttcgagaaacctagtaccaccatgaaggttgcgtagcgtttcgatcagcacaaccccggtgtagatcaggccgatgagtctccgcattcctcacgggcgaccgtggcggtggctgcgctggcggcctgcccatggggcaacccatgggacgcttcaatactgacatggtgcgaagagtctattgagctagttagtagtcctccggcccctgaatgcggctaatcctaactgcggagcacacacccccaacccaggaggcagtgtgtcgtaacgggtaactctgcagcggaaccgactactttgggtgtccgtgtttccttttattcttatactggctgcttatggtgacaattgagagattgttaccatatagctattggattggccatccggtgactaacagagctattgtatacctgtttgttggttttataccattaaattgcaaagttctagagaccctcaattttatcctattactaaacgcagcaaa

SEQ ID NO: 2758 - DNA, 726 bp, Enterovirus J
  strain CHN/BJ/2018-8J, complete genome.1
acatgggcacccagagggcccacgtggcgtagaactcacgtggcgtagaactccggtattacggtacccttgttcgcctattttaccaccccttccccagaaacttagaagtcatgatcacaaggctcaatagatacttgggcaaaccagcccaaggacgagcaagcacttctgtctccccgggaggcaacgctgttaggctgtccccacggccgaaggcaacgctaccgttaaccggcgtggtactgcgggaagtctagtaacatcattgaatttctttgacgttacgttcagcacacaaacccagtgtgtagttttggctgatgagtgcctgcattccccactggcgacagtggcaggcgctgcgttggcggccaactctcagggcaacctgagagacgtcaaattaaggacatggtgtgaagaacctactgcgctactgcgtagtcctccggcccctgaatgcggctaatcctaactcgggagcatctgcacacaatccagtgtgaagggtgtcgtaacgggcaactcctgagcggaaccgactactttgggtgtccgtgtttcctgttttatttaccttggctgcttatggtgacaatctagattgttaccatatagcaattgggttggccacctggttttgtaagcttgtgacttttagtacgctaaaacacttactataatacaacacagacattactataaaaccacttgaaagagagg

SEQ ID NO: 2759 - DNA, 727 bp, Hepatovirus A
  isolate KSA215 polyprotein gene, complete cds.1
tcccctctttgggctactctggctgggggtagtaaaatacccagccctcgtttgcctagagtttaggctaaaacccctttccctttgtaaatacgttcatttgtaaatattgattcctgcaggttcaggctttcttgaatcatgttgtgctttaacacacacttactattttgccataagtgcgatggatggaaacttccatcaaaccttttaacacaggatgttattagggcagtttctcttaatatatctctgggacattcttcggtcccattgtttctcctttctatcttcttgttttccgggttctcaggataccaatggagcgaccactgcgcccggtggggttaaccagaagattagcttctggctgtagctgctaaaagtcctgacgttatagagcgccgtcacggagttagtgattaaactcaggtgtttggaaattcattgatcttctagaaagggtaggctacgggtgaaaccctttacactaatacctatattaggagatgtgttgcataggtgaagggtactggtaaaggggattttcacgatgaacctttcaacagttgtggacccacctcatgcactagatgctttgatttgaagaacacttggggtcacttcccgagtgatcgcgccactaggcgccctcctctatgagttgtaggggtaatcaggggcatttaggtttccacatttaaaagatttatatgattgattcaaa

SEQ ID NO: 2760 - DNA, 729 bp, Echovirus E9
  strain 11-2042-1, complete genome.1
gggttgttcccacccacagggcccacggggcgctagcactctggtatcacggtacctttgtgcgcctgttttatccaccctcccccaaatgtaacctagaagtacaatactaacggtcaataggcggcacagcacaccagctgggtctagaccaagcactcctgttgccccggactgagtatcaataggctgcctccgcggctgaaggagaaaacgttcgttatccggccaattacttcgagaaacccagtaccaccatggaagttgcgcagcgtttcgttccgcacaaccccagtgtagatcaggtcgatgagtcaccgcattccccacgggcgaccgtggcggtggctgcgttggcggcctgcccatggggtgacccatgggacgcttcaatactgacatggtgtgaagagtctattgagctaattggtagtcctccggcccctgaatgcggctaatcctaactgcggagcagacactcacaagccagtgagcagtctgtcgtaacgggtaactctgcagcggaaccgactactttgggtgtccgtgtttccttttattcttacattggctgcttatggtgacaattgagaaattgttaccatatagctattggattggccatccggtgactaacagagcaattgtctatctgtttgttggatttgtaccactgaactataaggtattgaacacacttaactttatcatatcactaaactcagcaaa

SEQ ID NO: 2761 - DNA, 730 bp, Echovirus E11
  strain HAI/2016-23057 polyprotein gene, complete cds.1
gttgttcccacccacagggcccactgggcgctagcacactggtatcacggtacctttgtgcgcctgttttatgcttcctcccccactatagtaatctagaagcttgaactacatggccaacagacaacccggtacaccaaccgggccccggccaagcacttctgtatccccggactgagtatcagtaagctgctcgcgcggctgaaggagaaaacgttcgttacccggccacttacttcgagaaacctagtaacgccatgaaagttgcgcagcgtttcgctccgcacaaacccagtgtagatcaggtcgatgagtcaccgcatcccccacgggcgaccgtggcggtggctgcgttggcggcctgcccatggggtaacccatgggacgcttcaatactgacatggtgcgaagagtctattgagctaagtggtagtcctccggcccctgaatgcggctaatcctaactgcggagcagatacccacactccagtgggcagtctgtcgtaacgggcaactctgcagcggaaccgactactttgggtgtccgtgtttccttttgtcttttacactggctgcttatggtgacaattgaaagattgttaccatatagctattggattggccatccggtatcaaacagagcaattatttacttgtttgttggttatatacctctcgataccaaggttctaaaaacactcaactacatcttgttattgaatacgttgaa

SEQ ID NO: 2762 - DNA, 740 bp, Rattus tanezumi parechovirus
  strain Wencheng-Rt386-3 polyprotein1
cccgtggcttatgccacgggacccgtgcccccgtccagggggttttacttatgctcaggcgtttgcattatcgcctggatctggctctgggcaccctttcagcccctgggcatgggtttaaactgcctacctgtaacacttaacatctaagaaactgatttgtaaccaaccctggccagatgttgccagcccaagccacttggaataaggtgggcaatgtcacattggtgcttaaaggttgcgtccaaatttttcttttccaaccactcatgtggacggtgtgcaaactccaccgtaacacttctaggtgacttccacacttgtggggctaaagcaccagagtctttgcttcaaccatattgtggtgacagcaaagcatcctgaaattagttagtaatgattctagatccacttctgtggtgctgcatgcctgcggagcaatggggggtgaccctcacctcaggggccgaaagccacggtgtttaaagcacccatgcagtatgcttgtctgtttaggattgtgaacactgaaagtaaggatgatgagtggtcactgtggtcactggttgtcgtacgggggctgaaggatgcccagaaggtacccgtaggtaaccttaagagactatggatctgatctggggccagggagtgatgtactctatacacctgccttggttaaaaaacgtctaggcccccccaacctgggggaccaggttttcctggtcattttgcaaaggaat

SEQ ID NO: 2763 - DNA, 741 bp, WUHARV Sapelovirus 2
  polyprotein gene, complete cds.1
tcacactcatttcgccccctcaccctactcaggcaacccccaccccttctcttacgggagttagggccaaggatctagtgtagtggtgttgtatccccttaccttaaacccatcccatccaagcggactggtattatggctttagattgaataatggttgatgaatccaaacctgttactcattcaggggaaaaatgaagacattctctatggatttgacttgttacgaccaagagttagcgcttcgcgcgctggccgtatggactgtttaatggttactctatggattatgatttcagggttggccgcccaggataaaaggcaattgtggtaagtgatgttagtcattggcagttgaaacctgcctagaacatctaaggtctacgctgtgcgggccgaagtaagtctaggaacaacagggagtatgctgttttttgctttcacccaacacgaccgtacacgaaagagctagaggcatctggaggcaaagggaaaagaatttcttagcccgaatgttcattagagtccttgacgaatgcgtcccctctgtcccgagggtgaggcgtatggcgcatgctcatggcattactccaaggtgtatctagaggggggggccccctctacttagtctagtgctacctgacagggccgcggctggtcgtttgtgtatggtataaccagtagtaatcccccatggattgctttaactccccctcctcccttcacaagacattctctaag

SEQ ID NO: 2764 - DNA, 741 bp, Human echovirus 2
  strain Cornelis, complete genome.1
ttaaaacagcctgtgggttgatcccacccacagggcccattgggcgctagcactctggtattacggtacccttgtgcgcctgttttacacgcccctccccaagcaacttagaagtctgtcacaaatggtcaatagacagctcaacacgccagttgagtctagaccaagcacttctgtcgccccggaccgagtatcaatagactgctagcgcggttgaaagagaaaacgttcgttacccggccaactacttcgggaaacctagtaccaccatgaaagttgcgcagtgtttcgctccgcacaaccccagtgtagatcaggtcgatgagccaccgcattccccacaggcgactgtggcggtggctgcgttggcggcctgcccatggtacaacccatgggacgcttcaatactgacatggtgcgaagagtctactgagctagttggtagtcctccggcccctgaatgcggctaatcctaactgcggagcaggtacccacgagccagtgggcagcctgtcgtaatgggcaactctgcagcggaaccgactactttgggtgtccgtgtttccatttactcttatactggctgcttatggtgacaatcacggaattgttaccatatagctattggattggccatccagtgactaacagagcgattatattcctttgtgttggttttgtaccactcaccgtcacgagctttacaacgctaaactacattttgtcattgaacacggcaag

SEQ ID NO: 2765 - DNA, 741 bp, Human echovirus 25
  strain JV-4 complete genome.1
ttaaaacagcctgtgggttgtacccacccacagggcccactgggcgctagcactctggtactacggtacctttgtgtgcctgttttatacccctccccctactgaaacttagaagcaattcataccgatcaatagtgggcgtggcacaccagccgtgtctagatcaagcactcctgtttccccggaccgagtatcaatagactgctcacgcggttgaaggagaaaacgttcgttatccggctaactacttcgaaaaacctagtaacaccatgaaagttgcggagtgtttcactcagcacttccccagtgtagatcaggtcgatgagtcaccgcattcctcacgggcgaccgtggcggtggctgcgctggcggcctgcctatggggtgacccataggacgctctaatacagacatggtgcgaagagtctattgagctagttagtagtcctccggcccctgaatgcggataatcctaactgtggagcagatacccacgaaccagtgggcagtctgtcgtaacgggcaactccgcagcggaaccgactactttgggtgtccgtgtttccttttattccaaatctggctgcttatggtgacaattgagagattgttgccatatagctattggattggccatccggtgaataatagagcgataatatatttgtttgttggattcgtgccacttagtctgaaagttttgagaacactcaactacgttttattgctgaatagtgcaag

SEQ ID NO: 2766 - DNA, 745 bp, Unknown
  Description of Unknown: Human coxsackievirus A6 strain Gdula, complete genome.1 sequence
ttaaaacagcctgtgggttgcacccactcacagggcccactgggcgctagcacactgatttcccggaatccttgtgcgcctgttttatatcccctcccccatgcgcaacttagaagcaatctacaccttcgatcaatagcaggcgtggcgcgccagccatgtctagatcaagcacttctgtttccccggactgagtatcaataaactgctcacgcggttgaaggagaaaatgttcgttacccggctaactacttcgagaaacctagtagcaccatgaaaattgcagagcgtttcgctcagcgcttcccccgcgtagatcaggctgatgagtcactgcattcctcacgggcgaccgtggcagtggctgcgttggcggcctgcccatggggtaacccatgggacgctctaatatggacatggtgtgaagagtctattgagctagttagtagtcctccggcccctgaatgcggctaatcctaactgcggagcacatacccccaaaccagggggcggtgtgtcgtaacgggcaactctgcagcggaaccgactactttgggtgtccgtgtttccttttattcttatattggctgcttatggtgacaattgaaagattgttaccatatagctattggattggccatccggtgaataacagagccttgatatacctttttgtagggtttataccacttactcttcgcgttgttgagactctaaagtacattctaatcttgaacactagaaa

SEQ ID NO: 2767 - DNA, 746 bp, Coxsackievirus
  A6,strain CVA6 -310167012-FRA-2010, complete genome.1
ttaaaacagcctgtgggttgcacccacccacagggcccactgggcgttagcacactgattccacggaatccttgtgcgcctgttttacaaccccttcccaaactcgtaacttagaagaatagcacgctaccgatcaatagcaggcatggcgcaccagccatgtctagatcaagcactcctgtctccccggaccgagtatcaatagactgctaacgcggttgaaggagaaaacgttcgtcacccggctaactacttcgagaaacctagtaacaccattgaagctgcggagcgtttcgctcagcactacccccgtgtagatcaggtcgatgagtcactgcaacccccacgggcgaccgtggcagtggctgcgttggcggcctgcctatggggtaacccataggacgctctaaagtggacatggtgcgaagagtctattgagctagttagtagtcctccggcccctgaatgcggctaatcctaactgcggagcgcataccctcaacccagggggtggtgcgtcgtaacgggcaactctgcagcggaaccgactactttgggtgtccgtgtttccttttattcttatactggctgcttatggtgacaattgaaagattgttaccatatagctattggattggccatccagtgactaatagagctttgatatacctgtttgtgggttttgttccactcaccaatcgtgcagtttacactctgaagtacattttaatcttgaataatagaaa

SEQ ID NO: 2768 - DNA, 746 bp, Coxsackievirus
  A7 gene for polyprotein, polyprotein region,strain1
tttaaaacagcctgtgggttgcacccacccgcagggcccactgggcgccagcactctggtttcgtggaacctttgtgcgcctgttttatcaccctcttcccaaactcgcaacttagaagtaacactttactgatcaatagcaggcgtggcgcaccagccatgtctagatcaagcacttctgtctccccggaccgagtatcaataggctgctcacgcggctgaaagagaaaacgttcgttatccggctaactacttcgagaaacttagtagcaccgttgaaactgcagggtgtttcgctcagcacttcccccgtgtagatcaggtcgatgagtcactgcaatccccacgggcgaccgtggcagtggctgcgttggcggcctgcctatggggtaacccataggacgctctaatgtggacacggtgcgaagagtctattgagctagttagtagtcctccggcccctgaatgcggctaatcctaactgcggagcgcatgcccccgaaccaggaggtggtgcgtcgtaatgggtaactctgcagcggaaccgactactttgggtgaccgtgtttctttttattcctattatggctgcttatggtgacaattaaagaattgttaccatatagctattggattggccatccggtgtctaacagagctattatatatctgtttgttgggtttgttccattatcacacacatcactcaatacattgtatttcattgtgggattgaacacaagaaa

SEQ ID NO: 2769 - DNA, 746 bp, Coxsackievirus
  A8,isolate 18-38/TJ/CHN/2018 polyprotein gene,1
ttaaaacagcctgtgggttgtacccactcacagggcccactgggcgttagcactctgattccgcggaatccttgtgcgcctgttttaaaacccctccccacacttgtaatctagaagtaatgcactcttatgatcaatagcaggcgtggcgcaccagccatgtcttgatcaagcacttctgtctccccgggctgagtatcaatagactgctcacgcggttgaaggagaaaatgctcgttatccggctaactacttcgagaaacctagtagcaccagtgaagctgcggggcgtttcgttcagcacttcccccgtgtagatcaggtcgatgagtcactgcgttccccacgggcgaccgtggcagtggctgcgttggcggcctgcctatggggcaacccataggacgctctaatgtggacatggtgcgaagagtctattgagctagttagtagtcctccggcccctgaatgcggctaatcctaactgcggagcacatgccctcaagccagagggtggtgtgtcgtaatgggcaactctgcagcggaaccgactactttgggtgtccgtgtttccttttattcttatactggctgcttatggtgacaatcacagaattgttgccatatagctattggattggccatccggtgcacaacagagcaattatctatttatttgttggatttacccctttgacacttacatctcttaacacattgcactacatcctatttttgaatacgaggaa

SEQ ID NO: 2770 - DNA, 747 bp, Coxsackievirus
  A6,strain CVA6 -3141760671-FRA-2014, complete1
ttaaaacagcctgtgggttgtacccacccacagggcccactgggcgctagcacactgattctatggaatctttgtgcgcctgttttataatccctttcccaaaattgcaacttagaagaacagtactttatcgatcaatagcaggcatgacgcaccagttatgtctagatcaagcactcctgtttccccggaccgagtatcaatagactgctaacgcggttgaaggagaaaacgtccgttacccggctaactacttcgagaaacctagtagcaccattgaagctgcagagcgtttcgctcagcacttccccagtgtagatcaggttgatgagccactgcactccccacgggcgaccgtggcagtggctgcgttggcggcctgcctatgggacaacccataggacgctctaaagtggacatggtgcgaagagtctattgagctagttagtagtcctccggcccctgaatgcggctaatcctaactgcagagcacatgccctcaacccagggggtggtgtgtcgtaacgggcaactctgcagcggaaccgactactttgggtgtccgtgtttccttttattcttatattggctgcttatggtgacaattgagagattgttaccatatagctattggattggccatccggtgaccaacagagctttgatatacctgtttgcgggttttattccactctccagtcgttcagtccatactataaagtgcattttgattctgaacaatagaaa

SEQ ID NO: 2771 - DNA, 747 bp, Human enterovirus sp.
  89 polyprotein gene, complete cds.1
ttaaaacagcctctgggttgcacccacccacagggcccactgggcgctagcacactggtatcacggtacctttgtgcgcctgttttatacaccctccccccttgtaacttagaagaaacaaacaaacgatcaatagtaggcttagcactccagctaagtctcgatcaagcacttctgttaccccggaccgagtatcaataggctgtacccacggctgaaagagaaaacgttcgttacccggctatctacttcgggaaacccagtaccatcatgaagattgcaaagcgtttcgctcagcacaaccccagtgtagatcaggtcgatgagtcactgcattccccacaggcgactgtggcagtggctgcgttggcggcctgcctatggggaaacccataggacgctttaatattgacatggtgcgaagagtctactgagctaggtagtagtcctccggcccctgaatgcggctaatcccaaccacggagcaggcgctcacactccagtgagtagcttgtcgtaatgcgaaagtctgtggcggaaccgactactttgggtgtccgtgtttccttttatttttatcatggctgcttatggtgacaatctaagattgttatcatatagctattggattggccatccggtgaattctagagatattatttacttgtttgttggttttaccacattaaacattaccaattacagaactctcctctacatcctgttattgaataatagaaagagaaa

SEQ ID NO: 2772 - DNA, 748 bp, Unknown
  Description of Unknown: Human coxsackievirus A6isolate TW/273/09, complete genome.1 sequence
ttaaaacagcctgtgggttgcacccacccacagggcccactgggcgccagcacactgattctacggaacctttgtgcgcctgttttacaaccccttccccgaaactcgcaacttagaagaacagcacgctatcgatcaatagcaggcatggcgcgccagtcatgtctagatcaagcacttctgtctccccggactgagtatcgatagactgctaacgcggttgaaggagaaaacgtccgttacccggctaactacttcgagaagcctagtaacaccattgaaactgcagagtgtttcgctcagcactaccccagtgtagatcaggtcgatgagtcactgcactccccacgggtgaccgtggcagtggctgcgttggcggcctgcctatggggtaacccataggacgctctaaagtggacatggtgcgaagagcctattgagctagttagtagtcctccggcccctgaatgcggctaatcctaactgcggagcgcatgccctcaatccagggggtggtgcgtcgtaatgggcaactctgcagcggaaccgactactttgggtgtccgtgtttccttttattcttatgttggctgcttatggtgacaattgagagattgttgccatatagctattggattggccatccagtgactaacagagctttgatatacctgtttgtgggttttgttccactcaccaattgtacagttcaaactttgaagtacattttaattctgaataatagaaa

SEQ ID NO: 2773 - DNA, 749 bp, Coxsackievirus
  A6,strain FH233/SX/CHN/2013, complete genome.1
ttaaaacagcctgtgggttgcacccacccacagggcccattgggcgctagcacactgattctatggaatctttgtgcgcctgttttagtatccctccccctcaaacacgtaacttagaagaatagcacgctatcgatcaatagcaggcgtggcgcaccagccatgtctagatcaagcacttctgtctccccggattgagtatcaatagactgctaacgtggttgaaggagaaaacgtccgttacccggctaactacttcgagaaacctagtaacaccattgaaactgcagagcgtttcactcagcactaccccagtgtagatcaggtcgatgagtcactgcattccccacgggcgaccgtggcagtggctgcgttggcggcctgcctatggggtgacccataggacgctctaaagtggacatggtgtgaagagtctattgagctagttagtagtcctccggcccctgaatgcggataatcctaactgcggagcgcatgccctcaatccagggggtggtgcgtcgtaacgggcaactctgcagcggaaccgactactttgggtgtccgtgtttccttttatctttatactggctgcttatggtgacaattgagagattgttaccatatagctattggattggccatccagtgaccaacagagctttgatttacctgtttgtgggttttgttccactcaccagttgtacagttcatactttgaagtatattttaatcctgaataatagaaa

SEQ ID NO: 2774 - DNA, 750 bp, Coxsackievirus
  A6,isolate HK418670/2012, complete genome.1
acttaaaacaaacctgtgggttgcacccacccacagggcccactgggcgctagcacactgattctatggaatctttgtgcgcctgttttataaccccttccccaaaactgtaacttagaagaatagcactctatcgatcaatagcaggcatggtgcgccaatcatgtctagatcaagcacttctgtctccccggatcgagtatcaatagactgctagcgcggttgaaggagaaaacgtccgttacccggctaactacttcgagaaacttagtagcaccattgaagccgcagagtgtttcgctcagcactcccccagtgtagatcaggtcgatgagtcactgcactccccacgggcgaccgtggcagtgactgcgttggcggcctgcctatggggcaacccataggacgctctaaagtggacatggtgcgaagagtctattgagctagttagtagtcctccggcccctgaatgcggctaatcctaactgcggagcgcatgccctcaatccagggggtggtgtgtcgtaacgggcaactctgcagcggaaccgactactttgggtgaccgtgtttccttttattcttatactggctgcttatggtgacaattgagagattgttaccatatagctattggattggccatccagtaaccaacagagctttgatatacttgtttgtgggtttcgttccactcaccaatcgtacaatccatactctaaagcacattttgattctgaacaatagaaa

SEQ ID NO: 2775 - DNA, 750 bp, Coxsackievirus
  A6,isolate 12/GD/CHN/2018, complete genome.1
ttaaaacagcctgtgggttgcacccacccacagggcccactgggcgctagcacactgattctacggaatctttgtgcgcctgttttataacccccttccccccaaaactgtaacttagaagaatattacactactgatcaatagcaggcatggcgcgccagtcatgtctagatcaagcacctctgtctccccggactgagtatcaatagactgctagcgcggttgaaggagaaaacgtccgttacccggctaactacttcgagaaacctagtagcaccattgaagctgcggagtgtttcgctcagcactcccccagtgtagatcaggtcgatgagtcactgcactccccacgggcgaccgtggcagtggctgcgttggcggcctgcctatggggcaacccataggacgctctaaagtggacatggtgtgaagagtttattgagctagttagtagtcctccggcccctgaatgcggctaatcccaactgcggagcacatgctctcaatccagagggtggtgtgtcgtaacgggcaactctgcagcggaaccgactactttgggtgtccgtgtttccttttattattatattggctgcttatggtgacaattgagagattgttgccatatagctattggattggccatccagtgacaaacagagctttgatatacttgttcgtgggttttgttccactcaccagtcgtacagttcatactctaaagtacattctgattctgaacaatagaaa

SEQ ID NO: 2776 - DNA, 750 bp, Echovirus
  30,strain Bastianni, complete genome.1
ttaaaacagcctgtgggttgatcccacccacagggcccactgggcgccagcacactggtatcgtggtacctttgtgcgcctgttttataccccctacccccacatgtactctagaagcaaggcaaacctgaccaatagtaggtgtggcacaccagccgcattttggtcaagcacttctgtttccccggaccgagtatcaataagctgctcacgcggctgaaggagaaaccgttcgttacccgaccagctacttcgagaaacctagtaacactatgaacgttgcggagtgtttcgttcagcacttcccccgtgtagatcaggtcgatgagtcaccgcattcctcacgggtgaccgtggcggtggctgcgttggcggcctgcctacgggttcgcccgtaggacgctctaataccgacatggtgtgaagagtccattgagctagctggtagtcctccggcccctgaatgcggctaatcctaactgcggagcaggtgctcacagaccagtgagtagcctgtcgtaacgggcaactctgcagcggaaccgactactttgggtgtttttccttttttcttctcttatattggctgcttatggtgacaattaaagaattgttaccatatagctattggattggccatccggtgacgagcagagccattgtttacctctttgttggatttgtacctttgaaccacaaagtcttgaataccattcatctcattttaaagttcaactcagctaaaagaaa

SEQ ID NO: 2777 - DNA, 751 bp, Human enterovirus sp.
  76, strain 04360/SD/CHN/2004/EV76, complete1
tttaaaacagcctgtgggttgtacccacccacagggctcactgggcgctagcacactggtatcacggtacccttgtgcgcctgttttatacaccctcccccctttttgtaacttagaagaaacaaacacacgatcaatagcaggcttagcgcaccagctaagtcttgatcaagcacttctgttaccccggactgagtatcaataagctgtgcccacggctgaaagagaaaacgttcgttacccggctgtctacttcgggaaacctagtaccatcatgaagactgcaaagcgtttcgctcagcacaaccccagtgtagatcaggtcgatgagtcactgcattcctcacaggcgactgtggcagtggctgcgttggcggcctgcctatggggaaacccataggacgctttaatgttgacatggtgcgaagagtctactgagctaggtagtagtcctccggcccctgaatgcggctaatcccaaccacggagcaggcgctcacactccagtgagtagcctgtcgtaatgcgcaagtctgtggcggaaccgactactttgggtgtccgtgtttccttttattcttatcatggctgcttatggtgacaatctaagattgttatcatatagctattggattggccatccggtgaactctagagatattatctatttgtttgttggttttaccaagttaaacatcaccagctacaccactcttctttatatcatattattgaacagtaaaaagagaaa

SEQ ID NO: 2778 - DNA, 751 bp, Unknown
  Description of Unknown: Human coxsackievirus A16strain FY18 from China, complete genome.1 sequence
ttaaaacagcctgtgggttgtgacccacccacagggcccactgggcgctagcactctgattctacggaatccttgtgcgcctgttttatgtcccttcccccaatcagtaacttagaagcattgcacctctttcgaccgttagcaggcgtggcgcaccagccatgtcttggtcaagcacttctgtttccccggaccgagtatcaatagactgctcacgcggttgagggagaaaacgtccgttacccggctaactacttcgagaagcctagtagcaccatgaaagttgcagagtgtttcgctcagcacttcccccgtgtagatcaggtcgatgagtcactgcgatccccacgggcgaccgtggcagtggctgcgttggcggcctgcctgtggggtaacccacaggacgctctaatatggacatggtgcaaagagtctattgagctagttagtactcctccggcccctgaatgcggctaatcctaactgcggagcacataccctcgacccagggggcagtgtgtcgtaacgggcaactctgcagcggaaccgactactttgggtgtccgtgtttccttttattcttatactggctgcttatggtgacaattgaaagattgttaccatatagctattggattggccatccggtgtgcaacagagctattatttacctatttgttgggtatataccactcacatccagaaaaaccctcgacacactagtatacattctttacttgaattctagaaa

SEQ ID NO: 2779 - DNA, 752 bp, Enterovirus sp.
  C99, strain K292/YN/CHN/2013, complete genome.1
ttaaaacagctctggggttgttcccaccccagaggcccacgtggcggctagtactctggtatcacggtacccttgtacgcctgacatcccattccctactgaaggagaagcaaattgcacgatatcaaaaaaagggggtacaaaccagaaccaccacgaacaagcacttctgttaccccggtgatattgcatagactgttcccacggtcaaaagcgattgatccgttatccgctcaagtacttcgagaagccttagtatctccttggaatcttccgatgcgttgcgctcaacactcgaccccggagtgtagcttaggtcgatgagtctggacgatcctcactggcgacagtggtccaggctgcgttggcggcctacctatggcccaaagccataggacgctagttgtgaacaaggtgtgaagagcctattgagctactcgagagtcctccggcccgtgaatgcggctaatcccaaccacggatcaggtgattgcaatccagcagttggcctgtcgtaacgcgcaagtctgtggcggaaccgactactttgggtgaccgtgtttccttttatttttattactggctgcttatggtgacaatcgaggattgttatcataaagcgaattggattggccatccggtgaaagtaaaacacattatttacctttttgttggatttactacattatccacgttcactctagatttaattcgcatagttcttttgactagaagattttaccaacataaca

SEQ ID NO: 2780 - DNA, 756 bp, Enterovirus sp.
  A76, strain 10-3291-2, complete genome.1
cagacgtgtgctcttcccgatgtgggttgtacccacccacagggcccaatgggcgctagcacaccggtatcacggtacccttgtgcgcctgttttatgcaccctccccctatgtaacttagaagaaacaaacacacgatcaatagtaggcttggcgcgccagctaagtcttgatcaagcacttctgttaccccggactgagtatcaataggctgtacccacggctgaaagagaaaacgttcgttacccggctatctacttcgggaaacctagtaccatcatgaagactgcaaagcgtttcgctcagcacaaccccagtgtagatcaggtcgatgagtcactgcattcctcacaggcgactgtggcagtggctgcgttggcggcctgcctatggggaaacccataggacgctttaatgttgacatggtgcgaagagtctactgagctaggtagtagtcctccggcccctgaatgcggctaatcccaaccacggagcaagcgctcacaatccagtgagtagcttgtcgtaatgcgaaagtctgtggcggaaccgactactttgggtgtccgtgtttccttttatttttatcatggctgcttatggtgacaatctaagattgttatcatatagctattggattggccatccggtgaactctagagatattatctatttgtttgttggttttaccaagttaaacatcactagttacaccaccttactttatattatactactgaataatagaaaaagaaa

SEQ ID NO: 2781 - DNA, 759 bp, Ljungan virus
  strain 145SL,isolate 145SLG, complete genome.1
ttgaaaggggggccctgcagccgatataggctgcagggttcccctggtggggtgggtacgtctctcgctcattgagtgggggcgtggctcaccaaccacacctggttggtccccaggttcatgcaataaccactttttgtaatctttacatctaagcttaattcacccactagaactggacgaaaccgcttggaataagtttggttctctcttgagtgtgttttgtgttagcataatttctgtctctagagtgctttacactctagtaggggctgtacccgggcggtcccactcttcacaggaatctgcacaggtggctttcacctctggacagtgcattccatacccgctccacaatagaagatgatgtatatctttgtttgtgaaatgctcatgaaacgtgtgtgtaggcgtagcggctacttgaatgccagcggaacccccctagtggtaacactagcctctgggcccaaaaggcatgtctctgaccattcaagtacacaaccccagtgatacacacatttagtaatggctcagtaatggacattgattgatcatcagacaattgttaggaggcctaggtatgacgggctgaaggatgccctggaggtacccgcaggtaaccttaagagactgtggatctgaccaggggcccaccatggaaacatgggtagaagtcttcggaccttgggttaaaaaacgtctaggcccgccccccacagggatgtggggtttcccttataaccccaatatcacatt

SEQ ID NO: 2782 - DNA, 788 bp, Antarctic picorna-like virus 2
  nonstructural protein and structural1
cgataaaccggttatggagaccttctttggagaataatattttaaccgttattagctctttagaacttaaaaggatgattaatttctttgcacttctcccgtgctttatagattttacctatatgtgagttaaccctctcactccaatttgccctgagtgggcataaataactgaacgacggtatgtactttgtacgattccgtgaccagatgaatatagctgatgagtatcttagactcagcttgtatcttcattattggttaaccaaccttaccctcattaataaactgaatcccatatgggtccgtttcttgtttcttttgaattattattaaatctgaaaaggtaacatgtagttgtgaggcatgaggtactaccttagaaaggaatagaatttttggtttctctccgtctagaacaatgacggagtctcgcttgaaccctttgttattattgatcgtcacacaccagtgacattccgagtaagcatttatattgactactttgggcttgcacgatcagtccccaggctgatctctccccatcttatatcttgaatatgactatactcattgatctctaatacttagttattacacagcgtttctcttgattggtttcgaaaacgtgcgagagttttatacgcctgttaacccaggtaccatttcgttgatgcgattatctcgcaaaagaaactttttacggccaacatgaatggttagcccccttatagcctagcgatattatttatttaattttcagttaggcatcacaaataattcccacc

SEQ ID NO: 2783 - DNA, 807 bp, Passerivirus sp.
  strain waxbill/DB01/HUN/2014, complete genome.1
ttgaaagccccacctggggggctttccctgtgctgcgacctgtcgctaaccaagaggcatgacctcaagattggacccacagtcgccacaggtgtccgttgatacgctccggacctaacccggataatgtaacatcaaattatttaagatttatgagcttatatactgttatgaacaccagtaaacatgttagattaagagcaaaacacccccctcgtcaattctagaagtccgcgagggatttagggtagcaaactaggaatctagatgcatattcttgttttaaaacccacgctgcaagtgatctgttcactctcatccaccctcagggtggtcagtgtggtgagtcatagcgacacctaacagaggctaacctagtaactcttgtgaagttcaacacgctgacaggattccacgtccgtttactgctagcattcccgctcagagggtggcccaagtaattggtgctctgagtgtgcgtgagctagtatcccgcgagggataggtgtgttgtaatgacacaagttggtgaaaggtaaagtgctttaggctagctactggcccattggctacgagtagacatgtgcaggaggtacccgctcatcttagcggatgtgacctgtagctaattagtcaatgctcgctgtagaaatcttttccccttttttcttttatatacagagtgattcgcatttgtattgaagattgtgtgcctagtgtatcttggtattatcagaggaagcaatttaaactggattttcaattaggaggattaaaaccttgttaactttttataagcattataaa

SEQ ID NO: 2784 - DNA, 833 bp, Cardiovirus Hu/SIDS-347/DEU/2010
  polyprotein gene, partial cds.1
tttccggcccaggctaagagaaacatataagttagatttgatccaaatttcttgacgaattcggaacgagatgttctccctcccttgccgcttgttcacacccataactctgattcggccctttgtgacaagccccttggtgaaagaacctctctccttccgacgtggttggaattaacatcacttccgacgaaagtgctatcatgcctccccgattgtgtggtgttttctgccctgctgggcggagcattttcgggttgagaaaccttgaatcctttcttttggaaccttggttcccccggtctaagccgcttggaatatgacagggttattttctttattcttatttctacttttatgggttctatccatgaaaagggtatgtgctgccccttccttctttggagaattcacacggcggtctttccgtctctcaacaagtgtgaatgcagcatgccggaaacggtgaagaaaacagtcttctgtggaagtctagagtgcacatcgaaacagctgtagcgacctcacggtagcagcggaatcccctcttggcgacaagagcctctgcggccaaaagccccgtggataagatccactgctgtgagcggtgcaaccccagcaccctgattcgatggttactctctacggaatcaaaagatggttttctcaagccctccggtagagaagccaagaatgtcctgaaggtaccccgcgtgcgggatctgatcaggagaccaattgacagtgctttacactgtcactttggtttaaaaactgtcacagcttctccaaaccaagtggtcttggttttccactttttattgaatggtaat

SEQ ID NO: 2785 - DNA, 963 bp, Saffold virus
  isolate SAFV-3_NL2007-2690, complete genome.1
tttgaacgcgggacctgcgatagtgccaacccacgtcttttcccactcctaacccggttcccacctcgggtccattgtaaggaccagatatatcatcccttgaatgctggctaatcagaggaaagtcagcattttccggcccaggctaagagaaacatataagttagaaatgattctaatcccttgacgaaatcagaacgagatgttctccctcccttgccgcttgttcacacccactttattgattcggccttttgtgacaagccccttggtgaaaggacctctctctttctggcgtggttggaattaacatcctttccgacgaaagtgctaacatgcctccccgattatgtgatgttttctgccctgctgggcggagcattctcgggttgagaaatctcagaacttttcctttggaactttggttcccccggtctaagccgcttggaatatgacagggttattttcttaatcttatttctacttttatgggttctatccataaaaagggtatgtgctgccccttccttctttggagaattcacacggcggtctttccgtctctcagcaagtgtgaatgcagcatgccggaaacggtgaagaaagcagttttctgtggaagtctagagtgcacatcgaaacagctgtagcgacctcacagtagcagcggactcccctcttggtgacaagagcctctgcggccaaaagccccgtggataagatccactgctgtgagcggtgcaaccccagcaccctgattcgatggtcattctctacggaaccagagaatggttttcctaagccctccggtagagaagccaagaatgtcctgaaggtaccccgcgtgcgggatctgatcaggagaccaattgacagtgctttacactgccactttggtttaaaaattgtcacagcttctccaaaccaagtggtcttggtttttcaactttattgaatggcaat

SEQ ID NO: 2786 - DNA, 992 bp, Foot-and-mouth disease virus
  - type A,isolate IND 64/2004, complete1
ttgaaagggggcgctagggtctcacccctagcatgccaacgactgctcctacgtcgcactccacacttatgtgtgcgcgcgcgggaatcgatggactatcgttcacccacctacagctggactcacggcaccgcgtggccattttagctggactgtgcggacgaacaccacttgcgcacctcgcgtgactggttagtactcttaccactctccgcctacttggtcgttagcgctgtcttgggcactcctgttgggggccgttcgacgctccacggtttcccccgtgccgcacactacggtgttggggccgtttcgtgcgagtcgatcgcctggtgtgcctcggctgtcacccggcgcccgcctttcatttttaccgtcgttcccggcgttaacgggatgtaatcgcaagatttgccttcgcccggaagtgaaacggcaacttcacacacttttgcccgttttcatgagaaacgggacgtcagcgcacgaaacgcgccgtcacttgaggaacacttgtacaaacacgtttcacgcaggtctccacgactgacataaatcgtgcaacttgaagctccgcctggtctttccaggtctagaggggtgacattttgtactgtgtttgactccacgcttggtccaccggcgagagttagtagcagcactgttgcttcgtagcggagcatgatggccgtgggaacccctccttggtaacaaggacccacggggccgaaagccacgtcctaacggacccatcatgtgtgcaaccccagcacggcaactttactgtgaaagccactttaaggtgacactgacactggtactcaaccactggtgacaggctaaggatgcccttcaggtaccccgaggtaacacgcgacactcgggatctgagaaggggactgggacttctttaaagtgcccagtttaaaaagcttctatgcctgaataggtgaccggaggccggcaccttttctcaattaacactgtaatct

SEQ ID NO: 2787 - DNA, 1000 bp, Watson virus
  polyprotein gene, complete cds.1
tacccccctgcatctcttgtctgaagcgtccaatatatttggtcaccgttttggacagattgtaacggttctacctgcatctcttttcaatgactggcaaagtgcccggattagatatattaagtctttcgtagttagcttaggcgtggtgaaaattgactttttatatgctaatcaatccaaaacaaatttgcttgcatttttgtcccaccttcgggtgggttctttttagaacaggtttatcaatgtgacaagttgtgcgacctctagagaaaaatgtcaaaatactcggttcagaccggggttttaataactacatatattgatcgattattgaattgtagtcctcgccagttactaccagatgacggaggatgcatctaatatcatcccaaattaggtgtctcccaactttttggtaattaatgatatatatgtgtgtgttaaaatgtataaacacttttaagtaagaaagtgtagcactttcaaggttgtactcgttttgatactggttattttaactttatatataatttcccttttccctcataagtacacccacgtaatcgtggtaccgctatgacatcatacgggggtgaaaagtgtggctgacagtcccggcaacgttaattcggcggcggtttcctgcagtgtattctgcctcgggctccggtatgtgttatctaagataacagtagggaaattatttgatagctggtaatccttatcttaattagtgcagcgacggagtctttagtgagactaccaaacacggctagcttaatgctaacggtccgatgaaaggctggcggtcggaggatcacatatctctaagatatggtcgtgcagtatccgcccggggtttaaggcaacgggtcccctaatgtccgaatggaatccttttcttttatggtgacaccagtactttatttcgataaagtgctttatatgtgttattcctttataatatttttttcaatttattatataaatatctatc

SEQ ID NO: 2788 - DNA, 1000 bp, Foot-and-mouth disease virus
  - type A,strain IND17/77, complete1
cgttagactgtcgttcaaccacctccagttggactcacggcaccgcgtggccattttagctggattgtgcggacgaacaccgcttgcgcaactcgcgtgaccggttagtactcttaccaccttccgcctacttggtcgttagcgctgtcttgggcacacctgttggggttagttcgacgctctgcggtatcccccgcgtgacggactacggtgctggggccgcctcgtgcgagccgatcgcctggtgtgcttcggctgtcacccggcgcccgcctttcatcccccctaagttttaccgtcgttcccgacgttaaagggaggtaaccacaagcttgataccgtcttgtccgacgttaaagggctgtaaccaaaagcttgtaccgcctttccccggcgttaatgggatgtaaccacaagatgaaccttcacccggaagtaaaacggcaacttcacacagttttgcccgttttcgtgagaaatgggacgtctgcgcacgaaacgcgccgtcgcttgaggaggacttgtacaaacacgatctacgcaggtctccacaactgacacaaaccgtgcaacttgaaactccgcctggtctttccaggtctagaggggtgacattttgtactgtgcttgactccacgctcggtccactagcgagtgtcagtagtagcactgttgcttcgtagcggaacatgatggccgtgggaacccccccttggtaacaaggacccacggggccgaaagccacgcctaacggacccatcatgtgtgcgatcccggcacggcaactttactatgaacatcactttaaggtgacgctgaaactggtactcaaacactggtgacagactaaggatgcccttcaggtaccccgaggtaacaagcgacactcgggatctgagaaggggactgggacttctttaaaagtgcccagtttaaaaagcttctatgtctgaataggcgaccggaggccggtgcctttcctttaactactactactttt

SEQ ID NO: 2789 - DNA, 1000 bp, Foot-and-mouth disease virus
  - type A,strain IND258/99, complete1
cggtggactgttgttcacccacctacagctgaactcacagcaccgcgtggccattttagctggcttgtgcggacgaacaccgcttgcgcatctcgcgtgaccggttagtactcttaccacttgccgcctacttggtcgttcgcgctgttttgggtactcctgttgggggccgttcaacgctctacggtctcccctgcgtaacagactacggtgatggggccgcttcgtgcgagttactcgcctggtgtgcttcggctgtcacccggcgcccgcctttcatcccccctaagttttaccgtcgttcccgacgttaaagggatgtaaccacaagcttgaaccgccttgcccgacgttaataggctgtaaccacatgcttgtaccgcctttcccggcgttaacgggatgcaaccacaagatggaccctcactcgggaagtaaaacgacaaacacactcagttttgcccgttttcacgagaaatgggacgtctgcgcacgaaacgcgccgtcgcttgaggaagacttgtacaaacacgatctatgcaggtttccacaactgacacacatcgtgcaacttgaagctccgcctggtctttccaggtctagaggggtgacactttgtactgtgcttgactccacgctcggtccactggcgggagtgagtagcagaactgttgcttcgtagcggagcatggtggccgtgggaacccccccctggtgacagggacccacgggccgaaagccacgtcctaacggacccaccatgtgtgcaaccccagcacggtaactttactgtgaaaaccactttaaggtgacactgatactggtactcaaccactggtgacaggctaaggatgcccttcaggtaccccgaggtaacacgcgacactcgggatctgagaaggggactgggacttctttaaaagtgctcagtttaaaaagcttctatgcctgaataggcgaccggaggccggcgcctttctcttaaaccactactacatta

SEQ ID NO: 2790 - DNA, 1000 bp, Foot-and-mouth disease virus
  - type A,isolate PD68/2011, complete1
gatggactgtcgttcacccacctacagctggactcaaggcaccgtgtggccattttagctggattgtgtggacgaacaccgcttgcgcacctcgcgtgaccggttagtactctcgacaccttccgcctacttggtcgtcagcgctgtcctgggcactcctgttgggggcgctccgacgctctacggtctcccccgtttgacgggctacggtgatagggccgcctcgtgcgagttggtcgtctggtgtgcttcggctgtcacccggcgcccgcctttcatccccccctaagttttaccgtcgttcccgacgttaaagggatgtaaccacaagctttggaccgtcttgtccgacgttaacgggctgtaaccacatgcttgtaccgcctttcccggcgttaacgggatgtaaccacaagatataccttcacccggaagtaaaacggcaaacccattcagttttgcccgttttcatgagaaatgggacgtcagcgcacgaaacgcgccgtcgcttgaggaagacttgtacaaacatgatctatgcaggtttccacaactgacacacatcgttcaacttgaaactccgcctggtctttccaggtctagaggggtgacactttgtactgtgattgactccacgctcggtccactggcgggtgctagtaacagggactgttgtttcgtagcggagcatgatggctgtgggactccctccttggtaacaaggacccacggggccaaaagccacgtcctaacggacccatcatgtgtgcaaccccagcacggcaactttactgtgaaaaacactttaaggtgacactgatactggtactcaaccactggtgacaggctaaggatgcccttcaggtaccccgaggtaacacgcgacactcgggatctgagaaggggactggggcttctttaaaagcgcccagtttaaaaagcgtctatgcctgaatgggcgaccggaggccggcgcctttcttttactactacttaactg

SEQ ID NO: 2791 - DNA, 1000 bp, Foot-and-mouth disease virus
  - type O,isolate ETH/4/2015, complete1
gttggactgtcgttcacccacctacgactggactcactgcaccgcgtggctaccctagttggatagtgcggacgaacaccacttgcgcacctcgcgtgactggttagtactcttaccactctccgcctgcttagtcgttagcgctgttttgggcactcttgttgggggccgttctacgctccacgttctctcccgtgcaacggactacggcgttggggccgctccgtgcgagcagctcgcttggtgtgtttcggttgtcactcggagcccacctttcacccccctccccctaagtaatgccgtctttcccgacgttaaagggaggttaccgcaagctcagtaccgccttgcccggcgttaagggcctgtaaccacacgcttacaccgcttttcccggcgttacgggatgcaaccgtaagatgatccttcaaccggaagtaaaacggaaacacgcacattttgcccgttttctgagaaacgggacgtcggcgcacgaaacgcgcagtcgctcgcgggacacttgtacaaacacgactcacgcaagattccacgactgacacaactcgtgcaacttgaaactccgcctggtctttccaggtctagaggggtgacactttgtactatgactgactccacgctcggtccactggcgggtgttagtaatggcattgttgtttcgtagcggagcgtagtggccgtgggaactcctccttggcaacaaggacccacggggccaaaagccacgtcctagcggacccactacgtgtgcgacccaggcacaacaaccttgctgtgaaaaccaccttaaagtgacactgatactggtactcagccattggtgacaggctaaggatgcccttcaggtaccccgaggtaacatgagacactcgggatctgagaaggggactggggcttctttaaaagcgcccagtttaaaaagcttctatgcctgaataggcgaccggaggccggcgcctttccattacctaccactacttga

SEQ ID NO: 2792 - DNA, 1000 bp, Foot-and-mouth disease virus
  - type A,isolate IND 43/2006, complete1
gcgcgtggggaccgctggactaccgttcacccacctacggctggactcacggcaccgcgtggccattttagctggaatgtgcggacgaacgccacttgcgcacctcgcgtgactggttaatactcttaccactttccgcctacttggtcgttagcgctgtcttgggcactcccgttgggggccgttcggcgctccacggtttcccacacacggcaaactacggtgatggggccgctccgtgcgagttgatcgcctggtgtgctcggcgtcacccggcgcccgcctttcatttttaccgtcgttcccgacgtttaaagggaggtaaccacaagcttacaaccgtcttgtccgacgttaaagggctgtaaccacaagcttgtaccgcctttcccggcgtcaaagggatgtaaccgcaagatacgccttcacccggaagtaaaacggcaacttaacacagttttgcccgttttcacgagaaacgggacgtttgcgcacgaaacgcgccgtcacttgaggaagacttgtacaaacacgatccacgcaggtttccgcaactgacaagaaccgtgcaacttgaagctccgcctggtctctccaggtctagaggggtgacactttgtactgtgcttgactccacgctcggtccactggcgagtgttagtaacagcactgttgcttcgtagcggagcatggtggccgcgggaactcctccttggtgacaaggacccgcggggccgaaagccacgtcctaaccgacccaccatgtgtgcgaccctggcacggcaactttactgtgaaacccacttcaaggtgacactgatactggtactcaaccactggtgacaggctaaggatgcccttcaggtaccccgaggtaacacgcgacactcgggatctgagaaggggactggggcttctttaaaagcgcccggtttaaaaagcttctacgcctgaataggtgaccggagccggcacctttccttttgaactaccaatttta

SEQ ID NO: 2793 - DNA, 1000 bp, Foot-and-mouth disease virus
  - type A,isolate IND 245/2007,1
tcgcgggaaccgatggactgtcgttcacccacctacagctggactcacggcaccgcgtggccattttagctggattgtgcggacgaacaccgcttgcgcatcttgcgtgaccggtcagtactcttaccaccttccgcctacttggtcgttagcgctgttctgggcactcctgttgggggccgttcgacgctccacggtctcccccgtctgacggactacggtgatggggccgcctcgtgcgggttggtcgtttggtgtgcttcggctgtcacccggcgcccgcctttcatttttaccgtcgttcccgacgttaaagggatgaaaccacaagcttgaaaccgtcttgcccgacgttaatgggttgtaccacacgcttgtaccgcctttcccggcgtcaacgggatgtaaccacaagataaaccttcatccggaagtaaaacggcaaccacactcagttttgcccgttttcatgagaaatgggacgtctgcgcacgaaacgcgccgtcgcttgaggaagacttgtacaaacacgatctatgcaggtttccacaactgacacaaaccgtgcaatttgaaactccgcctggtctttccaggtctagaggggtaacactttgtactgtgtttgactccacgctcggtccaccagcgagtgttagtaacagcactgttgcttcgtagcggagcatgatggccgcgggaattcccccttggtgacaaggacctgcggggccgaaagccacgtcctaatggacccatcatgtgtgcaaccccagcacggcagctttgctgagaaaaccactttaaggtgacactgatactggtactcaatcactggtgacaggctaaggatgcccttcaggtaccccgaggtaacaagtgacactcgggatctgagaaggggacaggggcttctttaaaagcgccctgtttaaaaaacttctatgcctggataagcgaccggaggccggcgcttttctaccaaaccactactgacttg

SEQ ID NO: 2794 - DNA, 1000 bp, Foot-and-mouth disease virus
  - type A,isolate IND 447/2005,1
cgcgggaatcgatggactatcgttcacccacctacagttggactcacggcaccgcgtggccattttagctggactgtgcggacgaacaccacttgcgcacctcgcgtgactggttagtactcttaccactttccgcctacttggtcgttagcgctgtcttgggcactcctgttgggggccgttcgacgctccacggtttcccccgtgccgcacactatggtgttggggccgcttcgtgcgagacgatcgcctggtgtgcttcggctgtcacccggcgcccgcctttcatttttaccgtcgttcccgacgttaaagggagataaccacaagctcaacgccgtcttgcccgacgttaaaggactgtaaccgtaagcttgtaccgcctttcccggcgttaacgggatgtaaccgcaagatttgccttcacccgggaagtaaaacggcaatttcacacagttttgcccgttttcatgagaaatgggacgtcagcgcacgaaacgcgccgtcacttgaggaagacttgtacaaacacgcttcacgcaggtctccacaactgacacaaatcgtgcaacttgaaactccgcctggtctttccaggtctagagggtgacattttgtactgtgtttgactccacgcttggtccaccggcgagagttagtaacagcactgttgcttcgtagcggagcatgatggccgtgggaacccctccttggtaacaaggacccacgggccgaaagccacgtcctaacggacccatcatgtgtgcaaccccagcacggcaactttactgtgaaagccgctttaaggtgacactgatactggtactcaaccactggtgacagctaaggatgcccttcaggtaccccgaggtaacacgcgacacttgggatctgagaaggggacagggacttctttaaaagtgccccagtttaaaaagcttctatgcctgaataggtgaccggaggccggcaccttttctcaattaacactgaaatctta

SEQ ID NO: 2795 - DNA, 1000 bp, Foot-and-mouth disease virus
  - type Asia 1,strain IND 491/97,1
acgcgggaaccgatggactgttgttcacccacctacggctggactcacggcaccgtgtggctatgatagctgaattgtgcgaacgaacgccgcttgcgcatcttgcgtaaccggttagtacctttataactctccgcctacatggtcgtcagcgctgtcctgggcacacccgttggggaccgttcgacgttctacggtttcccccgtataacaaactacggtaatggggccgcttcgcgcgagccgatcgcctggtgtgcagcggctgtcacccggcgcccgcctttcatttttaccgtcgttcccgacgttaaagggttgtaaccacaagcttggaaccgtcttgcccgacgttaacgggctgcaaccacacgcttgtaccgctttcccctgcgttaaaggggtgtaaccacaagatgtaccttcgcccggaagtaaaacggcaatcacactcagttttgcccgttttcatgagaaacgggacgtcagcgcacgaaacgcgccgtcgcttgaggaagacttgtacaaacacgatccacgtaggtttccacaactgacacaaaccgtgcaatttgaagctccgcctggtctttccaggtctagaggggtgacactttgtactgtgcttgactccacgctcggtccactagcgagtgttagtagcaacactgttgtttcgtagcggagcatgatggccgtgggaactcccccttggtaacaaggacccacggggccgaaagccacgtcctaacggacccatcatgtgtgcaaccccggcacggcaactttgttgtgaaagccactttaaggtgacactgatactggtacccaaccactggtgacaggctaaggatgcccttcaggtacacccaagtaacaagcgacactcgggatctgagaaggggactgggacttctgtaaaagtgcccagtttaaaaagcttctatgcctggataggcgaccggaggccggcgcctttcctttacctattactgttttc

SEQ ID NO: 2796 - DNA, 1000 bp, Foot-and-mouth disease virus
  - type A,isolate IND 88/2006, complete1
cgtgcactgccgggaaccgatggactgtcgttcacccacctacagctggactcacagcaccgcgtggccattttagctggactgtgcggacgaacaacgcgtgcgcatctcgcgtgaccgtttagtactcttaccactttccgcctacttggtcgctagcgctgcttttgggcactcctgttgggggccgtccgacgctccacggtctcccctgtgacggactacggtgatggggccgcctcgtgcgagttggtcgtttggtgtgctttggctgtcacccggcgcccgcctttcatttttaccgtcgttccggcgtaaaggggaggtagccataagcttgcaacgtctgcccgacgtaaaggctgtaaccgcaagattgtaccgcctgcccggcgttaaacgggctgcagccacaagatgaaccttcacccggaagttaaacggcaaacttgctcagttttgcccgttttcaggagaaatgggacgtctgcgcacgaaacgcgccgtcgcttgaggaggacttgtacaaacgcgattcattcaggttcccacaaccgacacaaaccgtgcaacttgaaacctcgcctggtctttccaggtctagaggggtgacattttgtactgtgtttgactccacgctcggtccactggcgagtgttagtaacagcactgttgcttcgtagcggagcatggtggccgcgggaattcctccttggtaacaaggacccgcggggccgaaagccacgtcctcacggacccaccatgtgtgcaaccccagcacggcaactttactgtgaaaaccactttaaggtgacgctgatactggtactcaaccactggtgacaggctaaggatgcccttcaggtaccccgaggtaacctgcgacactcgggatctgagaaggggactggggcttctttaaaagcgcctagtttaaaaagcttctatgcctgaataggtgaccggaggccggcacctttcctttaaacaactactttca

SEQ ID NO: 2797 - DNA, 1000 bp, Foot-and-mouth disease virus
  O,strain China/1/99(Tibet), complete1
tgtggggaccgctggactaccgtccacccacctacggctggactcacggcaccgcgtagccattttagctggactgtgcggacgaacgccacttgcgcaccccgcgtgactggttaatactcttaccactttccgcctacttggtcgttagcgctgccctgggcactcccgttgggggccgtccggtgctccacggttcccacgcatgacaaactacggtgatggggccgcttcgtgcgagttgatcgcctggtgtgtttcggctgtcacccgaagcccgcctttcacaagttttaccgtcgttcccggcgttaaagggaggtaaccacaagcttgcaactgtcttgctcgacgataaagggctgtgaccgcaagatgataccgcctttcccggcgttaattggatgcaaccacaagatgaaccttcacccggaagtaaaacggcaaattcgcctagttttgcccgttttcaggagaaatgggacgtctgcgcacgaaacgcgccgtcgcttgaggaggacttgtacaaacacgatctattcaggttcccacaaccgacacaaaccgtgcaacttgaaactccgcctggtctttccaggtctagaggggtgacattttgtactgtgcttgactccacgctcggtccactggcgagtgctagtaacagcactgttgcttcgtagcggagcatggtggccgcgggaactcctccttggtaacagggacccgcggggccgaaagccacgtcctcacggacccaccatgtgtgcaaccccagcacggcaactttactgtgaaaaccactttaaggtgacactgatactggtactcaaccactggtgacaggctaaggatgcccttcaggtaccctgaggtaacacgcgacactcgggatctgagaaggggactggggcttctttaaaagcgcctagtttaaaaagcttctacgcctgaataggtgaccggaggccggcacctttcttttaaacaactactttta

SEQ ID NO: 2798 - DNA, 1000 bp, Foot-and-mouth disease virus
  O genomic RNA,isolate O1Campos,1
gcgggacccgatggactttcgttcacccacctacagctggactcacggcaccgcgtggccattttagctggattgtgcggacgaacaccgcttgcgcacctcgcgtgaccggttagtactcttaccactctccgcctacttggtcgttagcgctgtcttgggcactcctgttgggggccgttcgacgctccacgggctctcctgtgtgacatctacggtgatggggccgtttcgcgcgggctggtcgtctggactgcttcggctgtcacccgacgcccgcctttcataggttttaccgtcattcccgacgtaaaagggaggtaaccacaagcttgaaaccgtccggcccgacgtaaaagggtggtaaccacaagcttactgccgtctttcccgacgttaaagggatgaaaccacaagacttaccttcgctcggaagtaaaacgacaaacacacacagttttgcccgttttcatgagaaatgggacgtctgcgcacgaaacgcgccgtcgcttgaggaggacttgtacaaacacgatctatgcaggtttccccaactgacacaaaccgtgcaacttgaaactccgcctggtctttccaggtctagaggggtaacactttgtactgagtttgactccacgctcgatccactagcgagtgttagtagcggtactgctgtctcgtagcggagcatgttggccgtgggaacacctccttggtaacaaggacccacggggccgaaagccacgtcctaacggacccaacatgtgtgcaaccccagcacggcagctttactgtgaaacccacttcaaggtgacattgatactggtactcaaacactggtgacaggctaaggatgcccttcaggtaccccgaggtaacaagcgacactcgggatctgagaaggggactgggacttctttaaagtgcccagtttaaaaagcttctatgcctgaataggtgaccggaggccggcacctttccttttataaccactgaatac

SEQ ID NO: 2799 - DNA, 1000 bp, Foot-and-mouth disease virus
  Asia1,strain YNBS/58, complete genome.1
ccacacttacctttgcgtacgcgcaggaaccgatggactttcgttcacctacctacagctggactcacggcaccgcgtggccattttagctggattgtgcggacgaacaccacttgcgcatttcgcgtgaccggttattactcttaccactttccgcctacttggtcgtcagcgctgtcctgggcacgcctgttgggggctgttcgacgctctacggtctcctccgcgtggcagactacggtgttggggccgcttcgtgcgagtcgctcgcctggtgtgctttggttgtcacccgaagcccgcctttcacaagttttaccgtcgttcccgacgttaaagggaggtaaccacaagcttgataccgtcttgcccgacgttaaaggctgtaaccataagcttgtaccgcctttcccggcgttaacgggatgcaaccacaagataaaccttcacccggaagtaaaacggtaacttcacacagttttgcccgcttttaccagaaacgggacgtctgcgcacgaaacgcgccgtcgcttgaggaagacttgtacaaacacgatctatgcaggtttccacaactgacacaaatcgtgcaacttgaaactccgcctggtctttccaggtctagaggggtgacattttgtactgtgctcgactccacgctcggtccactagcgggtgttagtaacagcactgttgcttcgtagcggagcatggtggccgcgggaactcctccttggtaacaaggacccacggggccaaaagccacgtcctaacggacccaccatgtgtgcaaccccagcacggcaactttactgcgaaaaccactttaaggtgacactgatactggtactcgaccactggtgacaggctaaggatgcccttcaggtaccccgaggtaacatgtgacactcgggatctgagggggactgggacttctttaaaagtgcccggtttaaaaagcttctatgcctgaataggcgaccggaggccggcgcctttc

SEQ ID NO: 2800 - DNA, 1000 bp, Foot-and-mouth disease virus
  - type A,strain IND17/82, complete1
gtccctgcgttgcactccacacttacgtttgtgaacgcacgggaaccgatggactttcgttcacccacctacagctggactcacggcaccgcgtggccatttagctggattgtgcggacgaacaccgcttgcgcttttcgcgtgaccggttagtactcttaccaccttccgcctacttggtcgttagcgctgtcttgggcactcctgttgggggctgttcgacgctctacggtctcccctgcgtgacagactacggtgtttggggccacctcgtgcgagccgctcgcctggtgtgtttcggctgtcacccggcgcccggctttcatcccccctaagttttaccgtcgttcccgacgttaaaggactgtaaccacatgcttgtaccgcctttcccggcgttaacgggatgtaaccacaagataaaccttcacccggaagtaaaacggcaacttcactcagttttgcccgttttcgagaaatgggacgtctgcgcacgaaacgcgccgtcgcttgaggaagacttgtacaaacacgatatatgcaggtttccacaactgacacacatcgtgcaacttgaagcctcgcctggtctttccaggtctagaggggtgacattttgtactgtgtttgactccacgctcggtccactggcgagtgttagtaacagcactgttgcttcgtagcggagcatgatggccgcgggaatccctccttggtaacaaggacccgcggggccgaaagccacgtcctgacggacccatcatgtgtgcaaccccagcacggcaactttactgtgaaactcactttaaggtgacactgatactggtactcatccactggtgacaggctaaggatgcccttcaggtaccccgaggtaacacgcgacactcgggatctgagaaggggactgggacttctttaaaagtgcctagtttaaaaagcttctatgcctgaataggcgaccggaggccggcgcctttctctaaccactaattaattg

SEQ ID NO: 2801 - DNA, 1000 bp, Foot-and-mouth disease virus
  - type O,isolate O/KEN/K60/20141
caactggactttcgttcacccacccacggctggactcacggcaccgtgtggccacttttctggactgtgcggacgaacgccgcttgcgcatctcgcgtgaccggttagtactcttaccaccttccgccaacttggtcgtcagcgctgtcttgggcactcccgtcgggggccgttcgacgctccactgtttctcttgtgtgctagactacggtgatggggctgtttcgcgcgggctgatcgcctggcgtctaggcgaacgcccgaagcctgcctttcacccccatcaccgtaagtaataccgtcttttccgacgttaaaggatagcaaccgcaagcttgctgccgtcttggccgacgttaaagggctgtaaccacaagcttgcaccgccttccccggcgtaaaatggatgtaaccgcaagaagaaccttcacccggaagtaaaacggcaacgttcacacttttgcccgttttgaagaaatgggacgtcagcgcacgaaacgcgccgtcgcttgaggatgacttgtacaaacacgatctacgcaggtatccacaactgacacaaaaccgtgcaatttgaagttccgcctggtctttccaggtctagaggggcgacactttgtactgtgattgactccacgctcggtccactagcgagtgctagtagtggtatcgtcgtttcgtagcggagcatggcggccgtgggatctcctccttggtgacaaggacccacggggccgaaagccacgccctaacgggcccgccatgtgtgcaaccccagcacggcaactttaccacgaagaccactttaaggtgacactgaaactggtactcaaccactggtgacaggctaaggatgcccttcaggtaccccgaggtaacacgcgacactcgggatctgagaaggggactgggacttctttaaagtgcccagtttaaaaagcttctatgcctgaataggcgaccggaggccggcgcctttccattaaccactactcaccac

SEQ ID NO: 2802 - DNA, 1000 bp, Foot-and-mouth disease virus
  - type SAT 2,isolate1
acgcgacactagggtgtcgccctagtgtcgcgtaccgaccgtcaccggttgaaacgctactgctcagacctctggctgtcgtacctctattaggcaggcaggaaccacccttttggggcccacgcgttttcgcccttttggggcccgcggtcaccacaccgcgcctccactaggctgacaaccgtgcctcctctaggctgacaactgtcgcccttttagggcctacgaccttcaagttacggctttagcgtccctcccgctgccgactcgcctacgtgaacgctagctcgtcacccgacggcctacctttcacccgggccgtcttaaagaacgtctccgtcttttccgacgttaatggattgtaaccaaacgctcttgccgtcgtgtccgacgttaaaggactgtaaccataagaaacaccttcccgcaggaagtaaaacatgcacaaagtaaccagttttgcccgttttcatgagaaatgggacgtccgcgcacgaaacgcgccgttgctctttgcattcttgtacaaacacgatctcacgcaggaatctcagaccaactcaacccgtgcatctgcaagtttcgcccggtctttccgggtctagagagacaaacagttgtactgagaccgactccacgattagtctactggcgggtattagtaacactcactttgcttcgtagcggagcacttgagcggtgggagtccccccatggtaacatggacccaccgggccaaaagccacgcttcatgcctcaagtgtgtgcaaccccagcacggcaatttgattgtgaaacctatcttaaggtaacactgagactggtacttggtttctggagacaggctaaggatgtccttcaggtaccccgaggtaacatgcgacactcgggatctgagaaggagactgggagttctgtaaaactgcccggtttaaaaagcttctatgcctgaataggtgaccggaggccggcaccttttccttttaccacaactaatttt

SEQ ID NO: 2803 - DNA, 1000 bp, Foot-and-mouth disease virus
  - type A,isolate IND 109/2006,1
atcggcagctcttgcgttgcactccacacttacgcccgtgcactgacgggaaccgatggactgtcgttcagccacccacagctggactcacagcaccgcgtggccattttagctggactgtccggacgaacaacgcttgcgcacttcacgtgaccgtttagtactcttaccactttccgcctacttggtcgttagcgctgcttttgggcactcctgttgggggccgtccgacgctccacggtctcccctctgtgacggactacggtgatggggccgcctcgtgcgagttagtcgtttggtgtgctttggctgccacccggcgcccgcctttcatttttaccgtcgttcccgacgttaacgggttgtaaccacacgcttgtaccgcctttcccggcgttaacgggatgtaaccataagatagaccttcacccggaagtaaaacggcaactacactcagttttgcccgttttcatgagaaatgggacgtctgcgcacgaaacgcgccgtcgcttgaggaagacttgtacaaacacgatctatgcaggtttccacaactgacacacaccgtacaatttgaagctccgcctggtctttccaggtctagaggggcgacactttgtactgtggctgactccacgctcggtccactggcgggtgtgagtaacaggactgttgcttcgtagcggagcatgttggccgtgggattccccccttggtaacaagggcccacggggccgaaagccacgtcttaacggacccaacatgtgtgcaaccccagcacggcaactttactgtgaaaaccactttaaggtgacactgatactggtactcaaccactggtgacaggctaaggatgcccttcaggtaccccgaggtaacatgcgacactcgggatctgagaaggggactggggcttctttcaaagcgcccagtttaaaaagcttctatgcctgaataggcgaccggaggccggcgcctttcttttaccattactaaacca

SEQ ID NO: 2804 - DNA, 1000 bp, Foot-and-mouth disease virus
  - type A,isolate IND 17/2009, complete1
ggcagctcctgcgttgcactccacacttacgcccgtgcactcgcgggaaccgatggactgtcgttcacccacctacagctggactcacggcaccgcgtggccattttagctggattgtactcttaccaccttccgcctacttggtcgttagcgctgtcctgggcactcctgttgggggccgttcgacgctccacggtctcccccgcctgacggactacggtgatggagccgcctcgtgcgggttggtcgtttggtgtgcttcggttgtcacccggcgcccgcctttcatttttaccgtcgttcccgacgttaaagggatgaaaacacaagcttgaaaccgtcttgcccgacgttaatgggttgtaaccacacgcttgtaccgcctttcccggcgttaacgggatgtaaccacaagacaaaccttcacccggaagcaaaacggcaaccacattcagttttgcccgttttcatgagaaacgggacgtctgcgcacgaaacgcgccgtcgcttgaggaagacttgtacaaacacgatctatgcaggtttccacaactgacacaaaccgtgcaatttgaaactccgcctggtctttccaggtctagaggggtaacactttgtactgtgtttgactccacgctcggtccaccagcgagtgttagtaacagcactgttgcttcgtagcggagcatgacggccgcgggaatccccccttggtgacaaggacccgcggggccgaaagccacgtcctgatggacccgtcatgtgtgcaaccccagcacggcagctttgctgagaaaaccactttaaggtgacactgatactggtactcaatcactggtgacaggctaaggatgcccttcaggtaccccgaggtaacaagtgacactcgggatctgagaaggggacaggggcttctttaaaagcgccctgtttaaaaagcttctatgcctggataagcgaccggaggccggcgcttttctactaaaccactactgacttg

SEQ ID NO: 2805 - DNA, 1000 bp, Foot-and-mouth disease virus
  - type SAT 1,isolate SAT1/KEN/K29/20141
agggggcactagggcgagaccctagtgtcgcgtaacgaccgtcaccggttgaaacgctactgctcagacctctggctgtcgtacctctattaggcagacaggaaccacccttttggggcctacgcgttctcgcccttttggggcccgcggctgtacgccgcgcctccactaggctgacaaccgtgcctcctctaggctgacaactgtcgcccttttagggcctacgaccttcaagttacggctttagcgtccctcccgctgccgactcgcctacgtgaacgctagctcgtcacccgacggcctacctttcacccccctccccctaaagaacgtttccgtcttttccgacgttaatggattgtaaccaaacgctcttgccgtcttgtccgacgttaaaggattgtaaccataagattcaccttcccgcaagaagtaaaacatgcacaaagtaaccagttttgcccgttttcatgagaaatgggacgtctgcgcacgaaacgcgctgttgctctttgcattcttgtacaaacacgatcttacgcaggaatcttagaccaacccaaaccgtgcaactgcaagtttcgcccggtctttccgggtctagagagacaaacagctgtactgaagccaactccacgtttggtccactagcgggtgctagtaacactcactttgcttcgtagcggagcacatgagcggtgggaactcccccatggcaacatggacccaccgggccaaaagccacgcctcgtgcctcatgtgtgtgcaaccccagcacggcaacttgtttgtgaaacacaccttaaggtgacactgatactggtacttgacttctggagacaggctaaggatgtccttcaggtaccccgaggtaacaagcgacactcgggatctgagaaggagactgggagttctataaaactgcccggtttaaaaagcttctatgcctgaataggtgaccggaggccggcaccttttcctttttaaaccactaaattct

SEQ ID NO: 2806 - DNA, 1000 bp, Foot-and-mouth disease virus
  (FMDV),strain C,isolate c-s8c1,1
acgacagtccctgcattgcactccacacttacgttgtgcgtacgcggggcccgatggaccatcgttcacccacctacagctggactcacgacaccgcgtggccattttagctggattgtgcggacgaacaccgcttgcgcttctcgcgtgaccggttagtactcttaccaccttccgcctacttggttgttagcgctgtcctgggcacccctgttgggggccgttcgacgctccacgggttcccccgtgcggcaactacggtgatggggccgtttcgcgcgggctgatcgcctggtttgcttcggctgtcacccgaaacccgcctttcataagttttaccgtctgtcccgacgttaaagggaggtaaccacaagcatactgccgccttccccggcgttaacgggatgcaaccgtaagacacaccttcatccggaagtgaaacggctgcgtcacatagttttgcccgttttcacgagaaatgggacgtctgcgcacgaaacgcgccgtcgcttgaggaagacttgtacaaacacgatctaagcaggtttccccaactgacacaaaacgtgcaacttgaaactccgcctggtctttccaggtctagaggggtaacactttgtactgtgtttggctccacgctcgatccactggcgagtgttagtaacagcactgttgcttcgtagcggagcatgacggccgtgggaactcctccttggtaacaaggacccacggggccaaaagccacgcccacacgggcccgtcatgtgtgcaaccccagcacggcgactttactgcgaaacccactttaaagtgacattgaaactggtacccacacactggtgacaggctaaggatgcccttcaggtaccccgaggtaacacgcgacactcgggatctgagaaggggactggggcttctataaaagcgctcggtttaaaaagcttctatgcctgaataggtgaccggaggtcggcacctttcctttacaattaatgaccct

SEQ ID NO: 2807 - DNA, 1000 bp, Saffold virus 1
  complete genome.1
tagcatcttcgcggtaaagaacaccccaggggtaacccctttgaacgcgggactgcgatagtgccaccccacgtctttcccactcctaacccgactcccacctcgggtccaatgaaaggaccaaataattcatcccttgaatgttggctaatcagaggaaagtcagcattttccggcccaggctaagagaaacatataagttagatttgattcaaatcccttgacgaattcgaaacgagatgttctccctcccttgccgcttgttcacacccatacatttaattcggcctcctgtgacaagcccctcggtgaaagaacctctctcttttcgacgtggttggaattaacatcatttccgacgaaagtgctatcatgcctccccgattatgtgatgttttctgccctgctgggcggagcattctcgggttgagaaaccttgaatcttttcctttggaaccttggttcccccggtctaagccgcttggaatatgacagggttattttctttatcttatttctactttcacgggttctatccgtgaaaagggtacgtgttgccccttccttcttcggagaattcacacggcggtctttccgtctctcgacaagtgtgaatgcaacatgccggaaacggtgaagaaaacagttttctgcggaagtctagagtgcgcatcgaaacagctgtagcgacctcacagtagcagcggactcccctcttggcgacaagagcctctgcggccaaaagccccgtggataagatccactgctgtgagcggtgcaaccccagcaccctgattcgatgaacgttctttacggaaccagaggatggttttcctaagccctccggtagagaagccaagaatgtcctgaaggtaccccgcgtgcgggatctgatcaggagaccaattgactgtgctttacaccgtcactttggtttaaaaactgtcacagcttctccaaaccaagtggtcttggttttccaattttattaactggcaat

SEQ ID NO: 2808 - DNA, 1000 bp, Foot-and-mouth disease virus
  - type A,strain IND81/00, complete1
aaagggggcgctagggtcgcacccctagcatgccatcggcagctcctgcgttgcactccacacttacgctcgtgcactcgcggggactgatggactgtcgttcacccacctacagctggactcacagcaccgcgtggccattttagctggattgtgcggacgaacaacgcttgcgcacctcgcgtgaccgtttagtactcttaccattttccgcctacttggtcgttagcgctgccttgggcactcctgttgggggccgtccgacgcttcacggtctcccccgtgtgacggactacggtgatggggccgcctcgtgcgagttggtcgtttggtgtactttggctgtaacccggcgccctcctttcatcccccctaagttttaccgtcgttcccggcgttaaagggatgtaaccacaagataacccttcacccggaagtaaaacggcaaccacactcagttttgcccgttttcatgagaaatgggacgtctgcgcacgaaacgcgccgtcgcttgaggatgacttgtacaaacacgatctaagcaggtttccacaactgacacacaccgtgcaatttgaaactccgcctggtctttccaggtctagaggggcgacactttgtactgtgattgactccacgctcggtccactggcgggtgcgagtaacaggactgttgcttcgtagcggagcatgttggccgtgggattccctccttggtaacaaggacccacggggccgaaagccacgtcctaacggacccaacatgtgtgcaaccccagcacggcaactttactgtgaaaaccactttaaggtgacactgatactggtactcaaccactggtgacaggctaaggatgcccttcaggtaccccgaggtaacacgcgacactcgggatctgagaaggggactggggcttctttaaagcgcccagtttaaaaagcttctatgtctgaataggcgaccggaggccggcgcctttcttttaccattactaaactg

SEQ ID NO: 2809 - DNA, 1000 bp, Foot-and-mouth disease virus HKN/2002
  complete genome.1
cgactcccgcgtcgcactccacacttacgtctctgcaagtgtaggaaccgacggactgtcgctcacccacctacagctgaacccacaacaccgcgtggccattttagctggattgtgcggacgaacgccgctcacgcatgtttcgcgtgaccggtcaatactcttaccactttccgcctacttggtcgtcagcgctgttgtagggcactcctgttgggggctgttcgacgctccgcggtctcccccgtactgagactacggtgttggggccgccacgtgcgggccgctcgcctggtgtgcttcgactgtcacccgaagcctacctttcaaagtaacaccgtcgctcccgacgttcaaagggaggaaaccacaagcttgcaccaccactcccggtgtcaacgggatgtaaccgcaagatgaaccttcacccggaagtaaaacggcaacttcacacagttttgcccgttttcatgagaaacgggacgtttgcgcacgaaacgcgccgtcgcttgaggaagacttgtacaaacacgatttaagcaggtttccacaactgataaaactcgtgcattttgaaaccccgcctggtctttccaggtctagaggggtgacactttgtactgtgctcgactccacgctcggtccactggcgggtgttagtagcagcactgttgcttcgtagcggagcatggtggccgtgggaactcctccttggtgacaaggacccacggggccaaaagccacgtccagatggacccaccatgtgtgcaaccccagcacggcaaccttactgcgaacaccaccttaacgtgacactgatactggtactcggtcactggtgacagactaaggatgcccttcaggtaccccgaggtaacacgggacactcgggatctgagaaggggattgggacttctttaaaagtgtccaatttaaaaagcttctatgtctgaataggcgaccggaggccggcgcctttccattacctactactaaatcc

SEQ ID NO: 2810 - DNA, 1000 bp, Foot-and-mouth disease virus
  - type A,isolate A/HY/CHA/2013,1
agggggcgttagggtctcagccctaacatgccaacgacagctcctgcgtcgcactccacacttacgtctgtgtgcgtgcgggaaccgatggactttcgttcacccacctacagctgggctcacggcaccgcgtggccattttagctggtttgagcggacgaacgtcgcttgcgcgcctcgcgtgaccggctagtactcttaacactccgcctacttggtcgttagcgctgtcctgggcactcctgttgggggccgttcgacgctctacggtctcccccccgcagcagtctacggtgatggggccgcttcgtgcgagccgatcgtttggtgtgcctcggttgtgaccttctcgtccgagtaaaggacggtaaccgcgagctttaaaccgcctttcccggtgttaacgggatgtaaccacaagatggaccttcgcccggaagtaaaacggcaacacacacagttttgcccgttttcatgagaaacgggacgtcagcgcacgaaacgcgccgttgcttgaggaggacttgtacaaacacgatttacgcaggttcccacaaccaacacaaaccgtgcaatttgaaatcccgcctggtcattccaggtctagaggggtgacactttgtactgtggttgactccacgctcggtccactggcgagtgtgagtagtagcactgttgcttcgtagcggagcatggtggccgcgggactccctccttggcaacaaggacccgcggggccgaaagccacgtctttgacccaccatgtgtgcaaccccagcacggcaaccttactacgaaaaccactttaaagtgacactgatactggtactcaaccactggtgacaggctaaggatgcccttcaggtaccccgaggtaacacgcgacactcgggatctgagaaggggactggggcttctgtaaaagcgcccagtttaaaaagcttctatgcctgaataggcgaccggaggccggcgcctttccctatctaccattacttac

SEQ ID NO: 2811 - DNA, 1000 bp, Saffold virus
  gene for polyprotein, partial cds,isolate: Pak-2325.1
agcatcttcgcggtaaagaacaccccaggggcaccccctttgaacgcgggacctgcgaaagtgccaacccacgtctttcccactcttatcccgattcccacctcgggtccaaagaaaggaccaattatttcatccctcgaatgctggctaatcagaggaaagtcagcattttccggcccaggctaagagaaacatataagttagatttggttcaaatcccttgacgaatttggaacgagatgttctccctcccttgccgcttgttcacacccacacatttaattcggcctattgtgacaagccccttggtgaaagaacctctctctttccaacgtggttggaattaacatcatttccgacgaaagtgttatcatgcctccccgattatgtgatgctttctgccctgctgggcggagcattctcgggtcgagaaaccttgaatcttttctcatggaaccttggttcccccggtctaagccgcttggaataagacagggttattttctttatcttgtttctacttttatgggttctatccataaaaagggtatgtgctgccccttccttcttcggagaattcacacggcggtctttccgtctctcgacaggtgtgaatgcagcatgccggaaacggtgaagaaaacagttttctgtggaagtctagagtgtacatcgaaacagctgtagcgacctcacagtagcagcggactcccctcttggtaacaagagcctctgcggccaaaagccccgtggatcagatccactgctgtgagcggtgcaaccccggcaccctgattcgatggacattctctacggaaccagagaatggttttctcaagccctccggtagagaagccaggaatgtcctgaaggtaccccgcgtgcgggatctgatcaggagaccaaatagcagtgctttacgctgttactttggtttaaaaattgtcacagcttctccaaaccaagtggtcttggttttctaattttattgaatggcaat

SEQ ID NO: 2812 - DNA, 1000 bp, Saffold virus
  gene for polyprotein, partial cds,isolate: Pak-3486.1
gcatcttcgcggcgaagaacaccccaggggtaccccctttgaacgcgggacctgcgacagtgccaacccacgtcttttcctactcccatcccggctcccacctcgagtccatagaaaggaccaagtacatcatcccttggatgctggctaatcagaggaaagtcagcattttccggcccaggctaagagaaacatataagttagaaatgatcacaatcccttgacgaaatcagaacgagatgttctccctcccttgccgcttgttcacacccacttcattaattcggccttttgtgacaagccccttggtgaaaggacctctctctttctgacgtggttggaattgacatcttttccgacgaaagtgctatcgtgcctccccgattatgtgatgttttctgccctgctgggcagagcattctcgggttgagaaaccttgaacctcttcctttggaaccttggttcccccggtctaagccgcttggaatatgacagggttattttccttatcttatttctactttcatgggttctatccatgaaaagggtatgtgttgccccttccttcttcggagaattcacacggcggtctttccgtctctcgacaagtgtgaatgcaacatgccggaaacggtgaagaaaacagttctctgtggaagtctagagcgcgcatcgaaacagctgtagcgacctcacagtagcagcggactcccctcttggcgacaagagcccctgcggccaaaagccccgtggataagatccactgctgtgagcggtgcaaccccagcaccctgattcgatgaacgttctttacggaaccagaggatggttttctcaagccctccggtagagaagccaagaatgtcctgaaggtaccccgcgtgcgggatctgatcaggagaccaattgacggtgctttacaccgtcactttggtttaaaaactgtcacagcttctccaaaccaagtggtcttggttttctacttttattgactggcaat

SEQ ID NO: 2813 - DNA, 1000 bp, Saffold virus
  partial gene for polyprotein,strain Finland 2008,1
cattttcgcggtgaagaacaccccaggggtaccccctttgaacgcgggacctgcgagagtgccaacccacgtcttttccctcttttaccccgattcccacctcgggtccaatgaaaggaccaaacatttcatcccttgaatgctggctaatcagaggaaagtcagcattttccggcccaggctaagagaaacatataagttagatttgatttgaatcccttgacgaattcggaatgagatgttctccctcccttgccgcttgttcacacccactgttttgattcggccccttgtgacaggccccttggtgaaagaacctctctcttttcgacgtggttggaattaacatcacttccgacgaaagtgctatcatgcctccccgattatgtaatgttttctgccctgctgggcggagcattctcgggttgagaaaccttgactcttttcttttggaaccttggttcccccggtctaagccgcttggaatatgacagggttattttctttattcttgattctacttttatgggttctatccataaaaagggtacgtgctgccccttccttctttggagaattcgcacgacggtctttccgtctctcaacaagtgtgaatgcagcatgccggaaacggtgaagaaaacagttttctgtggaagtctagagtgcacatcgaaacagctgtagcgacctcacagtagcagcggaaccccctcttggcgacaagagcctctgcggccaaaagccccgtggataagatccactgctgtgagcggtgcaatcccagcaccctggttcgatggtcattctctacagaaccagagaatggttttcttaagccctccggtagagaagccaagaatgtcctgaaggtaccccgcgtgcgggatctgatcaggagaccaattgacagtgctttacactgtcactttggtttaaaaactgtcgcagcttctccaaaccaactggtcttggttttccaattttattttatggcagt

SEQ ID NO: 2814 - DNA, 1000 bp, Saffold virus
  gene for polyprotein, partial cds, isolate: Pak-3164.1
caccttcgcggcgaagaacaccccaggggtaccccctttgaacgcgggacctgcgagagtgccaacccacgtcttttcccacttttaccccggttcccacctcgggtccaatgaaaggaccaagcaattcatcccctgaatgttggctaatcagaggaaagtcaacattttccggcccaggctaagagaaacatataagttagatttgattcaaatcccttgacgaattcggaacgagatgttctccctcccttgccgcttgttcacacccatgttttagattcggcctcttgtgacaagccccttggtgaaagaacctctctcttttcgacgtggttggaattaacatcatttccgacgaaagtgctatcatgcctccccgattgtgtgatgttttctgccctgctgggcggaacattctcgggttgagaaaccttgaatcttttcctttggaaccttggttcccccggtctaagccgcttggaatatgacagggttattttctaaatcttatttccacttttgtgggttctatccacaaaaagggtacgtgctgccccttccttctttggagaactcgcacggcggtctttccgtctctcaacaagtgtgagtgcagcatgccggaaacggtgaagaaaacagtttcttgtggaagtctagagtgcacatcgaaacagctgtagcgacctcacagtagcagcggactcccctcttggcgacaagagcctctgcggccaaaagccccgtggataagatccactgctgtgagcggtgcaaccccagcaccctgattcgatggtcattctctacggaaccaggaaatggttttcttaagccctccggcagagaagccaagaatgtcctgaaggtaccccgcgtgcgggatctgatcaggagaccaatcgacagtgctttacactgtcgctttggtttaaaaactgtcacagcttctccaaaccaagtggtcttggttttctaatttttgttgaatggcaat

SEQ ID NO: 2815 - DNA, 1000 bp, Human cosavirus
  isolate Cosavirus_Amsterdam_1994, complete genome.1
gctcactcctgtacaccgtgagtccgcgcagtgctgacttaacacttaagtaatgtttaggccgagaattacaccgctcggctcccacctttcaccaccgtgggattaacaggtggtcaatctgtattcctgtctttggttatgtcaaagcaatacggcatgtgcaatggcgcacaggcccaaggcggagatctagacctcacagattgtgttacagattaagaccatgctggatggtcacgttggagactgcatgtggcagtcttgaaacgtgtggtttgacgtctaaccattatagcagtgggtggagtactgcaaagatgtcaccgtgctttacacggtttttgaaccccacaccggctgtttggcacttgcaggacagtaggtttattttctttcagatctcttttctagtcgtgcatgttctgtatgcacgagcggagtgatactcccgctccttcttggacaggcggcctccacgtcctttgtggaactcaaggttgccaagtcactggtgtttgaagtgaagattagagaaacactagggagtttcatgtggctttgccagggattgtagcgatgctgtgtgtgtgtgcggaatccccctcgtggcgacacgagcctcacaggccaaaagccctgtccgaaaggacccacacagtggggcacccccagcccctccctacaaagctttgtgcaaatgaacttttgtttggcttttcttaagcttctctcacatcaggccccaaagatgtcctgaaggtaccccgtgtatctgaggatgagcaccatcgactacccggacttgtgagccttttcacagacgcatgtggtacccaagccccttccctacggggaaggggctttgctcactcagcacaggatctgatcaggagatctgtctccggtgctttacaccggggcacagatttaaaaatttcccaaggcctggcacacaacctaggggactaggttttccttttatcacaaagatgtcaat

SEQ ID NO: 2816 - DNA, 301 bp, Thrips tabaci associated dimarhabdovirus 1
  isolate Tamono1 RNA2R
acagaggaatcaaaatcgctgaatactcttctcacgcttacactattgctcattattgcatctcctaaggacttatacatttgactcattttctactctagatgcactttccctccctctccatttattcacttgcactgaaaaaaactaacagacttaacaagcctttccgtctctcttgtctggatgtttgcgtctgtgctcttggggttcagcgtcctgggtatattattaacaggagccctattcccactagtccaccgactgacaagccaagtcgaccccaaggagattgaacatc

SEQ ID NO: 2817 - DNA, 304 bp, Clitocybe odora virus
  complete genome, isolate C-Holm.1
ctgtaccttcacaggttcagttaagacgaaatctcgtctttctctcctcaattggagttctatctttagttcttcttctgagagggtcccccagtcttgggtaattaggtagttacatcctaattacttcggccgggagttaggtcaagtcttttgatttgatattgcctcctaaaccgagtgacacccgccatccttccaaaggtagccgcagcccccacctaggggaaactgtaggatagtctctagagggaagtgacgaatggtcgtcggcctggtttagtaacatacaaatcagagtccc

SEQ ID NO: 2818 - DNA, 304 bp, Plasmopara viticola lesion associated mononega virus 2
  isolate1R
tcaagcttcgcatgaccggtaagtagttattttcattatttaataaaacttaggattaaaaaataatctagactacaatatgaaagatatcgcagttaatcttagtgtgttagttcattctttggaattattatcgaaaattctttctcggatcgaggaactaaataagtcagaaaatgagctagatgcaattggaacagaagaaacatggaccttagtataaccatgcattaggtttattttataaaacttaggagcaaatcacaattatccttaagtctttttttgtaattgaagtgaaatc

SEQ ID NO: 2819 - DNA, 305 bp, Wenzhou pesti-like virus 1
  strain WZSS31331 polyprotein gene,1
caagtacgctcatagttctcgagccaaccacacgaaagctagttggggcctttaaatatggaaacttctagtcgtaaggtggggtatctcccctatgggtggtgaacgcttgttcgctgcaataatggtgagtagtctctagactaatgctacctagtgagacaacgattatctgtctcatgtaagatagcattagtttggcgagccaggttgtttgggagcaaccctctgtcgataaactacacagtctgataggacgcacgaccttgcccattatgtaggataaagaatggtctgtcaacaca

SEQ ID NO: 2820 - DNA, 308 bp, Vespa velutina associated menton virus
  isolate VVAMV/144I, complete1
gcgattggttcaatcgccaatttgagaaagctttaattgatctcgacgtcgcttctgtacccggtataacggccctttctaagtatggcactaccttaggagaaatcctagggtttgatggcaaggcttttgatgcagagcgcatcaacatatttagaatttatgttctagatagattcaaaactttactccgaggagaagaatatgcagatccaattaagttattcataaaacaggaaccgcacaagattaagaaaatagaagacaatcgtcttcgcttgattagtgctgtctctgtggtggatacg

SEQ ID NO: 2821 - DNA, 308 bp, Beihai tombus-like virus 4
  strain BHZY58951 hypothetical protein 1,1
actcagcgacaactcggaccataccgagagatagaaaaggagccagagtcggcttggtagacccccagaaggaaaactgggagtactgggaaacccggcaacccaccgtgaagaggtagattagccagataggaagacgtttggaccttacgaggttgagcgcacatgggcattaatgtcccggtgttagtgattacggagagatggacgcaatgtacccttagcgacatctagacgcctaatacgagaggcggagcgctatttagcgcagggggccagcccgagtgccgccttcaagttatcgagag

SEQ ID NO: 2822 - DNA, 309 bp, Hubei picorna-like virus 36
  strain SCM50248 hypothetical protein1
taaaacttcttaccccaaaggtaggatttgcaatcgcagtgaccctagcagcaaagttttataatttctatcccaaagatagacgaggtgagcgtactcgataacgtctcagccaatgttaacttggctacgtaataaagtcaatttgatgataattagcgtgttacaacgcgtaaacacaataataaaccaacaaatcgcagagcggcagttagctagcaatcaagtatccacagtgtgatatatgtcaaatcaaccaagatattttcctctagagatttccaccacagaagagatagcagagcaatc

SEQ ID NO: 2823 - DNA, 314 bp, Soybean leaf-associated negative-stranded RNA virus 1
  isolate1R
tcatccccaaattccccagactccccacacactgactgcgacagaggtatttaataaaacttaggagtaaactctagatgcgcacaatgacgacctgccaaaaagcattggaggatttggcgaatgtgctcgacattctaacgagatgtctctccgaggctactcaagagaagtctgatttcgaggagattcatactccttctgacgacgtgatttctatttcttctgctgagcaaagtgcattataaagggcaacgttggtattagattatataagtcgtgtattaaataaaacttaggagataaccgcaatc

SEQ ID NO: 2824 - DNA, 314 bp, Changjiang crawfish virus 4
  strain CLX8819 hypothetical protein1
tatcacattttatttaataggcttaatatatgtaactatttagtttacagcttattgaatacaatttccatttacctaatttataatcatattcgtattaaagtattcacatttttcatagaagatcttttgaattccgctctagatatttaagttttgaagtattagttttgaaagtaataattatcacgattagtaattccagtcttttcgactataagaaaccttcgaccgttcggtaatctctaaccaaagaagtcctgattgtatttaattttagggggtgtatttattcattcgtcaccatagtacaa

SEQ ID NO: 2825 - DNA, 317 bp, Thrips tabaci associated dsRNA virus 1
  isolate THR-E_DN240952
ccccagcaaagtctagatgctggataattgacatccgctgggcgaatgtcgtagtagctgagagcaggcaggctcgttttattaatgattttaagccagtcgtttttgcttggcacttgcaggttctattgaaccgccggcccctattggccaactccgctggtcggagcattttagaaattgtttttgattttcctgtcggctggtccgatgagagcggtcttttggccgattttgaatcatctgttttggatattatacgtatccgtattttaaatgactctgaggtcgatgacgagattaccgcgcagcagctg

SEQ ID NO: 2826 - DNA, 318 bp, Alternaria longipes dsRNA virus 1
  strain HN28, complete genome.1
ttttggaaaattatacgcctctgtttctagagtttcttttccaatgcccatagagtttggtacccatgctcctaagggtttgagccaattcggtaccgggggtaggtttaagcagcgggtttctactccctcccgcactgagttctaccggtattgtaggaccaggctggcaatccggaccagcctgtaggatggatatctcaaggcgatatagttgtcttttcgtggctatggggttagaacggcgctccctactcgatccgagggagcagccccattcgctgtacgcgagactagcacattagctgcctatatctc

SEQ ID NO: 2827 - DNA, 319 bp, Picornavirales sp.
  isolate H1_Bulk_28_FD_scaffold_4 hypothetical1R
aagtgttaacactcccctcctgtagcttactccacggttatacaggtagtattatagtgggtgcgtctgtgtgagtggtatgtagcagactaagattctttaccaattttgaggaaatggcctcgatcctaacccgattgtgttaccgcctccatcactttgccccatattacaggttatgcattgagtaccgcttcttgatgtatgatgactggaaggctttgtgagatctcgttctcctgacaaacaggttgttatagagttgggcgtccccccgaaaacaaaaacggcaactggtgagctgactgatctagaaagc

SEQ ID NO: 2828 - DNA, 322 bp, Beihai sipunculid worm virus 5
  strain BHNXC41492 hypothetical1
atgggcagctatatattagctgcacggtagatacttttcaagcaagaggccagtgcagaccccttggtcgtatccagattttgcctagtgcgttaaaagagtccatcctcgccgggtatccagattaccggaggacctcatcagcacgtctgaagcggaatatatacgatagatcactagagacaagtctagacggatcagttagttggatttctctgcagtctgtaacgacgagagtgccagcagagctgagcgacctctattgatcgctgtgcacacccccgaactgacaacacgagatagaatcacttttcggcccatc

SEQ ID NO: 2829 - DNA, 323 bp, Wuhan insect virus 20
  strain WHCCII13322 hypothetical protein 1,1
acgggctctgctccgactctggttttgaatccccgttttcaattttggggttaccagagattgtggtgcgcagtggggctatccctaggaaaactagctctagaattagtttcttgaatcagtttagtttaggattagattttagatctcctaacccttctttacacaacgctttagtagcagtcgagagacgtgtctttactgtaggcaaaggcacggagattattcttcccccgcaacctgaggaaaacatttttcacagcttagattactttagagatgctgtggtgagggaagtcggcttttgtaagacctacaccccc

SEQ ID NO: 2830 - DNA, 327 bp, Blattodean nairo-related virus
  OKIAV321 segment M cRNA sequence.1
cacaaagaaacttacggctcagcaaccaaaactgtgctactggatcattgtttgtgtattaagtgcttcatattcatatttggtaatgtggtgtatctgcatacgtcactttatctccatttgcattatattatctttcattattgtcttctcttagatataggtatagttagtaataagctgtgaaattctagatagttgaactatagtaaactagtagacattaagaattaaatcactgacaagtagcagataaatcattttttcttaaactggaaagtaagtaaatacccacaagcaactgctgacagaatttgatgagtgaag

SEQ ID NO: 2831 - DNA, 336 bp, Cragig virus 1
  replicative protein and structural protein genes,1
aataaattaattggtcctaatttattttctttttctgtgtccgaccagcacaaatgattttgtcgttttgacaataattaaacaacagttactctagaacgtcatctaggaggagttctatgttctaacggttctcattatgaggcgcttgaattttggaataacctttgttacagttctctgagtttttgcacgttttttccattaaaaacgtgcagcctgtgttaggtttataaacactagggaaacgccccgaaagtgcgacttgcagataattgttgtcatgctgcattgtatttttacaacacggcttatatagccttaaccgaagattcc

SEQ ID NO: 2832 - DNA, 342 bp, Avian avulavirus 20
  isolate AAvV-20/great black headed2
tcacaatatcttcagaagattataacggcttaacaacaagaccatctaaatactatattacatgcatctatacgattcctttaaaataattaaattaatgacagtgacacaatattacaaaataatcttctagataatcctaaattgccaccctggaccaatttctcattctgatttaacagtgataccttcaccatttgtttttgtaatgatctagtatcagattctattggttttgagctttccaataataaagattttgaaccatcagttctaaaaaaaaccttttgggtgggtgaaatggaacttgggggcgacccctagcctgagaatatcccaaca

SEQ ID NO: 2833 - DNA, 344 bp, Dicistroviridae sp.
  isolate sru103dic1 genomic sequence.2
tcttgctatcttaggtaaaatgagaggttaaaataagttagtagtgctatttcggataagatgttagttatttaactttactgcttaggatgcatcgtggcagccccataaaaatccagagcccctccctcgtttctagaagattaagtcgtcaatagaaattaaataatagacttgcgtcaaaatataatgataataatcctagtaatagatctgataatacatataatggtagtttaagtaatgaagatgctccccctactccccaaaatgcacaagaacaggtacaaataacaacttttgaagctgatcttgctgtattacccgagcatgtcccaggagaa

SEQ ID NO: 2834 - DNA, 356 bp, Avocet picornavirus B
  isolate MW14 genomic sequence.1
cgcatatcctctccctcttttctcccttccccctccccgacctttttcccctctacggcctcggattgcggactgatatgacgcgcctgacgtggaattcaggaattctggaactgggggacttcgcccaagctgtgaaccggattaccgatgtagctccttgggtgcctcagggaagggaccagtagttctagagcacatgtgaagcactgacaaggggactgcgttgcatatccccgaccccggactctgtgtgatgatgctggattgccgctagcacagagaaaccacccttttagggctcgcagggcagtgtgtagcacctagtttgggaaagctaggctggtgtgtactgg

SEQ ID NO: 2835 - DNA, 357 bp, Hubei tombus-like virus 6
  strain WGML12775 hypothetical protein 1,1
gggtgcccaacagatgccacaggtcaggggtgtgaatggtctaaagctattgaagagttcaattgtgttcttatcaatgggggtcatagggtgacctttgaccccattgagaggaagcagttgaataaaagctcggaattcccccctgatcgtttgcagtgggaaaccactgttgggatacccaaggaacgtaggtatgttagagtgtctagaataggtcgcgatgtaaatattattccatttaataatgatatacgaactttgcaacgggcggtcgttgaacgagtcttcactgtgaaaagtgatggtgagttttgtcggccaccccgtccagctaaggatcatttccaaaacgta

SEQ ID NO: 2836 - DNA, 367 bp, Hubei sobemo-like virus 38
  strain QTM27202 hypothetical protein 1,1
agagatcgagcgaaacgggtttcgatatatcggaaaaaccgatccaatcagtagaaatgtcggtgcttatggaacaaattcttacattgcgcaaagatttcctgattttgacagaatcgataagctcgaagagtactgcccgccagagttccacacacagcggcaaaacaacacagcagaactccgaagtttcgcagtccattcaaaaataagacgcgaattgttagataggatacaaccgttgacgacccagcaattcaattcggttttggatcgaagcgaggacgtgttttcaaaaattagagttgagatttctgatgactttctagattttgataaggttttaaaaattgtgctatctcttaat

SEQ ID NO: 2837 - DNA, 382 bp, Apodemus agrarius picornavirus
  strain Longquan-Rl32 polyprotein1
tgatgagggtcgccatcccggttgtggtgacacaacgggcgtccctgcgctggcatgaggcctctttgaggctggagaatcgggatcggtaaccgaagagccccgtgagctagggttgactcctccgcctccctgaatgcggctaatcccaacccatgagcatccggtggcaatcccgccacaagggtgtcgtaacgcgtaagtcgtgggcggaaccgactactttgggaaggcgtgtttccattttatccattctactgtggttatggtgacaagttataaatctagatctatagcgtttgttgagagatatccaacaattgaacaaactcgcacagttcttttctttggaaggcttttctttggaaggcaaacagtgaaa

SEQ ID NO: 2838 - DNA, 384 bp, Salem virus
  complete genome.1
acgcttctagaaggtctccaatcactactgttatctttcaatcagtctaatcaccgaacttgattgatttgcttttatcattaaataactcttaaaatcactaaaaaaaacctaggactcaagagaacgagacccaagacagtccgacaagcccggaaccctcccaagagaggaacgaaagccgacaccccgagaacccaccaagatccaacaacaaccgagccacacccaccacaccgccagaaatccagacaaagccccgaaacaatcacactcctagccatccacagcggcctccttcccaacgaattggaaacgccacccaccacgtgtcatccctgacacttgggcataggcaatcaactcactccataagtagtaaat

SEQ ID NO: 2839 - DNA, 384 bp, Wenzhou picorna-like virus 35
  strain WZRBX39547 hypothetical2
ataaaattcagtattgaacgtatgggtgtcctcaagccaccgttgtgacaggcgcctacttggctgaactgaatgagtgcctaaaattgtgttgtttacgcaaaccaactagggtattggtggcgagccaattacctgaaagctctagatgatgttgagcgttgttcatttgaggagtacccaaatctttgtgtacgagccgttcctaggaacgttgtcgagcacacattgatgtagggcccgattacaggacatgccattgactaatcagagtgagtacaattttaggggagtccactgtaagttcttttcggcccagtccccgtgtagacgcaactcacaaaacatgttgacaatgctgctttttatttgccctcccttctt

SEQ ID NO: 2840 - DNA, 388 bp, Hubei levi-like virus 11
  strain WHWN53995 hypothetical protein1
gccgttaaggccccgctgcgctgcttcttcggacgctgcgtactgctttgcagatcccggcctacacccttctcggaggtatgtatgccgtatagtcaccgctgcaggttctctgctacgggccgtttactcggcggtgtatttcttttacacttgacttgaggtcacatatgtccaaggacgagctcctccagctgctttatagtcagcgcgaatctattcagcttatatctcctaacgggggtcgtcaagacctttctgtcggggatatcggtgatgcttcgcgctattctgtttcgcaactgcagggctttactttggcttatgcgagcgtgctttatgaacacgctgacgaactcgtcgcctctagacttcttaaggaatcgtg

SEQ ID NO: 2841 - DNA, 391 bp, Avian metaavulavirus 21
  isolate APMV/dove/Taiwan/AHRI33/2009,4
cttgtttagttaagttgaacggtgatggttacattcctcattgcacattgactcataactggcgttggtacaattaatctagttgacgaaagaggtcaactagcgtactctaacactaatattaatataaacacttaagcttaggctcacatctagatgtgaagaagcagtcactttaaattcattcaattaaattatcaattgatactgtactgaggcataaccacttacaacttagtgcacagccttattgctttacaatctgcagatagtggtaacttaggtcgaaatttagatttaaatgcataagtgctatactgttgatttaataaaaaaatgggggagaccaccaataaaacagcaactgccgctgctagaagtagacctaatc

SEQ ID NO: 2842 - DNA, 399 bp, Marine RNA virus
  BC-3 non-structural polyprotein and structural1
ttctagaatagctagattttaacctatgtattattattgttttatgtttatatatctgaccatcatgtccttaaactgttcggaggcgcactcatgtgtcaacgtgacttatgtgaaaccaaaaatgagctgtacatactgattacggcagtcgaccttagtgtctaccccttaaatagactgacgcttgtgtatatctgggaagcataatgcttgtggctatttagctgcggaggtcctaccactccaccaatgtagagacaggacatcgctctgaggtgagctttgtacccgtgtaaataaaaataccttaccaactttactctaaaacaaaagtctgtggaggactataaactctacacttatgtgccccaatctggagaggttgggatttcacaa

SEQ ID NO: 2843 - DNA, 399 bp, Hubei picorna-like virus 14
  strain QTM26191 hypothetical protein 11
acttgcaactaatcttcgagagtctaagaataagacactaatggctggtcaatccgctaataacggtctacagtacggtgaaactttttctacatcactattctggtaagaatgtaaatatacaatttgtcttatagacacctcaatgtgaaatgacgaacgaaaataacattgttgtattaaagcggctctttttagagttactaatcaagaacgcttgttggcagccccaatgaattctagatgttcaaatttgctaacgattaggctgttgttagtgaataaattaagcctgcgaattttataactgaaactttaaagcaagaacaacgacaaattttaactttcgcatcagaaggtgattccaaccacactaatgtgatagcaaaaagtttgcaa

SEQ ID NO: 2844 - DNA, 403 bp, Botrytis porri RNA virus 1
  RNA 1, complete genome.1
gcaaataaaagagctgccttttgaagccttttatttgtaaggaaaatttatattgatcgtcattcaacgatccccgctcgggttagaaagcaccacaagcgcagtgacgatcgcttgtgagtagtagtcacactagatggtaaattctatttggaacctcggacactctcaaaccgccttgtcaggatatcagcggatgtgaatagacgtgtggaacacaacgtgcccaccacatcttcaactgctcctgttagtgtataaatcagaaggataggtaaaccgagatctctagagaagaggctacctggcactgctgacgggccgtagtatactacgatatcgggaggaattgaagccttctgtaatcccccagtacccaggctctctagggtaaagtgagaga

SEQ ID NO: 2845 - DNA, 411 bp, Hubei tombus-like virus 15
  strain WHYY21098 hypothetical protein 1,1
gaatgccgcaccttgactgctgtctgtacgtccggaagacctggacccaacaaaaccttgccaggtagcagtgttaacgccaaggaatgcgtttgtcattgtaaacgcagaaccaccaaattattcaactacagcattccagagttgaacgacagctatgtttggacgcacaaagggtgtgtgtgtaacgaactggtggctctaaaacaacggcaccaactcgatgatggtctcagatatgtttcaaagtctaacttgtctagacatctcagaccgttcatcaagacggttagtccctgctcggaagatactgtgattgcccacagtgcaggcgctaagcgtaaactccttctctcggccaaattaagccttgaagtctatcctattcaacctgaggatggcgcggtgaaa

SEQ ID NO: 2846 - DNA, 416 bp, Riboviria sp.
  isolate plw155urn1 genomic sequence.1
ccccgcaattgtcccaaagattgcggggagcgagcctcggtaatatatttggattagcatatacggattatatttatgtgcatatagaaggagataaattgactgacttaatatttcaaaatgctttactagacattccggattttacaacagtatcattatttcaacacgaaatatcatctaccgagagtggatacacattccaattctgtactgttggttatgcttcctattaccagcatagtagctatttcgtgctatttcaatctaattccgataatttccttccattaattaaagattataaaagtagttcagagtttgcagatgtatctcgcacaatttatgattggtacaaccctacatacgatgatctagactactgtagcttttataaagttgaccaaattaataaa

SEQ ID NO: 2847 - DNA, 422 bp, Achimota virus 1
  complete genome.2
atgagtgctggccagagcattctcaagactcctccaccaggtccacagaacacagaaccccgaatgacaaagaagaggatttgcatcaccccactggacagaaggaaccaactcagatctgctacagcatccacaatcatcacaaagtcagcaatcgcatccttctctaaaaacaaactctctagcttgctcaaaattgcccaacagttaatcaatcatcccgtagatagatagatttccatgctaatacgcttaatgcatttaagaaaaaacttgaggatatatagtctgtatgattgaataaatgagatgggatgatcatcttagaagaaaagaagaatgggcccggaccccataaatgtccggacactctagattccaacatggctctatcaactcatcttagacaagcctattctgtg

SEQ ID NO: 2848 - DNA, 428 bp, Tesano Aedes virus
  16GH47 RNA, complete genome.1
ccacctctgatatacaggtgaaagttgtatatcaaaagaaatttttattttagttttaatatctagttcacagggctataacctaccccttattagtaacaaaatataaaaactcggtacagaccggggtattgatttgatgactttaagatggaattttgtttagtttacggaaggcccgtagctcttatcaatccccctaagagttacccctattctagaattccattttaattttatcaataggtatggataaatattagatagtaaggcaaggtacgtatcttatagaaatgttagtaagtacggagaagtacgcgactctagttgaacgataaatagcatctcgagcttaccagtagccctggcgttaacaatagaatagctaaaggcttctcctgaaagcaaccgctactataagatagcgt

SEQ ID NO: 2849 - DNA, 436 bp, Hubei diptera virus 11
  strain SCM51501 hypothetical protein 1,3
atctaacaacattcaatttactaaccatagatataagatacatttaaagaaaaccgtagtaaaagtcaaatacagtatacatcgaaatggacccagtatattttactaccacttgtcccagatgtggtgaaggaattaaatatataagggttgaaaaaccacttccaactacacaaaatcaacccaaacagacaggttaaatcattacaaatttttcattttgatattaatcccaatttatttttacagaagcttttacatttctaattatttattatttattgaaacatatatgtctgttcttatcccatctcttatttctttatacatctacttttggacataattaaattattattcagttatttatcattttaacacagagattatgttctagaccctttaatatttaaacaaaaccgtagtaaaagtcata

SEQ ID NO: 2850 - DNA, 440 bp, Salari virus
  isolate OTU77 RNA-dependent RNA polymerase gene,1
agaacaatcccaaaagctgtactgcctgtgccttttgtattggctccgaagtctgaattgcatgaccaaacatttgtacctttccctatgtcaactgctggtggtaaatgcgaccctgtcatgagactttggcaagcagcatctagaaattacaatcacagacctgcagactatctagcgtcaaagagagaaaggtttgacgagatgtatgaagatgaccctgaagagcagcggaagatacaggaaaagaataaagagaagaggggccttgcccatcgggctaacatcaaaggagaattagctgaagaggacctcaggctgctagcactagatggtgtgtttgggaagaagtttatgagcgatatggaaaagcaagtgaaatatgaagatagcaaaagaccttggaattggaacactgactgcactgatatagatgcttt

SEQ ID NO: 2851 - DNA, 445 bp, Blechomonas wendygibsoni Leishmaniavirus-like RNA virus 1
  strain1
gtagcctatagccttgctcctcttaaggagggctagtatcatgagcgtcaattcatgacctgatatagctttatgcgaaaatatcggggtcaacaatggtgtattctgtgtgacggtagctccggtttccgtaattctagatagttaataactctagttcccttgtggttagtcgttgtaagcgctggcatagatgcactcaaacgatcagacgccgagtcggtgcaaaaggagtggtttggcagccacactctatagaccgattcattctgactcgcctattgttgactatctactactaccaatcgctattgctctcgtcatcctatcagttcgacttgttagtgtctactctcgctctagactaacaaggcttctagttgtttcaactagattcatataagaactgatctgtgacatccaactttcgttattcatcatcaaa

SEQ ID NO: 2852 - DNA, 448 bp, Culex mosquito virus 2
  strain CMosV2/Santa Cruz, complete genome.1
atcaacacaaatcgagaaaaaaacttttataatggcttctaattcagtactaaaaattagcactcatctggagatgaagtttagagaacctcctagaactagtaaagatgtattaagagccttagaactcattaaagacaattataatgggtttccggagaatttagaaattataatggtgttttatgtattgtcgggattcacatgtaaatatttaggaaaattaggtcaattctatatttataaaagtacattatctggagtatttaatggtaggtgatgggatacgattattcataattatttatcctccgggaaatgtctagataaatttttctgcactagatacagtagctgcaaccattagattttaacaagatgagcgtgaaaaaaacagataacacaaatcatattatatcatcttattataattcgaatctatctgaac

SEQ ID NO: 2853 - DNA, 455 bp, Hubei permutotetra-like virus 3
  strain spider127212 RdRp and1
ctagaaatactgccgtactcttgctgactgttagtagaagtgttttatgtgtgacggacggatgtcaaacaaaggttgacatctctctcggcacattccaatacttcgctaaaccccctcctacaacacaatgtattgagcttgttacatctaccgctctagggaaaacagagtgttcccttcctccacactgtggagaagctcaatatgctgaggtcgacagtggatggttttctagagtcggagtctgtcaaggacttggactgacgaaaactactttgcaaggagcaccaactctaattggcaactggctttctgtatataatgttaccattactcgtattcccccagtcatagctgatgaacttgtagtcctttttgaccagaaatccaacgtgtactctttagtaccgcatttctatgttgagacatttttcattaaaacccaagatgga

SEQ ID NO: 2854 - DNA, 458 bp, Picornavirales sp.
  isolate ltt163shi1 genomic sequence.2
aataaaatataaccgttatgtagttgaaattgaggaaacgatagtaggctgtggtcttgtccaactaagatcgggtagcaattttattgtccgattatgttgtccaaggctccttacgccgattactcataacactatattttattataattttaaggtttaatgtgatcttgcacgataaatgttgatgtgaaaacgtcgtgtattgctattaaacttgcgtacctatttaggtttactcatcaagatcgcggagtgcagcccactcgaaatctagatacatcaactattctattagattaggtagtcaatagtttagtataatattacctgcaaattttgaacaaaatactataacaaaaacgcaacaacaaatattgtctttttcctctgaaggagaatgtaacaggtctggagtattaccagatagagttagtattccacgccaatttctgtcg

SEQ ID NO: 2855 - DNA, 459 bp, Culverton virus
  RNA-dependent RNA polymerase, nucleocapsid, and1R
atcttcacaggttgcccctaacatatgacgactggcatgattaatgacaagagataccttagttttaagagtttttagagttagaccaaatgtaaccacattccatgaagtactattaacattaaccttagacataagttatgtattatttttctatttgtagttcttaattgctttttaaaaactcacagataaaaaaactcggttaatcaaagaaaacccacctgaaagacaaacaatctacttagattatgtctgctatttttcccaagaattcgaaatttgtatgcatattaccctaatcaggtttttacactagtgacgagtataaaagctctagactaataagaggaccagcccgatacatagatagttttaacagaggttgatggtcgagggagtatgatataataattcagctctcaatctatatcgtagtgatgatatgatccattcaca

SEQ ID NO: 2856 - DNA, 463 bp, Darwin bee virus 8
  isolate NT-7 nonstructural polyprotein and1
aaaggactgttgtaatacagttgaatcaataagttgtgaatttgcagattgttgagtattcgttgtctcaatcttgtttgaggtgcttctgtggtggtcgcacttctagagtagctaagggtttgacacacatttaaatttcaagatcatgctagtagctgtcgagtcatttttccaaagaaagtccatgggatttacgtgatggacatgggtatgactccggagacggtgtaacgaggcagtaaagatcttgagatggcgtgtgtgaatgactccgccttgcattaatcacatgaaaagaccgttcggatagcggagctgacagtaggcacgtgatgattaatgtgactgtggaaacttagcgcgagattacttgtattctcaatctgctttaaagcaatgatgtgattcaggtgttaaaccaacgattgcatcgtgtgtaattagctagattggaagtggt

SEQ ID NO: 2857 - DNA, 464 bp, Plasmopara viticola lesion associated tombus-like virus 1
  isolate1
agagcccgtgagatattttcactcctaatagtagccatgaaaccttgattggtggattggcgaagctaggggcagagatcgctgcacgtagcccatgagtgacacatgggcgcggactggtaatatgcagaactattctagagaggggggagcatacctaacagtgcccaccctggtccttggtaagtttgatggacccgggaaggagcccgaaatactccggagttgcgagactcccgcggccggcgtaatggcgaacatgggaaggtaaggcgcaccctaaatgcgcaagggacggaaaacctaattacaaaccacaactagggcagcagcccgactcgttgcgtgctacgaggataaactcgcattgcggtcagaggtggtcattgatacctgaccttaaacaatgtcggtttggcccgactggcccccgtagaggggctatcccactacaattttcaatt

SEQ ID NO: 2858 - DNA, 476 bp, Beihai tombus-like virus 16
  strain BHWZXX15284 hypothetical protein1
ggggctgttagataatattagggaatttccaatggccttattggataaactttttaatgcacttattaaatacaagctagaaagtctacttttctcaggatgaatgttcaatactcagcacgagctaaaactgcaccacaaattgacctccgtttctatgtagtggaacgtaatggggaaattctagaagccttcgcaagataccatcacctaccacagcagcaaattgcctattttcatctggcaacacaagaattaggatctactggtggtatcttgcctaatcaacgcttcgcctcatatcgttactccgttccaccaggcttccaattacatccagaattgaataagtggttcaatgccacacccgctattataaaacgtgaagtgctgaagaaacctaacgtcgtcatgacgccaatttgtgctatactagatgctgagctggtgagtccttaccttagataatcaaacgt

SEQ ID NO: 2859 - DNA, 484 bp, Hubei picorna-like virus 16
  strain SCM51353 hypothetical protein 12
aacatgatgtgatcttatattttagaataaattagtgatgtaaaatttgaaatatattgctatcatgttaacagagttacctatttaggtttacttccaagatgctctagaagcagcccttccaaaatctaggaaccatcactcgattatatagtttaagttgactatatagtttaaattataacttgctacaaatcaaaatacaattcaaaatacaacagatgacgatgctagtcgtgaaataagtcaagtacaaaacgtaacatttcttaatcaaggacaagaagttgaagataaagcactccctagcattgttgatattaacccttcatatttaaatgaaacattatacgatgtttctcatgatataccagattttttggaaagaccaataagagtgtggaatggattttttgataatacacaaacaccaaatacatcattggcaactttacgatttccagatgtattattacaaaacaga

SEQ ID NO: 2860 - DNA, 489 bp, Weivirus-like virus sp.
  isolate plw156pic2 genomic sequence.1
gtatatatcatcattatcatcatttcattatcattatcattatcatcatcacgtacgtactacattctaagttctgaccagcttagtcttatttgtcacatgagcaacattttagtgagtgtcggagcacaatcgagaataaagtatcgttatagcgcctcacgaagagtgtggatcacagttcaagtcaaaccgttattgttgtagggtatatgggtaacctcacactacaaacaaccgcggcattctatatttggatgaatatagtaattactagacctcaatgcttgaaacccgttgaactagtatagacaccaattcgttagtgatctagagttttgtaaattgacttaataatttaccgtcggagcccgcaagcccacctggaataattttctaattttcaagaaattagacgttcagccacgtacggctaccagatctaaaagagctcgtaatgcttaattacaccccaaacagattgaagaa

SEQ ID NO: 2861 - DNA, 493 bp, Shahe picorna-like virus 11
  strain SHWC13613 hypothetical protein 12
ggaagcaatgtccttactatgactttaaactagtaaaggtagtgacttacactcgtctcgtctagacgtaagtagccgagggtggtgaccaacaccacgtgattactgcggtataaggaatgtgacactttatgggaagaccaaaagtgtagagaaatcaaggattctatgtgatcttgcattcatgatatatggagtaaaatcatgattgtattgctatagaattgtcaaggtgctatttagtttcggtgtcctttggagcagtcctcctaaacaccaatcctccaaatttcaagcgttgtacagacgtcgtttgatcttaatattctggcctacaaatacaaacacaacacccgaagagagcgggaataatttctctcaaactaatgtagaagcatctgctacttctgaagtgcaagctactactatatttaatgatgatgccggtattaccaccagttctatcgacaatcctgcgtccatctatcaaaag

SEQ ID NO: 2862 - DNA, 495 bp, Laverivirus
  UC1 gp1 and gp2 genes, complete cds.1
gtacggcatcattcaccggagagagtgatctcacaacgaataagaaagacgttaagagcgttaacgacacggaaacggacgttttgcggttacctattcaggtcggcttccccgcgatagcagccctatcaaatggagcagtttccaacttcctaagcacttggtcgtgcgaacggattttacatcagaccagcacaaacatttgacaatataccagaaaacacccccaccccctatcttgctgataattcatcatcagtaacagacaacacaggtctatttggaaacacaacacatgagcaaactggaaccactggctttactgatcaatcagtcgaagtagtcgtcaatggcggagacttaacagcaggtctctttgaagatgtagttgcaacagatactactaataccatcgttgattatctatctagatatcgaaaagtttttgactatcacttcggttctaccattggttaccatcctattgcagatttc

SEQ ID NO: 2863 - DNA, 500 bp, Erigeron annuus picorna-like virus
  strain pt013-pic-1-NW genomic1
aagaacatattgattaagttctttatattattacgcggatgatggcttgcgtgagggcctaccattcaaacggataatatacatagatcacttttatatgttttgtttttgtctttacatgtattcctttcaagaatatatggtgatgaagtcctgtaatgccattataggttaagaggcaaggtgtcttaatactaggtgaaacatgcaggcaggtctatttaagaattgattgataacgagactattaatgctgtgagttatttcgtgcaaaccgatcggataaacatttggcgacaaatgcctttgggcagagctgattaatttgcaggttaacattaatacgtattgtgcgtcgagcttcttttatagatatcggttgctagtattgacgaaatctagagtttgttttatgggactgctctgcggctaaagtaatagtgagttcctgactttaggcgtttcaagatgaaatcgtcgtttaaattttaaatctcatt

SEQ ID NO: 2864 - DNA, 501 bp, PNG bee virus 7
  isolate PNGBV/7 non-structural polyprotein gene,1
tgagccccaactcatggaattcttgttatagatactaagtcaaaagatgtgacgttaatatcgtagtttactgtggtaaaacgctttaaatgtcgattggtattgacggtgaaatctttgtatataacgtgacgttaggtacagcatcatactccggtgaaacgttttatgtataagtcgatacactaacggtaaagttatattctatagttttctcttcaagttttaaaaatgggaatccccctttattttaattgcatttatattcgcgtaagatctcttcttacatgcgtcttattttgtgttcaacgacattatcaaccgcttatctgggatagcaacccgttaggatgtcgtcatggtgtactacctctagatagttaaaagctagcatgatccttaagcaggagatgattgtatctagagaaggataatagttcttctacggaagcaactattttattttattttatttttaagtcttatcttcaatgtgacctt

SEQ ID NO: 2865 - DNA, 502 bp, Sunshine virus
  complete genome.2
aaacggaaatgaatgactttgttaagatttgatgatcaagttcttcactaaaatatacactactcagaaagagtagattgtggactttgtattcaaagagttaaacccacgagtcatccttcaacagagtacgagagaactccacactcttcccaattaaaaaatagggagagggagagagattaggcatacctagatctagaagttcagattctcctatctttgagcgtgttgaacaactcccaaaaacctagtcattgaaggcttgagaagaaggcaaagaacacaaatcacttgtttttgaatacttactgtctctaagtatatggacaaagaccccctcatcacaaacattacctcttaattggatgattaaatgccaggttgagatactctaaaaatgaaagaattgaagttagggctgtagttatctatcaggatcacagggtggcttatttttcaaatatattgggttttaataagaaaattgaagggcattaaa

SEQ ID NO: 2866 - DNA, 506 bp, Hubei odonate virus 6
  strain QTM11719 hypothetical protein 1,1
ccctagggggtggaattaaaattccaccttctagagatttttacccttaataaatgggttaacgatgataaatatttgagtaacactctcgtcaatgctcctagagttaacgaagatccaagtattttattactctcgtcaatgcttatttaatattgtatttagttttaagtttttatgtgtcgtggtgacctaaaaaccaaccaatttttaattcataatatcattttaattatatgataacccgtttaggctgtatattttatatgcgtgttatataatatcatttcattaaatttcatatattcattttaatttttgttaggtcattttcatccctaacaaattcctttggttcattttgagtttatgattttattattttgattagatgttttcgatcccctctttttattttaaaaattaaattacaaataaaagataataagacttctaccagagagagcagttctaaccctgcgcaggtagttgatacgtgtgttagg

SEQ ID NO: 2867 - DNA, 513 bp, Victoria bee virus 2
  isolate VN2-6 polyprotein gene, complete cds.1
gctactcacaaccttgttttctttctttgattgaatcaagccactgtgtttctccccacacacaaccactgtgtcttcttcggttgatatagtgccgctgtgctcccatcccacccattgcccttcttgatgtcggttctgttatttataacagcatgtctctggtttttttctttcggtgatctctcgcactagcatagattgcgagaacgatgcccttgaatcggtttcttcggactaacgaattcacataagtcacatatctttaaatgtccctctagacatgttaattagagggaaggtatgtatcagagtgtgtctacggtaccctgtatgtcaatggttagatgtacaaattagggatacggttatggcccaggaaacgttggtttacctgggttatacataacacaaatgctcattttgagcttctcttcttatgaatttattcatgcggcgaatggaacgcgcgtcttcggaccgtaagtactaatagccaaccacacatttgaa

SEQ ID NO: 2868 - DNA, 513 bp, Sanxia picorna-like virus 5
  strain SXXX34146 hypothetical protein2
ttactctacaggagttgacgttttctgtagtgctttagtttggagtagtcgaatctttcgaccccgggttatgagtaaatcctggggtttaaaattttactcgaaactaaatttaataatgaaaaccgagggagtagtaaaccctttacaaattcaaatggtggtattccacaaggactggatggtccgaatcacaaaagagttaactttgctctagaggatacactacatgattatagtgtagcttctgaagaaagtagtgacattacctcacttaggcaacgccaatttctttttgaaattggcgattgtggtaatatttctcagttttgccgtgctcgtcgcgctgctcgttctcttgttcgcttgaagtatgaggctcaatctttgttagagtctattgctgattccaacgttcaagccaatatagttggatttaccgatcacgatgctgggtatgaagcgggtttaatatcagcccgtgatgacagttattatgttagtgatgaaccc

SEQ ID NO: 2869 - DNA, 517 bp, Hepacivirus sp.
  polyprotein gene, complete cds.1
cccactagaaacgatcttctagaatggggaaccgcgacaagtgaatcacgatggactaagcgaccaagagtttaagtgacagggttgttcgcgtaaatcccggcttaaattcaaagttgaatatgtccgtacggagcactctagcaccggacgaaggatcgtggacggtgggcgtagggtacacagggtcagctgtgtataaactcagtactgaagcaggatttgggagcattgcagtcacactcaagtggagtactccgcctttaatacccgtatggggcaatactccgaggagggcgggttttcaaacgaaacttgagtaatactttatatggtctcaatatacacttgtggatgtagggaaaccagccatgggcggacccaaggcggcgcacctgacacatgcggcaagagaaaaaatccttcgggtgatctctgggtccattccaaaactatgaattgcgatttgtgcttacctcgtgttggttggctttgaacactaaatacaaacactaca

SEQ ID NO: 2870 - DNA, 519 bp, Wenzhou picorna-like virus 34
  strain WZFSL80163 hypothetical2
ttcgtgtttaattgagtttccggtctccataagaaaccggcctacttcctagggattagggagccacgtgtggtacacgctatgcagtggtgcgcaataaaacaccgggtttgatctcctttataatgatccatttgtcgatatatgataatcgtcgcaagttaatatgttcaattgtttattgtttctaggctgtatacacttgtgtttttacttgtaatcccttggctatttagccttactaatcaaggtggggagggtaattccaatacctagattctagatagcctctgaccttgagttaaaatcggaggtgaattattgtgactcgctattactaatacttctcaagaaggtgtcccttgtgagacaccaacaaatacctcgggtccttctgctcccgaggtgccttctcaggcagttaagcagaattgtttgtcaaagctagaaggtgcatcgtccactgcctttcaggaagatggtgctgtagtatctggaacaactagatctgttccatca

SEQ ID NO: 2871 - DNA, 527 bp, Anthurium mosaic-associated virus
  strain PHA segment dsRNA3,2R
gactaagatccagtccaccttctagtgtgaccagtctcttattctattggttaatgtctcagcattgtctgccgatacattaaccatatgttactaatcttgtctctctctgttccatttactaagaaaacttgcttccattaccatccaaatctgctcacgttctcacatattcttgttgttatatccacactcgcactcggtacccgtgtacctccatgcttcatactctcgtcttcctctactgcacttctttgttctacatacttcggtatttcctcatccaccatctcattttccaaccggctctccctcctctctggttaatgaatagctcttctagaagcactctgacgtctcccatactggactcactctttaatttacccatcggcaccaactcatctgccactgcacttcttgttaacgcatcgcagtgtataccgtcataggttattcctattatcttatcatgttccactccttttgtaccaatcccatatgcttcatttattcttttatcatat

SEQ ID NO: 2872 - DNA, 527 bp, Salem virus
  complete genome.2
ttatttatattaaagatcatgttgctcctcagtcagtatatataatttagctgattgacccgaattactacaacccacctttaaagctactagtctttgctcggccaacttttctaattagaataaagtcgctttccttgcagctaataatcctaaggctacagccaattgcttgactcctggaggttacacatgggtaatcatttgagcttgttcagataattacaagctgagattgagacaaaataataagaggaatttacctgtcctaatttaggtttagaagtgctctaagacagttaatcaattaataaaaaacttaggaatcacgtcaaatgaggcacacactgctctagaaccacacccaagcaccccggtttcctcttacacacccagcctgcatccccacaaaaacccaaggctttagcaagcccaagccaagcaagacgaaacccaaaaatcacggttcgactcttacctcattctccaccggttgcaattcagcctcagcatagcctaagggaaat

SEQ ID NO: 2873 - DNA, 549 bp, Beihai picorna-like virus 72
  strain BHHK126587 hypothetical protein1
gcaaaaacctacgcacaatatggccttagtggtgtttggccttaatttatagcctttggttaatcgacgccctctttgaggagttaacggacggccagctatggtcaccagaaaaatagcactttagacaaatacatttaaaaattctatattttcttgaattaagattgaagttcttgaactgaaagtcttcaatgaattgtgcaatgtacgtgtaaacagttccccgcgagggtgtcccacgttcttagcgtttcgccattgcattttgaagttgttgcattagtatgtgatagaaccaatttctctatgacctggactgtttttaactagatggttatggcagtaatctagtagttttgtaccaggcattaactcaactttagtgatattgtctacttgatacgtcgcgttttaaaatttaaggacaataggcgaggcccgcgagttgtcaaatcttaagtctatacccagatggtaaatagtatcactctagatgaggctaactaaagacttcttaaaacttctgcctttctttttccaaaattt

SEQ ID NO: 2874 - DNA, 553 bp, Blattodean arli-related virus
  OKIAV101 cRNA sequence.1
tagtaattaagaaaaaccaagacgctcaggtctttcatctcttacaagaaaatagaatggcatctacaagctcatcaaaaacccataataccattgaatctgtaaatctggtatatgatttacgtgataataaaagtggattcaattatcgcggtatcataaaattggggagatctagaactgcggaattttcagaacaaacgagaaaaacaacaataaagaaatggataactaaaatgaagattgttcaagggaatcctgtagaacttttaatacaatggagcattcctacaaatcaagatcttgttgaattgtgcttctccacggagatcactagcactgatttgagtatcaatttgggagtccctcgatatgaaataaatattgctgatttggagatcataaagtatgaaattggactgagttcgactcctgctaccaaaactgaactgaactattagggattatttacacatagtatttggcttaattaattgattaagaaaaaccaagaccactcacgtcttattttcctccgtattcctatataaac

SEQ ID NO: 2875 - DNA, 555 bp, Beihai levi-like virus 28
  strain BHXG26591 hypothetical protein1
ccccctagccgggggcaagaacgcaagttcacctctagaatcacctgtacaggtgcgtatcagtgattggtacgttcttgtgcggctaggggtccaatacaactgctacttgcagtcggacacatttcagtgccggcatgtacgtggcatttcgcgacgcactcagcctaaaggaggattaacattgtgcgtatttcacacaaatataatcaacctacctggttagagtgtcggtccgataaaaacggcccgttaaggtacgaggaaattactgttgaaggtaattccagtactccagatcgacaaataccctataaggctgcaaagccgtatacaagggcagatgtctttctagatagcagtgtaccatctggcgtcccggctggagttagtcttttagacttgcctacagccgacgacgttgttgcatcgttgttatctgacgagcccacgttggcatcatctgtgtttcaaccctttgttgatacgtcggatatccagaatcaggcacttcaaaatgccattgagtatggaaatatcttactccttgtctct

SEQ ID NO: 2876 - DNA, 562 bp, Hubei tombus-like virus 2
  strain WHSFII19265 hypothetical protein1
tctaggccgatgacggaatttcgctccttcgggggcatgcacggggaacgtaccttcggggcgtgctggtaatactcccaacaattctagatgcgtactgcgctcagcgccgggcacaccgttaagtgcttcaccctggtccttggtaaggttgatggaccctgaagaaacagtaaatcaccgggagagtgaactctcgttacatcatggttcgcccagttgcaaacgcgtctagagacaactaggcagagcggcagagggaagtgagacactctctgaagcgattaaatccgcgtgctgtccgtgactatagctgccgccagcggggattggcgatcgttaagagaataaacccgcccacgcatttgggaccacattagtggtatagcaacaacaaccagtacggaatctggtcacgtaactttccggccagcccattggtttaccactaccacttcggtgttcttgtggcattgggacgtacgctaccgcgagggggccccgctctgggtgatgagacggttgatggtcccgtagaccacacttccccccctacgacatc

SEQ ID NO: 2877 - DNA, 566 bp, Sigmodontinae hepacivirus
  strain On/2012 polyprotein gene, complete1
gggggcccggcggaggaccaacgattgacgttcttcctggtgacgggaagtctctcgttggcagctccgaaaccgagcgctgcgttaacccgagttctagaatgctacgcgatcagctattcatggacgaagactcgagcggcactagggtaagggttcttcgggtaaatccctcctaatgcttaacgtttaataagttgttgaatactggtttgctacgcggacgaagctcggcagctccggcgccacggtcactggttgtgggttatccgggaacaaaccctccggttgggtaccgtaatataggaaccccataacccgggcctcccgaaaggagctcccggggtaccctaaccctgcaacgggcaaggacatcccactacgccgcccttcaaaggagttactcttccaatatattcttaggcgggttgtcaaagtgggccgcggccgtgcaggtcatcgggcttggggtagccatggggccaccaaggcggggagtccccctactcccctagaccaaaaatcctacgggtgaggtctggtggcactttttccttatattaacc

SEQ ID NO: 2878 - DNA, 572 bp, Hubei myriapoda virus 8
  strain WGML66308 putative glycoprotein,2
gtccttcgcttggtaattcaatgttaattgtcctttctgtcctcatgttacatgtgattttcactatctttccttaatttatcaatcgataattcaaaaaattggcagaccgtgttacttgccttattctagaatattttatttgtatataaaagtctgataatgttagtcttgtaattctttttatatattttaattactattcacattccgattttgactaagctgtcacaaagttaattaattaagacaacacaaatgaaattttttctatgtatattatatattcgtgttttaatgtttcaacatgtacaatttacaatgcatttttacaaacatacattaatcaactatttttcgaagagcttatcggtaagctctcaatattgaagtgcagttttacactcatgtacttaatggataccatttttaacaactatttttggcacattctcgtatgacactctatttagtattataaactttattaataaacaccctcggtctcataccaacctgttttaaaagcggttaattactgagtaattttagatttaacagctttgttcaca

SEQ ID NO: 2879 - DNA, 573 bp, Beihai blue swimmer crab virus 2
  strain YYSZX17850 RNA-dependent1
caacaatgggagaattacacgtcaatttccgcacacagctccaagttgtcaaagtcaaaagctcagaaccaggcgcaggctattccaaaacaaagcgcaggctattccagctttgatgaaaatggatctgatgaaggggaaggaagacaatgtgaagatgctgtagatggtttcgaagactcaatagttaagaggatcaagaagagtgttgacaatcaatataaggttggaaaggaagagtttctgaatctaggggaaagaaaagaaacacttcaaaaggaacctaagactgaatgtgaacatctcaaatttgagaataaagtgatcaaaaagattataaaagaaataacttatactaagactaagcgtgtggatatcacatactcggatgaagcaactactagtgaactggaagaatatctcaagattcacgccaatgaattgaatgaagctggaaaccaatggtataatattaatccaacatctaatttatctaaatccttacctgagaaagtgaggaagctttatgatgaactgaactttgaacttctagagaagctggattcaaatgaa

SEQ ID NO: 2880 - DNA, 577 bp, Bald eagle hepacivirus
  isolate NA03-001, complete genome.1
aacaggggcgagagttcctgttggtgtgtggtggccccacggaccatgcgaagtcgaatcctacgcattctagaatggatgattcccgtaactatccacggaatggcctaccctttggtcaagtctgacagcttcgcggggcttgagacttaggggtggagattccgagaggcctgtacgggtattccggacgaagtgcgataggtaacacggcgcatgtagaccgcgtggagcggcagaacagctcccgtgacaaggtcggttgtcacgttaataaactcagtaacttgttattagctactaggcttgctgtctacggaagatgttgagggaacgtcgcgtctaaagataacaataggctacggcccgcgagttgtcaatcctccctgggaacaggctcatcatctctccaaaaccagttttggctagtatgtgatgtaacatgttaggagaaatccaaccatgggcggacccaaggtggcggccccgacacagccggcaagaggaataaccttcgggtgacctctgggtccatttctcaaagctagagtgggtgtgtgtgtcgtcgtttgcaaag

SEQ ID NO: 2881 - DNA, 578 bp, Bipolaris oryzae hypovirus 1
  isolate ES35, complete genome.1
gtcttaggggtccctacttaagatcacccattgggtgtttaaaagggatgtgatcaggtttcatgaccaatcataacgtaaccttttggggtctacaatgattccttttggtggagatcgtaatctccgtgagcatagctcgtgtgtttcgtttaaaacacgtgacttgatagtcgtggttagctaccgtgcacctaggtgcgtgccttgctcaggcgtgacctaacggtctaccctatggggcctcaacagtggtgtctgaagacaaactgtcggtattgtgggtggacttgcgttccacgcgtggtattgcttcggctcttattctggctactgtattcgggttttgaagcgtaagctcgttcatgggattgggcccccatgtctggttgatggtcacacatacgtgtgtcggtactggtatctaatttcctttgttatctagaacctggtttgacagcaaacactctaagctttatttgtttctcttcctagaaacatcagccacgctcttgtcagaacggtgtccttttccaagcggggagtagtgacctttagcttgatccgttaaggatgac

SEQ ID NO: 2882 - DNA, 578 bp, Duck hepacivirus
  strain HCL-1 polyprotein gene, complete cds.1
gagcccatccccgaaagggggtgggtcagccttatggctgtgtggtgtccccacaaaccgactcctaaacctcgctggttctagaatggtttgatgtgttggttgaccactggtcgaagctaactagcatatggtgttagggttcttcgggtaaatcccagccacatgcgaaattagaataagaccggtgtgcaccaatgcctctcttccggacgaagccggtcaggcatggagcacggtatgccgagaggcccgccgcatcagttatcgcggtggcgacagggcacgctgtcgttaaactcagtcctgatacagttgctgctgtgggcattgtctacgacactggtttgcggtggaacgccgcgcttttaaatacacagtagggtctgtcccgcgggttgtcaatccgtaacccagaaggggccgtaacctagtgtcaaaaccaatagccggcaacagcgttctgtggaaggagcgtaagcaaccatgggggtaccaaggtggcgtcccgtgcacaggcggcaaggggaaaatccgtatggtgacccctggtaccatttttttcttagtagaatgtt

SEQ ID NO: 2883 - DNA, 582 bp, Wuhan sharpbelly picornavirus 3
  strain DSYC47507 polyprotein gene,1
ccgtggggtttaccccacgggatgttttcgacgcagctactgcgagagtgtagcctagtttacacagctagaaatctgtgtgcccttttgtgctcattttgggtgaataaatgatcacgatgcccatatcgttaaatgtgtgctgagggaaactttcgcactgtggcactcttttcggacggatctaggttatgactattgcttgaataaggaaatccccgttctagcggtgtagtgattggcactaaaccttgtgtggagcagtctagaccaacacataatagcatagtgaagttaatggtacgagttatggagtagtcgccttctatatattaggttggccctggtaacaggtctaatatgtaatgggttaatgccatatgtttgacgaatgccatgatgagttaaaggaagataactatgtgaaaggtgtgttggatgtatccctctaaggagcgtggcttacttaagagctaaccctgttttgaatagtacaccagcaaagaagcaagacgtacttatttgaggcagacttttaccaagtttcatattgtgagtagttggaaggttccagaaagcaat

SEQ ID NO: 2884 - DNA, 596 bp, Lassa mammarenavirus
  isolate LASV/H.sapiens-wt/NGA/2018/IRR_077 Z1R
aatgcaagatcatctcaaagtaccttgcagataatgagaagctatcaaggcagaagttagcttttggtccagaccgaacccagaatgttgctcatggagggactgaaactactatccctttgcattgagattgactctgcaaggccaatggatgtgagcataacactgaagacaaaacggttgaatccattctaagtgatcatgggattctcactccagctttatgctttgtggtcctgacggctacaaactcactggtaatgttctaatcttgcttgagtgctttgttagatcatctcccgccaattttgaacagaagtatttagaagatcacaagaaactagaacaattaagatgacttggagtctagacgcaggacaacattttacaatgaacagatacctgattgggtgaatgacaaactcagggacacttattcactttgttaaatactcacaagaagtaatgcactataagatagatatagaggattttaaagctaggaacaaattaaggcaagggaacatagaaagtcaatttgttaagactgataagatgagattattagaggattttgaaagctaggaacaataagg

SEQ ID NO: 2885 - DNA, 604 bp, Shayang Fly Virus 1
  strain SYY3-1 glycoprotein (G), putative1
attgatgaacagaaacctctaattggtaatttttttcttaaatcgctgtgtctcgcagtggtttaaaactgactaatcgggcattatcccctaaactgacctaattataccgatttctgacttgattcaatataatctcgaagcatgaacaacatgttaccctcaacgtctcgacgaaccggacagccggtggctgttaatcagttgaggcaaaccgccgtaatggctactaaccctgacattaagggtgcaaatgatacagcacgacaactagagtgtatcaatatgcgtctaactaaaattgagaagactctagaatctatccaaaataccatggagattttgagggcagctgcaggttcacctgcaccaatatatccctctgctccctcattagtcactgaggtacgaggactaccggggttagcaactccggtttattccagcatggacgctagacggtttgtataaagccaaataaacgggctcgtcccataaaaccgttaacagctactcaaaaccttttcaagtgttttaaaatcccttgtttcaggctctctatactcgtgatttcctcgtacaaattcctcgaatctatcaatct

SEQ ID NO: 2886 - DNA, 613 bp, Picornavirales sp.
  isolate tom099shi2 genomic sequence.1
aatcttcagtgctgtaaagtcaatctaaaatggcagccgcaacagcagtagcagcattaggtaatacagcctcatcatcttcaacagcaggtttacaaattttaggaaattatttaggtaatgctcaaaatttagctaatcaacaaactttaatgagccatgttgagaatacttttaaagagtctggtcttcctcgttatatggcctacactggcactggtgatatgccacagaacaggtatcaggtcagcggtggtaatttctactctgctggtccagttaattctaatttgcctacatttacaactcaggcacaacaagatacacattcaggcagaccaggaagaccgtatgaagcagttccaccttttaatcaattaggtcccaacaatgaaatgcgagttttaggccaaaatgatcgtcaaggtttaggtttcggtcgatataatattcaaaataattttgtagctgggggagtaatgacagcagccacccccaggaatgcagccgctcatcaagcagctgctaggattcttcagtaaaaactttcatccttaaaaacttcggagacccggttagataattgttatatttgtttaagtctagaattaca

SEQ ID NO: 2887 - DNA, 616 bp, Wuhan spider virus 3
  strain spider133889 hypothetical protein gene,1
aggggccccttcccctacctctcttttcggccagcggcctgctggtcctatgtgtgctacggacttattttcggataccagatacaagttatctccggacttattttcggaatcaccatagataggcaaccaaaaaaccttcgtgtcgtcattatgtgttaatgttacaagcaagtgtttctcccccttgcttggcgaagaaagtctaataacttccttaacaaagaaccctgagtgaagagccggtgtcaaaaccggaattggcggaaattggcttatgtcgaaactgatcagtatttgttaagaaatagtgttagcaaggctatagtattattgcgcaaacgagaattctaaatgagagtttattctgcccaaactgtgttgggagttcacatcgagaggtgtgcccttcgcgagatctgaagcagatattctcactaatcatggatgattcttgtaagcgtggtgtgctataatatcgatttactcaggttagatgaaatctgagcgtttgttataatagtcttctagagaccttgcgacgaaagtaaaggtaagctgaagtgacttccgagccgtgtgaagagaaaacggtcgtttttcccagtacttgatt

SEQ ID NO: 2888 - DNA, 628 bp, Beihai picorna-like virus 64
  strain BHJP54755 hypothetical protein1
tccaggggtgatccccctggactactttgaagtattgtgaaatttttcgagaaggattgtacacatgtgaccgtgaagcgcggtctgtttaacgagcgtccttttcgaaggacgcggattgcatcgttacacgctattgagtaccgacttgatgtgcaatgaatctgttctattaagcttatttcaaacttttgctgttttacagatatttaattattctattaacctcgaccttcatatgtaaaggtggaggcgttggttttgaatatttaatattctgtattgttgaggttatcactatacattattggaagtgaaaatttcctcaatcgaggagagtttggcgttttcaattaaaaacgcattttctagataagtgtcaagaggctctaacgaacttgatattgatacttattttgcactatacacttgtattgttctgaatgccatataggcccaacggaacaaattggtgtctggatgaatttccagctagaccactctagatctgtgattttgtgctttttaggaaaagtaatatctaaagtttttcatggtttttcccagagataggggagctgtgtgaagtttccacagttcactttaaataaaccttgttttctcaaga

SEQ ID NO: 2889 - DNA, 631 bp, Cryphonectria nitschkei chrysovirus 1
  Cys-Pro gene for cysteine1
tgataaaaaacaaaaaacctcttcagccagtatctgatcacattttgggcaaccaccgtcgtgttaaatgttgttggaaatatatctggttgattgtggtggcgaggcagatgtgtggtctgggggtacagcctcaggcagtgtcatctgcgatcgtaaatgtctgtttcgcgtgacggcagaacaggctaaaatcgtaatcggtaggcagttactggtggtaatatccgatgataattcttgtgaagtattattctgcccgctgtgtggattgggcgtctacactaacactaggaacatgcatactagcgaagtttacgttgagcacagcgaacttccagtgcctagacagtggtcgcacctgatgtcggcacataagacatgttctaacgcatatgacttgctgttatcgcgtggaaagttgaggacacggcgtaaggcagtcaccggtactcaggtaggtacagtattgtatcgccgagggtcggtatatctagacaacattgggccaattggcgttgaccattagctgaggggcctgatgagtacctctcaggaggacgaaacgccaatgcgtcgccccggggcaagataacagtaccaaaagttaacgtaaggaatcaacaacaca

SEQ ID NO: 2890 - DNA, 633 bp, Marburg marburgvirus
  isolate Marburg2
ttcttattgttcaaagttgcaagggaagttatcttcccgagttgatacaaagacactaaacatttcaaaagcatgtatgtgggcaaaacgtaactagaccatcttgattgaagtagtaatttatttctgtcttaaatgtgattttcacttcaaaagagttaaatggtgatagatcaatctttgaaattacccatttatacattatagagaaactaatattactaacaaaaggggtctacctaacgggtatgatcgagtgatcagtctatcttataaaccaaacaattgacttcttactttttaagaatcaactaacagcatagaaaccacatttatccttacgtaatctttggcttagttggaattaacttttgttgtaattcaatacgtttagtcatagtatattgtaggattttttataagtttagaataccttaaatcatacccacaaaaaatactgttttaattaagaaaaactatgaagaacattaagaagatctttctctcgtagtgttcttttactggaagaagtattccaatcttaacttgttggatcagttgtcacttaagttgttatttttaaaattgattcacacaaagtagtttaaatttgtatctagaataaattttaat

SEQ ID NO: 2891 - DNA, 635 bp, Chinese broad-headed pond turtle picornavirus 1
  strain WHWGC1513141
tctcggggcagtcggtcggggcggttagtgccatgtgtagggcgtttaaagacgcaatactattggtgcggccgttactgacttcctgtctcgcaggtcccactcccctttcccttttcatgtcgctatcttctctcccccaacttttaaactggactgattttaacgtgtaacagatgatttgtggattatggatgtctagagatatgatctccgaaacctagcttgtttcgctgttattgacgcatttgtcattcgatggtggctaagtgcccacaaccctaaacttgggtgtggtcaacacatgagtcaattcgtctgcctaattcgccatgaggacagtaacgtaattgctagttagtagaaatcgcattcttgtgtcataggaaacctgtggccgatagttggtaaccactccagcgtttaggactcagagaattttatctttctatgatttaacacaaggactagtgaggagagagtagaggctgtagaccggtttgggacctcattgagtatcccttgcctagtagcaccggctatggactccgggttggaatcccggacttggctctatacttcctgatagggacgcggctggccgcttctcactagtatagtcagttgactttcac

SEQ ID NO: 2892 - DNA, 648 bp, Solenopsis invicta virus 5
  isolate formosa, complete genome.1
ttaaaattgtacgtagggaacaaccctacgtacaatggcctgagccaatcagaccctggttttacaccagacaataattggcaaacaaaaacattgggcgctatagcttaacggtgcgtcctgcccccgtatggagtggttgaatataagtgctataccctgaggagggaataatacctaagtctatgagaaacacattatttatcgacgaaaccatttaagctaaatgattatgatttttctataacgacaaacagcgtaaactgtataaacttacaacaacccaacggattacgaaccttaaagtaactgttctagatgaagtctagtagtctccaaatattcccgtgaaacggatgatggacggaacagctctattttaagacgtgaggctttaaatattgataattacattacctgagagccctctttatgaggtttgattattaataaaattagtaccaattcttgatagaatttaagtatgttaacaatgctgaagacatgtatttcgattgttaacctctacatttctatgaaaaggatatgcgagtctcggtggatatcgcattatggtcgcagtcaacctgcagttttattaatcccgtgtcggagcggtggtaatggagccggactactttgccaaaa

SEQ ID NO: 2893 - DNA, 650 bp, Riboviria sp.
  isolate wwb174shi05 genomic sequence.1
cttgttcttacactctagaacaaacatttctggattctccaaatagaacttcttgaaaacttcgggccctccctttatggcatcaaccagggcgggcactccgtattccaacacatcgggcaggcattcccctttggacctccaatagggtgctcctgctgaggcatttttacttgttgtaacatctgccagcaattccgacaggtcttcagcgtgccagcttttaacctcacccaccggcaacagcttctttagagtggctactttcgcgggtaccactcctgtcgggtccacttttatatcgacgcacttacggcttgtcatcaaactaagcctattaacaaatccatcaacggttccactcgagtatatggtgctgttcattgactcggcgacctcctccggagagtacacccgaacaagcccactcactgttgccggtgggtgaggttaaaagctggcacgctgaagacctgtcggaattgctggcagatgttacaacaagtaaaaatgcctcagcaggagcaccctattggaggtccaaaggggaatgcctgcccgatgtgttggaatacggagtgcccgccctggttgatgccataaagggagggcccgaagttttcaagaagttctatttggagaatccagaa

SEQ ID NO: 2894 - DNA, 651 bp, Umea virus
  isolate OTU2.IU18 RNA-dependent RNA polymerase,1
tgaggtcctgatcgcctacccctagcccccttgagcagaatctcataatcccttgtgtaatccccgtctgatgcctcctcctcttgaggcagctgttttaaaacctctaccatgggaatgagatacaatgtttagcactaaacctagacgatcaggacacgatgatgacgatgacgacgaggtgccttatgtgcacacccctagtacttcaggtgtcgtcactaggagggtaatgtccttggacgaggtgattcttgccaagctgaataagctcgaggcagcagtggccaagataagccagacccaggatgtcatggcggcagagatgaccaaaatctcgacggtgctggctactgttcaagcaatcggaggacgcgagagtgcatttagaatcagcaagatgtctgatggccctcaggactctaaacggaacagaccgtagctcgtctagaagacctgtggttccacaaaaaccaccataaacaatattaacaaaatgctgttttaagtagatgatcggtccgatctcgtgcaccctgttaagggttagctgtgtctgttttaaaactccttttcttctgaagagaaaatggaaaatataactactatcctttttatcataggagcacgattgctggacaaagcgataaa

SEQ ID NO: 2895 - DNA, 652 bp, Linepithema humile virus 1
  putative capsid and putative RdRp genes,2R
gtgcagtttttatactgcacgcacaatgacccgctaatatatcggattctagtatttctagacaattatatattagacctaatttgttttgttaatattactttcatggtctttaaatgaggcgaaaagtaaatttaaccatcctaattgtttgttagtatatttcatggatgtaaaatgaggcgaatcaaactaacaactattttaatcaattccgaatactatgacgaaaccatttgaatactattcttgacctgattatgatataacgacaaacagcaattattataaactgtataaacttttaataacaacaatggactacgaacctatatgtaaccaagatatcgatgagcaatctcgatcccaatataagagtgaaatctttgagggccgttttggcaatgtatatagacgtggggttttaatggctagtaaccacattacttgtgatgaaactcaataactagtactaattcttaaataatttaatcatgatataaatgctgaagacaagtatttcgatttatatcctctgaatttattaaagaatatataattactcggtggtaattatattttagtcgcagttaacctgcagttatagagcatcctgtgtcggagcagtagtaatgcaacctatcaacgaaac

SEQ ID NO: 2896 - DNA, 653 bp, Changjiang picorna-like virus 6
  strain CJLX30470 hypothetical1
gatatacacttattagtgtatactttatttgcctgaaccgatgtgagcagtatctcccggagtgcggtaaccatttagcggtcccagacacagctgtctctgtgtaaaacgggtaatttcgggtagggtttattcatccggtcattttattccgtccattatggacttcatccatcattgacattttatttttgtggttggagagctgttagaagaagctctcgtttgcaaggtaggctttattttaagctgaggttgacagatcatatctatacgacactttggtgttaagtgtttagtcctcaggtctagctatgcgattcgtagtctagaccttaatggcagtgaatcgtacagtagctggtggcaatatacgtaagaccaccatactggcattccagcagtggaatgtgacgcatccttagatagttgatgctttcatcctatcttccgctatggggcatacccattcatgattcacaggtttcccgttatagtgcattttgaaaacgtttctattgaacacgactgacaagcatgttgggggaatcctaataggccccaacggaacactcgcagagccgttaacaattcattagagtaaatcgttagtagagtgtaccggtagggcactgtcattgaaaatatttcgc

SEQ ID NO: 2897 - DNA, 656 bp, Ranunculus white mottle virus
  isolate E_Meta-contig815 polyprotein1
ataaaacaagcctataatacaaatctcctgaaaacatacaaacttttgagataaaatttcaaatacaaaatagtcaaaacatgaatagtgctgattctagaattattccgatgaataaacacaaggaatttgagaaggataagctaagcttgcaaaaaatagtgattaatcctcaattgcaagaaagaaacaatcatttccttgatatattatcacgatacaaaactagttattgctcaaaagaacgttttttgtttggatcatggttaattaacaataacttagtcacttctccttttagtcctaaagcgtttataataattaaaacgtcaaatgagctaattgattatgatttgtttgaaggattggaaatctatttgatcacttctcttgaatttgcaataagttcgtatgctttacatctgttcaaagaagattttattatgcaagaaaaaagaggagaaacctcattgatcctcaattcttataaaattcctaagtactccctaaaacttgagaaatcacaagagaatatcctcaagaaaatcaaagaagactatagttatatcattaaaatgaataaatttaaatgaggagttaaaacaaatcaaccaataaatttgcatgaaaaatacaaaagaatcttgcggcttgat

SEQ ID NO: 2898 - DNA, 664 bp, Hubei picorna-like virus 47
  strain WHYY21982 hypothetical protein1
cccccttttcaacggcgctggcaaattcgccgtattgactattatgccatcctatatcagtcatccgtggcctttatatcgattcatattagtcaaatatttgccaaaactttactttcagtttagtttttcagtgtattttctttttgtgtatgtacgttgtattttctatgtaagcgtttgtcgcgagtgttgaaaattctctacaattacaatgtgtgaaaatttgaattatgctttataactctaccctgtattgtttatctaagtagtttcggttgaatctaaattggtgaatttcgtagatcatgaccaagcattttctctgaccctatgtatgttaaatttacgcaggttaaaagttattttagtgtttttcgagtgagtatcagttgtgttgatgaggcttcaaattttcggttttgacttgacacgtgaaaacccattatttgattctaagtgcttaactgaattctaggctctgtacgattgcttgttaaatccatgctgtcaacatgtgctacgcggctgtagcggtacaatttcctagtgtaaagaatggctggttagaacagtccccctcctaaagggaacctccctggtcgccggagtatgtaaatgcgacaaatgtctagacgacaagtttctttttctacgtatcact

SEQ ID NO: 2899 - DNA, 669 bp, Oryctes rhinoceros picorna-like virus 1
  complete genome.1
agagacccccttttcaagttttgtgtgtgattacattgcactttggattacaaaagttttccaagtttgatcacatgaaactgacaaaactcgacttttcgttttgttttgtcttgtattttgtttgcatgtgtaatgcaaatatgtagtactgttatgtacttatatatcgaagctataggtatttaccgaaacctattccatctgatggctatggttgtggttaagtctcataaacttaatcaccattaggtgagcgtctgttgacttaaggaatgatacagcgtttaatctcctagtgtcgctttgatgttgtgtgacatttcaagttctcatacttgtgttatgtattgcggtttggtagttgtcacgtacacaactactgggtttgtttttgcgttcagatgtctagacggttagtttgtcttgttgtatagacccgctttctcactttagtgactttgcgttagtggacattgcgcatcgtgttccctcaaaagcacaaatgaatttcatcgtttcggcagtgtgctgcaaatgttagaccaagttgtcacattgcagtttccggatatttatatccaccgagcgcggacgtgaaaaataatccgacacattatctcttacgcgtataaggggatgctaggattcatttaaatcttacttatc

SEQ ID NO: 2900 - DNA, 670 bp, Soft-shelled turtle systemic septicemia spherical virus
  strain NBEC1
aggtggggggggcgcttatgcgtcccccccttcttttcccttcctgtccgatgtcggtctgtctcctgcggtgcgtcgctctatttagagtggtaatccgtgggttcagtactggttgaggatgggttgggtcccattccccctccctttaacgtcgctatcaacttctttgtaaccccacactttacatggactgatttaatggcttttgatgtttttgaggattatggatgtctagagacatgatctccgaaacctaacctgctttgctattattaacaaatttgttatatggtggtggctaaacgcccatgctcctaaacttggagatggtcaccgtatgagccaagctgtctacctaatttgttatgaggatagtagcgtaagtgttagttagtagaaatcgcattcttatgtcatagggaacctgtggccgatagctggtaaccaacccggtgtgtaggacatggagcaagtcaacactctatggtaaacataaggactgatgcgagaagagcagaagctgtagactcgtttgggacccaatttggtatcccttgcctagtagcgcgagctatggactccgggctggactcccggacttggttctgtacttcctgatagggacgcggatggccgtctcgcattagtatagtcatttgcaactcac

SEQ ID NO: 2901 - DNA, 678 bp, Cragig virus 9
  complete genome.1
cgcgtgcacgttcacacgtgcacgcggatatgtagatttagatctatagcaatactatagttgatactttttgatggatgatatccaatttatgagagtttcgactactcatttttggattatcacatccatacttaaagattgattgttattgagatacatttacttcttcagtacttattaggtttgaatagccttaaataaactacttttctaagaaatagacacttaatgcttatagttgtaagctgcaaatactgtcttgaacagtacaactaccccccttttttctattaatcatcatttttctcgtagaaaatgaagatttgattgtcataattgacatctcagatgcatggcttgccctgtctgttataccggataatatccgttgacgtcttttgtgttttgatgtaaatataacgaaaacaccacacatacacacccgtctcgaaatcactttgtgttactagaggcggggaaccgtagagtctagagttatgtcattttgaaggagcttgctcctagatggtaactatacattttcttagattttgagtttcgccacttattatccttgatagagaactaaaactagtctcgtttgttgaacaattttcttttgactttgtcagaagtttatttgttcactcggttcatgtattttaatttaataac

SEQ ID NO: 2902 - DNA, 681 bp, Rhizoctonia solani ourmia-like virus 4
  putative RNA-dependent RNA1
caaaccgattttagtcggtctgtgtcgtgctcatcaaactggaaactgagaaattagaatctggtagcgtgaggtgaatggatagctcgtccgttcattgcgaggccccccctgagatgacgaagggagagggtactgtgcacgggtaaaagaagaaaacactctatgatccgagttgagtgaaatcctgttgtgacagacgccggttgaggcagtcgcgcagagaggaagcgattcctggatatagaggtatcggcaatactgatcagaggcgtgaagacgcaacatcagatcaaacccaacaaaccggcacaggcgttatgaccctgtgttacgacagaggccctactgtccgggacctgagggaagcgcgttcggctgagcgctgccggctttatgcccgcagaggagtcgtcagaggttgctgtggagtgaccgccgtgcggggtggtggcaatgagtgccgccgccgtcagcgaggggaggagtgagcccaacccccataccaaatcgcgaacccggtgcgtattaacgcggaagacgccggggcctgtagatccagaaacgcggggaaccaaatcccgcacaagaggacgcaggaaaaattctgcctcgttttggctagagcagattgaagtctagactgacactgacccgggcttggaattgccggaccagtgg

SEQ ID NO: 2903 - DNA, 683 bp, Hubei picorna-like virus 17
  strain horsefly124179 hypothetical1
atgggccttaacccatgcaccttctttcgcggaatctatccgcgtcgctttaatgcgagcaatatagacgtgaatatatacgataattatatacatatatagttttagtttggtgtccatttgacattattatctttttatatatgattttgaacaatacatgattcaagcattatcttgccagagttgcgaagatttagttctgtaggactttgtagtgacttaagcacctaatagttgtggtagaagattgtagtagtttgtttcgaagctagatgaaattgtaggctgagttcagagtgagctagaggactgccatcctcgttgtagctattctaactgtactgtttctagttaactagtgatgagaacaaattagtactatgcttttatgtattctgatgaacggtggttttgtgaattatctgttgtgtgttgtgatattgattgtgtaaattgtgcgttttgtcgatgaagatgagggttttggtgtaagcagcaaaacttagtttgatacctcattgtagactgcaagcgttcgaaatcgtgaatggtcgatcggttttctttttatgactgttttatagagtttctagagtgattacaagtttatttgctggcaggcaatttttgatttaaaaggtaaaatattgagagttatttgttaaataataaattacaca

SEQ ID NO: 2904 - DNA, 695 bp, Unknown
  Description of Unknown: UNVERIFIED: Potato virus Sisolate 18-1113-2, complete genome.1 sequence
cagcttaggtaatcagcttagtagtattgaataaatggatgtgtttttgcaagttttgaataaatacaagtttgagcgtgttagtagtgctttgaataaaccaatagttgtacatagcgttccaggtgctggtaaaagttccgcaatcagggaactactgaagttagatagtaggtttgagtgcatcacccgcggccggccagatattcccaatctagagggtgctttcatcaagagcgaacgtagtggtgaggataagctgttgctggttgacgagtacatagaggggcccgttccagaagacgcttttgcaatctttgcagatccgctgcagagcacagctgttagcccatatagagcgcatttcatcaaaacactaagccatcgctttggcaagtgtactgcttcgctcttaagggatttgggttgggacgtgcaagctgagggtcaggattcagtacaaattgccgatatcttcacggttgaccctaaagaaacagttgtttactttgagccggaagtcggggagttgttgaggaaccacggcgttgaggcgaattgcattggtgaggtgcgaggagctacttttgagcacgtgacgttcgtcacttctgaaaacagcccactagttgataaggccgccgccttccagtgcttaacgaggcacaccaagagcttgctcatactgtgcccag

SEQ ID NO: 2905 - DNA, 697 bp, Hubei picorna-like virus 5
  strain WHBL70549 hypothetical protein 11
cgtatatgagctgatcactcatatacgcacttacgtttctaggggatgctatttagcattcctaggatggtatccagaccaatccgagttctataacacatttggacctaactaaaaggcctaaatggtactagggagacatggaattatgtgtgaacgcacaaagacagagctacacgggctgcgtcttttggcgtatgcagcgagtttataacgtgtctttgatgcaatctggattagggaggggacatttatgtcaccctccagtcaacgatcacaaagagttattttgcttccgaactctataaataaaggaatataccagacccgaggctaccgcctcacctttattgtctattggcaatatttaccctactgttggtgaataaccaaccttattgtatttttatatacagtatgacacccactcaatcattataatcgaattgatgaaaaattggacaagcatgctgtgatgatgttttatgaaatattagtaaatgttttagcttttctactttaggaattgaagacgataagactaggcgcacttctctagaatctagatgggcaaaccccaaaactagactgatgtgattgcgttggttgccgagtccgcggagaatatccgttgctcctttagcgaaatctattatgttgaaattatgaattgattcattattggtacgaaatctca

SEQ ID NO: 2906 - DNA, 698 bp, Beihai picorna-like virus 61
  strain BHBei76813 hypothetical protein1
tggggagaccccccagtcaacattggtagtttctatcaatgccttcgccaggatttcttaactatgataaggtttaatcaccggttcatgcattatatgatagtgcaaaatttttgagtaagatcaacatcggtctcatagatttttctctatcagttaatgttacagttacgtgaattgaagattgcgggtggcgcccgcttttgggagcatctatgctcccgcccctttttgagttttagtgttcacttttgtggacgtcactcaattatgtctctctatctagagatagctctagatataatcatttgtcagagagaggaagaacaaatgctaagtgtatagttacctgtagctccgccaagcctacctggataccttagaaatcgcggttttaaccgcattattggtctggcaaaccttctttgtttgttaaccggaggcaccaaggttaatgaacgttaaagtttttacgtgtcgcaaaccccctttatcgaagcgtaggcttcaacctttttgatgatactcctgatgagagtggattgtttgatgttgaagaaacagaatttgatcgttgcgatgatgatcgcattgatgttgccgaattgcaggcattttttgatgaggaggatatcggtcgaagagccgatgagaaaactgttgaagagacagttgaggtgaagcggcgtaaaggcaag

SEQ ID NO: 2907 - DNA, 699 bp, Human parainfluenza virus 4b
  strain HPIV4b/Seattle/USA/SC0496/2019,4
ttgcaaccaagaggcacattttgcaaatcttacctagatgcatctagacaaatcgcccacaaagaaaaacaaattcccaattcaccaaaagaaatccaaaatcaacggagctacagctatcctgaaacaacactgcgaccacaatgacattcctcaagaaataaaggacaaatccaggaacagaaaaaaacagcccagaacaaactaacagacagagaaagggagaggcaaacccgtctcagcaaaatctcccatcaacatcactcgaccaagaccgaaccaacagcacaaacgcagaaacccactaccgcaaaactacagaaattctcccacaatcccccaccaacattcaccaacaaaccagaaaatcattcaaccaggcaacctccacatttcaagtttaagaaaaaaactattataggggggaacgcacttctcagctctaaccacacgaggccttgtcttgtaaaacaagatcaatctcacacagttcaaaacaaaatctgactacaagtagaacctccacaattcaaagttagaccaacgatctaacaacaactcatcaactagcaactatcattgaactaaacaatccagaaggacattacatcaactcattcgtgaatctccaaaagaaataacccaagtaaatttacaatctactctttaattataaataaactgaagtaggtcacaagg

SEQ ID NO: 2908 - DNA, 702 bp, Human rubulavirus 4
  strain t146a296_HPIV4, complete genome.3
caaccaaggttcatactttatgaaattcatctagatgctccaggaaaagccatccacagtgatgcaccgaccctcatctcattgaaagaaactcaaaatcaacaggatcacaaccatcccacgacaacaccacgcccacaacaacgccctccaaaaaatgaaagacaaagccaagaaaagggaaaaatggaaaagaacacaacaacagacagagaaaaagaagaagaagggcaacattgccctggcaacatcactcacaaacatctcccaaccaagaccgaaccgactgcacaggcacagaaactcaacatcacaaaaccagaaatggccctccacaatcctcccccaacaatcaccaacaaaacaaaacgacacccaatcaaacaatctccacatttcaattttaagaaaaaaactattataggggggaacacacttctcagccctaactgtacaaggccttgccctgtgcaactgagacacccccacgagcaccggaacaagacccgacaacaagtgcagcctccacgaccaaaaaccgaatcaaagatccagaaacagcccatcgcccagccatcatcatagaatctaacaatccagaaagacgctacatcaacccagccacgaatctccaaagggaacatctcagacaaaaacacagcccactctccaattacgaataaactaaaataaatcataaga

SEQ ID NO: 2909 - DNA, 702 bp, Big Sioux River virus
  isolate S28 nonstructural polyprotein (GP1)1
gtcatctgggctacaactgacgcttttgagtgattaacccgcctttatatattattgccgattaaatactcatgattcttgtgtgtgtttattttggacaaggaaactagttctgaaaagactttgaagagcgcgataacgtcgaacttttagtttgtataaccaggagctctgggaactgtcgttgacaggaaattgagaccgttgtgtatgctttgtgatcttcaccgtctcacccacctacctggacgattgtcgtccttggatttgagcctttagaaaaggaagtccttgaattatagaggtacattagtgcgttgtctgccaaaacaggtacgtacggattacactataaggacgtctagagttgttcattttgcccccttaaccggattcggcgaacactctattttatatacccacccatttatagttaaagctttataacttaaaagtaagccgactggaaatcgttaatccaattttattttattttattttatttaatttatttcaatatagattattttagatatataagaccagtatttagctgccttaagcaactattatacttattttttgttattcttaaatttttaggagctaaggtagcgttattagctattgcacttttatttattttaggaatattgtccccgaggaattatttgttaataacactttgtttgtcattatata

SEQ ID NO: 2910 - DNA, 708 bp, Haartman Institute snake virus 1
  isolate KS111230Crimig20111
ttcaaaagagggtggggagttttctccccacccccttttggatacccatggtgcgggggtataaattaccgcaccccctttgctgtgcccagggtatgggcacctttctgtctgttttgtttcgtttgtctgctttatgtgtgctcgtcccctatagggcactcatttcagctttctttcattctttcttttccccggttctcaccttaccggaggcactggccgttgcgcccggcggggtcaacctagtgattagcactaggctgtaggtgtctaaagtggtgacacaaagaggtgtttcctgattccagcactgttaactgatacagatgaaacctgattgatcttctagaaggggtaggctacgggtgaaaccccttatcttaatactactatgtagagatagatccagtaggttaagggcagtggataaggttgagttcaaatggacaataaatcttcaacactggtggacccaatctcactggctagttgccttcagtgtggattctgtggaggggtgtttcttctggatagggaaccatcacactggtgcctgagactcagggtgtctggccttaaatcacagaagccgtatggtttttgtggcctagcttctgcctctaaacagactctggggcccaatgacaccctgagcccttcggggtactcaggggcatttaggttttccacatttcaaaatagtca

SEQ ID NO: 2911 - DNA, 710 bp, Sanxia picorna-like virus 12
  strain SXXX24153 hypothetical protein1
actgcatctattttgccacgctccacattggcccgtgtatatggctatgtgctctggattcgtgactaattcgcgaacggtttcccgacgccgcctgtcgagcgctttgacgttatcgtagagggtttttaaaagtcgatgagtggtacctactaagtgacacaattgatatccgtttctgttcgcagtactaatttagagtagtttcgatttattttcagcattgtgtccttttcctttagtttagtctccatgtcatcgccgttagtacacggggtgccgtttgcggaggcaagactaaccacttttcaggtcaatgagctatgattgactgaggatagcaagtacggaccacgttatgaatttaacgtgatttacccgaaggttcgctccaacggggttttaggcttgtgaataggctgccaagccgttctttggaacgttgtttacgatttgattttgaagcttgggaatggcgccttttgaaggccaaccactgcttgtttcttcttatggtctgatggggcgtttttatcaccccttgtctagaagcctatttggctttgcacgacttcgattacatgcaacttcataccatgcggcttttgcctcaaacccacttgggggggaacgccccgagcatcatggtggctctgatgtcataaccactatacaaaacaacaactatcatacaacacaacttaaccaat

SEQ ID NO: 2912 - DNA, 715 bp, Picornavirales sp.
  isolate rfb200shi2 genomic sequence.1
taaatcgtgagattgagaataaaggtaagcgagatgtagccgatcaaaatataaaaggtaattggttaatacaagatactaaaaatcgcggtctattagaattacaaaaattaatcggcagtcaaaaagaaaacataacgactaaagaaataaatggccaattagaattgttgagagagaaactgggcaatcaagataagtggaccgaagctggacgtgatgcattcactaaagctggcctcccggaatttactttctgggaccggggatctagaggaccactcgatatcggatcaacgcgatcatacatcggaggcaacaattttgtcaattcctatggaggacctgacaccaaactgcctaaaaccggtgagtcgccgttcgcagatatgaatggactatcccgcccgtactaatcttgttgctcataacatcgatcaacaatctaagctgtcttaagtggtttgtcgggtgtcgcaggctactgttccactcggggtcatggtgccgcgcttaagcgtttcactgtaaaaccatttcattcagcatcaaaaagaaaaatacctaggtgagcttaactcaccgtcatttaagctaaagttacaaaatttaaattaacttacgttctgttttcttaacctcaactttcaaaattaaagtaaagaattctagtaaagtaaatttcaaaatttgtcatccaaaaaaatcatggatc

SEQ ID NO: 2913 - DNA, 727 bp, Beihai picorna-like virus 87
  strain BHJJX25970 hypothetical protein1
ccatggacgcccctttgtaattcgtcgttgcatgtatttagtatgccgttatacgtattcccccgtgagaaacggtcgttgcgtgtattcctcatgctattatatgtattccccgttgaaggaatcctgaacccttattttacccatttacaaaattttctaaattttatatatttaattaggatcataccttttacatcgatttgccatacacaaggtgtaattgctatgataaccggaatgataccttccggacagtggaatctgttactttcccatctttaatcttcagatgtaaaatatagctagactgataccgtctagacagtggaatctgtatctttcccatccttaaactttggatgtaaactaaagccgccctgatatggcgtacctcgtggtgattcgctcccataaggataaaactatcaaggttctattttggacattttaacctaaagaaaaatgttctattggccagatcaatctcacttactcaacatttgtgagaggctatttgcctgtgcgttgtccagacccagatgttaatactgcatgacccactacactgtggaataagcaaaggaaatactttggtataaatacctccttattcttgaacgcaaccaggatttcgttccctggcagtgatatgctcatgtaagatctcatcaactgtcgcaaaggacttaaagttattatctctacgctgtggcttaatacaact

SEQ ID NO: 2914 - DNA, 730 bp, Apis rhabdovirus 1
  strain Apis/USA/A, complete genome.3
ggccctaagaacattgaccctgaaaacaatagacctactcatccatccatatccttctgaccggttttagccaaaaggagcctttaagaacaaatcatccaatccaagcaaaacctcactctagaccaaaaaacccaattcttctcctcaaccacctatgccattgtagtaatcttcccttctttccgcaatagagaccagcaataatctgataatgcttttctctctgatttccttaatatcacgaaaaacctctatgtaacggagaaaattacaaacttctaacagcaataattttttagatctcatttttcaaaaatttgtgtcaaatacaaacattcgataggtctcttactcaaaataaaataacaatgtctattaaagaaattgattaataaacactaattattaaaaaagaatgtttagaaccgatagtggtaaaaaaccattgctcacgaaagtatagaaaatttgagagagctgaaaaactgcattaacttttcgggtctattcaatacaacagtccaaaccaacctcagataaagcaagccttaacaatcaacaactgcgtcatagtgattcgaaaccgtagatccagcaatacagctcggcccggtaggaatttaaatccgagttactctaaaaatctagtcaacgacacatcaaggaaccatttgtccaaaatcagagtccccgaacgcataccacattccattaccaaaacgcaacg

SEQ ID NO: 2915 - DNA, 730 bp, Piura virus
  strain P60 hypothetical protein 1, hypothetical protein1
ataaaactatactaacgtattggcttatcaggtttgtatccaggtacagatcatagtcggtttccatccaggtgggaactgtataccggcggctcgtaaggcgagttgctgtaaactggtacgtagccagactacgtactgtaataactggagtcccgaattacgcgactctgtaaaccccggtgttccgctagacggatcactgtataattgctgctcatctaggtgaggagtgtaaactgaataacgttaagcgctattctcaaacaccacgacgttctttcgggagcgtcgtttaactgctgactttctagaaagtcagtgtaaaaattccgcaagttcgcttgtggatctaaaataggagaaactttcgaggtttctcccgtctgtcttgtgctcagcttgcttttgacggacagtgttgcacacgcgttgttacagaagaccgaattttgctcttctacgcctcgcctacgcttcacatctctgtctctcgcagccgcactgtcttcgtgctttgcgacttgatagaacaactgcacttccatcatttggaactgctgaggaccggacttgctcctcacgcacccaactcgttgttggtgcatcgttcttctttcgggaagcactgtctcactgtctccggatttcactttccggggtctgtctagcgctctactgagcccttctctcttcgtctcttggccaaggacgattatacactttcatc

SEQ ID NO: 2916 - DNA, 736 bp, Wenzhou picorna-like virus 20
  strain WZSBei68985 hypothetical1
ctgggcagtattgcccagcaatctcttaaggagtttctcctttaacaatatcgcaacaattttatgcaagtttggtgatgtctaaaaatcacccgatcctttctatcttgttctttacgacttttctataatattattttattaatcatattataggcgagtaatataatatggatttcacgaaaaatattatagttctgattatggtcattttagttaggatgtgccttatcttgttgtcaggcttggtctagccttgatagaccattttaaggtttagtctaacctctaaatggactactcaattgttttagagttttgttggtgttgctagccataaatagcacactcggattgttatccagcgtcattgagtggattaacttaagcaattctctctatataattttattaatttaattatacttactgtaaatgtctagacgtgtacttgatgttttgccttttcggaaagcgagtataatgtaatcttttgaaattaggtaaacctgtaatccagagagactgatcagtagatatttcgaatgtaacctttatggtgattagtagaaagacctttcattatgagggtcctgattaggtaaattattaagttcacggtacaactccatctgttttactattaaacatccagattgtaatcctgtttttactttaataattttattttcatctgacttaagtaaattaagacgttttaaattacttttattca

SEQ ID NO: 2917 - DNA, 745 bp, Plasmopara viticola lesion associated tombus-like virus 2
  isolate1
ggtttctagaaccgcttgaagaaatttcggccggctagcatggtatcctcccctcgaggataattctgcgaaccggtcagaaaggtggacctaccgcatatgcacaaacatgtgcgggggggctggtaatatccaccacaattctagatgaggccgtgtcccgcggtgcaagtaggcttggctccggcttcagcggcttgcaagggcgtatacgggtccgctcgtgtacgctaaatgggatcgcattggcatgtgcaaggtacatgccaccgcttatagggacagattgctgagtcccagttcacggaattgaacttcttccccgagaccggttgcaagtctcaaagggtcaaggttacgtgcgccttgtgtcccctcctaatcgcactactgcaaccctcatacggttgtgggagctcgaactggcacccacggtggtggaccggcattaagttggttcgagcaagtccggtcccagacgtgtgtggtatccacacgggtgtagcaaacacctaaacagtgccgcggaccgtgaaaccgaggacaacacgggttggcaacaccagccgccctggcagagggtagaaactctgctgtcacgcatctgacgatcacttcagtgatgccggtaagctaaggccgtaagccagccgttactccaagcccacaattcgcgtttgtgggtcataacgtgaggaggtcgcggaggcggttataactcaaccacccccccaacacaacaatc

SEQ ID NO: 2918 - DNA, 746 bp, Wenling sharpspine skate picornavirus
  strain DHBYCGS187421
tccgttataggattatttggacctctatattgattgacgagaggttaaacaatgtgcgtttgcttcatgatttattatgttgtgatcgttggtcttcttaacacattgatgtcaatcacccttttactttactttgtaactaagtttcatacatttctttgaaattctcatttacaatattgtcgagctgattcacatgtttcatttacttttactacaaatctaaatgttccacaatcatattttgtttattcataatcaaggttgtaagtattatgcagggcaacccacgcagtcaattggtcactcatgaagtggctgtggattaacgcctgaatgtatttgcttattaatatcttgttttacgaatagataaattatgtggtctttttaaactacccttgttgttaattgggtcgaatcatcgcacacataatgctattttagacaaacgttgttcgcgagtatgcacggtattggaccattattgcttgtcattagcaccattggtaacaatgatgacaatccccggttttcacttaagacagctccgcgcttcgtgctgtgtttgagccttgagtgttgacgtctgggatgggtggttgtgctccactttatctagactgtgtatataagttagcaagctgttgctttcttagcattatgtggtgggcccgaccacaaagggcggtgggatgtgccaccgtaaataatcatatcaaaaccctttattttaatatgtagac

SEQ ID NO: 2919 - DNA, 748 bp, Beihai mantis shrimp virus 4
  strain BHXG23944 hypothetical protein1
catggtagtacccatgcagcgaatctacgtaaagtgtaattaactgacacacagtgcccatcttttgcacactgtctcttagtttttacatgtagttttaatcaaagtacaatttctattagtttcttctactatccttttagttttagatcaaaaccctaaaaactattataattttaaaatccaaaaatattctagttttaagtgttgagctctaattgtgatacttaaatggaaattgattgcgttggtgatgattttgatgacggatgtacctctattaggatcaagtatggcgacatactccttttggcacgggaaccctgagaatgactctagacaatattaatagaagtttttgttgatctcttatctcacctctagcgaggttaaagttagtaacacggttttatgatgtgaagctcttctttctcttttctcatctacgagattcttttattttacttcacattatttatcgtagttacggcaatacgttacttctccgggtgttatggcgtccggtaagttaggtatatgtccacgtagtaatgcgtggagtccgccttgtattctgactgtggtgagtataaggtgcctaatgtggagactaaagcttattgcaactccaatccacggagcactttacttaacgtatcgtctgttgctacataacttgatacttcacgtgtagtaataaatttcttgaaagtatcgccccttttctttcttatatggtgacaattat

SEQ ID NO: 2920 - DNA, 752 bp, Rhizoctonia solani hypovirus 1
  isolate BR20 polyprotein gene,1
gctggctagaattttaaaagaaaacttgcgtaggtatgaccgcccaccatcgcgttagcaacgtaagcggcacgctccttccttggaaaagaaggattctaagcgtccagagctggcacctaaggaggtgggcagtcggaattcggtgtgtcccggaactgacccttgggcaaggcgtgagcttcactggacctgtagacgccccggtgtctccatctctagacgaattttcctgacttaaagtcaactgtatgctacccgagatgttggaaggggaagctagaaccggggactcccggcatgttgtatacgctgaaaccgtaacgggttggggccgtccgcgcctttagctgttaacacaacatgttgggtttgccaaccgtaatgggaaggcagcctagcgggcctttaggggcgatgctttggtcctcccgggtgatgaactgtcttctgattggctgcgaaagctgtaccacagatgttcaggggattcatcgggggttaaataccggattcttccttctctcgtttcgggctgaaaccccgcagggaatgctttatggactttcaagaaaagtaccaccgtgatggaccggagatccaggttaccagatgtggcagagcttcctaaaagcggcgcccacgcccagagtacaacgactattacacgtataactcgacggtgctctcagtaaagacgggacactaggcattgaattcaagatttccgacttcccaattctcccttcgcc

SEQ ID NO: 2921 - DNA, 761 bp, Beihai picorna-like virus 100
  strain BHNXC41148 hypothetical1
cttctcacgctaaacgtatgattcttttgactttggaaacccatcctggtacccgcagtgctatgctgttcagtcattacatgccaaccatgcactgctgcactttgatgcagatgcccatggttgagatgcaattgatcaaagcagatgcccactgatgatattcagtcgtgtttccatcgtactcacgagttatcctggtgcccacaacattatgttattcagtcctcttgtgccaactatgctatgttgcacggagatgcaaatgcccatagttgagacattaggatcaaaataaatgcgtgttggtgacattcagtcaacaatctcacattctcaaaaatttcacaaatcacaaataattgctggtatcaataaatttgacactggtgcgttataatctaagtatgacttctggattccgaatgaaggcctaaaacctgatgtgcttgaaggaagtctagacataaaccggcgtagattcggcttgtgttggctgcacgagtaacgattacaaaggtgtaaggtcaaatacttattttatagtgtcatcttttgacaatttattggtaatttgcggtagtgagctaagtatggtccagcaaagccatcttagtttgaaacagatctaccatatattaaactaattcctatggaatcttgtatggatattggcgaaaacccgatacacgtagtagacggctagtagtcaagtaaatcaactccggtcgatagttatccattgatttgggtagcggtcc

SEQ ID NO: 2922 - DNA, 761 bp, Wilkes virus
  isolate Antarctic11 polyprotein gene, complete cds.1
agcatacatgctatacccaaattttaacatcttttcttatttattctagaacaacccgtgagacggctaacccccgttgatcggcatccctagaatttagtacataggggatgaccccctatggaaccccaagggaaccctacccttacccaacgcacctggtcctcatgcgtttaatgatgttggcaccgcaaccttgcggccttgctggtatcaatggacccctaccacctaacccactcacttgacacatgtggttcgcccacgaaaccccctttgtgtggctagcgccatctgagaggagtgcggaactcccccacggtaacgtggcccgcactggcctaaagcctagtgtgcaaggacacatgctggtcggttgtacccacggcctgcctaccatgtgtcctgaagctcaccgctcagacctcgatcccggagacacactggggctagtactgtgcgcgccgcctggaccaccaagtccttgggcagtgcgtaggactgccagccttagtagacccccagcaggtacccccttggatctgagctgggccctgtgactataccgttccggtaatgcagggttagaaaaatgaacgggttggcaccacttctcttctctttttcacctttttaatgcagacatcaatggttgtattggtttttgcaatcttcaccttggctgtgatattcattgctatctgcaatctcttgtgcattatcctctggtgtgggttttgtgctgaacctccgctttcact

SEQ ID NO: 2923 - DNA, 764 bp, Macrophomina phaseolina double-stranded RNA virus 2
  isolate Mp32
tttggaatgctgcgctagctgcgactgcccgtgagcattccatcatcattttctctcgggtacttcagctctttgaagaacctgttaaggcagccgttacagacacgttggcccgtaggagctttaaattgaggggccgaatcttttatgcattctctgaaatttgtgcagagtgggacctggctactgctcctaatttagccacgcatgagaatgagaaagtggtgaaagccattttaacctatatctttattcaccccactcctatccaggtatatgaatatataccacgcttggccgtgaatcactcaggactgtcatctaattttaaacttagttatacgagaaaagccattgaacaggtaaattctcacacacacacacaggtgggcaaatattcttattataccaacgattcgggcgtattgtccagctgcgcgactcgagtttttaccttactcggtattcaatgggagcactcgatctatgatgctgttgatcctgctaagtttggggtgatagctgatacttttaacaaatatattcgtagcagctggcatccaaagttgcaaatcctaacatattcatattgctacgatggggaagtaccaccgtttgaagggtgggagcaaggtgacaaagaacttttattatttgtgtataatgatcatgtagcctatgctttgcggcaggacatatgcgccaaattacaaaagttggatagtgatctacgcacatacaagtctagacttgctattaaagag

SEQ ID NO: 2924 - DNA, 767 bp, Beihai picorna-like virus 5
  strain BHNXC41415 hypothetical protein1
cctgcagctcttatcgatgttgattacttggtgtattcacccaatgtattttgaatattcagaatctagcggtgtacgtcaccgctttattttggtataatattcaagatcattgttatagtagttttcgttgatttgaacttattttacctccttatatttctgattgaggagatctttagtcaagatttatcaaaacgaaaccttatttgtcttgtgcattcaggtacaccccctgatgcgtattcatttttgtatattattgaacatattttatattttatatattgcgtatccgacgatcttcggtttacatatatagtaaaatcacaacgacggtatctactgagactgtctttgtatgacagtgtctctttaggagtccgtgtctagaatttgttctaggaaattcctcgttaatttgttacgaggtcttctgtttttagatgatttttaatttggatggatcacctcttcctatcttgtgatggttcactgtcctgaattcttacaataactctatgagtactattggttttcattatggatataactacagaacttgagaagtcgaggtttgtcacgcagaccaactgtaagtcgtgtgtgaaatctgatgatttttgattcttttaatggaaaagtgaagcgttacagtgttgttatgatacttggaccctgagaagtccacatacagctgaacgtgtataatgctcgttacggagcatggagagatccagtgaagtaactattcggttggctccggt

SEQ ID NO: 2925 - DNA, 768 bp, Biomphalaria virus 2
  complete genome.1
cggagtgatcttttaataatatagctaggtatgcttatactaccgaacagtaaggtactactttacaggcttttaatagtgcgtattaacacgtcgctactatttcataataatatgtgttacacaggtttagtgtagataaactttttatagtgcgttctagattatcgctactatatcatatgaaaatctatttagttgattggacgtaatttattttaacaatcctatttttagttttagttttaactatatatttattttattttattctacaactcgtttgtagatgtcgacaataattcattaatggctgcgtttcctttcagtttaagcatgtaataaagtagtgacagtgatttacatgatactttgggttatgttcccctcttttcggattaagtcaaaacacgttttgcgactctgccgtgtaagcagaagcccactgattttctaaattttcttttgattaatcacatacaaattttatacaaacatgtcgactcgtgtatatcacctgtctgttaacctctatgatcttgcctatatttctagcgtctatgaccacttaattgtgagcgatataggtatttttgattatgttagccttatttgtataatagctgttgagtttaaactttagtggagtatcccctaacgttctgaggattctttaaagtgaaggccgttcgcttttatgcgcgctatatgtggtagtaccaacttagtgttaaataacggaggtccacatgggagaacgaacaatca

SEQ ID NO: 2926 - DNA, 770 bp, Trichosanthes kirilowii marnavirus
  strain pt111-mar-9, complete1
agacaataacacatgcgtgcggaactaccgcacgcatgtattattggcgaccttggaaggtcggccaaatttggagtctgtgactccctctttgtttaaatgttagaattgaacctgatttgtttaccccgagacctcacttgttcaagtttacatttgggcattcttgggattacacttcggcagcctttctagacatcactttacactgaggcaatagctagctccatcttttctaaatccgatgatggtaaaccatcacccatttatatgtatagtagcgtgtgcccttaagcaaggcaagtcaaagtttactggttatctttaaaacctttattaggactatttcgtcgttgacgcttgcagtaaatcgagtacgcttcggcggtaaatccgtacatctgtcaagatagttcctgttgtaggagacaaaagctacaaacaaactctagaaaaatcttcaaacacaataagctcctataacgaaagcttaggtcaaatattaagcctttccccaaccctactagcaatccacgcaaacacctctccgctcctattggacgacgtgaaaagttaagtggtggtaaggtacagctgcagttgcagccgaggcctgcctggcaaggtaataaggattggcccaattgtggcctatgtccggtactccggtagacttcctggtttgttgaattaaaaccaggtgcggcaatctaggggccaaagaaaacaacctatttcagaaacagagacaaccacaaacgacaacgcaa

SEQ ID NO: 2927 - DNA, 781 bp, Pineapple mealybug wilt-associated virus 2
  strain HTS 2, partial2
gcgagtgtcatttttaaatatttttatttggtttaagccgatgtgtagctatttttagagccaatactttattcgtttctttgcgtaattgcctgatttgttacaatgcgcaattttgtttagcgtattgtcattttttgattctttattgcttgtaccgtcatgtgaatattagttgagcttggttttcgggttttaggttgtttctaattaatgttcgttttgttttgtacagcttcatacagaccctccgattatatcgcttgcaaggcggttagtgcggggacacggggggggtcttagtggtgatgttggcctgacacagtaggtctcctcacagcatcacacttttggttgggagaggagtttgcgagtgaggcgcatctcctttgtatatatacgcgttatattgttgttttaattatagcgttggtattactattataacatattctcagggttttttagtttatgttagtttataattaggttttcttacagttaatataattctattttttcacgattaggtattggctctatcttgcgtagagtggtagtattgtatattatcgattgtagattgtcagtaacacgagatgatatgagtgtatacattaacagatgttagacgctttcacagccataactatcatagcctctttaatcttagcttttctttttctgttgatactatttatagtggtactagtgtataattattattctagaatgcacagttcgatgcgatcgtatggagcggcgtaagtagtcacgacgt

SEQ ID NO: 2928 - DNA, 787 bp, Atlantic salmon paramyxovirus
  isolate ASPV/Yrkje371/95, complete1
accgacctaggatagtccctccactggagacctcaacacacataatccgtcaagcatcacaccgaggaggtctccaggaacacccagactatatgaacagctgatccacatgtctcgttctctgctctgtcacattttcttataaataaaatatatctactgtagttctatacttgaattatttagcaacaactatctcatcagaggcttattcttagcgggtctagatatttgtgtgtttattggaaattgggtcagggttttagtagaacactcgcgaaaagcctctgagagcctatctctaaaagaacgtggaacaaagccagcaatctccagaaggcacacgtgcaatgtccattccaagcttgtaattgctcaggaatcgtaaagcatacatgaatcagtccatgagtgtcaggacatcaggtgatctctgtgttgatatatctgtcggttgtacttaaattggtgaccttcaacgaacacttaaagacccggatatttagtgactttgcacattcactaacgggtaactcaagccagtatataaaggtcttactggaaaatagttgtatgataactcgcacttatcatgtattgtctaaagccgttatagattacgaaattatttcggatatgtttgttagttttttgtctttatagattgagatatcgttgcatctcgtttatgtcacttgtcaatggattaaagaaaacttaggatcaaagcaattgatatctactctagttgataccgactactttgatctttttcccatattagcaa

SEQ ID NO: 2929 - DNA, 804 bp, Wenzhou picorna-like virus 16
  strain WZFSL67369 hypothetical1
gcgtagaattcctctacggaattctacgcatgtgatacgattttatcggtcatccctgcaaagggtttatttctagtcatgatataattcatgatattgcgccgctttgtgtgttgaaccaaattggcgctcccaatttgcttctatttcacatgaaccgccgtaggtatctatgagttatattatgcaaaattcggccaggcccgatccacctggccgtcttatatacggatcaccccctatttgttatttgttcactgtatgtgttataaaactaaacaatagtggtgttggattatatccattattttaaatcataaaaatgtgtgttgtatatcatcattatatattcgatttggcacatctttttaccatttctttgattgattatttgttagttgagtaatttccaagggccccctcttcggaaagacgcttaatgagcatacgaattctacaattgagaatcgtttgaagttgtttgattaactgatcgactagctcttgcttttccctctaggacctgacgacctcctattgggaactgtaagatactcgcaatactttttcatgggtatgtgtgagtttttgatgatcctgtattttgtggctctatctagagtcaaccccctgaccccagttatgtgagtcaacttaaaatgacaaactccataacatttcttatgtaagcctaagttggcaattagtgaaataatctttttcgcttggtagaatttcacacacgacaagtttgtctactaaagcaaacaatactgatcagcttgcagatcataatcccgatca

SEQ ID NO: 2930 - DNA, 805 bp, Plasmopara viticola lesion associated totivirus-like 1
  isolate1
tctcggcagctcggtttataccgcccgccggggcccctcgtaagaggggtgacagggacacgatatgtgtagcgggactcgttcgcgggtctcagaggatcggtgatctgatttcccctttccttctcgaggtttcaagacgcacaatacctcgatgcgatacgtcataaccttggcggttgttcctttctgacagccggggcataatttgacgtgttaaggccgcaagcgttgttccgggcttttggctgtatctttggatcggtactgatacaggtgatgagctcgttaaccagataggaggtgggttcacgtgaatgcgtgtgtccacgcctaggctggcaagtggcaatttatttacagtgatctagtcgtctaagtggtgataatcctccctaacccacacctcggagcgagctgaaattagacgagtagagcatatgtttaggatacaggcgacgggctacccgcccggcaaggaaatctcttcggagaggcccgccttgtagaggtatagttacgggcccgagcgattccgacgaagtcgcgcttggctgcctcccatgccttctcatcctcaggctataacggtaaagatcacccgttgttgttaagtgataccgataaaagagcgacggtacgcgtatctgaggaatcatagtcgaatgtaccccgcgtgaaactatgtcgttcgaggtccgaacatatgtaaagctcgttttctagaagttcgtgtctatggttaggttagtagttaggttagttggtcgcctcacccgttagttggggcaatctcccaaaaatc

SEQ ID NO: 2931 - DNA, 827 bp, Halastavi arva RNA virus
  complete genome.1
aaaatgcgaggcatgggttaccttcccatgccccctccattttaaacaacattatttcaacattttgtgttttatcagactcagtttattgcgttactaattagttttgcgtttatctgcccccgtggtttagcactttatgtgtaaagactcttgattctaaccttgccgtatggtgccctaacgggttcatttaatcatgcgatgagggttgctataccgcatccattctaaggcgattcaatgcttcatttaggaattttgttgacgattaaaaggtacccccacaaaaacaaaaccaatcttacttgattttcgttttaactgaccactgcgatcccaaattttcgccttcttatcaaagtatgttgtgttctttgggtgtacaacctgagaacttgtctacaactacatattactcgaggaagaaattcggtttaagccgtgccttctcacgtttagtatatctatctagacacaccttcttcatcttctaatccccatctagtctcctgatcagagacgtcgttattaacaaataaccccccttgttaataagagacaaagtacaatcaagctaagttctcttggagttcctgtaggaacttagccattgtgatagagtcataagtctatgtgcatagacagctctagctcaccatttccttcccaacccatcttttcatcagcttaactctatgaatccgatgcaaaaaccattctaacatcttatggtgctttccaagccaaatgagagctcactcttttgagccgctatttaatggacaataaacgttttatagtgtacatcatattgtaaaaacaaa

SEQ ID NO: 2932 - DNA, 828 bp, Sanxia picorna-like virus 6
  strain SXXX37597 hypothetical protein1
catatgcggagttctgattttagttgtcatatatagtttgggtaaaaacccggtagtagctattacgatggctattacatggtttttgcttaaccgactgtatatgggtactaatgacgagttcccataagtttacatttttatacatacgtcaatcccacgacacgggatagaattttcgaattcttgttaaaacggcttaattggctgtattgttcatctacagtggataaacgacccagcgaccctacaatttcggttcgtcttcgatatagactgataaaaatattttagtaattttaagacaaaattactgcaacgcacacatgtggttgcggcgcactgcgccatttgatatagaccattagcctcaggtctagaaaatgagggccatgtcaccggcaaggagatattctatggggtagcatagcccatagtcttaaacccgtgctttgattttagatcacaactacaggcaataaaggacatatacagttgcctgtacccacgacggcgtagaatagtgaaaatgcctaagtaactattcgtaggagcgtaatgaacttgaggttgatgtgataggtgtgattggttagaatcacattgtaagcacacgtacctcccgtccgaagccatgccaaattgagtatggtggaaaagtgggacaacaaggcgtcaacaacaaaaccaaagatttctctttggcttgttgttgactctttgttgtgtttgtggtctgcgaaatttagctgaataatagtaggttattaaagtagcagacctttacaaatacaacaagagtcaataacagccataaagtacagcgta

SEQ ID NO: 2933 - DNA, 833 bp, Wenzhou picorna-like virus 10
  strain WZRBX43164 hypothetical1
agagaaccatggaacatcccgttccatggctctcccttgctgattgtagtgtgtcgttttaccgcgacacccggctacatcacatatattcatctaagcttaattgctccttttataaacagacacaagaactgataaacaggggcaacccccttgtttactgcgtcttaccctgtaacaggagaccgtacaggcaactatttgttggctgtacgaacctagcatttgaattatatgatatttagtcaccataccggattaaaaacccgttataagtgacaagcgcttgagtgtagatagttgtggctactatttactatacttttgcccttgcccaagagagtcaactctttttcaaatcaagccccttctggcacatttgtgtttaggatatgcggaacgtatcccgaatcactatgtgtcataaactattgctccgattaagatgtcaagtatattaatcgcataattaagcagtgtttggttttgttagcagaagaatcccccctactagagaatgatttcgttttaacgactgtgcctccgcagaggactcgcacagatctagatctaacaactcttttaggaagaattggtcttttggtacattttggatgctgatatacgcatcacaaactatactgtcgcaatataactctttataagtatgtttacttcctgacaacctgagggaagaggtttggacacctaaattttccataccgctgtactgagtttgaggttttgctatgattatttatttgatggactttttggactatagttttggttttgtttagcctgttgaggttagttctacgcctactaaaatt

SEQ ID NO: 2934 - DNA, 838 bp, Gysinge virus
  isolate OTU22 hypothetical protein and RNA-dependent1
gataagaacgttatctttttccttctttgacaattttcttaagtttgaacaatcactattaaaaacttgaacaatgagaaaagacactcctctaagtttacctctctttaagatcttcattatcattatccactaaccaaccattagttggaaagtcacaaggtgatatccttgatgtgtcgtaggtgtgtattgttagcctcattcactccgcattatcacagaattgtattaatattagctaaattgttcttgggtcatcaattgtcctgtctgaactgtttaactctagtcgtccatatcctagaagttacaactcgatcctattattcatccttatctcaatatttctttgtggtgtccgcgtggagtcttatattggagcatttattgtcgaatccaatttccttacagcttctagacaatcttgatctctttcttcttgtatccgatttggctcaccatttgctagtcaaacatgcttgtgctgggattggtatcgctctacgtatacaataaaattacaaggatgaccatgtttgaagtttttgaaggatcagaagttgatgaattattacgtcttaaaatagagcaagggaagcttgaccatcatgatcagattatggaagaaccaagtgttactcttgaagattacctccgttccagactgttactaccattccgtgtggaaaatgatattgttactgtagtcaatgatagaaaactcagattattccatcacattcagacaaatccgatttctgaaattgaactaactgccttagaactcttgcaatttttctctactctttaatgagaaaagccatcattttaaagt

SEQ ID NO: 2935 - DNA, 838 bp, Beihai picorna-like virus 73
  strain BHJJX25960 hypothetical protein1
ctgggggccaaccccaggaggatctcacctttagaagtgcgcgaagcgctgtaacggcgttagtgaaccttgaggataatttctatttgtcaaacctaatcattggagtgtgacggagccttaggccactagtccctctttggagcggcgacctggtcttgaagtcctcacctttgactcaatacagtgccttaggccactagtctcctacgtgttgcgactcactgtgacggtgttagtgactgtagacggcaacctggtcttgaagtctggagaagttaatccaacatagttcaacggaagaaggtgtgatgtgtcttttaaacccctattgtatattaacgtgttacaaagtaataatgtgatgtataaaaagctcttcaaaatggacacctggtccaccaaaaatatacgtgtaatctatctatgttttcttttcttgtttccgaaattccagttagtgctacaccttagacctaatctatcaagtcggagtcggaagtaacgtgtttagtacagatttctggaacgaccgaagtcgactaattctagtccggatttccgcctacacgaaagtggtggttggatacgggaaacaaagtaagcctttagcgaaagcgacgaaagtcggcctctgctctagaattgtcggagttactgagacgtgtagtattttctggtcataccctatgggactaagaggcaggtgtccccggtttcaaggctaccgaaaaagtccttttgataaaactccccaaagtgatgaaatattttaactcgaatgttttcttctcgcacatgatgtgactttgttaatattgaacgaataactgacaaa

SEQ ID NO: 2936 - DNA, 839 bp, Wenling picorna-like virus 3
  strain WLJQ100015 hypothetical protein1
gggtgttttcacccacacacttttaattagggacttattagcaaacctctcatttcgctccttttcgctatatgccattacgagccatttcatgttaattgcttttattttcttgattgattgtgtaatcacatcttatttatacccattgactccctttctttgtcaatttctctttctcatacttcatttgtacatagttatgcttatatagaggtgttctactccgacctttctatgtacccttcttctagtttagtatttctagtcagaaaaataccttatataccgttccctgtatctcttgggaatttctacctgtatatttttccgttttaaggcttaggctttatatacagtgtatttctttcttcttcctaattgtatattttctccgttttatgtttcgtttgtctccgcacgagatgtttagctatgggattttccgaattaacgttgtgaagagcgtggtggtttttaccgaccatttcacgtttcatttcgacttggattttctctacggcgactattgtgttatatgtattttcctgtttgtatgaatgctatgtttttgtttgtattatgtttctctgtttgtaatttcaatttctagacaatcactttttgtttcattgtgtactttagcggttttctgcccgccatttgaatttagacgatataagttagtaagattttgtcacaaatgctttattcccgcgtgttatcgcttcttagccccgtgacttaaaaactgctttcttcagtctttgttcttatgtgaagctattgtatgtgtgttaactggataattttgctagcccagttttcatacatacgag

SEQ ID NO: 2937 - DNA, 850 bp, Kornilov virus
  isolate Antarctic39 RNA-dependent RNA polymerase1
gaataaagcagttgatgccccctctcagtatgagggagggtgtgcccccccggtaaaacggggaagaggatctgccgtccagcagactctggaattaaacatcgatgagatgaagcccaaacttgaaggccccaacaacagcgtagtgttggtggttagcaaggatgtaggcggtcaaatcgattttctagagccgactggtttcgcgggtcttaagcagaagcttagtgattggtcatcacaacgagtggaagcaaaacatgatgatgggttagtaaccatcatctcaagtgcccttcacaatgcgccacgcgctttcgtgggattgtgggggttgaaggatgaagtgacaagtgatagtgtcattcaatcgatcgtggacggagaagtcatggtcacgcacttggaggagaaagatgaggaatctcctaacactactaagaaggtcaaatccgttgacctttgcggagacggcgtaattgtcgttagaaccaacacccacaagcgtacgaacaaacgcacagggttccgcattccagtgctagctggagacgtcgctgccaaccttaaaggtcggcacggattcctggaatacaatccagacaacgtaaagttgatccgtgctgatgctgcgcgaaaggttgaagcatggcgcaaggaaggagatgcggaatggttaaacttgagaggagttgaagccacccgaatcatcatgcatgcggctaacatgtactggcttttgtctcaagatgaggcagatgtccaggaaatgtacaacacaagccacatgcgtgcctcgcgcgccgcccggtccaagatggccggtgcggcccctagatgctagggccgc

SEQ ID NO: 2938 - DNA, 853 bp, Beihai picorna-like virus 43
  strain BHNXC41212 hypothetical protein1
gtgtgcaatatgcgtaacaccgcatattgcacacattaaaagttatatcatacgtttaaattcgataaacctcaatttacatgtgttctttggtaaattgatgcacattttaaagtattatagaatcatagtttatatgatctgaaatatcaaaataatttgtaatcctcacagattcttttattatgatacatgtaagaacaaatatgtatgtacttctagatattttaatctacacaactttacacatttataggatggatatcctttaaatatccaaaacaaatatacacatataaacacgcacactcattcatgctaacttaacttgttagcaatcatagtcgttacacattatatgtataaatatttgatttatgcacatcagaattggtttttactaggttcgattcctagctgatgttttaaagttaaaatttttatactacatcacatctcatgctgtattttaaagttcacaattcacatattcatctttattttggattgtttaacaaaattccgatttttaccagatagttttacggaaattaaaattagcaatcataccgtccttgattgttatttaaaataaaactactgactgctcaagcttcgagcgtccataaggagatcatgaaaactgttgaagtaattcatataaatttaagtagaagatcccgactgtgtatggtggtaaagatcacccatcatatatggtaggaaaattacctactttatttgtacggacagaaaagacagcgcagggtgatgcctgatagtgattggaggccgatgattataagccttctcgaaagagagtaaattatggatataattggacaaaataccc

SEQ ID NO: 2939 - DNA, 856 bp, Wenzhou picorna-like virus 9
  strain WZSBei69430 hypothetical1
tgtatgggtatttacccatatagagtctcctacttgttggcatttcgttgtctgtttgaccgcagactcggctttcttgtcaacctattcagtcttctgagaatgttgagcttcatgcgaattttcttagaagattcgcatgctagatttcgcagctcctagacgcgttgattaatacgtctagagacacattttgagtagtattcatacatcctaggtcaccacaaaatctttgtttttgatacgttagcatattaggatgttatgctgtattttaaaaacagagtgcgcacctggcgtttccaggtccactttcaccgcgtggtcacattaaccgcgggaaccaccttatttggtgtggcattatacgccctcgagagtattttgctttattgattaattcaattacaatatcaaatcgcattaagcgatccgagcactcaagtttaaaaaggaacccagagcgccttgagacattaatattttagaacctccttttggagtggcttagcacgctaaaccgtaacggttgtaggccccaacatcaagcatatatcattttctcttgataaattacacagtgggttaaattcccagctggaagaaatgatatttagaattttgtgaggcaagcctcccgagcacattacgttacgtcctaagtaaaagtattatgagaattagccttcgaacgtcgtacaaactataagctacgatatttgaaattgttttaaatctttaactgcaattattctttgtaaattcaaaatgaacatacttgattaaaattgttctgaagctgtacccagcagcactaccagcctgaaggtagtgtgttattataaggcaccttttc

SEQ ID NO: 2940 - DNA, 858 bp, Picornavirales sp.
  isolate brb030urn1 genomic sequence.1
tggccactttagcagcactccttgctggtggttttggcagcgatatactcggctcgtatatcaaaggccaaattcagctcaacaatgcagagagtctcgagcagttcaaacaacagacgatgacaaatgctggaatcaatcccatgttggctgcgatgcaagctgctggcagcggcggatcagtgatgtccgaccagatgaccagtggcatgctctccaacatgtccagcgcagtgatgttgggaggtgtaacaacaaaaggaatcctcccgtggatgcaaggtggtcagcttggtacacctacatctgtgacagccaattatggagggatgcgtgtgacagcttcaggaagtccctcctctggcacctcttcatcgaaccccctaggggcttacagttcgatgcctcctcccagtcgaccaacttctgggaatacttatttcaacaacccatccaatacgacgaatgtcagtggcaattcagttgccttcgttccatcaagtgcaggaaccgcagctaatgaaagtgctgcacttgtcactggcaatccccaaccgtctatgacaaattctgagtttcagactgcgaacccatataacagcgctttgacgtcgtggggttctgaaatggatgttcgaaatcctggcggcctcgacacctctgctgtcggagccagtgatccatccacaaccgacgtcatgtccagtgatgacgcagtcgcggcttctggatcgggtttagtttctgccattggctaaactacgttttctagaaactgcgtttggcgacgtagttttctcaatacgatattgagcgtttcttagtgataccagaaaaaacaagaaaaacacaaaaaac

SEQ ID NO: 2941 - DNA, 860 bp, Hubei coleoptera virus 2
  strain QCM76287 hypothetical protein gene,1
tgagccccggggggtcatcccccccggactccgttcacttaagtgtgggcttgccgaagcagggactcttttcaccgtctgtaaaaagacaaattttagtttgtaaggaccttagttttaagaccgaggccgtaatctcactggataatcgtagtatatggatcaacttaggattgagatgaatataaaataaatgaagttggacagtgtctctatattaatatagctgtagccaacggacttgcttatatgattgccaattctttgccatagcagtattaaacctgcacagattattatcagtattatctagacttagtttgcggattcgacacccgtgtggcgacggctctaggtatacgtaaacgcccatagtcagtaatacggctattcctttaaggacatgcactgtatcaagaaaggaccagtgtcaagtgtgatatatatcccaacgaccaaacccccacgatacacaccccaatgtgcaaaattgtattactagctgcttatgctaattttcccaaataagctattttctacttatataaagtagatcgttgttagagaactaactaggatcttagtatgtagatgggatgatacgggaacgctgtatttcaaaggcatgtattttggtacatagtccgtattccttgaatctatttacgctaatttctgaaaagaggacctgtctctataaccagtagtacctacagtgccttacgggttaccactatgaggacagagggatttgacccgcagtgtggtaatattgggcgtagtcacgagagtcacttggcttcatatcgtgcttaattccgttaaacggtcgccctcttagatatttaaaaccatatacc

SEQ ID NO: 2942 - DNA, 865 bp, Soybean dwarf virus
  isolate IA-1-2018, complete sequence.1
acgtcattcccgactttatctcttgctgtgatgttgtccaggtggacactggtgaaaagctcccttctaagaaagataaagaagggaatgaattgccgcctgagcctaagcttaaaatgtttagaagggtgaagcctgagcatgttggtgatgccaggaaatacatctgtcaacatattcgcaataataatatgaggttgatagacggctctgatgtttctcatgcaaccatcaaccgatatgcgctcaagttttgcgaagacttggagcttgatatgaccagcactgaaatgctcatcaaatatgctatggtcatggtcccactccctcgaaaatctgatattgaggctgctaaaatcgtccaatctcctgctgccaggcaaataaggcatgagttgggcgtgcttaacgccgaggttttttagaggggctctgctccgactctggttttgaatccccgttttctattttggggttgccagagatcgtggtgcgaagtggggctatccctaggaagagtcgtagtactattaattatttgagtcagtttagtttaggtctagattaccaatgccctaatcccagtttgcacaacgcattggtggcggttgaacgtagagtgttcaccgttgggaaaggaaatgaggtagtgctaccttacaagaacataccaggaatcttctctaatcttgattatttccgcaaatctattgtggataaggttggttgccccaggacgttctcccctgaagaacttgcagcgacgtatcactctggtaagagaacgttgtataatgctgctgttcaaagtcttaaacgtaaggctgttgagaggagtgacgcgaatgtgacagctttccttaag

SEQ ID NO: 2943 - DNA, 870 bp, Hubei picorna-like virus 27
  strain QCM155345 hypothetical protein1
atctcatagggtgaacccctatgcacattttgaaatagtttcaacttatgttggatttgtttgacttagtaatgaatttgtcaaatttaaaaggtcggaagcatgaaatttattggcgtatataattatataattgattggcgttttatagaattcgtagctatatcactgatttcaattatactttgtatacaggaactctcagtggttggttaactgagctgcggcgatactaaattgatgatattttgattactgattgttgtaaatatttccaatgtaaggctttatatttcaatgactcctggaaagacaggtatggtttgaaaaccaattttaggtttaagatacttagcgttgctggaagtgagtactattagtgaagtactggacttttagatgcttattgagatatattagaatatgtactagtacctctatctgatattttcaacacataagttctctctaagaaaggtatggatcttcctcatggaaaccaaggctaaactgttaaagtcagtctgtactgaggtacagaagatctagtcccgtttatggttagcatatacatatgatgccgctttgtaacccaaatgcgtgcgcgtgattactgtatatgtccggaagcggaaaacacactctagatgattctcgtctggtgaagtacgtacgtctgatcatcctatgagcatgagctatctggcaatagcgtaatggtgcctcctaagtgctactttgtgggagtgaatctcaatgtcccgtaaaacggatacagtgaaactacacatcgacaataggcattgcggtacggagtataccttgagatccgcgtcggagcggtcttcagtgtgactttcattttattcc

SEQ ID NO: 2944 - DNA, 877 bp, Picornavirales sp.
  isolate trb102shi1nc genomic sequence.1
tcctgcaaacgcggggggcaaccacccaactgctacaccctgcacaaacaacaactaaccagcaaaagagcaaattaatcaacgccaagcatgtatgacagtctcgaggacgcgtaggggtggaaacccctacgcgccctcgagactgtcatacatgcttggctttgattaatttgctcttttgcttgttagtttttgtttttgcatggtctagaatttgactacttccccccctcttttgcactacgtgccactgtttttcaactttggttagttttgcatcccctttctccgggaacttgtttcccaccccctttttgttgttttggcggctatgttgtggcttttcaaccgcagtagcagtagacagaagaagttgagaaaacgtaagatttattagtaggacctccgaaagtaaacccctgcgcactactctgtgatgtccggacgagctatgtaaggagattcatctaaattatcgatttggacgtttagtctgccgataagcatttgtttttcccaacgtttgtaggtattcacaccccagacttctgaccgactgaattacggatttttctttttgaacaatggaattgacttgacgaagcttggctgctctttgttgtccagtgtggcatttgtaggtgtacttaagtgtatgtttacatttgtgtgatatcaaattcacagcgcaaagacaaggtttttcaaagcgtgcagtttcctaaaaactgatcacaaggtagactgggcatgcctctattattaggccaccataagtccttttagtatgcgtgtcacgacgtaccgtccatcgcgagcgaattccggagacacctcgtggatgatgtatgcaacttccggcccaaggtgaaag

SEQ ID NO: 2945 - DNA, 883 bp, Pingu picornavirus
  isolate 991, complete genome.1
gtttacgtttcttttacctgcacgttcgcgtgtagggttttcttgcaaccactatggttcgccatagttggatgcgatccccgtcctcgccaaccgacgttaaactgttggtatatgtaacctccaatcccccctaacctaagttttaccagtttctcggtatctgtaagaaccgagcgcacaccacaagtggcgacaagacttgtggaggtttgtacactaaagtacacgtctcttatagattttatctagagatctataaatagatgtaaaatattatctagacccccaccacccctgtgccatggtgcaactggcctatgagtcggattcccttttgatccgtcagcacccattctaaagactgttagcatggtcattagtctgtgaactctcgcgaaagcgttagtgttttctagcgatgcattgattgcgcgtggattccccatctggtgacagatgccccgcggcccaaaaggctagtgtgtcacaacacaccgtcaatgtgccagaaaccccatctggcaacactaattgttagtaccgattggtaaccactaatcgtccattctggctgaacattctttgggatgagcatagaagtgagtagaccccctagcgctaccttcgggcgtgactagggccagttgactataccgctccggtaataactggttaaaacaatgaaagcttactatgcgaactgccctacccaaggtagctgtacccacggctatcctgaacgtcggcagcctttcctttttattctttaaaatgttttatggtgacaatattgtgttatttagtttgttaattttgtttcttttgccttttaatttaactattgttaagcaaaacccccttgtctaattaaactgaaacc

SEQ ID NO: 2946 - DNA, 886 bp, Bidens pilosa tombusvirus
  strain pt033-tom-24, complete genome.2
tcgtcaacgggaagagtgctgccgaggttgaatcgggcattgcaaagcactgggaaatcttcggcttccaatgtgttgtcgaacccaccgtccataccctagaacatattgagttttgccagatgaagccggttttcgatggtaaatcctacgttatgacacgtaatccgcatatttgtctttccaaggatgcatatagtatcggtccatttaacacgacactcggggctaggaaatgggggaaagctgtcggtgaatgtggtttagcattgaccggtggtcttcccatcatgcagagtttttacggcatgttggtacgtaacgcgggtgatgttgggggaaaggtttcacgtgatgttgcatttgctagcggctttgcagcattggctaagatggggaaacgggtgaagagtgatgtcagtgaggaagctaggttttctttctacctcgcattcgacattagcccggatactcaattagccgtagaacgcatgtatgatgacatggttcttaacatggaattcgtcccccagggatcaccagccattgattcagacttaacatggattctcaaacacctcaaacagtaaaccgcggtaggtcaaaggaaagagctcagggtaaagatgatagcaagggatctttgaagaggcgtgttgccactgatgcgatcgcagccggggagggttctgctttgggcactatggtcatacaagctgaaacggtcactatgaccattaatttcaacttctagacatgcagtgtacctgtgtagtgcccagggatagcctcctcgacactctcaaagcttatattgtacttctcatagctttcattctcttcttcatcacaatcctttcagctcaccaaacacaatacataaata

SEQ ID NO: 2947 - DNA, 889 bp, Wenzhou picorna-like virus 15
  strain WZFSL85504 hypothetical1
acgggagcgagagctcccgtgctttgattgtctatacgtcgttcactgatactttgcgtgtgaaccacgtatcgttgaagtgttacttcttattggcgattaattacacaggatattaatcccgtgcattattggatctgtttagtctttacgacttcttttcgcaccagagagggcccacttacctctttggcaaacatttaggttggttttgtttacaagaccatattctaaatgaatactgctttgtttatcacactagaagaagaatccctcagattgctgttggattctactctagcataacttagcccccctccatgttttatgttttatgtcaccatgtcgaaggaggatgtacctcctgccggttgcgtaagaatgtaggctaccgaaactagtacatactaaactctcattccattaggggtgttagtatatgatttttaaaattgtctgtaaatagttatacccataaaaccaaataaaaattagtctagatcatttgtcaagtcagcaacttcttcactgagggtacagctatccctatatgggatgttgcgttaccgaaatcgaggagactggaggcgtcttattagagattaggagcccaccgcaacagctgattgattgaaatcttatttagagacccctgatgataactaatattaactgtattcgatgtcgcatgttttgcgtctagtagtaggttgtgataccttcaggttatagttattgtgccaggccacctgaatagacggattgattgaagcgccatgtgtagtgaacaccacaagcttgcatggtttgccgaggccacagtggagaggccaagcccacaacccgccgttatatgtgttatagaggtttttaaaatttagcaccaaaa

SEQ ID NO: 2948 - DNA, 890 bp, Macrophomina phaseolina fusagravirus 1
  complete genome.1
atggggaggaaaagagagatatagagttgtaccggccttcgggctggagggacactacatctctccggacctccaccttccagctgccggcctggggctggagagtgtattttgccgggcccccactgcctccggggagggggtgtaatcagtttcctcgggttgaaactataaaacgaggagggtgcgcccttgacagcgtgatggtgcatgggtacgcggcgtgattaaaactgagctatggtggttgtctagtcgtccaactgctgggtggatcgtcaaaagttcacgccccttctagacatcctaagtagtaggctacccgactcctctgtgagagggccgtgcaccaggtccgaagtggtcttccagaaggctttttgccgaggtaggtgaccggaccacaacgcctctattctctgttcctcctgcttcagggggagaagattaaatagaggcatccttcgcgccgcggattgctctgcgtgagcaaagcgcactgcgtcgcgggtagcttgcaactaccgaagccctagtgaagcaggtcctagggcaccttccgctaaagcctgtgagactaatggtagcaggggccttgcctatgaacctctacgctctcgggcggtatgtgacggtgagtgacctttgtggctggtggtcctttgcggctatgaacctctacaccttcgggtggtatgtgacgctgcgcacggggctattggcctgccaggtcgaatcctcctgtgtgatcacttgctccctgagtaagtgtgaagcgagtagggaaccagcatcgatggacgtaagctgggtgtggtgtggcttggtgccatgctgctaacgtagtctgcgtaggaggcctttatgcctatgaacctctacatcttcgg

SEQ ID NO: 2949 - DNA, 891 bp, Beihai picorna-like virus 45
  strain BHZC37433 hypothetical protein1
tgataggatttcctcacggaaatcctatcatatgctagattagcaaatttttgttattctggaagctcggaaaattctcattgtattagtgttctgggcaaatggactttgatcggtccataccagaacttaaattagtcatatgcggactaagctactactatgaaaatctacgcaaaattatttctgtagccctaacttcgggtgaataaatagaagtgttcgattgtcgaatcgaactaaaataaggcagacaacagataaaactgtttgtttaaaacttcagtcagcactgaaggatactcttatatttgagatcgaacatgctgatcaggttcttatattataaaacataaaaacattgggaaagttaattttgatcaacctctcgttcaagttaatgatcattatcacctctcgaaccccaatggcctgattttattttgtatatctgctctagcttgtggcagatcgtgtctacaacaagcttttatttctaaaaccatagaaaaagtataaaatgagccaaaaaaaaacacataaaaattttgtatattatgctcagaaagactctttttaatggaaatgattctagatgtgacgatggaaacctctcagctgtaaagtgctcagctcacgtttacctgacttaacatggtcaagatactgccgtagcccctcgatgggtagattcttttgagtcgcagatctatgatgtcatcggttcccatgccggtggataggccttgctagatgatttgaaattaacaagatatatccctaggtaaaagtcccaagggagagaatcagaactctaaatactgatatggcgtgacggacgcatgaataaaatatccaactacgaatcagatacgaccatcgaatttcacc

SEQ ID NO: 2950 - DNA, 896 bp, Bremia lactucae associated fusagravirus 2
  isolate DML-A_DN432391
cgagcgtacttcttccttagcagctgatgcttaacgacattaaactggtcggtatcagagatcgcgctaattagacggggtgtgtgcgttgggcatacagagtctagatgggggagagacatcaatgatggactcgaactcagccaggtcgtattgcaataaggacggttttgaaaggatctggcaaattcttttgagaatccgtgaagtcagtagaagggatgagtcaatgacgtaagcccgggccactggtttcaaatatatcaaaatctcatgtagctggctccggtcggtgcaaatcttggcggattgcttgaggtggaggtagagtagatgcggggactgtagtttcgtgacttgatcatggctcagtctgacagttaccgcggaaaattcagggctatgctcggatgctcttgctaacggctaacgccgtgcagtctagcacaagactgtgtcacagggatggccccacacatcggtaacttcatacgatgtgttaaactattacgtaaactcgtggtgcgatgtataagcattagaagcggggtgtggtgttaggaggaattctaacattgctaacgtatgctcaaccggcgaaagcagcgtttaagtagcgtatgggttgggtagaacgtgccttgatgcataagttatcaaggtggaacggccgggtaatagtattcagcgattaggcgcggggaacgaatggcctaccataactggtgtccgatagtgacgatattttatagatttaccgttgactatcgcagagaacagagaagtctggccgaatatttaatattctaatatctttctatagtagtagctgcgtttattttataaacgtgaaggccaagcatagttagacggtgacagtacattcctcaaacatc

SEQ ID NO: 2951 - DNA, 896 bp, Picornavirales sp.
  isolate H2_Rhizo_Litter_49_scaffold_571R
ctttgtcccgtccgtaatgacattaaactaagtctagctctcgactttaaattgagcaccaaatccacacgcaagtgtgaagagagaatgcatggacgtggagtaacccctaggactccatggatcgcgctctctagaaataggggttcgagcttgagcacgttgatcagctaaactcaagcctatcgtgaaattggatcgccgaaaatacatttgaaaacgaacccaaaactaccgtagacagtaatggactcgtagattttatcgaagagtctaaaactgtgcgtactgctgtcccgagattaccacgacctcgtgatatctcgccttgggcagatcaaacacctgtaaagatacttgaacgtgagtatgctttggatgatgttgtttatagcacttcttcaaattccgtgctgagatatttacctaatatttttgcacaaactgcctggaaaaacgcaatgtcttcgtttcgttatataaggtgggattttcttgaatggcgttatcaaataatgtcagttcctcaggtttggggtgctgtaggatttacatgcattccaatggacccgcgtcgtcgcactgtactatcagaagattatggtttgctatctcatactgattgccaaattgccgatttttccactgctaacagcggaagaataatggttccttggtgctctttgaataagtggcttgactggtcttctcgtcaagaggagggcttcgacgctcaaaccttcaatgagctgaagattgttggtggaccttggatatattcagccgattcctcaatcccgactagtgttaccataaatttgtggtgtagcttgcatggagtgcaagtagcaggacctcgtgtccctaatactgtgacggatgaaggagaagctcag

SEQ ID NO: 2952 - DNA, 901 bp, Beihai picorna-like virus 39
  strain BHSC164089 hypothetical protein1
cccatggcaagttatggtctgaagctagataagcctctcgagaccggtgtgtacaagtactgtgctcttttacctattacgatatcactagaatttcgtgttttaaagagcacgatcacactagattatcgttttcgatatttagagattttactttgcacatttgttgtgttaaatcaaacctgcatctttctttttagatgcaagctcgtcattgactttgagctagttggcaacaaattgtcaccaacgaatcaaaacgacggtataccctgtggtgacacacaggggaatccgtgcctcatttgaggaattagtcaatgtaagatagttccattaactattaaaattctcccactgggagtgtcagcagaacgactggttctgccacgcttgtttactgtcaatccgaaagcgtaatagtcggatagaatatcccattgaaatgggcggtatgaggaccaagacttcgtgttttgagcctcgctctccgatatgagccaagctatcttttaaaatagcccaattgacatcaatttacttactccacttgtggagagtccccctattatgatttttaggctgggcatgtagttgatggcttttgtcacgggccacattgtatggatacatccaggacgaaacgttctggacatgagaatcatcacacatcccgggcagtcttttgactgtttaccattgggatgtgtgggtgcaagcatgctttgtggtaggctgagggcgtctcatctagaccatgagacagcgccctatgaagcctgcggtagctggatttaatcaccagtgatggtacgtggcaccctgcagcagcagtttccaatacccggtctattccggatattggtagtgttgtgcaggaccccgggcgatctatatcaaa

SEQ ID NO: 2953 - DNA, 911 bp, Beihai picorna-like virus 13
  strain BHZC37435 hypothetical protein1
ctgcatgggcgttccccatgcagacttttgcatttagttgtgagttttctaactcaccaaatatcgagcgtaaatcgctccttacaactcagttagagatatgtggattggagcgtacatcgctcctctatcactgtttcaactaagttcttacaggcgtacatcggttgtatgtatctttttaatagcttagttgtatgatttgtatatctacagaagttctgcaagattctttattaacgcaatatcttgtaaccaggatttgatcacctgaaattttagtaatgaattgtttgaattatgtgatcgataattagattcattacggtgcattaagataccaatatgatatagctcctattaagttagttagagcgtcattttggtggattttttgtgccagctccttttaattattaacttcgaaataacgtaaagtgactacgagcattcttggactcacaaggtaataagagactcgaaccccgaagcgcgaggaggcacacgcattctctattctcgaaaggaatggaggcaatatatgttctgaagttattggttagatagcccgaggcacacgactagagatggttactataggaagtaattgtatagaaaatttgttgatatgagaattgttctaacatccatctcgcttactgctgtgtagtagcaagctgtctatctagactaaaactatattgttctgctaaacggattgacacccggccgacaccttagttaatgcaaaacgtaggtaattgaaatgattcggtgaacattttaagttgagcaaagttctgatgtgcgttatagaacatatcaaaatcacgcacagaccctgttatagatcagtaaaactagacctcttcatgttatttgatcacatcatgaagattctttgatcagcc

SEQ ID NO: 2954 - DNA, 913 bp, Wenzhou bivalvia virus 1
  strain beimix75829 hypothetical protein1
ttgatgcgaattagctattgacagtttcgatcttgtaacgatttcttttgagaattttgttagagatctagatttcaattaagtgccagttgtggcgattttaattgtgatcgactccaacgtctcagttttatagatccagttgtggatgagacttgtatataaatgtcttacactttccatgtatgtttattttgtcttttgttcatagtttccgttgtaccagttgtggaggaaatttgacgataaagatttatgtgtgcgtgttctattgtcttatatatataggttcattcatacttgtttgctaccattttagtttcatgcaattgtaccatatcattcacgaaacttcatgttaggaactttcaacttagttttgattagcacgttaatgttttgaaagcgttgagcaattgaggttgttgggatcgcgtaaagcggctctacgttgttactctttccgtagagattttgttatgttccgaccctagttaagctttttggtggttcttaaagccggttaggttaggccctgcaaagaagcttcatatctgaaacgcccttactttgattctcgaaggcgcgcaagctaccggatgatgataagtaacatgttggcaatgtatttgtacattgtagggagatcactgaagcactcaggcattctgcatagctgtcggaatggcctgttacccgtatcagcgaaggtttgacgtattaattaacctcttttcgtgcaaaagattctattttgatatcaacccggtgaagatgcttaatccactgttccttttaggggagcaacattttgcgttcgatccaccccttatttgtgcgttgatctatcagtatgatctcgtagtgatgcgcgtatttaaggtttttccaccccaggtggcttattttaacc

SEQ ID NO: 2955 - DNA, 933 bp, Beihai picorna-like virus 116
  strain YYSZX16386 hypothetical1
tgtgggtacaaacccacatacatctgtcgtagatcgcgacgtaaaataagcgatcattcgtagctcacgaatttaaataagcgagcagtcgtagatcgcgactctaaataagcgatccggagttgatatgcttacgtgacaaaaatatattcatcttttcatgatgtaaactgaatttgtgttttataacacacttctataactcttttacttattttatatttacttgagtttcccctcattttctatgaggatctaacctgtatttataccgtctagaattttataagtacgggccattgcctattttctgaaggtatacgtttacgcctatagccctatagtattcgtgtatctttctttcctttcttaatagcactttgcttagtaagagtctatctctcttagctactcctgctataaagaggatgtcgttgtcacgactttaaatgaaagacagacctgtgtgaagacacaataaaatacttccttatatatcgttttagtatttgaaatgttgttcttaggtagtagtacgttcggaggtgtgaaaacctctttcgcggaacctactggtatgagcttcaggacattgaacgaattatatatatgagagttggtagactactctactcgtcagactcatgacgttaattatgatagctagcttgacatctagtgaatgattttctgtataaagatattgtttcattgtgctaagtactcaggtaagctgtacagcaatgtatagtttcagagagctgtttcacaaccagttcttttgtgagtatgtcgagagtaaatcttagtgcgcctacgtggacaataatcttgtgatgaaggattttcattttatggtcggaaggtatccatatgacttccctctattgatgttccccgttcgattggattaatcaactaccatttctttat

SEQ ID NO: 2956 - DNA, 934 bp, Hubei picorna-like virus 29
  strain arthropodmix14031 hypothetical1
cacggggggaacccccgtgcgtccttttcttctatagacactttgttgtttgctttgaactaacttctgcaagtgtattttgaatttcgatttgaagtgattcattgagatttcattagtgctttgctggagtttttcgagaattgtgagtttgtgttggattgtttagtgtctctagaagagaaggtaactttttcataacataggttaattatgaatgaatgtgtgtatgtttggttgtgaattgaaagctcagctctgcacacaattgttattcttgtgttatgagttttgtttcagtttgcttgaaaccagttattttgaaagcagttatgttagtaagtatcctcctcccagaaggagcctggtgaaagcaaccgctaattgtaagtaaagtaactagtttagtaaattaatgttcgttttattatgtgcttcgaatgttttttagtaaagaaagcatatacctcatgtacttgacatgtacttgttgtatgtatctttaagatacaattgtcccatagatctgttgttctctagtagttgagaccttatcagtatgagcagagcgtagcctatacctcaaaacacacactgtatctgtttggagcagtggaaagaagttagggttttgcagagtgatatgatctgcaatgtcagctagccggcaggtgttctgtatgctagtgattacgcgtagtcctaaaccgctgataagctttccgaacgatgaactaagactgtgaagaatctgtgggttgaccgaccatggattgtaaagattgctatggtacgcccaggcatgaggttggccagttcggggtcgctccgttcatttccttaattacgataattacgatttttgttttgttgtttccttgtactgtctctaatcttgatatttttgaatttattgtaatttaatttttattgt

SEQ ID NO: 2957 - DNA, 940 bp, Citrus tatter leaf virus
  complete genome.1
aaatttaacagcgcttaatttccgcgcattacgtcaatggctttcacttacagaaaccctctagaaattgcaattaacaaacttccaagtaagcaatctgatcaattgctttctttgaccaccgacgagattgaaaagaccttggaagtgacaaatcgcttcttttctttttcaatcactccagaagatcaagaactgttgaccaaacatggtttgacacttgcaccaattggatttaaatcacactcccatccagtatccaaaatgattgaaaaccatcttctgtatatatgtattcctagtcttctatcttctttcagatcagttgccttcttttctttaagagaaagtaaggtcaatagttttattaagatgcattcagtcttctcacatggaaaaatcaagtctttagggatgtataatgcaatcatcgatggaaaggacaaatataggtatggtgaggtctctttcacttctttcagagacagagtgattggtttgagagaccaatgcttgacgcgtaataaatttccgaaagtccttttcatccatgacgagttacactttttaagcccttttgatatggccttttttatttgagactataccagagattgacagagttgtagctacaactgtctttccaattgaactactttttggtgataaggtttcaaaagaacccagggtttacacttacaaggttcatggtccccctttctccttttaccctgatggtgttgcctctgaatgctatgagcaaaatctcgctaactcaaaatggccttttacctgtagtggtatccaatgggccaacaggaagatcagagttaccaaattacagagcctttttgctcaccacgttttttcatttgacagaggaagggcttgcaatgaattcaatcacttcaataagccgagttgcctacttgcagaagag

SEQ ID NO: 2958 - DNA, 957 bp, Rhizophagus sp.
  HR1 mitovirus-like ssRNA putative RNA-dependent RNA1
tcggcaagggctcgggaaggtgccgaccttcctcagagtcctgatcagactctggaacaatctacagactactctgttgttaaacactgtacgtagtggatatcggcaagggctaatttatagatctgatcaatctatatctaatagtaacagcttattcttaagactgatcatcttaagtagaaagctttctcataatttcactctctactaaccttcaaattgttctcataatcttaaagcgctatatctaactcttcttcattaataacattaccaactatggttaaatagtaaagtatacactatgcttgacactaatccaaccttaatgtacagtaaggccattagtgatgtggacttcactcagtttctcttacattccttccaatactaaatcggatacttgttactctatgataagagttgtcttggtcacggctactagcagctgagtggcgaaatcctctcagggcgtgtacacccaccaaggttaagcaattctaggattagggagcctaacaggttcaaattcgatggacaatctggaaaatagggagacgatccaacatctaacgctaccgcggcacaggttcttctgtggaaggtttgcagtcacctaccacggtttgtcaccggtctctctaataaactctccccccttcaatttaccattttcccttccattggtatctttgtaacctatcgcagacactgtgtgggtagagcctcaaaaactgaagcacagatgataggtaagtttaacctagcactttacaataactaggccgtgcttatgcatgcaaatctttatccttccactcctcttcgtgcaagcatggctgacgcaacgagtgatgtaacacttatgcttgaatcagcttaatagattcttgtatctaggtttctagattttattggacttcttatgattagtaaacatacgcctaaagtgct

SEQ ID NO: 2959 - DNA, 969 bp, Ebolavirus
  Mutant Zaire ebolavirus, isolate Ebola7
taaggctgactaaaacactatataaccttctacttgatcacaatactccgtatacctatcatcatatatttaatcaagacgatatcctttaaaacttattcagtactataatcactctcgtttcaaattaataagatgtgcatgattgccctaatatatgaagaggtatgatacaaccctaacagtgatcaaagaaaatcataatctcgtatcgctcgtaatataacctgccaagcatacctcttgcacaaagtgattcttgtacacaaataatgttttactctacaggaggtagcaacgatccatcccatcaaaaaataagtatttcatgacttactaatgatctcttaaaatattaagaaaaactgacggaacataaattctttatgcttcaagctgtggaggaggtgtttggtattggctattgttatattacaatcaataacaagcttgtaaaaatattgttcttgtttcaagaggtagattgtgaccggaaatgctaaactaatgatgaagattaatgcggaggtctgataagaataaaccttattattcagattaggccccaagaggcattcttcatctccttttagcaaagtactatttcagggtagtccaattagtggcacgtcttttagctgtatatcagtcgcccctgagatacgccacaaaagtgtctctaagctaaattggtctgtacacatcccatacattgtattaggggcaataatatctaattgaacttagccgtttaaaatttagtgcataaatctgggctaacaccaccaggtcaactccattggctgaaaagaagcttacctacaacgaacatcactttgagcgccctcacaattaaaaaataggaacgtcgttccaacaatcgagcgcaaggtttcaaggttgaactgagagtgtctagacaacaaaatattgatactccagacaccaagcaagacctgagaaaaaacc

SEQ ID NO: 2960 - DNA, 975 bp, Subterranean clover mottle virus
  complete genome.1
acaggcatggggacctagtgtacatagcagtagcggaaagaatatgtatgttggctgaggctgatcttgcagatgctccagatccagtggaccttgtgaaagctggatactgtgatccgataagattatttgtcaaacaggagccccacccactcaagaaggttgtggaagggagattccgtttgatttcttcagtatcactagttgatcaactagttgagagactgctcttcggcccacaaaacgaaaccgaaatcgatctctggcaatcagtcccgtccaaacccggaatggggctgtcgcaaccgtggcaggtgtccgctctgtggaatgacttagagcataagcataagctcagtcctgcagcagaggcagacatctccggctttgattggtcagtccaatcatgggagatcttagctgatgtgtgcattaggatagatagagggggttttaaaggtaacctccgtaaagccgccctgaataggttcaaatgtttctccaatgctgttttccaactcagcgacggaacattgataagtcaaggcttaccgggtctgatgaaatctggaagttattgtacctcgagtaccaacagccggataagatgtctaatggctaaaatcattggagccccgtggtgcattgccatgggcgacgactcggtagaaggatatgttgagggcgccagggagatgtacgactctctcggccacacttgcaaggattatataccttgcaaagctgatctagacaagttagaggaagtgaatttttgctcccacactataaggaaagacagctactacctccaatcctgggcgaaaaccttgtttcgattcctcagtcaacctgaagatgtcaatgaacttgctgtggaattgaaaggatgtcctgaatggccccggatatccaagtacctccgtcggattggaaagatctccgacaaaacttcagaaggagagggaaaacaaa

SEQ ID NO: 2961 - DNA, 988 bp, Nilaparvata lugens honeydew virus-2
  genomic RNA, complete genome,1
attgaaagagcggcggcgcgtgtttttcacgcgtcgtcgtcttattcgggttgcccaagtgcctgctacattgtttatttgtaaattctttaccaggcctactctcgaagtacactgctaaagttttgcatctcgccttgtacctcgtcttggttttcttgagtagatttcgattgttgtgttttacatagttgccgtctctttcataccctttattggaacttattttataatttatattattattatacattatctggttataaatgttaatattctttgtgaagggccgcattacactaatttagtgttgattcaattatatttttgctttgttacattatttatcgtgagggaagtagtccatgatagtttaatgtgatttggccggggtatttattgaattaggaatcttttacagcaatatgtgtgatagcgtcaaaattttgtttattgttctcattctaaattatgtttatatctttagagcgatgattctatcatattgtaatgtaatttgtgttagagcctgctgagtttcttttcggacattcccaagaagaaagatcaactcagtaggatagcttttagtagccagtacatacttatttagtcactgtgcgtatggtgaagaagcctctacaagatttcagatgtgtataactggtgctagtcattttccgccagcctgtcttaacttagcgattaacctctttatataccaagcgctgattctgtattttagtagtgtattttatttaattggttgggcttagttataagctaggatattcaattgtctatctagatattttcttttatctcaaacggatatgatatcaaattgatgattttccaatttaccgtcatatcgtctgtgtgtgatctatatcccagtgtccttattcatccagtctaaggaaggtaagatatacgtagaaattattttaactgacaattgtctagagttggaaattttattttaaaa

SEQ ID NO: 2962 - DNA, 991 bp, Yili teratoscincus roborowskii picornavirus 1
  strain LPWC1754991
ccggggggaatccccggtaatccacttttcggccagcgtctgttgctggcactctcgcccaatcttataacactaggtattgggtcttacccgaaaggagaatcccactacaatagattataatgataaagagatagatcgacggttgcgggtcttaccttaaccgggaatcccaaaacaagcgtctatactccagagagagatcaaataagcagcgtaatggtgatacgttaaacaatccgtcatgagaagacgtaaaaatccttgtactgcaagtaaaattgcaacttttgtaattaagtaaatatgtacctcacacatgtgagcactctctaacatcagagaggaaataatcttaaattgtaatacgtgttctggtgaaccgtttagaaaccacgtccgactagagagactagtccacggagaaatccagatgttcaagttcactacgctttcctgcggaaacaatggttagctgagatttgaacgggcgtttaagttctagacacctcacagtggagcgatccacaacagagctacaatcttcagggctaactctggtgcgccgaggcatagcggcaactgtgtattaggagcatttcagggcttgaagagcaggcacgtgcttaaaatgtagcaaaactcaagatgttgagcaatgcgttctgtttgaaaaccatgagtacatggtaacctaccacattgacctatagtgcataacgagtgaagatgtagtttgaaaacatgcagcggatcatggaattgatcgcggtgtttcagatgaaattttcattgcagtgaacattatagagggctcgtttttcgataaccctttgtcagataatgttggaggtgggtacacccacttacagaaggtaccgttttcgtgtgggttgcgaaaatggcgttattagttaacacctaataatgttgtgcagggtgacagcctgtcggcgggtgcacatcttgttttaatccgttgtcttgccat

SEQ ID NO: 2963 - DNA, 1000 bp, Agaricus bisporus virus 6
  isolate AbV6-003 segment RNA2, partial1
attctaggaattgatgttctttcaaacaagatttcgattggatcattcaaacattgattgtttgtttgttaagcttgcgcccatcatgttcgcgtttgactgttaattcttttccctggcaacttgacgtcttgtcacccggttacgtatttatggcttgccttgctagggcgcgtccgcctataaacgacttaagcttcggtctagatttgctgaaagtagccctttcaccatcactctgccgtgcgtagtgagttttgtagaacattgagtgtttgagcccgtactcatcacgtgcagtcttttcaactatgctaccttgagttgtaactcttgatgctctattggaggctgtatctcgaaggctatatacctctgtatcctgggtgaaagtacccgtccctcggagcatgtactaatttccttgtgtaagatgttgctcgatcaactctacttggagagtagctttcattaacctcttggagaagaacaatgtttatacccattctttgacgttcgatgtcgatgacacaccaactctggtgagtttgatactgttgaactcgtgagtacgtctttgatgtttccccctcagaaagttgcttcaagttggttccggttccgcttgccttttcaaatcatctttgggtagacactggtgtctgtaaattcaaactggtggtaagatccggtttcccaaatctctgtctattggaggtaacgattcatgcggtgacactattagttttgacctatacccgtttgtaacgtttcgatgtccaagacacaccaactctggtgaactgaatcccacatttggttcgtgagtgcgttgcagatatctcttgtcaaacttggttgttcatggcaattttcacatggtaagattgtgagaagacccctgactcaacagtagttaattgcgccgcggttccgtattttcatctaatttaccctactttcatgatgttgaggagtaaacctcctcttttcgtttata

SEQ ID NO: 2964 - DNA, 1000 bp, Trichoderma atroviride mycovirus
  strain NFCF377 structural/gag1
gtacagatccgatgataaattccggtgatgtttaatatagcgagtttagtctcaaagctcgtcctgcggatatacaccagctcaagggggtatggactgcccttgtaaagtctacaattctagaggagaaggtgtaatttgctaacctccttagataaactgcctcatttatacatcctgtgctcaccataagctaggatggcgcttggtattaaattgagcgcaatacctccctcgaggaaagccgggggcccatcaatggggatatgaaactaggccctggtagcaatctcaccagtaagatgattttagctctaatgtataggcccggacattagtaagattacagggcaagaactatcctagtgggtctgttctcgtcgttgcgtttaacgccggcattcaggtccaggtgcgaggtaactgagattttcgactcaggtgtgatccggtggtgtcggctaccccggtgagctatcgtaacatcctacgccgttagcctcctatctagcctctagtaattatttccactgctatgctaatccaggagtgagtagggatgggaacgagcctttcgatggaataagtccctaaatagagtggcatcctacaaagaaaggtggacagactgacactcgacacagagcaaggtgaatcctgctcctagcaaacagtcggttggggaaataagagtacccaatgatggttcatcccttcaccgggtggtatagaacggcgcgtgaggtaatacatagtattatccacctcacgtatacctacccacttgaagtagggttgttggacgtcccttgaccaacttatatataccgggctgcgcaaagcctttgtcacccatttgtctaatcaagatgccagtatcgcctaccacatcctcatccccattaattttggacgaaagaagccggtagatagttgctatccaagatacactgattagagatctgaaagtaccgagtcataaatttgctgcacgaacaaa

SEQ ID NO: 2965 - DNA, 1000 bp, Tomato mottle mosaic virus
  isolate CpB1, complete genome.1
caagtcactattgggcaattgtctgattttgactttgtggatctgcctgcagttgatcagtatagacatatgattaaagcacagccgaaacagaagttggatacttccattcaaacggaatatccggctctgcagacgattgtgtatcattctaagaagatcaatgcaatttttggaccgctcttcagcgaactgacaaggcaactactggacagtgttgactcaagcagatttttgttcttcacgagaaagacaccagctcaaatcgaagatttcttcggagatctagatagtcatgtccccatggatgtgttggagttggatatttccaaatacgacaaatctcagaatgagtttcactgcgcagtagagtatgaaatctggagaagactgggtctagaagattttctggcagaagtgtggaaacaagggcataggaaaaccactcttaaagattacacagctggtataaaaacatgtttatggtaccagagaaagagtggtgatgttacaactttcataggaaatactgtcattatcgccgcgtgcctagcctcaatgttaccgatggaaaaactgattaaaggggcgttttgtggtgatgacagtctgctgtacttcccaaagggctgtgagttccctgatatacaacaggctgcaaacttaatgtggaactttgaagctaagttgtacaagaaaaagtacgggtacttctgtggaaggtacgtgatacatcatgatagaggttgtatagtatattatgatcctcttaagttgatttcaaaactcggtgcaaaacacatcaaggattgggatcatctagaagagttcagaagatccctctgtgatgttgctggctcgttgaacaattgtgcgtattacatgcaattggacgacgctgttggggaggttcataaaaccgccccccctggttcgtttgtttataaaagtttagttaaatatctgtcagataaggttttgtttagaagtttgtttatca

SEQ ID NO: 2966 - DNA, 1000 bp, Cucumber mosaic virus
  isolate Kirinyaga1 3a protein gene, complete1R
aacagaacattggaagaaaccccacaacaacatctttgtccgactctagtacccacttcaatctttctttttatctttcaaaggtcctttgggtatcttgctcaaaaccttcgcatcgaacactgcatattgcttcttaatctcggcaatcgccttttcaccaaaagagtccacttgatcttcatatttctcatagagcacaggcacagtatgaagcaaaacaaaagctatgtagaacaacgtcaagaagttcgcccagctccccagaatagagaaaacccataatccagcaatcactgataagaacttcttgagatcccttccggatgcaatatcccttaacactgaaaatgcccgattaatctcaattctaagagcagaggcaaattgtaaaatagggtcctctggaatgtgcacttgtgggatctttggcggcctcttgttgatgaaagtggatgcattggaccacaagaacaaacccgcgagggcaagtattacgaagtggcaaaccagagtgaggaggtggtactcaagcaattcaaacagaatccatatgactgtagcaactccgagtgtcgatgctgatatcttcttatttctccacagaaaaacatcagcctgttttccgccaccaagaacatggtgaatgggcttttcccttccgaaaagcctgaaaacctttgacttcaaggaatcagagggcccggttttctcgttgtcggaatccgaggaagacgatgaatcgtggtcgtggatcttcccggaaatcttgtccaacaaggactcacccttggcctcctcgtgctcgtggtgctccgccatcacagaatcgccgatcaatggaagcgtctagaaggaataagaaactccctttttcaccaagagagagagtatgtgtgtgtgcgtgtgtgtgtgtgtcgcgtcgtgtcgagtcgtgttgtccacacatttgagtcgtgctgtccgcaccttcttttcagtgtgttagaatacccgaggc

SEQ ID NO: 2967 - DNA, 1000 bp, Strepsipteran arli-related virus
  OKIAV104 cRNA sequence.2
actcatagtaggccaacaatatacttgtcgattctactagcgtcctgtatcaagacaccatcggttgagtaagattatgtctaaccattataaaataatagcagatattggtttgttggaactagacactggaataactagaagagtcaaggctggattagggacaatatccatctcaaatgataaacttcctaaagttagagaaattctagccaatcttatattactatatcaggtacaagagttagagcactggtatcttcgtctagatttccactctcccagtatgaaaaccctaattgatatgtattcagcagagttattatctcaagagcaagtttggtatatgagaattagaaccctgctaggatctggaagtgcatgtttggttaaaagtggctttgaagtgccgactatgcaaattatattagtgaaatatgtttacccatcggcattcatacctgaatagattcttttaaacagggaactttatttataacactttcttttctttacgcaaatttatcaatatacttgcatatctagcagtctcaactggaagtctctttaatttatttatcaatacacaagccagcttatctatatgattatattatgtatcaaatgcatgcgttcttagaacattaattaataaaatatgtctgctatacacaggtgataaccaatgagattatagagtaccattacaaaattgtgtctttattggcaataactagatgcttatctttctgctttaatttacacttagaaaaactcaagaagtgccatctaatagctacaatataaacataagcgcgaatacaaccaatataaatcgtcaccaaaggcttatgcgccagacatctcaaaaagaactcttgccagaggaatcagaagctataaataaagaagcatcagcattgcgagaacagaaatcaattgaccagaatatataattgaaattcaaagtgaataaatcttgcttaacataatctccagt

SEQ ID NO: 2968 - DNA, 1000 bp, Beihai rhabdo-like virus 4
  strain BHJP58499 putative nucleoprotein,2
atgcttgaatcttgagggaactcacatcgacatctcataactatgatattgattgctctggttttgattttatactttgatgttgagatatgcggggggaaacaggccagagtgctctttatagaaaactgaatttttaatcatgcatggaagggaaactgcccgatcctccgggaggttagtgctataggatttctagagcagatcagtagaattagtgttataactttggcttcttgatgtatgttattattcttgttatattacctgtgtactctatatcatactttactctattaaatccagctatccattcctgtaatgtatgcctaaatgtaaccttatagtgctataaaaaaagtaacattacccaacaaaactcggaatcctctttaacaatgaatagtgattttactgatataagctcagaatatagcgactctgctaaaggagacaaacaaactcaatctaagcaactgattaagaaaataaggagaaagttaaagacaagaaagaacactaaacagaaaaaaacctgtgccagaagggacagactcatcagatcaggaaattcacccctatcagctattatacgacagagaaaagagactaattgagaaggagtcaattgagaaacgcgtcttgaagaggaaatctgccccaccgcctgagcctcctcaaatagaaggtgatttatcggacgagttgcacctcttgatagacgatcaatcctccaagagagcttgcaggccgacagaaatacctacggacataaacagccatatcgtgacagctctgcacggcctcggagagcagatcgggaagctatccaagaaggtggatgagatcttggtgaatcagcgcgatcagtggtcagcaattagaggactgcaggctcaggtggctaagctgaacggagaagccgtagagggtctgctgtctccccaacaggaacttcggctagagtcattcaacacgaggaaggctgctaggaccatcg

SEQ ID NO: 2969 - DNA, 1000 bp, Feline morbillivirus
  strain 761U, complete genome.1
tcctaaattacttgttaagccgccacctagggtaaaaacaagcgttgatcacagtaatccattaaaaggggccacaggagggaaattagcctcacctgggatggagactacattattcgagaggagtggtgcaaccccatctgtacacccatatactcaacctgcaagcgacttcaatgtaggtgcaagcaatgtccatcaacctgccctaaatgtgaataataattgcaatgatggtagggtaacagcgcctaactcacataaagatatcgagggtgagtctgaaatatctattcaagatatatataacttgattcttggatttaaggatgattacaggaaattatcaaacaaattagatatggtattagagatgaaacaagacattgacaatctaaaaaagaatagtgctaaagtgcaattggctctatcaactattgagggacatctatccagtgttatgattgccatccctggttcaggtattgattccacaggggatgaggaaaaggatcagataaattctgacttaaaaccactgctaggaagggatcattgtagagcatttcgagaagttaccaatcctctagatgagtcttcactagccaattctccaacaaaacatgttgccaaggtaaacaaaaactgcactcttcagaagatcaacaagaacgaaacatctgcaatcaaatttgttcctagtgacagtcatgcaagcacatcaaccatcagatcaattatcaggtcatctaatctcgatcaggatttgaaaacaaaattgctcacaattctatcccagattagaggggcagacaatattagagaattctatgaaaaggttatgatattaataaagaataagaattaaatattacaaatctacattcattataggttgtaattgtcttcaataagatttggtcagtttcatatatatggttattgatttgtgataattataaaaaacttaggagctaaaggttactcagtcatatacagc

SEQ ID NO: 2970 - DNA, 1000 bp, Peste-des-petits-ruminants virus
  complete genome.1
gggtcccggaaatacccgatgtcaagaactctagaccatcagcccaatcaattaaaaagggcacagacgggaactcagtcttatctggaacggtgacagagtgttcatcgataagtggtgcaacccaagctgtgccagagtccagatgggagtcatcagagcgaaatgcgtctgtggggagtgtccccaaatctgcgaggagtgcaaagacgatccaggggttgacacaagaatctggtaccatagcatcactgactcagcctaaagagaatgactccgagtttgagtatgaggatgatctattcacagagatgcaggagattcgtgcaagcattgctaagatccatgatgacaacaaaactatcctctcaaaacttgattctctactgttattgaaaggagaaatcgatactatcaagaaacaaatcagcaaacaaaatataagtatatctaccattgagggccatctatccagtataatgatagccatcccgggctttgggaaggacatcaaggacccaacatctgaggttgagttgaacccggatttgagacctataatcagccgtgattctggcagggctcttgcggaggtcctcaagaaacccgctgttgataggtctcagaaaagcggaatcaaagtcaactccggttcaaagggtcagctccttaaggatctccagctaaaacctgtcgacaaacaggcaagctctgcaatcgagtttgttccatctgaccatgaatcatccaggagtgtcatccgctccataatcaagtcgagcaagcttaacattgatcacaaggactatcttctagatttactgaatgatgtgaaaggctccaaggatcttaaggaattccacaagatgctaacagccattcttgccaagcagccgtaacacatcctataatcaacatctcatactcggttgaaaacatcctctcaatcaggctattacaaaaaacttaggagcaagggcaactgagcttcacagacaag

SEQ ID NO: 2971 - DNA, 1000 bp, Scaphoideus titanus bunya-like virus 1
  isolate St_USA segment L,1
ggtttgacaaatgtacttgactgaccagcaggtatgaccgatgtatttggttttaaacaggtaggtatgtcaggtgtatttgattgacgggtaggtatgccaggtgtaacggggagtctattttaacaatgaggtggttgctttggctgactgatttttagtaaacgtgcttcctctgaatgtggataagactcaaataatacattttaaagcaaattacacaaacagttttcagcaaatcagacttctaaattctcggctggtccctgaagatatttgttgaaaataaaaatctgtttcctcacatttataaattgggtaaaaaactaagttcaccaatctttttccttagaattatcactaaagtcacaaagacccaattggatatctatcatccttatttttaatccctgttgaattagggaatttttgtatgggaaaattcaagccactccataagttcttaaaacatcagaaaaaaatcaatgtgtactatagccaactatacttacaatattcatgacaatatatttttcagcagtttcaagttttcatattttatgacaactacattttaaaatagcttattgggtaaagaataactggttcacattcagagaatgccaatcaaatgtgtctatgccactagatataagcataagattaagcctgtaaatcataggctaagcctgtaaatcatgggctaagcctgtatcagtgatcagtatactagaccacaaatatataacgttccaacaaatttaaaaatatcaccataagttttagattttggaaaaactaaagaatggcttttaacaaaaacattttattctctagaagaataatttaaaggaaacgggaaaacttgaattcattaatagattaatttttctcttcattagtactgtaatttgacaaaagtgttctgtcattgtttaagggcagataggtacgactcaagcacgctgaggttaaacacaaatgagtaatctaaagaaaa

SEQ ID NO: 2972 - DNA, 1000 bp, Astrovirus sp.
  SG, complete genome.1
ctaaagataagtaaaattgaggaagaagacattaggcaaattgtttgtgctgatcccattttttctagaattggttgtgtatttgaagagtaccaaaatcaattgatgaaaaatagaaccctgacacgtatgggtcaatgtggatggtcgccgtttatgggaggtttccataaacgcataaagcgcttagttgataaaggcaatgattatttcattgaattcgactggacgcgttatgatggtaccatccctaatgaagtctttagggtcattaaggactttagattctcgtgtcttaggggggatttgcaaacaaaggaaaatagagatgtctataattggtattgtgagaatatatttagaagatatgtgatgttaccttcaggagaagttacaatccaggacagggggaatccctctgggcaaatatccacaactatggataataacatttgtaatgtctttttccaggcatttgagtttgcatatctgaatactgaattggattctgatgaattaaaggaaaattgggataagtatgattcacttatatatggagatgacaggctaactacaacccctattttatgtgataattatgtagacagagttattaaaatgtatgctgatgtctttgggatgtgggtcaagagagagaaagtaaaagtttcaaataaaattaatggattgaccttttgtggctttactgttcaagagtcaaatggcctttttgtccccataccaactgatacagataaattacttgctggtttaataacaccaataaagaaattgcctgatattttgtcactctatgggaagctcctttgctaccgcatccttggccataacttgccggatgaccataaatttaaaaattatattttggtcgccttggaggtagtggccaggcacatccgtgctagtggtggggaagaaccctactatatcacggatagcatgctggataggctttggaggggaggtccaaagcaaagtc

SEQ ID NO: 2973 - DNA, 1000 bp, Darwin bee virus 3
  isolate NT-12 polyprotein gene, complete cds.1
gccgcttatgttaagtcagaacggttatggatcttgagcatttactttataggtttaggcccgaagcgaagggtggcgtaatgatcaccgccgtgaaagccagtcgtgggggtacctctatggagtacgtgttccttctaatctgggtatggttttgattaaccagtacacttatgaatgagcaccttgaatgaatgtagagtgaatgtttgtatactatttagtgaagctgtaatttggaagtagtacggaagtagtacggaaaccgaagcctgaagccgaattacagaagtagtagcttagtgtgtgtatacaaaacagtagacatctgtggcttgtctagaagctgagtatcttctttaaatattactcaattctgcgtgttatattatctattatattagtaatattagtagtgcgtaactaagtacctcctctttgagtttgagtctacttagaccactgcagtatcgagtagtaatctttaagaatagtgcaatatgttgatcgattgtcaaccaccgttaagggtaacccttagcctgtggtaaaccaatgcatgcgaaggtctagcaaactggaacatgtgagttggtattccctatacagtgtgccaccccagagagcgggtatagggcatgtcatgtcaacatatgaattttctaaaggatgtgctgcgatgaggtagggacccctctatcctctaggtactgtatgtcgcgaaagtatgaaagtataagaacgtaatataatattcagacgtacaatggtatactttaagcaagtaatactggtgtgttgtacgttaaatttgcttcggtatcactctcacaccacagccgttagtgtctcacagtggagtagggaatctttatttatttatttattgctgattccattgctgattatactgctgcgctcttgctaatttatttgctgatctatttatttatttattgctatttattgctgattatttattgctaataaatcatataca

SEQ ID NO: 2974 - DNA, 1000 bp, Picornavirales sp.
  isolate RtNn-PicoV/HuB2015-2 polyprotein gene,1
ttagttcagtggaaagcacaacaccgcttcccccgattatgtgacatcaagtaagtgggcggatgggagcccctcagaatccccgtctcccttgacgggtttgacttttaaaattcccataccggacgaaggcgcttgcaacaagtcaggtttattttctagaattcttgtttttcttaaccctacgtgatctatgcgtagtgggcggtttagtgaggaaccgttctcaggtgatccccgcacgcttgtgcggaactttggacaccacctcaggtcaggtgagacgaaggtagtgtatcctttctggaaatcttgtaatgaaaccctaacagttcatcctcttggtataagctgttcccacggctgaaacttgaggctctgatttgcacggaggctgtggacgaacatctggtaacagatgccacagtggccaaaagccaagtgagcaagaaagtccccttaataggctgtacccacggctgaagactgggatggactgcgttcaccacgtgtatccactttaagtggctgtttggttagtaagagcttgatggaaggtttggacgactgctataagtccacttgattggtttgtgtaggaatgctgggcaggtacccctatctagggatctgagctcaggctaattgtctaagcaaacccaaacttcttttcccttttttcttttcattggtgacgatcacaggagctatcatggcttctcaggcaattcacggtgtctataatctcccaatggattctcttgaagctttcaacatgattcgcgttttttaccgcgataaccaccttgacttcatttcttactgtgcctcagtggtgcggacctatcccgcggtgctgcaggagttggctcaactggttcgagacccggaacgttatgttctgttttgtgccttacattggcagaacaaccatgatgaaggttatgagactgaccctaacccggaacctatggaccaagatgaatctggagatgaacag

SEQ ID NO: 2975 - DNA, 1000 bp, Picornavirales sp.
  isolate RtMrut-PicoV/JL2014-1 polyprotein gene,1
tcatgtgtgtcgcggtccactccctcagcaacccgtctttggacgtgggtactacgatagtgccatccaattcccctaaccttgttaccttccgagcgacctccaacacccgaggtgctcaccaccctgtaaggaaaaatgaaatttcgtctggtgctggctaacagataagatctagcattttccggcccaggctaagaaacctctataaagtagatcgataaacttaaattggcgaactgtacaaagaacggtcctctaccttgccgccacacacacccaaccctaaaatttggcctttagtgtgtggccccttgtgtatgacctcaactcttgcgtacacgcggaatttaacatctttccgctgaaaggagttttcgtgcctccccgattatgtgatgctcgtcctttgctgggcggagcaacgcacgaaacaagccttttctttactaatggaatccaattcccccggtctaagccgcttggaataagacagggttattttcaccccctcttcttctactctcacagagctctattctgtgagaagggaatgttgcgcccctccttcttgggagctcgcttggcggtctttccgtctctgtgcaagagcgagtgcgcaatgtgttagaaggtgaagaaagatattttgggactaacgtttgacacggaacgaaaacgtctgtagcgacctcacaaaggcagcggaacccccctcctggtgacaggagcctctgcggccaaaagccacgtggttagcagccacctttgtgagcggcgtgaacccgacgccacggtttcgttgtgtgacactcactacccccattcggtctttcttaagccctaacacaggtccaccaagaatgtcctgaaggtacctcttcggagatctgatcaggagcttcatgccggtgctttacaccggttcggaagttaaaaactgtcacagtggacccaaatctagatggttctagatttctattggttttaaaatttcatt

SEQ ID NO: 2976 - DNA, 1000 bp, Beihai shrimp virus 1
  strain BHBJDX17672 hypothetical protein 1 and1
aacccgcaccagtgctgtctattagtttacaaagtgatcgcttggcgtaaattattagagagcttgcattgctctcctctacactttctttcgtagagtcattttatttgtccgttgaaacgtattaaaggacctattttgtgtctaaggtcttgtatatgtgtgtggttaaattcatcaaaatcttaactatcactattatatgttattgtcctttgttctatgttgtatgaaagtgtttgtgcttatattcttcaaaacacaaaaacattgttgttgactcctatagtcactatatgtgtatgaatgttgtatgaatgtatcccggattacactaaatgtacctgcttcagcatacaatggctgtgtgtagtaagggtccagcggtgctgcccccatgatagggaggagatttgcttgtgtgtctagaggagtttgttctaccggcggctgaattgctgcgtctgagagacaacttcttgaaccaccgtttgcatttggccttccttgagggatgttcccgtcacgcccggaaccacctgtcctgtcgtatttagtgtgggaaacagtgtaagatggcgttaccagatcgaaactggacctcagcacttcttcgctgagaggctggttatgcaccaccagctaaacaaacaacggttgttcttactaggcactctgtggtggagtagccgaggcgtaggaccattaacataattggagcatacaggcgagaggcccatgttgcgaggtctgtccataggggacctcaagacatcggataccaactctcgggctaagttcagcaataatgcacctctgccggcagtgttctaggcaagtgtcacactccaattccctgttattgtaagacaactaaccttccacatattgacgcccgagcccgaagggactaacgtcgaactgtgagtgcacacagtaaatctagggatctttgggtgagctcccgttatcagctcaatccttttctcatttcgtcacc

SEQ ID NO: 2977 - DNA, 1000 bp, Beihai mudskipper astro-like virus
  strain BHFishC1881592
tttaaaaatttgatgtttttactgcttctgttaatcttcttgcaagttcttttcttcttttactatctattgcatgtggacactggagaactgggacagctctatcctgatctcgactagcctgttactactatcatttatcttttcacctagatcaacaacagtggtagtactgtcttacacagtgctactttatcgcctatggcagacttggaaaatctttgcaagcaactaaaagacttgacaaccaaggttaaccaaattgcccaaagccaaaaacaaacagacccaaaacaacaaagacgcggaagatctaggagccgtagccgctccagagaacgcaaaaacatccgctactttgacgaggacaaggtaaaacctggggatattgtacacgttcgtacttgtccaggtactattactggtaaacactccgattgtcagtggaactacatcgaaatcaaattcccaaagaaacctaaaacagagggttcaaactaagtggtcagaatttgtagccaaacataatttgactgctaccaaaaacacaaacggcaaaacttgtgtcttcctctgtgacgcaacctattgtgacaacgacaacacagagttccaaaattggcgcataacaccaaaccttgaactcttagtttattcgtcaacccaaatttcaggtgggcgtagaacaaccctacagctagcctgtaaaaactactcttgtccttggcgagaagaggttcaacaattacgcaataaaacaatagttagacaccaaccgtgtctacccaaaaatttaactcaaaaaatcttaaacggctcgctttgtaccggtctagaagacggtagtaatctgatctgcgtcaaaaaaccaccaagaccaagaccaacctctctcgcgctagttttcgctagtacgatccaaatacaaacaacaactgtagtgacaaccggttctactactcaaataaccacctcacaacagacaaccaaactaacaaca

SEQ ID NO: 2978 - DNA, 1000 bp, Beihai picorna-like virus 26
  strain BZL93356 hypothetical protein 11
gttgtctcttttgagacagattggcaaccaaacatatatttattatattactactcaagcgtagcccgctagagttaatagctgtcattaacagcgacccctcggcaagaggttaactgtccaaaatcgaatctgatcgaggaagaaatccaaaaacagacgtcgctaacccgctacgaaaacgcggaattattatcgtaggataagaatcgactctatgtcgtgtgcgagtccaacggttcagattacatatgtttgtgacatgtgcaaattcggttgcacaacagccattctttgtaattcatcttattaagaagatggaagaactccctcctatggcgccctgtaatggggattggaggtactctagatttggaaacctggagtgaacgagaacggtttggagcagtggccttttataggtatagactccatctgtaattagttgaattcttagaatcagcctgtatttgatcttacttgttttccacgcaagtattgcagtataggtgctgtccttgtttgacataacgaaggcttgagttattataacacttcgaggaaagtataaagactttattaggtcagtggaaagatctggcgctgtgtttggggttaatagccccctcagcatcaatatagcaatgaagttacgaacagccaaaattttaattccggactttttgtcacacccaattccggttgtggtgatgataaatcatttgcaagagttaaatttcagaagtctaaggcttctaagcttcgtcagaagggaaaggatgctggcaagtttggcgctcccaaggggaggcgaactcagatcgctcagcaattggataaggccaatagggaatataaggcaggtagatataacctgcaggctaatagtggcatcgtcgaggaccttgagaaggtgcgacggagcctcgccggttttaaggcttcaataccgaagaagctcggcaatatttttaacgttattgaggacgtaatattacat

SEQ ID NO: 2979 - DNA, 1000 bp, Beihai picorna-like virus 28
  strain BHZY60695 hypothetical protein1
gaatgtgcaagcacgaattcacctcctgcttgtatgttttccacgaaactagatttttggcaaattagcctccatcatgtttcgtcagcccttgagtaacgggtgcaaatggtataaccctggcatgttgctcaccccaaacccgaccgaaattgtcattaaactaatgtcgaccgaaatgtcattaaactaatctaactatcttttgttctttataagattttagatgtgcatctcaccttgtagatgcttttagccggttttaagaactggcaacccagccccctattccgactctttaagagattaattttagatttggaatgtttttgcagcagtttagctcatgctgactgtttgccccatacttttattagcgtggagtaatttatttaaatcacttgtgaacgattttgaggaatcactgtctagaagatgtcacaaagcgacttagtcgtagttttgctctttacttatgatatattaccgataaatttgaagcatttaaaagtcccacatcagatgggatggtttcgatattgacctctatcacttttacgagtatgaagtgatcgaatttcatgtcatacactgataaaacgcatatctggcgaattgcgggtgttagtgaagtttgtatatggggcctcgtacccccaggcgacgagccgaatacgagtatataggttggttaatttattagcccatatctgcgtgacctgagtaacaacccatgcgggaaaagttacaaattgccacatcgacgtagatctccgcctattggtcaataagcggagaaagtatttatttgactactaacaattatcaacaactttttgtaggatgtgagaatttatcagctcccatctgtgaaatttttgatagtacttttcttgataacactcaagaaacactttttggaccccgcctttgtggtcctcgtttatgtagcgatgcgtatgatcctaaggaatatgcgcgtagcaagtaccggcgtcgt

SEQ ID NO: 2980 - DNA, 1000 bp, Wenzhou picorna-like virus 12
  strain WZFSL74240 hypothetical1
ttttctaacttaaacaagaaaatgccgctcaacttgatgggcgtcattttgttgtcagtgaacagagttcagccaactctatgtatcgcatcatttaatgctctgactttcgggtcatcagatgccttttcttggttatttgataagtatgctatagatttgcgatgtattgtatcacaagagcgctatagatttgcgctgtattgttgacgtcacatgtggcggtaccatggttgaaccctgccgctcatgtgtattcagcacgtcacgtacgtctcgcctgactgcttattttaatgatatagtttgcaaattgtcttttcagaaggtaattatcagttccttgtccaaaattctgattaaccttaggagattatatatctccgcacactagctttactaggtcgagctatttctccccttcataggaggaaaggacatctagactttaagctctttggtcctgagctatttcccgatgggcatacacagatgtccacagtaacaactcgtaaaagaaataaaaatattttgaaaacggaccattacccttacccttgtaacaaaggaactccccttctcaaatttagaaatcccataaaaatctttaaaacagaaatgtaaacaagatccacctttgttgcagagaaccatatgcttgtgaggaaatacactgaatataaatccctaaacgctgggtttcactgtatgagtttcctaacctacacagtcgagagattgtgggctcaattgagtttggttctagacctaagcgcccctcttactagatatagtttgcacttgaggaaatgcgatatgggaaagcgtgcacttacccctgcgaaggaagggtgcatgtgttggaaacagatgtgtagaggttcataaccactcacatgccatacgtactgatcacggtaagagtccgagagctagggtttccccctgaaagtgggatatcccgacaccaggagaaataataggtgataatgtgaaagcg

SEQ ID NO: 2981 - DNA, 1000 bp, Sanxia picorna-like virus 13
  strain SXXX34014 hypothetical protein1
ccatcgagctgtaaggagttagggaaacccctggcagtttatcggtcctgccataaccaaataccgacaccccctcccttcatagtttgtagatattttcaacacgaagcgttgagaacaatagtataacaccatcgcgagcgcactttgtctgtgctactggtcttatatgaggtgtttatacgccactgttatagttttagagaattgttggaattagtggacacatgtccacatgcacgaaatactacgtgagtgcatgctggcttgaccccaaaaacaaaatcaaaattataaatgttcttgccctttgtcggtttagaacatacaaaaatcgcagataggtgcctcttggtgacttaatcagtcccatatcgtactgttgccatcacatatcaatcgtaagtgagacagcgttgctggtggctactctagagaccagcacacagcgtaagctgttcaggtgtccactttacccgagagggtatgtagcagcgattgttgttgtgacacgggcgggtacacctgacttagtaaggttccgattaactggaactctgaaacgttagccccctggaccattagggtcgtgagggttccatgcggagtgcttatcactcctgaatggatatggagcattcacagaagccgcggagtaaaggcccggaggaatgccagtacgtctagctcagccggatgaggagtccggcgttgtcgagacaatgtgtattgcgatgcactaggtaagacagagcgccactgagcctgctcgtggtatgaagggacgtgcacggatctggcaatgtccgatgatggtgataccgtcagctggatgtgaatgtttccagagtcaggcactggatgtagtgccgaagtttccttggtgacgttcctccctttgatgaggtaatgttacaacaaaaacactccgtgcaacccaggaacaatcgcaaaacccctccacccccaaaactaaacacacgacacagatacaacaatc

SEQ ID NO: 2982 - DNA, 1000 bp, Wenzhou picorna-like virus 24
  strain WZSBei69493 hypothetical1
ctttgcctacaacctttatagtttttatgccggcccactttgatttatcaatgtggccccttgatttgtatctcgcgggatacgcccatacatttccggcatcctatttgatatttcattcgaattattttattaacatataatatttatttattcgttagtcactataattagtgcaaccggtcttcgggccattattagtccttttattagttctatcacgtgtcttcgggcacacaaatagtaaagtatttttattagatctctggagcatttaagatgctatagccttaacgaactggcgtttatcggctttttaaattgaacggtatggttaccacattgcccgggagcctattttaagctttttcctttagcggggaattatcacttattttagaataaactcctttatccaggtgactaggtattcctatcaagccaagtttcaactattaagtgtcaggataagtctttagagttaagttgcacatcgctgcgcgttgagtgcgtagttacccatggtgtgcattttgctatgataaccatcttgcatgtttcatgtcttttattaatgaggtagttgttctataacagcatttcggctgagaagctgaggtgttggaacactaatgtttacccacctatcgaatattctatacactgggttaactgcccgtatagtcttaaactagttccttctattttatctagacatggaaaagcaattcctacccctcgagtcggggaaactaattctcttcaacacatactagtctcttcggagagtgttgaagcccttaatcattcttgtaatgaacatgtgcagttacatggtttatttcattttactgccaagtgtagttgtttcaatgttgacttgattgtctcaaaggatgacacacacgaatcaaaagtggatctatcttcggatgattccaatgtcaaagaagtactatttactgagagcgattatttttcgatttcgcaacagacaggg

SEQ ID NO: 2983 - DNA, 1000 bp, Beihai picorna-like virus 9
  strain BHBJDX18814 hypothetical protein1
cctaaaaatatatgtgtgaattgctctccgtgaaaggagatactgatcatgtaataggtgctttaagcactgaagctgcaagaactacagcgtaatcaacgcgaaccccgcttgctcagcgggaaataaatagagcatttttggtaatcttcttacctctgaatatagaaaaagaagacgtcgttcgaagccggaacgtaatccggattttacattacagtaccttcgcgtaggtgcagtaacaaatagttggtggagccaaccgtctagatatagtgatctaggacacactaccactttttaattttacattataaagaacacacgaactcacctcttggcgggctacgtaacgtagttttgaggttctcttataggtatacttatcctgttagagagtgcgatgtacggcatggagcagtaatatacttttatagtattcagactgtgttcgttacttatatttgtaataaatattgattagtggtcagctctttcatcttatcccaaggctttattcgaccttgggtgtttgttagagtgtgtggcttgttagactgaagcaaaggcttgagcttcgacttttcgagcaaagaattagaatagatctggcgccgttgggcttaactagcccctcggcatcaaatagcatgaaattactaacgccttttcaaaagtactagaccctctttcctttgaaggaggaacttacgatttgtactctccccaatcttttaatttgtggtcaagatggcaatttattagcaaatacttggcacgggaactttctaaagaagttctttccaaaattgaaggattggtggctttgtttttggcactcagtgaggttcagacggagaaaggtttcttgtctgtgttaatactttatgtaaaaacacattgtgacgagtctcttattaaattcgtgactgaacaggttgcagtcctgtttaagggctatacggcacagagttctggccgtccaaagtggttggatgat

SEQ ID NO: 2984 - DNA, 191 bp, Unknown
  Description of Unknown: SF573 Dicistrovirus sequence
aaaaccgaccccagagatcagaaagtcgttgacgcgatcttttattagaggacgttgcgctggcgcgagctttaattagcagacgccaaaaataaacaacaaaatgctgatcgcgagacttaattgtcagacgattggccaaatccgatgtgatctttgctgctcccagattgccgaaataggagtagtag

SEQ ID NO: 2985 - DNA, 193 bp, Unknown
  Description of Unknown: CRPV sequence
aaaagcaaaaatgtgatcttgcttgtaaatacaattttgagaggttaataaattacaagtagtgctatttttgtatttaggttagctatttagctttacgttccaggatgcctagtggcagccccacaatatccaggaagccctctctgcggtttttcagattaggtagtcgaaaaacctaagaaatttacct

SEQ ID NO: 2986 - DNA, 675 bp, Chicken orivirus 1
aaaccctcacgagtgcttgtggtaggtcccaggccaatattcttcgtaaggcttggttccaattttccaccactcgtgtttgggttctggcctatggtacccagaggggcggtttgggggaattaactccccctcccctgtggtcctataccaccccacacctctgtgggctttctttactatcttcttgttttccgacttttaaacactaggcaggcgcgcctagtcatacaccgcccggctggtctttccagctcttgtgggcggtgcgcgctggtccatcgtgcccagcgacatagcaccttgtggacacctccgaacgccctcccctgtatggggtggtgcccaggggtttcagtgtggtgacacactccctggggcccgaaaggctagtgtgcaacaggtgaggtacagccagctgcccccgtggctggagggaccaagcttgtgaagcacacctcaccttcttgggggtgggctagtaagtggtgaaagcatagtgtccgtgtcgctggccaacactttgggtcaagtccagccactcagtgagtagatgcccaggaggtacccctagtggatctgacttggggcctgttacttaatgcaggttaaaaactatgaaagctgagtagtgtagcccggctggtggcttctcttccttattcattctatttt

SEQ ID NO: 2987 - DNA, 630 bp, Unknown
  Description of Unknown: PV1.0 sequence
aacaaaaggctacaccacttgggctacggcccgcgccaccttgtggcgcaaagacattagaagaatagcataccgcccactagggccctgcagccagcagggtaacgggcaagcacttctgtctccccggtagaacggtataggctgtacccacggccgaaaactgaactatcgttacccgactccgtacttcgcaaagcttagtaggaaactggaaagttcgagttattgacccggagtgttccccccactccagaaacgcgtgatgagggttgccaccccgaccatggcgacatggtgggcatccctgcgctggcacgcggcctctaagaggataactcgctcctactggtaaccgaagagccccgtgagctacggtttattcctccgcctccctgaatgcggctaatcctaacccatgagcagttgccatagatccatatggtggactgtcgtaacgcgtaagttgtgggcggaaccgactactttgggatggcgtgtttccttgttttctccatttgttgttgtatggtgacaagttatagatctcgatctatagcgtttcttgagagatttccaaacatttattcaagtcgtacaattcttgtgtttaagcagtacagtgtaacc

SEQ ID NO: 2988 - DNA, 630 bp, Parabovirus
  5?48
aacaaaaggctacaccacttgggctacggcccgcgccaccttgtggcgcaaagacattagaagaatagcataccgcccactagggccctgcagccagcagggtaacgggcaagcacttctgtctccccggtagaacggtataggctgtacccacggccgaaaactgaactatcgttacccgactccgtacttcgcaaagcttagtaggaaactggaaagttcgagttattgacccggagtgttccccccactccagaaacgcgtgatgagggttgccaccccgaccatggcgacatggtgggcatccctgcgctggcacgcggcctctaagaggataactcgctcctactggtaaccgaagagccccgtgagctacggtttattcctccgcctccctgaatgcggctaatcctaacccatgagcagttgccatagatccatatggtggactgtcgtaacgcgtaagttgtgggcggaaccgactactttgggatggcgtgtttccttgttttctccatttgttgttgtatggtgacaagttatagatctcgatctatagcgtttcttgagagatttccaaacatttattcaagtcgtacaattcttgtgtttaagcagtacagtgtaagg

SEQ ID NO: 2989 - DNA, 675 bp, Parabovirus B
aacccataatccattgtccatcaatgttttatgggggggaccctttctcccctccccctccaaataccttttacccctctgtaaccaagagtgtgcaaaatctatttactagcccagaattgcggcttctggggaggtttattcctcatgcctaacaagatgttacgcaaactccgggctacggccctgggcttttgccctaaagatttagaagtttacactatcgtccaacaggaggacaacaaaccagttgttctaaggacaagcacttctgtttccccggtgagactggatagactgtacccacggttgaaactggttgatccgttacccgactcactacttcgagaagattagtaggaaactgtgaaactgattccattgatccggatactttccccgtatccagaaactactgatgagggttgacttcccgactacggcgacgtagtgtcatccctgcgctggcagtaggcctctttgaggatggaagatgtggatcggtaaccgaaggtcctattgagctagtgtttatacctccggcctcctgaatgcggctaatcctaacccatgatctagtgctcacaaaccagtgagtagctagtcgtaacgcgtaagtcgtgggcggaaccgactactttggagtgaccgtgtttcctattttacttttgtttg

SEQ ID NO: 2990 - DNA, 636 bp, Echovirus E30
aagcaaggcaaacctgaccaatagtaggtgtggcacaccagccgcattttggtcaagcacttctgtttccccggaccgagtatcaataagctgctcacgcggctgaaggagaaaccgttcgttacccgaccagctacttcgagaaacctagtaacactatgaacgttgcggagtgtttcgttcagcacttcccccgtgtagatcaggtcgatgagtcaccgcattcctcacgggtgaccgtggcggtggctgcgttggcggcctgcctacgggttcgcccgtaggacgctctaataccgacatggtgtgaagagtccattgagctagctggtagtcctccggcccctgaatgcggctaatcctaactgcggagcaggtgctcacagaccagtgagtagcctgtcgtaacgggcaactctgcagcggaaccgactactttgggtgtttttccttttttcttctcttatattggctgcttatggtgacaattaaagaattgttaccatatagctattggattggccatccggtgacgagcagagccattgtttacctctttgttggatttgtacctttgaaccacaaagtcttgaataccattcatctcattttaaagttcaactcagctaaaagaaa

SEQ ID NO: 2991 - DNA, 675 bp, Equine rhinitis A virus
aagggttactgctcgtaatgagagcacatgacattttgccaagatttcctggcaattgtcacgggagagaggagcccgttctcgggcacttttctctcaaacaatgttggcgcgcctcggcgcgccccccctttttcagccccctgtcattgactggtcgaaggcgctcgcaataagactggtcgttgcttggcttttctattgtttcaggctttagcgcgcccttgcgcggcgggccgtcaagcccgtgtgctgtacagcaccaggtaaccggacagcggcttgctggattttcccggtgccattgctctggatggtgtcaccaagctggcagatgcggagtgaaccttacgaagcgacacacctgtggtagcgctgcccagaagggagcggagctcccccgccgcgaggcggtcctctctggccaaaagcccagcgttaatagcgccttctgggatgcaggaaccccacctgccaggtgtgaagtggactaagtggatctccaatttggcctgttctgaactacaccatctactgctgtgaagaatgtcctgaaggcaagctggttacagccctgatcaggagccccgctcgtgactctcgatcgacgcggggtcaaaaactgtctaagcagcagcagaaacgcgggagcgtttctttttcctcatttgtttc

SEQ ID NO: 2992 - DNA, 576 bp, Equine rhinitis A virus
  U188
aatattggcgcgcgcatttgcgcgcccccccccatttcagccccctgtcattgactggtcgaaggcgttcgcaataagactggtcgtcacttggctgttctatcgtttcaggctttagcgcgccctcgcgcggcgggccgtcaagcccgtgcgctgtatagcgccaggtaaccggacagcggcttgctggattttcccggtgccattgctctggatggtgtcaccaagctgacaaatgcggactgaacctcacaaagcgacacacctgtggtagcgctgcccaaaagggagcggaactcccccgccgcgaggcggtcctctctggccaaaagcccagcgttaatagcgccttttgggatgcaggagccccacctgccaggtgtgaagtggagtgagtggatctccaatttggtctgttctgaactacaccatctactgctgtgaagaatgccctggaggcaagctggttacagccctgaccaggggccctgcccgtgactctcgatcggcgcagggtcaaaaattgtctaagcagcagcaggaacgcgggagcgtttcttttccctttgtatcgac

SEQ ID NO: 2993 - DNA, 612 bp, Vilyuisk human encephalomyelitis virus
aattccttcttcctttctccttggacctcggtcccccggtctaagccgctcggaatatgacagggttattttcacctcttctctcttctacttcatagtgttctatactatgaaagggtatgtgtcgccccttccttcttggagaacgtgcgtggcggtctttccgtctctcgaaaaacgtgcgtgcgacatgcagagtaacgcaaagaaagcagttcttggtctagctctggtgcccacaagaaaacagctgtagcgaccacacaaaggcagcggaaaccccctcctggtaacaggagcctctgcggccaaaagccacgtggataagatccacctttgtgtgcggtgcaaccccagcaccctggtttcttggtgacaccttagtgaaccctcgaatggcaatctcaagcgcctctgtaggaaagccaagaatgtccaggaggtaccccttcctcatggagggatctgacctggagacacatcacacgtgctatacacttgtgcttgtgtttaaaaattgtcacagctttcccaaaccaagtggtcttggttttcccttaacttcgaaaagtcactatggcctgcaaacatggatacccagacgtgtgccct

SEQ ID NO: 2994 - DNA, 675 bp, Foot-and-mouth disease virus
  O isolate
acaagcttgacaccgcctgtcccggcgttaaagggaagtaaccacaagcttacaaccgcctaccccggtgttaatgggatgtaaccacaagatacaccttcacccggaagtaaaacggcaaattcacacagttttgcccgtttttcatgagaaacgggacgtctgcgcacgaaacgcgccgtcgcttgaggaggacttgtacaaacacgatctaaacaggtttccccaactgacatacaccgtgcaatttgaaactccgcctggtctttccaggtctagaggggtaacactttgtactgtgcttgactccacgctcggtccactggcgagtgttagtaacagcactggtgcttcgtagcggagcatggtggccgtgggaactcctccttggtaacaaggacccacggggccgaaagccacgtcctgacggacccaccatgtgtgcaaccccagcacggcaacttttctgtgaaactcactctaaggtgacactgatactggtattcaagtactggtgacaggctaaggatgcccttcaggtaccccgaggtaacacgcgacactcgggatctgagaaggggactggggcttctgtaaaagcgcccagtttaaaaagcttctatgcctggataggtgaccggaggccggcgcctttccattataactactgacttt

SEQ ID NO: 2995 - DNA, 675 bp, Hunnivirus A2
acagtttttgacaaggaccctcacctgtcaatcgggaccaccactttcagtgaccccgtgcgaagtgttgagagaaagtgagctttcttacccttcatttgtgaacccttcagtcgaagccgcttggaataagatggaaggaaatgttcattctaaatggagtgaaacatatacttaatttccagtgtttagtggtctttccactagacaacggcactgtcttgccggaactctacacaccaacattccacgcttgtgggactcaaatgttggatgacacagttgtagctggaactgagtgtttagtgcactctgtgtaacagtgaaaacaatgtgatcacttcggtgggctagtagcctgtggactaacaactggtaacagttgcctcaggggccaaaagccacggtgttaacagcaccctactagtttgattggagcaatccatgatgttacagagttagtaactgccaaacagattgtactggtatcttggcataccgtgcaacttaggatagtgaaggatgccctggcggtacccataggtaacaagtgacactatggatctaaacaggggctcactctacgttgctttacaactagctgtgagttaaaaaacgtctaactatccacaacctaggggactaggttttcctttttatttttatacacaacta

SEQ ID NO: 2996 - DNA, 319 bp, Unknown; identical to SEQ ID NO: 304
  Description of Unknown: PLV-CHN sequence

SEQ ID NO: 2997 - DNA, 675 bp, Posavirus 1
acatttccttgcgtgcgcacccgaaaatttattgaacttggcttgaatcataagtaatgcttcttatagcggacactttgagaatataatgcttgtatggattaatgtatactgttttaaataacaaacctagacacgcagttgcgttgatggttgtatcaatcacatataagtgttgaactcgtgttaatcctcgatcgctatatgtttgccgcctacttccaataaaatagattacatgcgcgtcatgcctttgtgggttacctattggcctctgacaaaaacaagtcgtaagatttgtagcttcccggtgtaaaaagctgggcgcggtctggctctcgtagggtggaaaggtccaccaatggctggttgagtgtaagctccggtgtcctggttgtcgcaattccaggcgtcgtaataacctatattgcatctgactctaactcttgtggctctactgtatctagttcttgttctactaactctaataatactactggctctaatactgaaaaacttacatatgttaatatagataatatccttgatcctgatatccctcacgtcactgaagttcgccgaaaacgaatttcagatcatatcattgaatctcaaggatgtacttgctctgaacctactataactcctcatgcgttttcattttctactcttggc

SEQ ID NO: 2998 - DNA, 107 bp, Rinderpest virus
accaaacaaagttgggtaaggatcggtctatcaatgattatgatttagcacacttaggattcaagatcctatcgactggagcaggcttaaggtaaaggttctttaaa

SEQ ID NO: 2999 - DNA, 134 bp, Unknown
  Description of Unknown: Avian paramyxovirus penguin sequence
accaaacaaggactagataacccacgtgaccgttaactggaaaataagatgttgtaggggcgacctagttggaattcgaccccggctccgaaacctctaattgtggttattggcagtctagtctacttctaacg

SEQ ID NO: 3000 - DNA, 121 bp, Newcastle disease virus
accaaacagagaatctgtgaggtacgataaaaggcgaagaagcaatcgagatcgtacgggtagaaggtgtgaaccccgagcgcgaggccgaagctcgaacctgagggaaccttctaccgat

SEQ ID NO: 3001 - DNA, 145 bp, Mumps virus
accaaggggaaaatgaagatgggatgttggtagaacaaatagtgtaagaaacagtaagcccggaagtggtgttttgcgatttcgaggccgggctcgatcctcacctttcattgtcgataggggacattttgacactacctggaaa

SEQ ID NO: 3002 - DNA, 107 bp, Dolphin morbillivirus
accagacaaagctggctaggggtagaataacagataatgataaattatcatacttaggattaatgatcctatcaattggcacaggatttggataaaggttcacagtc

SEQ ID NO: 3003 - DNA, 107 bp, Canine distemper virus
accagacaaagttggctaaggatagttaaattattgaatattttattaaaaacttagggtcaatgatcctaccttaaagaacaaggctagggttcagacctaccaat

SEQ ID NO: 3004 - DNA, 675 bp, Human poliovirus 1
  strain EQG1419328
acccttgtacgcctgttttatactcccctccccgtaacttagaagaaacaaaataagttcaataggagggggtacaaaccagtaccaccacgaacaagcacttctgtctccccggtgacattgcatagactgtccccacggttgaaagcaattgatccgttacccgctcttgtacttcgagaagcctagtaccatcttggaatcatcgatgcgttgcgctccacactcagtcccagagtgtagcttaggctgatgagtctggacattcctcaccggcgacggtggtccaggctgcgttggcggcctacctgtggcccaaagccacaggacgctagatgtgaacaaggtgtgaagagcctattgagctataagagagtcctccggcccctgaatgcggctaatcccaaccacggatcaagggtgcacgaaccagtgtataccttgtcgtaacgcgcaagtccgtggcggaaccgactactttgggtgaccgtgtttccttttattatttcaatggctgcttatggtgacaatcattgattgttatcataaagcgaattggactggccatccggtgaaagtgaaacatattgtttgcctcctcgttgggtctacttcaaccaatctttacttacaatcttaccactacagttttgctggttagaagtgtgtttcacg

SEQ ID NO: 3005 - DNA, 675 bp, Unknown
  Description of Unknown: Parabovirus A3 sequence
accgttacgcaccactcagttggtgtttggtggcaccaatgatggaacaaaaggctacaccacttgggctacggcccgcgccaccttgtggcgcaaagacattagaagaatagcataccgcccactagggccctgcagccagcagggtaacgggcaagcacttctgtctccccggtagaacggtataggctgtacccacggccgaaaactgaactatcgttacccgactccgtacttcgcaaagcttagtaggaaactggaaagttcgagttattgacccggagtgttccccccactccagaaacgcgtgatgagggttgccaccccgaccatggcgacatggtgggcatccctgcgctggcacgcggcctctaagaggataactcgctcctactggtaaccgaagagccccgtgagctacggtttattcctccgcctccctgaatgcggctaatcctaacccatgagcagttgccatagatccatatggtggactgtcgtaacgcgtaagttgtgggcggaaccgactactttgggatggcgtgtttccttgttttctccatttgttgttgtatggtgacaagttatagatctcgatctatagcgtttcttgagagatttccaaacatttattcaagtcgtacaattcttgtgtttaagcagtacagtgtaagg

SEQ ID NO: 3006 - DNA, 384 bp, Hepacivirus A
acctccgtgctaggcacggtgcgttgtcagcgttttgcgcttgcatgcgctacacgcgtcgtccaacgcggagggaacttcacatcaccatgtgtcactccccctatggagggttccaccccgcttacacggaaatgggttaaccatacccaaagtacgggtatgcgggtcctcctagggcccccccggcaggtcgagggagctggaattcgtgaattcgtgagtacacgaaaatcgcggcttgaacgtctttgaccttcggagccgaaatttgggcgtgccccacgaaggaaggcgggggcggtgttgggccgccgccccctttatcccacggtctgataggatgcttgcgagggcacctgccggtctcgtagaccataggac

SEQ ID NO: 3007 - DNA, 340 bp, Hepatitis C virus
  QC64
acctgcccctaataggggcgacactccgccatgaatcactcccctgtgaggaactactgtcttcacgcagaaagcgtctagccatggcgttagtatgagtgtcgtacagcctccaggcccccccctcccgggagagccatagtggtctgcggaaccggtgagtacaccggaattgccgggaagactgggtcctttcttggataaacccactctatgcccggacatttgggcgtgcccccgcaagactgctagccgagtagcgttgggttgcgaaaggccttgtggtactgcctgatagggtgcttgcgagtgccccgggaggtctcgtagaccgtgcatc

SEQ ID NO: 3008 - DNA, 675 bp, Unknown
  Description of Unknown: A115-675 sequence
acctttgtgcgcctgttttataccccccccaacctcgaaacttagaagtaaagcaaacccgatcaatagcaggtgcggcgcaccagtcgcatcttgatcaagcacttctgtaaccccggaccgagtatcaatagactgctcacgcggttgaaggagaaaacgttcgttacccggctaactacttcgagaaacccagtagcatcatgaaagttgcagagtgtttcgctcagcactacccccgtgtagatcaggccgatgagtcaccgcacttccccacgggcgaccgtggcggtggctgcgttggcggcctgcctatggggcaacccataggacgctctaatacggacatggtgcgaagagtctattgagctagttagtagtcctccggcccctgaatgcggctaatcctaactgcggagcacatacccttaatccaaagggcagtgtgtcgtaacgggtaactctgcagcggaaccgactactttgggtgtccgtgtttccttttaatttttactggctgcttatggtgacaattgaggaattgttgccatatagctattggattggccatccggtgactaacagagctattgtgttccaatttgttggatttaccccgctcacactcacagtcgtaagaacccttcattacgtgttatttctcaactcaagaaa

SEQ ID NO: 3009 - DNA, 675 bp, Unknown
  Description of Unknown: A110-675 sequence
acctttgtgcgcctgttttataccccctcccccaactgtaacttagaagtaacacacaccgatcaacagtcagcgtggcacaccagccacgttttgatcaagcacttctgttaccccggactgagtatcaatagactgctcacgcggttgaaggagaaagcgttcgttatccggccaactacttcgaaaaacctagtaacaccgtggaagttgcagagtgtttcgctcagcactaccccagtgtagatcaggtcgatgagtcaccgcattccccacgggcgaccgtggcggtggctgcgttggcggcctgcccatggggaaacccatgggacgctctaatacagacatggtgcgaagagtctattgagctagttggtagtcctccggcccctgaatgcggctaatcctaactgcggagcacacaccctcaagccagagggcagtgtgtcgtaacgggcaactctgcagcggaaccgactactttgggtgtccgtgtttcattttattcctatactggctgcttatggtgacaattgagagatcgttaccatatagctattggattggccatccggtgactaatagagctattatatatccctttgttgggtttataccacttagcttgaaagaggttaaaacattacaattcattgttaagttgaatacagcaaa

SEQ ID NO: 3010 - DNA, 675 bp, Unknown
  Description of Unknown: Human coxsackievirus A2 sequence
acctttgtgcgcctgttttatatccccaccccgagtaaacgttagaagttacgcaaccccgatcaatagtaggtgtagcactccagctgcatcgagatcaagcacttctgtctccccggaccgagtatcaatagactgctaacgcggttgaaggagaaaacgttcgttacccggccaattacttcgagaagcccagtagtgccgtgaaagttgcggagtgtttcgctcagcacttcccccgtgtagatcaggctgatgagtcaccgcgatccccacaggtgactgtggcggtggctgcgttggcggcctgcctatggggcaacccataggacgctctaatacagacatggtgcgaagagcctattgagctaattggtagtcctccggcccctgaatgcggctaatcctaactgcggagcacatgccctcaaaccagggggtggtgtgtcgtaacgggtaactctgcagcggaaccgactactttgggtgtccgtgtttctttttattcttataatggctgcttatggtgacaattaaagaattgttaccatatagctattggattggccatccggtgactaacaaatcgctcatataccagtttgttggttttgttcccttatcacatacagctcataacaccctcttatatttactacaattgaatagcaagaa

SEQ ID NO: 3011 - DNA, 675 bp, Bat Iflavirus
acgaatcggtatacgcttcggtacctattgttgcaagttcgttccctattttcgatttgcctgcccgaatttgactcaaacaattgtgacatactatgtctctgtttgaaagcactacacgagtttgcgcccagcatgtatgttttcaagtcttttgtataagtctgcctctatagtggttttctttgaccttaaagccttgtcaaccatcctatatgctgcatcgagacttgatgtcaatctgcctctactacgcaaatgtctagtaattagttataaggttttactattttccctcatttccaattttagtttgtagtgtatgtgagtatcattcttactccgactgttaagagaaaccaatttatagtcgttaaatatgataaatggaatgaatgatggtgtcattttaaaaacactcttctctataggcgtaagcattctcgctcttagagtcgtaaagaagaaatgccgtgtctatcagtatgttatgcgatttattttctgccacgcgcttctagtgcaatctagttgacatacagacattgcctaccactcgcgagggtcgaccggtagtgtaaggagtaagtgatgatttccgcttattctgtaccctttgcctggtgaggacagatcctgactaattttaaatataaatgaacactagcttccaag

SEQ ID NO: 3012 - DNA, 143 bp, Farmington virus
acgacgcataagcagagaaacataagagactatgttcatagtcaccctgtattcattattgacttttatgacctattattagacccttcacgggtaaatccttctccttgcagttctcgccaagtacctccaaagtcagaacg

SEQ ID NO: 3013 - DNA, 675 bp, Unknown
  Description of Unknown: Poecivirus BCCH-449 sequence
actacacaatcgcaacacgcgcaagtttgtagtttgattggcgtgcaaatgtcaaatcaagcatataacacaatttggtggctgttggtgtttgttataggaattttggttgtgttgaaattgtggatgtgtaggaaatatgcacaattacgtcagcgtcaggagttttataacctggcgcaacaccaaaatggtcttcgcgctttaacatcaccagcgaggtgtaaacaaattgaagttgaattagatcgtgtataggccagggaaccatccctcccaacgccacatcttgtggggaagttgggataatggtgggtctatatgaattggtctgtagacccacagtgaagagtgaatagtatgcttgcggttccatttgttaatggtctagcatgggtgggggcggcaaccccgtgaggggttccccactggccaaaagcccaggggttagtcatttcaaccaaggaagctggtaacctggtgacctgaacttgagtggtgagacccccttgctagagtgtgtaaaccgattgtaagcattttgtttgcttagtatctgtggtataagcagtcaattttgtataggctcaaggctgtggtagttagtagatgcccggaaggttattactgatccggggaccgtgactatacattaggtaaaccggtttaaaaacc

SEQ ID NO: 3014 - DNA, 675 bp, Unknown
  Description of Unknown: Aichivirus Rt386 sequence
actccattcagcttcttcggaacctgttcggaggaattaaacgggcacccactttcctgtcctctccccctttctgcaactcaagtgtgtgctcgtaatcctgactcccacgggttgaccgccccgttggtgaacaaacagctaggtcattccctccctacccctgggcgccatttcagtggcgttcatatcctccccccagcctgacgtgtcacaggctgtgcaaagtccccgcgaaagctgctcacgtggcaattgtgggtcccccctttgtgaaggaaccgagtctttctcccttaaggctagacccctgtgtgaactcacaggtggcaactagtggttccactgcatgctcccgacctcggccgcggagtgctgttccccaagtcgtgacactgacctccacttatgtgcctggcaagcatatctgagaagatgttccgctgtggctgccaaacctggtaacaggtgccccagtgcgtgtagtcttcttccgtctccggacggtaagtgtgtggtaaagatgcggcgtaaggttcaagtgccaacgccctggaagggatgacccttctactgccctaggaatgccgcgcaggtaccccaggttcgcctgggatctgagcgcgggctaattgtctacgggtagtttcatttccctctcttttcactggcatc

SEQ ID NO: 3015 - DNA, 675 bp, Unknown
  Description of Unknown: Aichivirus Goiania sequence
actccattcagcttcttcggaacctgttcggaggaattaaacgggcacccatacacccccatccccttttttgcaacttaagtatgtgtgctcgtaatcttgactcccacggaatggatcgatccgctggagaacaaactgctagatccacatcctccctcccccctgggaggacctcggtcctcccacatcctccccccagcctgacgtatcacaggctgtgtgaagcccccgcgaaagctgctcacgtggcaattgtgggtccccccttcatcaagacaccaggtctttcctccttaaggctagtcccgatgtgtgaattcacatcgggcaactagtggtgtcactgtgcgctcccaatctcggccgcggagtgctgttccccaagccaaacccctggcccttcactatgtgcctggcaagcatatctgagaaggcgttccgctgtggctgccagcctggtaacaggtgccccagtgtgcgtaaccttcttccgtccccggacggtagtgattggttaagacttggcgtaaggttcatgtgccaacgccctgtgcgggatgaaacctctactgccctaggaatgccaggcaggtaccccaccttcgggtgggatctgagcctgggctaattgtctacgggtagtttcatttctaattctttcatgtcggagtc

SEQ ID NO: 3016 - DNA, 675 bp, Enterovirus sp.
  isolate CPML
actctggtatcacggtacctttgcacgcctattttataccccttccccatcgtaacttagaagcaacaaacaaactgcccaatagcagcacaacacccagttgtgttaggggcaagcacttctgtttccccggaagggtctgacggtatgctgtacccacggcagaagtatgacctaccgttaaccggccatgtacttcgagaagcctagtaccattatgaaggttgattgatgttacgctccccagcaaccccagctggtagttctggtcgatgagtctcggcattccccacgggcgaccgtggccgaggctgcgttggcggccagcctacaccatacggtgtaggacgtcaagatactgacatggtgtgaagagcctattgagctacgtggtagtcctccggcccctgaatgcggctaatcctaactccggagcatccgccagtaagcccactggaagggtgtcgtaatgcgaaagtctggagcggaaccgactactttgggtgtccgtgtttcctgttttacttattgtttggctgcttatggtgacaacttatagttatcatcataagctacttggtcttgccaaccggagaattatttggttatttgttggtttcataaacctacagtcgtattttcctgtcttattaattgttctcaaaattaacaaca

SEQ ID NO: 3017 - DNA, 248 bp, Unknown
  Description of Unknown: Yc-3 sequence
actgaagatcctacagtaactactgccccaatgaacgccacagatgggtctgctgatgactacctatcttagtgctagttgaggtttgaagtgagccggtttttagaagaaccagtttctgaacattatcatccccagcatctattctatacgcacaagatagatagtcatcagcagacacatctgtgctactgcttgatagagttgcggctggtcaacttagattggtataaccagttgagtggcaa

SEQ ID NO: 3018 - DNA, 528 bp, Avian infectious bronchitis virus
acttaagatagatattaatatatatctattacactagccttgcgctagatttttaacttaacaaaacggacttaaatacctacagctggtcctcataggtgttccattgcagtgcactttagtgccctggatggcacctggccacctgtcaggtttttgttattaaaatcttattgttgctggtatcactgcttgttttgccgtgtctcactttatacatctgttgcttgggctacctagtgtccagcgtcctacgggcgtcgtggctggttcgagtgcgaggaacctctggttcatctagcggtaggcgggtgtgtggaagtagcacttcagacgtaccggttctgttgtgtgaaatacggggtcacctccccccacatacctctaagggcttttgagcctagcgttgggctacgttctcgcataaggtcggctatacgacgtttgtagggggtagtgccaaacaacccctgaggtgacaggttctggtggtgtttagtgagcagacatacaatagacagtgacaac

SEQ ID NO: 3019 - DNA, 292 bp, Human coronavirus 229E
acttaagtaccttatctatctacagatagaaaagttgctttttagactttgtgtctacttttctcaactaaacgaaatttttgctatggccggcatctttgatgctggagtcgtagtgtaattgaaatttcatttgggttgcaacagtttggaagcaagtgctgtgtgtcctagtctaagggtttcgtgttccgtcacgagattccattctacaaacgccttactcgaggttccgtctcgtgtttgtgtggaagcaaagttctgtctttgtggaaaccagtaactgttccta

SEQ ID NO: 3020 - DNA, 310 bp, Feline infectious peritonitis virus
acttttaaagtaaagtgagtgtagcgtggctataactcttcttttactttaactagccttgtgctagatttgtcttcggacaccaactcgaactaaacgaaatatttgtctctctatgaaaccatagaagacaagcgttgattatttcaccagtttggcaatcactcctaggaacggggttgagagaacggcgcaccagggttccgtccctgtttggtaagtcgtctagtattagctgcggcggttccgcccgtcgtagttgggtagaccgggttccgtcctgtgatctccctcgccggccgccaggaga

SEQ ID NO: 3021 - DNA, 436 bp, Coronavirus AcCoV-JC34
agaaacaagtagtgttttaaaaaccttcaaattagtgcctgtaacatctttgcaatgaaagtagcgctcactagcctctatgcaaagaatgttaaaagaaatacgaagcatttaaagaatacaatctatctaggataggtacaattctcctccccctcttgacttcggtcaactcaactcaactaaacgaaatcccccttgcatggttccgacccgtgtaaggttgtgtatttcgtgcagtcgttgcccttactagtgtaagcgtaacggcatctaggtttgcacgtcttggaggaaacggtgtgtacgtttctagtgtttacgccgtatcggttccggcccgataggtattgcattagacgtcctgggtggttctgcctgcccttgtgtgattcggctgttccgtcagtttggtcacctcacacgtccttaagac

SEQ ID NO: 3022 - DNA, 393 bp, Unknown
  Description of Unknown: Equine Pegivirus 1 sequence
agaatggggagttaactcctggcactggcccgaagcatgaactgatcgcggtggcagggttcttcgggtaaatcccggccgcgtgttgtgattgtgttagggcaggtgacagtcggcagggtcgaccccctgcttcaggaccactgtcttcctggacgaccgttgctgaaaaagggccgccacggtctgtagctcgccgacgcttctaattcaggccggaggaccacgctccgtaatcgagcccaagtactcaaaccccagcacccctgggtcacgccctacgccgcccttttaacgcttcggctaatagggtctatccggcgggttgacaaagggcgcagggttacctggtactacgagcttgggtgtccctgggagtaatcccagggtgcc

SEQ ID NO: 3023 - DNA, 524 bp, Unknown
  Description of Unknown: Pegivirus I sequence
agaatggtctaagtggttgccaccgtggtccgaaggggaggaggacctacgctgccagggttggcaggtcgtaaatcccgggtgtaggagatccctccttgttaggactgctggtagctggggggtcggtgaccccctgggcaaccgccaaacccggacgaccgggtggcggctccatgttggcacggtccacaggtgtgaaccctaccggtgtgaataagggttggtggttgcggtccaccttaaacgtagtatgcattgggcttggtaaaacaccgctcgtagtacggaacgccgcctttaaagacacagtaggcgtagccggcgggttgacaatccatacggggggtggggtgtggtcatggatctgtccacaccaccttcatgcggccctctaagcaagccataccggggggaggcgcgcggcaccgcactgccgggcaaggggaagaaccttcgggtgacccccccccaaccaccgtccgatcaatgctaatgttgcgtttaggcgtgacaccggcaca

SEQ ID NO: 3024 - DNA, 537 bp, Unknown
  Description of Unknown: Pegivirus K sequence
agaatggtgtgatccgtcgccgctccagcggaaagcgggcgggatctagtggttagggttgttcgcgtaaatcccacactagtggtacgctcgtataacgtgggagcagccggtggggtcgaccccccacctggcggctgctgagcaccggacgaagcgcggggggtgaacgctaacccgcggcccgggctgccaacgttaggcacgtcttggctggaagacgttaaacacagggccccccctcaaccctgatccgaggccagagaccaaggtacgccgcccttttaaaggcgttactcgtccaataggatctctccggcgggttgtcaaaccttgctggccctggtgatggttacgggagggggtggggcggggagtagaagccccgcccggcatgggggtaccaagctcggcacgcccagcacgcgtggcgtaggggaaaaatccttcgggtgacccctggtaccataaagtaattaacatgagcatgccgctagggtgtgctttttcttccttccttgggaaggcggtggcacc

SEQ ID NO: 3025 - DNA, 631 bp, Parechovirus A3
agagtccttttcccagccagaggtggctggttaaataatacctactgtaacaaaacatctaagatgtaacaaccacacacctggtctccactggccgaaggcaactagcaataaggcaggtgggttcagacgcttaaagtgtgttgtacatattcttttctaacctgtgttttacacagggtggcagatggcgtgccataactctaacagtgagataccacgcttgtggaccttatgctcacacagccatcctctagtaagtttgtaagatgtctgatgacgtgtgggaacctgttggagataacagtttgctgcaaagcatcccactgccagcggatctacatctggtaacagatgcctctggggccaaaagccaaggtttaacagaccctttgggattggttcaaacctgaactgttatggaagacatttagtacctgctgatttggtagtaatgcaaacactagttgtaaggcccacgaaggatgcccagaaggtacccgtaggtaacaagtggcactatggatctgatctggggccagctacctctatcttggtgagttggttaaaaaacgtctagtgggccaaacccaggggggatcctggtttctttttaatttaagtaatcact

SEQ ID NO: 3026 - DNA, 675 bp, Hubei picorna-like virus 2
agcaacttctttctgaaaactagctagagttcgacgatctctctggctaatgacaaataaccaatcaaaaagtcaaatgttcatgtatatatatatttagtagtgacctttatttagaaaaactttagatgatttatcgtcaagttgccctttgtgaagcgatcagctttttatatcgtttcatttttgtatacgtcttaattgacgttgtaagtacgttttgcatacctcacattgaggatagtatcgtttcctgactaagaagttaaactagtctaccaatagcaaccatataggatatagctttgtttttaacaaggtttaatctgatcttatgctcttgcttacggtgttttatgtatagaaaagtttttataaaaactacataattgtcaaaagaaaaagcgttacgtactgacgcatttatgttcacagtgtgacacaaaccttctatattttgattgtaaaataggctttgcctgaccatttatcaaatacaaactgtttcaaacgcctctccgagccatattggccgacgcgaatcgacataacagggtgagtttacagctgcagttgcagccgaggatccacttatttgagagagaattactcttaacgaaattttgaagtcacttctacacagttaagtctgagtaggcgttatccaaacgtaaa

SEQ ID NO: 3027 - DNA, 675 bp, Picornavirales Tottori-HG1
agccatgaactagtgtgcgattcccacagtgttggtcgaaagccccgcactgtctactcgcatatttgactccagtccttccgcagccagcggttaggttctggttaaagtgcattatgtgcacggcgccacgcagaactgccagaaatggtaagctgcgcccaacgccaacggtttgtgtatcccgttagtcacacgtttacagctgttcgttaacagtagggttttgtcgacccggaccccttaatgcgcgcgaattcaaccgcgcctagtcggcaatggtatcatttaatcccatgcactacgggagaaatttgagaccaaagaattcctgagggccactgcttgctctaagtgcaatgcctcgggagacttctgtcaggagcctagcggctttcaaccgcgacagctaactcctgcgggatgtttggtgtccatacttactggcgtcctcacaacgctaagtggatgttgtccacaggtaggcaaacaccgagccccacattcaggagacctgtatgaacgatcctatcagcattagagttggaattgggtgtgctaacgtccgcataagtgcaccccgtggtaacgctgggaaactatccagcgcaacgtactgtcctcaatgtctagggaaggaccgccctaagcgtacaaccgggccatgtgtcgagc

SEQ ID NO: 3028 - DNA, 150 bp, Yokose virus
agtaaattttgcgtgctagtcgctgagcgtcagaccgcaaagtgagtttttagtgatctaaagtgaggagttattcttactgtcatcaaacactacaaataaacacgttgaaattatttccggaagaacaactgtccggaatcaaagacg

SEQ ID NO: 3029 - DNA, 675 bp, Staphylococcus phage SA5
agtacttggtattccggtacctttgtacacctatttacaaaccctaccccttgtaaccttagaagcaattatttaaccgctcactagggggtgtgctatccaagcacatcaagagcaagcacttctgtctccccgggaggggctaatggtacgctgtgcccacggcggaaatgagccctaccgttaaccggcagtctacttcgggaagcccagtaactacattgaaactttgaggcgttacactcagcacataaccccaatgtgtagttctggtcgatgagccttggcatcccccacaggcgactgtggccaaggctgcgttggcggccagcctgcggaccaaaagtccgtaggacgcctaattgtggacatggtgtgaagagcctactgagctagactgtagtcctccggcccctgaatgcggctaatcctaaccctggagcatccgcgtgcaacccagtacgtagggtgtcgtaatgcgtaagtctgggatggaaccgactactttgggtgtccgtgtttcttgtttttcatactgggtcgcttatggttacaactaattgttgtaatcattggcagtgcgcgctgaccacgcgattattgatatttccatttgttggatactccaatagtgtcaactcatatacacaacttttaccactgatcaagataaaa

SEQ ID NO: 3030 - DNA, 118 bp, Wesselsbron virus
agtatattctgcgtgctaatcgttcgacgttagtccgtggagtgagcttctattagagtcgttaacacgtttgaataatttctactgaaaggagtagaagaaaggagattcattccca

SEQ ID NO: 3031 - DNA, 104 bp, Bussuquara virus
agtatttcttctgcgtgagaccattgcgacagttcgtaccggtgagttttgacttaacgcagtgagaaaagttttcgaggaaagacgagaagcgaattctctga

SEQ ID NO: 3032 - DNA, 106 bp, Zika virus
agttgttgatctgtgtgagtcagactgcgacagttcgagtctgaagcgagagctaacaacagtatcaacaggtttaatttggatttggaaacgagagtttctggtc

SEQ ID NO: 3033 - DNA, 675 bp, Breda virus
atcacctagtacttacaagcgggtcaaaccgccctccggaacggtcataaccccctcccgaacgtgcgcttgacgtgactggtctttcagtctagctttctgagaaatactccggggttgtaacccaccattttgacctttggtcagtttggtaacactccaaccaaacagcatctgacccacctccagcttgctgcaggccatttggaccaaacgggttcagatatcttgtggctaaacctctgacccacctccagtttactgcaggccttttggactaaacgggtacagactctttgtggttagtttttaactacccactgtttagccgccaacctgatttttattgttacaaaattttgtgtttacacattattttcttacggttggcagtttgtttggttgtttgcacagtttttgctgataccaatttttactgtgcttttggtgttttcggctaaggctgtttttcacatacttagtttgcttgaagtaaccttcacaacatctgttttgtttttggtttctaaggtaaagagtttcaggaaaaaacataggcgcccatcttgtggtgtctagttttaattaatctggcaaacaagtatcaagtcatcgactccctttggagtgagacttacgagtaccaattcgcctattttggccatccatataaaa

SEQ ID NO: 3034 - DNA, 189 bp, Porcine reproductive and respiratory syndrome virus 2
atgacgtataggtgttggctctatgccttggcatttgtattgtcaggagctgtgaccattggcacagcccaaaacttgctgcacagaaacacccttctgtgatagcctccttcaggggagcttagggtttgtccctagcaccttgcttccggagttgcactgctttacggtctctccacccctttaacc

SEQ ID NO: 3035 - DNA, 312 bp, Unknown
  Description of Unknown: PV Mahoney sequence
atgagtctggacatccctcaccggtgacggtggtccaggctgcgttggcggcctacctatggctaacgccatgggacgctagttgtgaacaaggtgtgaagagcctattgagctacataagaatcctccggcccctgaatgcggctaatcccaacctcggagcaggtggtcacaaaccagtgattggcctgtcgtaacgcgcaagtccgtggcggaaccgactactttgggtgtccgtgtttccttttattttattgtggctgcttatggtgacaatcacagattgttatcataaagcgaattggattggcc

SEQ ID NO: 3036 - DNA, 675 bp, Unknown
  Description of Unknown: TRV NGS910 sequence
atgcgacgtggttggagattaaaccgactccgacgaaagtgctatcatgcctccccgattatgtgatgttttctgccctgctgggcggagcattctcgggttgatacaccttgaatccttcatccttggacctcaggtcccccggtctaagccgcttggaatacgacagggttattttccaatcttctcctttctactttcatgagtcctattcatgaaaagggtctgtgctgccccttccttcttggagaatctgcgcggcggtctttccgtctctcgaaaagcgcagatgcagcatgctggaaccggtgaagaaaacagttctttgtggaaacttagagcagacatcgaaacagctgtagtgacctcacagtagcagcggaaccccctcctggtaacaggagcctctgcggccaaaagccccgtggataagatccactgctgtgagcggtgcaaccccagcaccctggttcgatggttgttctctgtggaaccagagaatggtctttctcaagccctccagtagagaagccaagaatgtcctgaaggtaccccgcatgcgggatctgatcaggagaccaatcgtcagtgctttacactggcgctttggtttaaaaactgtcacagcttctccaaaccaagtggtcttggttttcacttttatcaaactgtttc

SEQ ID NO: 3037 - DNA, 625 bp, Unknown
  Description of Unknown: AP1.0 sequence
attctcgggctacggccctggagccactccggctcctaaagatttagaagtttgagcacacccgcccactagggccccccatccaggggggcaacgggcaagcacttctgtttccccggtatgatctgataggctgtaaccacggctgaaacagagattatcgttatccgcttcactacttcgagaagcctagtaatgatgggtgaaattgaatccgttgatccggtgtctcccccacaccagaaactcatgatgagggttgccatcccggctacggcgacgtagcgggcatccctgcgctggcatgaggcctcttaggaggacggatgatatggatcttgtcgtgaagagcctattgagctagtgtcgactcctccgcccccgtgaatgcggctaatcctaaccccggagcaggtgggtccaatccagggcctggcctgtcgtaatgcgtaagtctgggacggaaccgactactttcgggaaggcgtgtttccatttgttcattatttgtgtgtttatggtgacaactctgggtaaacgttctattgcgtttattgagagattcccaacaattgaacaaacgagaactacctgttttattaaatttacacagagaagaattaca

SEQ ID NO: 3038 - DNA, 625 bp, Unknown; identical to SEQ ID NO: 3037
  Description of Unknown: Apodemus Picornavirus 5?201 sequence

SEQ ID NO: 3039 - DNA, 277 bp, Betacoronavirus England 1
atttaagtgaatagcttggctatctcacttcccctcgttctcttgcagaactttgattttaacgaacttaaataaaagccctgttgtttagcgtattgttgcacttgtctggtgggattgtggcattaatttgcctgctcatctaggcagtggacatatgctcaacactgggtataattctaattgaatactatttttcagttagagcgtcgtgtctcttgtacgtctcggtcacaatacacggtttcgtccggtgcgtggcaattcggggcacatc

SEQ ID NO: 3040 - DNA, 488 bp, Potamipivirus A; identical to SEQ ID NO: 14

SEQ ID NO: 3041 - DNA, 675 bp, Cadicivirus B
caccaacccttgacctgtaatgtcagtggacagagtgctcctctgttcccggttaccgtgttccaggacacgattgtaatcctgcgcctcaccagcgctgcgtgcacgtctgcataaggaaacgtgccttccccatgtctctatcaattctttggtgagtgaccgccctagttgctcatcctatgggattcttctctcatgggttctttgtggcatgcgaatgtcaccttaattggaggtctttaattagatatcctttcttcatctttgatatgagtgtcggaatttgattcctagtctctgcaaaacaaccccacttgatgaattcaacttttcaaccgcacaaacataatcaggtttttaaattgaatgtttctaaattctaaatttagtttatttaagtagtttgccatcttgactcgatgtaaaattgtcatacaagtcttcttttcttttctttacactttgaagtttgcacttagcagtcgttctgcacagctttcgagttttgtttgatcgacatcgcaacttccacccacctctctttttctagtgttgaatgcggctaatcctaacccgagagcaataaacccaggtttattgtcgtaacgcgcaagtcttggacggaaccgactatacacacacctctttaccctttagtacacccttggtacg

SEQ ID NO: 3042 - DNA, 486 bp, Bovine nidovirus TCH5
caccaatagattagtcaagctgtctataggcataaactaacccccaaccccattaccccggggccaggtgggccgccgccttcgggcaaacccgtgcgctggtataatcaaggttcacagccagattcactgccggttagctagtggggcggtagcctggcaaaacccgaagaggttggaaagggaacttcagggtagtttatcctaggctagcgtagctacagttcggtcaagataaccgtcctggtgctagggctagtagagacagtggtaacttggacaagggtccagggccactttagggaataccctacggaaggctaggtccgtaaggaagacccccgcagttgtccgcggttgagcagagctcctgcgtagacaaaaggcaaaaagtggattacattcgcctgcaggaaaaggcaaacgtcgttggagtcggagctaaagtactggacgattgataccacgcctgctgcggtagataaa

SEQ ID NO: 3043 - DNA, 629 bp, Aichivirus A; identical to SEQ ID NO: 1317
  FSS693

SEQ ID NO: 3044 - DNA, 675 bp, Unknown
  Description of Unknown: EV J 1631 sequence
caccctgagggcccacgtggcgtagtactctggtatcaaggtacctttgtacgcctattttatttcccttcccccacagtaacttagaagcttatctcatagttcaacagtagggtcactaaccaagtggctcagcgaacaagcacttctgtttccccggtcctagtacctgtgaagctgtacccacggcggaaggggaaaaagatcgttatccggccccctacttcggaaagcctagtaacaccattgaagcaatcgagtgttgcgctcagcacagtaacccctgtgtagctttggttgatgagtctgggcactccccactggcgacagcggcccaggctgcgttggcggccaaccgactcgggcaaccgggtcggacgctcgtttgtggacatggtgtgaagagcctactgagctagagggtagtcctccggcccctgaatgcggataatcctaaccccggagcacccacactcaatccagagtgcaggatgtcgtaacgcgtaagtctgggacggaaccgactactttgggtgtccgtgtttcctgttttacttactttggctgcttatggtgacaatctagtgttgttaccatatagctattggattggccatccggtgttttgaattgtgtgtttatactaattcttttacatatcacagacaaccaaat

SEQ ID NO: 3045 - DNA, 270 bp, Guereza hepacivirus
cactcaatactacactccgcatttggggagaagcgctggcgttcgcggaaccgcgttaaccatacgcgtagtacgagtgcgacagaccccggtgctactggtggtagcgagacacgagccgaagtctgtggggggaactccacttagagggcatgcccgggcgtaggcttctgagttgggatgggccccaacttggcccctgagtgggggggtgttacgacctgatagggtgcgggctggcgcctaccactttccagtcgtacatgagtc

SEQ ID NO: 3046 - DNA, 721 bp, Saffold virus
cacttatttaattcggccttttgtgacaagcccctcggtgaaagaacctctctcttttcgacgtggttggaattgccatcatttccgacgaaagtgctatcatgcctccccgattatgtgatgttttctgccctgctgggcggagcattctcgggttgagaaaccttgaatctttttctttggaaccttggttcccccggtctaagccgcttggaatatgacagggttattttcttgatcttatttctacttttgcgggttctatccgtaaaaagggtacgtgctgccccttccttctctggagaattcacacggcggtctttccgtctctcaacaagtgtgaatgcagcatgccggaaacggtgaagaaaacagttttctgtggaaatttagagtgcacatcgaaacagctgtagcgacctcacagtagcagcggactcccctcttggcgacaagagcctctgcggccaaaagccccgtggataagatccactgctgtgagcggtgcaaccccagcaccctggttcgatgatcattctctatggaaccagaaaatggttttctcaagccctccggtagagaagccaagaatgtcctgaaggtaccccgcgtgcgggatctgatcaggagaccaattggcggtgctttacactgtcactttggtttaaaaattgtcacagcttctccaaaccaagtggtcttggttttccaattttgttga

SEQ ID NO: 3047 - DNA, 674 bp, Saffold virus
  3?47
cacttatttaattcggccttttgtgacaagcccctcggtgaaagaacctctctcttttcgacgtggttggaattgccatcatttccgacgaaagtgctatcatgcctccccgattatgtgatgttttctgccctgctgggcggagcattctcgggttgagaaaccttgaatctttttctttggaaccttggttcccccggtctaagccgcttggaatatgacagggttattttcttgatcttatttctacttttgcgggttctatccgtaaaaagggtacgtgctgccccttccttctctggagaattcacacggcggtctttccgtctctcaacaagtgtgaatgcagcatgccggaaacggtgaagaaaacagttttctgtggaaatttagagtgcacatcgaaacagctgtagcgacctcacagtagcagcggactcccctcttggcgacaagagcctctgcggccaaaagccccgtggataagatccactgctgtgagcggtgcaaccccagcaccctggttcgatgatcattctctatggaaccagaaaatggttttctcaagccctccggtagagaagccaagaatgtcctgaaggtaccccgcgtgcgggatctgatcaggagaccaattggcggtgctttacactgtcactttggtttaatgttga

SEQ ID NO: 3048 - DNA, 726 bp, Saffold virus
  Kozak
cacttatttaattcggccttttgtgacaagcccctcggtgaaagaacctctctcttttcgacgtggttggaattgccatcatttccgacgaaagtgctatcatgcctccccgattatgtgatgttttctgccctgctgggcggagcattctcgggttgagaaaccttgaatctttttctttggaaccttggttcccccggtctaagccgcttggaatatgacagggttattttcttgatcttatttctacttttgcgggttctatccgtaaaaagggtacgtgctgccccttccttctctggagaattcacacggcggtctttccgtctctcaacaagtgtgaatgcagcatgccggaaacggtgaagaaaacagttttctgtggaaatttagagtgcacatcgaaacagctgtagcgacctcacagtagcagcggactcccctcttggcgacaagagcctctgcggccaaaagccccgtggataagatccactgctgtgagcggtgcaaccccagcaccctggttcgatgatcattctctatggaaccagaaaatggttttctcaagccctccggtagagaagccaagaatgtcctgaaggtaccccgcgtgcgggatctgatcaggagaccaattggcggtgctttacactgtcactttggtttaaaaattgtcacagcttctccaaaccaagtggtcttggttttccaattttgttgaccgcc

SEQ ID NO: 3049 - DNA, 675 bp, Simian Sapelovirus 1
ccaaggatctgttgcataggcgttgtatcccctaaccttttacctacccatcccaataggactggtatttcggttttgattgagtaatggatactgattctatacctgttacccattcaggggaaaaatggagtttctttcatggatctgacttgatatgaccaagagtcaacactttgcgtgttggccgtatggaatgctttaaggtttattctttggattatgacttcagggttggccgcccaggataaaaggcaattgtggtaagtgatgttagtcattggtggttgaaacctgcctaagacgtcctaggtctacgctgtgcgggccgaagtaagcttaggaataacagggagtatgccattttctgctttcacccaacacgaccgtacacgaaagagctagaggcactttggggcaaagggaaaagctttgcttagcccgaatgttcatttgagtccttgacgaatgcgtcccgtctgtcccgacggtgaggcgtatggcgcatgctcatggcattacccaatggtgtatctgtgaggggggggctcctcacacttagtctagtgctacctgacagggccgcggctggtcgtttgtgtatggtataaccagtagtaatcccccatggattgctttaacttcccctcctcccttaccaagacattctctaag

SEQ ID NO: 3050 - DNA, 675 bp, Unknown
  Description of Unknown: A105-675 sequence
ccacccacagcaagaatgccatcatctgtcctcacccccatttctcccctccttcccctgcaaccattacgcttactcgcatgtgcattgagtggtgcacgtgttgaacaaacagctacactcacgtgggggcgggttttcccgcccttcggcctctcgcgaggcccacccttccccttcctcccataactacagtgctttggtaggtaagcatcctgatcccccgcggaagctgctcgcgtggcaactgtggggacccagacaggttatcaaaggcacccggtctttccgcctccaggagtatccctgctagtgaattctagtggggctctgcttggtgccaacctcccccaaatgcgcgctgcgggagtgctcttccccaactcaccctagtatcctctcatgtgtgtgcttggtcagcatatctgagacgatgttccgctgtcccagaccagtccagcaatggacgggccagtgtgcgtagtcgtcttccggcttgtccggcgcatgtttggtgaaccggtggggtaaggttggtgtgcccaacgcccgtactttggtgacaactcaagaccacccaggaatgccagggaggtaccccgcctcacggcgggatctgaccctgggctaattgtctacggtggttcttcttgcttccatttctttcttctgttc

SEQ ID NO: 3051 - DNA, 513 bp, Porcine Kobuvirus; identical to SEQ ID NO: 1446
  XX

SEQ ID NO: 3052 - DNA, 675 bp, Unknown
  Description of Unknown: Turkey Gallivirus M176 sequence
ccactcgcacttcctggatagtgcgttagatatgcccgacatatcgcttccaggaccaaagccccccttttctctttcccaaccagcttcgccactcaagctgtaattccatgtccggtctttccggccttagtatcatggaaatgtggtcgtgctcaaatgaaattgagttgacattgatcaatgaaagttgcactgaactttgctaaactggctagcgccacctggtgtgtgccgttggtctcctcacatggtaacatgtgccaacgggcccgaaaggctagtgggcaattaccgctccaagggaggggtacccaccccgacctgaacagcggtaatgaagctcacctcccaggctctgaccccgagaagtttagttatttagtaggtgtaattagtacttgtgattggtcaatttgatagtagtttgaaacgttatggatgaatgagtagaccccctgaaggtaccccattacatgggatctgatcagggccacattctgcgtgtctccccgcacttgtggttaaaaccatgaaagttcatcccaaacaatcttttcctcttctttttcttttagtggtgacaacctactggattggtgattaccaatctgtactagtgttgtattaagacttgttgtgtggagaaaatggactctttcaagaagatttttg

SEQ ID NO: 3053 - DNA, 675 bp, Unknown
  Description of Unknown: Rosavirus 2 GA7403 sequence
ccaggcatggcgttaaacatgcattcccttcccctagtaacctcccttcgccccttccccacgttgtaccccctccgagatggctgctaaggcgcttgctgctacagcagtctcgtgtttcgggtgttataagtgctttcttttccactccactccctgcctatggggagcggaacggccttgtctcggtcgttgcttcttgcagatcttcacccctccaggctttctggactcgccaggggtggagtagtaggcgcactgtctaagtgaaggtagcagtgttgttggcgaagagttgtggacctactttgagtttgtagcgatcatccagagctagcggatctccccacgcggtaacgcgtgcctctaggcccaaaaggcacggtgttcacagcaccctttggatggcgggggtgcccccctccgcacttaaagtagaaaaacagcttagtagtcaaataacatggctttcctcaagcattcagtgctacatgggactgaaggatgcccagaaggtacccgcaggcaacgataagctcactgtggatctgatctggggccctgggccaggtgctatacacctggttaaaaccaaatctggtagtcagggttaaaaaacgtctaagtcccacccccccggggacggggggttcccttaaaccctcaactgacacc

SEQ ID NO: 3054 - DNA, 293 bp, Bovine hepacivirus
ccatcgacactccaggctcacggattaagttaggttccgccgaagcgggctaaccaggcccctagtaggaggcgcctatcccgtgagccctttccccacggattgagtggagctggagctgggaaggaccgagtacggtccaatcgagaagaaccctgatgaacattccaggcctcttcggtagatttggatatatccaccagtgaaggcggggtcgtgggtacaggccccctagtccacacagcctgatagggtcctgccgcaggatccgtgggtgcggctgtacatgtacc

SEQ ID NO: 3055 - DNA, 675 bp, Unknown
  Description of Unknown: 18-675 sequence
cccacagcaagaatgccatcatctgtcctcacccccaattttcccttttcttcccctgcaaccattacgcttactcgcatgtgcattgagtggtgcatgtgttgaacaaacagctacactcacatgggggcgggttttcccgccctacggcctctcgcgaggcccaccccttccctccccttataactacagtgctttggtaggtaagcatcctgatcccccgcggaagctgctcacgtggcaactgtggggacccagacaggttatcaaaggcacccggtctttccgccttcaggagtatccctactagtgaattctagcggggctctgcttggtgccaacctcccccaaatgcgcgctgcgggagtgctcttccccaactcaccctagtatcctctcatgtgtgtgcttggtcagcatatctgagacgatgttccgctgtcccagaccagtccagtaatggacgggccagtgcgtgtagtcgtcttccggcttgtccggggcatgtttggtgaaccggtggggtaaggttggtgtgcccaacgcccgtactttggtgacacctcaagaccacccaggaatgccagggaggtaccccacctcacggtgggatctgaccctgggctaattgtctacggtggttcttcttgcttccacttctttcttctgttcacg

SEQ ID NO: 3056 - DNA, 562 bp, Encephalomyocarditis virus
  pEC9
ccccccccctaacgttactggccgaagccgcttggaataaggccggtgtgcgtttgtctatatgttattttccaccatattgccgtcttttggcaatgtgagggcccggaaacctggccctgtcttcttgacgagcattcctaggggtctttcccctctcgccaaaggaatgcaaggtctgttgaatgtcgtgaaggaagcagttcctctggaagcttcttgaagacaaacaacgtctgtagcgaccctttgcaggcagcggaaccccccacctggcgacaggtgcctctgcggccaaaagccacgtgtataagatacacctgcaaaggcggcacaaccccagtgccacgttgtgagttggatagttgtggaaagagtcaaatggctctcctcaagcgtattcaacaaggggctgaaggatgcccagaaggtaccccattgtatgggatctgatctggggcctcggtgcacatgctttacatgtgtttagtcgaggttaaaaaacgtctaggccccccgaaccacggggacgtggttttcctttgaaaaacacgatgataat

SEQ ID NO: 3057 - DNA, 654 bp, Mosavirus A2
  SZAL6
cccccccctcaaattgcaacgatatagctaatggcgagattgagatgctatatcacctcttctaagttatagacctcatctgattgataaggacgtaatttggtcgaaaccgcttggaataagaccgatgcgcgtagtcatgatgatgatgtaagatctaggaacttatccaatctgcttatgtctatgtaagtagaggggcaggcctcattgccctaattctttctaccgagtatctgctagggtttctagcggcttgaatacttggattgagggatacaagatactactgatcgattgtcgattgggaaacttgtagatacttcaaagctaccagtagcgtggactcacagccagcggactacccctcatggtaacatgagcctctgggcccacaaggcacgtcgcaagacctgtgagacggcaaccccagcctagctttgttgaggaaacaagcgataacatgacatgagagaccggaaggattcttgtattgtgagccgaaggatggcctctaggtacctcattttatgagatctgaggaggtgctcttgagttggtgctttacactgacaacacagagttaaaaagcgtctaagctcacccggaaattgggaaatttccgttatttccattttgtttgcaaagtcgttc

SEQ ID NO: 3058 - DNA, 608 bp, Bourbon virus
ccccccctacttaaagatgtacggttttgctgctttcacagagtaaagcagatagaggttctgaactggcaaactttacctcgaaacacgcccgtttttctgctgtgtctcacagactgtcctgtcacacttgtggcggcttgtgacactgtgaacatagtgagaccgaccaagacaacagtttcaagtgatgaacatcgaacgtctaaactggatccgtaactggacatgttagggcaaggacttcccccctggtaacaggagcctggctggccaaaagccccgctcattgagcctagcatgttgtcgaccctggactgttcagtttagttagtacatggaattcacttgtcacggttcttctgaactcggtctctagtatgacagcctaaggatgccctccaggtaccccggggtaacaagtgacacccgggatctgaggaggggactactttacgtagtttaaaaaacgtctaagctgttatggtgaccagaggctggcacctttcacttttaaaattacactactgactacaattgaagtgataacggttttacaggctttcaaactagttacacaagcactgttttcctgacacacacacttt

SEQ ID NO: 3059 - DNA, 585 bp, Encephalomyocarditis virus
  A
cccccctctccctccccccctaacgttactggccgaagccgcttggaataaggccggtgtgcgtttgtctatatgttattttccaccatattgccgtcttttggcaatgtgagggcccggaaacctggccctgtcttcttgacgagcattcctaggggtctttcccctctcgccaaaggaatgcaaggtctgttgaatgtcgtgaaggaagcagttcctctggaagcttcttgaagacaaacaacgtctgtagcgaccctttgcaggcagcggaaccccccacctggcgacaggtgcctctgcggccaaaagccacgtgtataagatacacctgcaaaggcggcacaaccccagtgccacgttgtgagttggatagttgtggaaagagtcaaatggctctcctcaagcgtattcaacaaggggctgaaggatgcccagaaggtaccccattgtatgggatctgatctggggcctcggtgcacatgctttacatgtgtttagtcgaggttaaaaaacgtctaggccccccgaaccacggggacgtggttttcctttgaaaaacacgatgataatatggccacaacc

SEQ ID NO: 3060 - DNA, 457 bp, Crohivirus B
  5?51
ccccccttttccccagccatgggttaaatggcaataaaggacgtaacaactttgtaaccattaagctttgtaattttgtaaccactaagctttgtgcacataatgtaaccatcaagcttgttagtcccagcaggaggtttgcatgcttgtagccgaaatggggctcgaccccccatagtaggatacttgattttgcattccattgtggacctgcaaactctacacatagaggctttgtcttgcatctaaacacctgagtacagtgtgtacctagaccctatagtacgggaggaccgtttgtttcctcaataaccctacataataggctaggtgggcatgcccaatttgcaagatcccagactgggggtcggtctgggcagggttagatccctgttagctactgcctgatagggtggtgctcaaccatgtgtagtttaaattgagctgttcatatacc

SEQ ID NO: 3061 - DNA, 436 bp, Unknown
  Description of Unknown: GB virus C/Hepatitis G virus sequence
cccccggcactgggtgcaagccccagaaaccgacgcctatctaagtagacgcaatgactcggcgccgactcggcgaccggccaaaaggtggtggatgggtgatgacagggttggtaggtcgtaaatcccggtcaccttggtagccactataggtgggtcttaagagaaggttaagattcctcttgtgcctgcggcgagaccgcgcacggtccacaggtgttggccctaccggtgggaataagggcccgacgtcaggctcgtcgttaaaccgagcccgttacccacctgggcaaacgacgcccacgtacggtccacgtcgcccttcaatgtctctcttgaccaataggcgtagccggcgagttgacaaggaccagtgggggccgggggcttggagagggactccaagtcccgcccttcccggtgggccgggaaatgc

SEQ ID NO: 3062 - DNA, 655 bp, Caprine kobuvirus
  d20
ccccctcaccctcttttccggtggccacgcccgggccaccgatacttcccttcactccttcgggactgttggggaggaacacaacagggctcccctgttttcccattccttcccccttttcccaaccccaaccgccgtatctggtggcggcaagacacacgggtctttccctctaaagcacaattgtgtgtgtgtcccaggtcctcctgcgtacggtgcgggagtgctcccacccaactgttgtaagcctgtccaacgcgtcgtcctggcaagactatgacgtcgcatgttccgctgcggatgccgaccgggtaaccggttccccagtgtgtgtagtgcgatcttccaggtcctcctggttggcgttgtccagaaactgcttcaggtaagtggggtgtgcccaatccctacaaaggttgattctttcaccaccttaggaatgctccggaggtaccccagcaacagctgggatctgaccggaggctaattgtctacgggtggtgtttcctttttcttttcacacaactctactgctgacaactcactgactatccacttgctctcttgtgcctttctgctctggttcaagttccttgattgtttttgactgcttttcactgcttttcttctcacaatccttgctcagttcaaagtc

SEQ ID NO: 3063 - DNA, 604 bp, Acute bee paralysis virus
cccgtcaaaataacaacttataacacgatgttacccgaagaaaccattttagtgtaacatttaagattagaagtagttcatctaatagagataggcactattagaaggaggccttttctaaaggagccgttagtcagcccagacaagcgcagtactttagaagagagaagttccccgatagcgaccgaaaagacgcgttttccgtgctaactaatttaaatgtgggaacgaatattattattgaaattatgtgagccacgtagcaatcaagtcatgtttttgtcactacgtttactcatctaatgtagataattttgtttaagtacctatttaggtgtcatcccaccagagaagaaataatacgtaccggaacccagagtacaccccttattttaagccttactgggcttctctgttagttagtaatctggcccacgttttgcgttgagtggggtcccaacagtaggaattcgacggacaagtagcaagcgagtcggtaccaattggtttagccttcgaaattactctgggcaggaagttactaaacgagaactttctgcttaaatcccaacgcacaaacaaatagagtaaataaataattata

SEQ ID NO: 3064 - DNA, 675 bp, Niviventer confucianus picornavirus
ccctttcataaccccccccttttaacccaacccttcgtaaccgtacgcttcactcgcctttgggtatagcggcccaatgtgctgaagaaaaggatacgctataaggggccaacgggtggtggcccttaagaccacccaacctagaagcttgtacactcgggcaatagtgaggcccacatccagtgggtcaagcccaaagcattcttgttccccggtatgatctcataagctgtacccacggctgaaagagtgattatcgttatcccactcagtacttcggagagcctagtacaccacttggaaatggaagtctgtgatccggggttgaccctgaaccccagaaactcatgatgaggctaaccttcccgaacacggcgacgtgtggttagcctgcgctggcatgaggcctctttgtaggcagactgaaatggaagggtgacgaagagccgactgagctactgttttattcctccggccccctgaatgcggctaatcctaactcctggtccagtacttgtaacccaacaggtggctggtcgtaatgcgtaagccgggagcggaaccgactactttggggcgtccgtgtttctcaatattattcatttctagcttatggtgacaatttatgattgcagagattgtgctgtatttgtgtctgagagaagaagtaacaat

SEQ ID NO: 3065 - DNA, 551 bp, Rabovirus A
  NYC-B10
ccgaccccactggtcgaaggccacttggcaataagactggtggaacaaggtcgcctgtagttgattggaaccttctttctaatgacttatgtcagcggtgctactcacaccgtaactctcctaccctatccccacgcttgtggaactaggaggggatgagtgattcaagtaagtactgtcagaatggtgaaaataatctgattctgaaacgctatggatccatcgaaagatggggctacacgcctgcggaacaacacatggtaacatgtgccccaggggccgaaagccacggtgataggatcacccgtgtagtttgagatcatatcaatgttcatagtctagtaagatgatttgaaatctaactggtctgatggctaactgcttgtcttattgcggcctaaggatgtcctgcaggtacctttagagaaccttaagagactattgatctgagcaggagccaaggtggtctttcccagccttggttaaaaagcgtctaagccgcggcagggggcgggaggccccctttcctcccaaactataatatagattgt

SEQ ID NO: 3066 - DNA, 625 bp, Caprine kobuvirus
  d50
ccgggccaccgatacttcccttcactccttcgggactgttggggaggaacacaacagggctcccctgttttcccattccttcccccttttcccaaccccaaccgccgtatctggtggcggcaagacacacgggtctttccctctaaagcacaattgtgtgtgtgtcccaggtcctcctgcgtacggtgcgggagtgctcccacccaactgttgtaagcctgtccaacgcgtcgtcctggcaagactatgacgtcgcatgttccgctgcggatgccgaccgggtaaccggttccccagtgtgtgtagtgcgatcttccaggtcctcctggttggcgttgtccagaaactgcttcaggtaagtggggtgtgcccaatccctacaaaggttgattctttcaccaccttaggaatgctccggaggtaccccagcaacagctgggatctgaccggaggctaattgtctacgggtggtgtttcctttttcttttcacacaactctactgctgacaactcactgactatccacttgctctcttgtgcctttctgctctggttcaagttccttgattgtttttgactgcttttcactgcttttcttctcacaatccttgctcagttcaaagtc

SEQ ID NO: 3067 - DNA, 675 bp, Cosavirus A
  SH1
ccgtgctttacacggtttttgaaccccacaccggctgtttggcgcttgcaggacagcaggtttattttcttatgctctttatttctagccaacagggttctatcctgttgggcggagtgatactcccgttccttcttggacagattgcctccacgatctttgtggatctcaaggtgatcaagtcactggtaaatagagcgaaggttgaggaaacctgaggaatttccatgtggttttgccaggagttgtagcgatgctgtgtgtgtgtgcggatttcccctcatggcaacatgagcctcacaggccaaaagccctgtccgaaaggacccacacagtggagcaatcccagctccctcctacaaagctttgtgagaatgaactcacgtttattcttctttattctctgtttacatcaggccccaaagatgtcctgaaggtaccttgtgtatctgggcatgagcaccatcaactacccggacttgcatttcggtgcagacacatgtggttacccagcccctctgctttggcagaggggcttttgctcgctcagcacgagatctgatcaggagcccttcccagtgtgctttacacctggcggggggttaaaaattgcccaaggcctggcaaaataacctaggggactaggttttccttttattaacaatgtctgtcatt

SEQ ID NO: 3068 - DNA, 675 bp, Unknown
  Description of Unknown: Kobuvirus SZAL6 sequence
cctacccaagggttacatgggaccatattcctcctcccctgtaactttaagttttgtgcccgtattcttgactccaggcggatgttgtgtcgcccgtcctgtgaacaaacagctagacactttcctcccctccctctgggctgctccggcagtccactccctccccccagcgtaacatgccccgctggagtgatgcacctggaagtcgtggacgtgggttagtaacttcggtgaaaacccactataatgacaactggttgacccccacactcaaaggactcgagtctttctcccttaaggctagcccggccacatgaatttgcagctggcaactagtgagtccaccatgtcccgcaacctcggctgcggagtgctgttccccaagcgtatgccttccttctgtaagagtgcgcctggcaagcacatctgagaagtcgttccgctgcgtcgtgccaacctggcgacaggtgacccagtgtgcgtagacttcttccggattcgtccggctcttctctaggaaacatgcgtgtaaggttcatgtgccaaagccctgcgcgcggtgttcttctactgccctaggaatgtgccgcaggtacccctacttcggtagggatctgagcggtagctaattgtctacgggtagtttcatttccatcttctcttcaggtcgacatc

SEQ ID NO: 3069 - DNA, 636 bp, Unknown; identical to SEQ ID NO: 67
  Description of Unknown: Oscivirus sequence

SEQ ID NO: 3070 - DNA, 675 bp, Saffold virus
  5?46
cctctctcttttcgacgtggttggaattgccatcatttccgacgaaagtgctatcatgcctccccgattatgtgatgttttctgccctgctgggcggagcattctcgggttgagaaaccttgaatctttttctttggaaccttggttcccccggtctaagccgcttggaatatgacagggttattttcttgatcttatttctacttttgcgggttctatccgtaaaaagggtacgtgctgccccttccttctctggagaattcacacggcggtctttccgtctctcaacaagtgtgaatgcagcatgccggaaacggtgaagaaaacagttttctgtggaaatttagagtgcacatcgaaacagctgtagcgacctcacagtagcagcggactcccctcttggcgacaagagcctctgcggccaaaagccccgtggataagatccactgctgtgagcggtgcaaccccagcaccctggttcgatgatcattctctatggaaccagaaaatggttttctcaagccctccggtagagaagccaagaatgtcctgaaggtaccccgcgtgcgggatctgatcaggagaccaattggcggtgctttacactgtcactttggtttaaaaattgtcacagcttctccaaaccaagtggtcttggttttccaattttgttga

SEQ ID NO: 3071 - DNA, 675 bp, Unknown
  Description of Unknown: EV22 sequence
ccttataacccgacttgctgagcttctataggaaaaaaccctttcccagccttggggtggctggtcaataaaaacccccatagtaaccaacacctaagacaatttgatcaaccctatgcctggtccccactattcgaaggcaacttgcaataagaagagtggaacaaggatgcttaaagcatagtgtaaatgatcttttctaacctgtattatgtacagggtggcagatggcgtgccataaatctattagtgggataccacgcttgtggaccttatgcccacacagccatcctctagtaagtttgtaaaatgtctggtgagatgtgggaacttattggaaacaacaatttgcttaatagcatcctagtgccagcggaacaacatctggtaacagatgcctctggggccaaaagccaaggtttgacagacccattaggattggtttcaaaacctgaattgttgtggaagatattcagtacctatcaatctggtagtggtgcaaacactagttgtaaggcccacgaaggatgcccagaaggtacccgcaggtaacaagagacactgtggatctgatctggggccaactacctctatcaggtgagttagttaaaaaacgtctagtgggccaaacccaggggggatccctggtttccttttattgttaatattgacatt

SEQ ID NO: 3072 - DNA, 675 bp, Coxsackievirus B5
cctttgtgcgcctgttttatgcccccttcccccaattgaaacttagaagttacacacaccgatcaacagcgggcgtggcataccagccgcgtcttgatcaagcactcctgtttccccggaccgagtatcaatagactgctcacgcggttgaaggagaaaacgttcgttacccggctaactacttcgagaaacctagtagcatcatgaaagttgcgaagcgtttcgctcagcacatccccagtgtagatcaggtcgatgagtcaccgcattccccacgggcgaccgtggcggtggctgcgttggcggcctgcctacggggcaacccgtaggacgcttcaatacagacatggtgcgaagagtcgattgagctagttagtagtcctccggcccctgaatccggctaatcctaactgcggagcacataccctcaacccagggggcattgtgtcgtaacgggtaactctgcagcggaaccgactactttgggtgtccgtgtttccttttattcttataatggctgcttatggtgacaattgaaagattgttaccatatagctattggattggccatccggtgtctaacagagctattatatacctctttgttggatttgtaccacttgatctaaaggaagtcaagacactacaattcatcatacaattgaacacagcaaa

SEQ ID NO: 3073 - DNA, 675 bp, Unknown
  Description of Unknown: Icavirus sequence
cgaagtttaagctaagcaccctcgggcgttcccggattatgtgatcacatcaatttgatggctggtcaccacgcaacgcctggagagatactcttacttttctcttaagatccccggtcatttgacgcttgtaggatgatagggttattttccactataaatactttcatactcttggatgttctatatccaagacgggaggacctaccccgtaccccttagaggtgagatgccaagaacaggccctttctgttctctcgacaatggcatcataggcaacaagcatcacaccaagattgctaagttttgttaagagttcttcaagctatagggtggctgtagcgaccttctgatgcctgcggatttccccacggagcgatccgtgccacaggggccaaaagccacggctaacgcccatcaggagcggcacttaccccgtgccccacccttgaaacttgaatgttcacactggcttctctcggctttctgaactgtctgcttgttggggccccgaaggatgccctggaggtaccccattttatgggatctgaccaggggacacctcagctctctaagttgctggtgtttaaaaaacgtctaagggcccccaccccttaggtggagggatccacctttcctttattttttaaaactcttttatggtcacaattgttt

SEQ ID NO: 3074 - DNA, 675 bp, Equine rhinitis B virus 1
cgacaggcacaggtcgctccgagttctagtagtgtgggaacttgttactactgatgaaacgaggtagtgacactcagtacctgcgaacgaggtcggggccctcccttcttccttcacccaactttcacttttcgttccactttagcaggggtcttctttctatccccctggcggcattggaactagccgtcgcgtcttaacgcgcagccctgaaggccccacaccttgtggatcttgccgtgggtatgtttctggcatgtgtttctcaagcctgcaaccgaagccgaacagccacatgaacagtttgagcgtggtagcgctgtgtgagttggcggtggatccccctcgtggtaacacgagcccccgtggccaaaagcccagtgtttacagcacctctcacatccaggacgaccccatcctggcgctcactcttagtagtatggcttagtacgcattaggtggtaagccgagctctccctcggccttgttctgaatgcacacatgtctaggggctaaggatgtcctacaggtacccgcacgtaaccttcagagagtgcggatctgagtaggagaccgtggtgcactgctttacagatgcagcccggtttaaaaagcgtctatgcccctacagggtagcggtgggccgcgccctttccttttaaaactacttgttct

SEQ ID NO: 3075 - DNA, 675 bp, Unknown
  Description of Unknown: HAV HM175 sequence
cgccgtttgcctaggctataggctaaattttccctttcccttttccctttcctattccctttgttttgcttgtaaatattgatttgtaaatattgattcctgcaggttcagggttcttaaatctgtttctctataagaacactcatttcacgctttctgtcttctttcttccagggctctccccttgccctaggctctggccgttgcgcccggcggggtcaactccatgattagcatggagctgtaggagtctaaattggggacacagatgtttggaacgtcaccttgcagtgttaacttggctttcatgaatctctttgatcttccacaaggggtaggctacgggtgaaacctcttaggctaatacttctatgaagagatgccttggatagggtaacagcggcggatattggtgagttgttaagacaaaaaccattcaacgccggaggactgactctcatccagtggatgcattgagtggattgactgtcggggctgtctttaggcttaattccagacctctctgtgcttggggcaaacatcatttggccttaaatgggattctgtgagaggggatccctccattgccagctggactgttctttggggccttatgtggtgtttgccgctgaggtactcaggggcatttaggtttttcctcattcttaaataata

SEQ ID NO: 3076 - DNA, 675 bp, Canine picodicistrovirus
  strain 209
cgctctttatacaaatctgtcaaccctttgtataactctaagccgaacaattatagctaggctttttattatataacattaattaggcattagcgttgtcgccaatctcttggtaatcctaaggatacctttcctgttgactaagatgaagcgccttcggttaccgatgcccggtgtccacgaagccatcgtggtcggccgcgtcccccacctctcccaacttggactccatgttttcagtaggtgtaatgattagtattattgattctgctcgttcaatgtgtttatcttcacgatctgggacccaacacatgcttcactcatgtttaaatgttggttccctcattttgaagacacccaaaccatagagtgcgagaatgaggatttctacttccattctggtaacagaaatgaattcctgcgtgtgtctcgtaaatggaatctttaagaacttcagataaatcgaacaatacactaatacaagttgttttctaccaacatgttcaatgcggctaatctgaccgtggagctgtgaagcgctcaaacccgagtgttgtatacagtcgtaatgcgtaagtccatgaggaaccgactactgttacctctgttggtgtgtttctcctttcctctcttttattattatttgttattgcaaatactacaactttgatcaac

SEQ ID NO: 3077 - DNA, 675 bp, Falcon picornavirus
cgcttggaataagttgagaggaattatgcatgctagttgtgtttgtttacaactaattgttctaatccaagtgaagctcttcgcttggggcggcacgacacttgccgtaattcttctaccgtccctccacaccttgtggatgaagggccggatgtgtggcctctggctaacccctctctctggggtgatgctactggatgttttactcctagaccaaatcacatgaactcctcttgatccacttcggtggggctatgagcctgcggattaatagctggcgacagctaccccaggggccaaaagccacggtgttagcagcaccctcatagtctgatgcccaagggctgatgttgggagctagtagtgtgtgtctggcctatgtttaggacttctggccaagcgcagaggagtggggctgaaggatgcccagaaggtacccgtaggtaaccttaagagactatggatctgatctggggccccctcacgtggctttaccacgtgttgggggttaaaaaacgtctaggccccaccagcccacgggagtgggctttcccttaaaaagcccaacaatatttatggtgacaattcactgtttcttctttgcaatttttgtattcttggactccttattttttgtttgcttgattttagtggacattcagattcaaatacaaa

SEQ ID NO: 3078 - DNA, 245 bp, Wobbly possum disease virus
cggctgtgagtgcttagcatatgctagagtactacagccgggtgttggagtcatatgcactggttgcctgtataatagtcgggatctgtctgacctacattatctttgggagttgcttatcacgacaattctcgaagtgtctgtcgacagcttacccccgattcgacaaggccccttgtccaccgcagacctatcgattttcaacgagaacactatcagaggtttaaatttaaaactcaccaaca

SEQ ID NO: 3079 - DNA, 675 bp, Unknown
  Description of Unknown: EV J N125 sequence
cggtacctttgtacgcctattttacccccttccccttgtaacttagaagcaaagcaaaccagttcaatagtaagcaacacaacccagtgttgtgacgaacaagtacttctgtttccccgggagggtctgacggtaagctgtacccacggctgaagtatgacctaccgttaaccggctacctacttcgagaagtctagtaataccattgaagttttgttggcgttacgctcaacacactaccccgtgtgtagttttggctgatgagtcacggcattccccacgggcgaccgtggccgtggctgcgttgcggccaaccaaggggcgcaagctccttggacgtcacttaacagacatggtgtgaagaacctattgagctaggtagtagtcctccggcccctgaatgcggctaatcctaactccggagcacatcagtgcaacccagcatttggtgtgttgtaatacgcaagtctggagcggaaccgactactttgggtgtccgtgtttcctgttttaccttatttggctgcttatggtgacaatttgatattgttaccatatagctgttggattggccatccggatttttgaaagagacccaaaactttcttctctacttcagattcaagtgcgaagttttccttttcatatattacttactaatttgaagtaccaaag

SEQ ID NO: 3080 - DNA, 675 bp, Parechovirus C
cggtcatccccctttccccacagccggtgtgggttctaatcggctcctactaaacacctaagcatcactgcgcctctatctctcctatccacaggtctaagacgcttggaataagacatgtgggtgcaataggaagattagctagtccaatctctccttccagctacgcttctcccttcgatgagcgtagggggggcccccacctccctcatctctggatagggctcttgctacggggctttcccgtctggaccagcaggcccactggtgcgcttccattcaagtttagtgtgcattactgtctgaaatattgctttgctaggatctagtgtagcgacctgcatattgccagcggacttccccacatggtaacatgtgcctctgggcccaaaaggcatgtctttgaccgtatgcagtacaaccccagtataggtcctttctatggcagtatggatctcagtgatgagtctatacagaatatggaagtggttcggatatgtcagcccgaaggatgcccagaaggtacccgcagataaccttaagagactgtggatctgatctggggcccaccaccttcgggtgggtagaagctaaccatgccttgggttaaaaaacgtctaagggctgaccagacccgggggatccgggttttccctatcttgacctactctaatc

SEQ ID NO: 3081 - DNA, 675 bp, Cosavirus B1
cgtgctttacacggtttttgaaccccacaccggctgtttggcgcttgcaggacagcaggtttattttcttttaactctctctttctagccacacacgatctatgtgtgtgggcggagtgatactcccgttccttcttggacaggcggcctccacgccctttgtggatcttaaggctaccaagtcactggtgttggaaagtgaagagaaaggagttccttgggaactacatgtggcattgacagaggttgtagcgatgctgtgtgtgtgtgcggattacccccgtggcgacacggaccccacaggccaaaagccctgtccgaaaggacccacacagtggagcaaccccagctcccctcttcaatgttttgtgttagcaaccttggtattattttctctcaagcttccaatacaccgggccccaaagatgtcctgaaggtaccccgtgtatctgaggatgagcaccatcaactacccggacttgttctttcgagaacagacgcatgtggtaacccagccccgatcctaaggggtcggggcttttgctcactcagcacaggatctgatcaggagacctcccccccctgctttacagggggcgggggtttaaaaattgcccaaggcctggcaaataacctaggggactaggttttcctttttattttaaagttgtcaat

SEQ ID NO: 3082 - DNA, 675 bp, Cosavirus D1
cgtgctttacacggtttttgaaccccacaccggctgtttggcgcttgcaggacagtaggtatattttctttcatttctcttttctagccgcgtaggttctatctacgcgggcggagtgatactcccgctccttcttggacaggcggcctccacgctctttgtggatcttaaggctgccaagtcactggtgtttgaagtgaagaatggagagacactagggcgtttcatgtggctttgccagggattgtagcgatgctgtgtgtgtgtgcggatttcccctcgtggcgacacgagcctcacaggccaaaagccctgtccgaaaggacccacacagtggggttgccccgacccctcccttcaaagctttgtgtaaacaaacttttgtttagactttcttaagcttctctcacatcaggccccaaagatgtcctgaaggtaccctgtgtatctgaggatgagcaccaccaactacccggacttgtgggacgtgtcccacagacgcatgtggtattccagccccctccttttgaggagggggcttttgctcgctcagcacaggatctgatcaggagattcatctctggtgctttacaccagagcatggatttaaaaattgcccaaggcctggcaaacaacctaggggactaggttttctctattttaaaagatgtcaat

SEQ ID NO: 3083 - DNA, 675 bp, Unknown
  Description of Unknown: EV D94 sequence
cgtggcggccagtactctggtatcacggtacctttgtacgcctgttttatatccccttcccccgcaacttagaagaaaacaaatcaagttcactaggagggggtacaaaccagtaccaccacgaacaagcacttctgtttccccggtgatgtcgtatagactgtaaccacggttgaaaacgattgatccgttatccgctcttgtacttcgaaaagcccagtatcaccttggaatcttcgatgcgttgcgctcagcactcaaccccagagtgtagcttaggtcgatgagtctggacactcctcaccggcgacggtggtccaggctgcgttggcggcctacctgtggtccaaagccacaggacgctagttgtgaacaaggtgtgaagagcctattgagctacaagagaatcctccggcccctgaatgcggctaatcctaaccacggagcaagggtacacaaaccagtgtatatcttgtcgtaacgcgcaagtctgtggcggaaccgactactttgggtgtccgtgtttccttttgtttttatcatggctgcttatggtgacaatctaagattgttatcatatagctgttggattggccatccggtaatttattgagatttgagcatttgcttgtttcttcaacaatttcacctattcattgcatttcagcagtcaaa

SEQ ID NO: 3084 - DNA, 675 bp, Rabovirus A
ctacggatatttgcatgacccgctttctatcgccccaacaatcccctttgtaaccacaagctttactcaggctagcagcccgactagctgtttggaagaaaaggctagggcacacaccaacaacaccgaccccactggtcgaaggccgcttggcaataagactggtggaacagggtcgcctgtagttgtttggaacattctttctaatgactttgtcagcggtgctactcacaccgtaactcttctaccctatccccacgcttgtggaactaggaggggatgagtgattcaagtaagtactgtcagaatggtgaaaatgatctgattctgaaacgctatggatccatcgaaagatggggctacacgcctgcggaacaacacatggtaacatgtgccccaggggccgaaagccacggtgataggatcacccgtgtagtttgagatcatatcaatgttcatagtctagtaagatgatttgaaatctaactgagctgatggctaactgcttgtcttattgcggcctaaggatgtcctgcaggtacctttagataaccttaagagactattgatctgagcaggagccaaagtggtctttcccagctttggttaaaaaacgtctaagccgcggcagggggcgggaggccccctttcctcccaaaacttaatattgattgt

SEQ ID NO: 3085 - DNA, 113 bp, Antarctic penguin virus A
ctaggagactacgcagtgggataagatgactatgatgtcgtacgggcagaagccagtacagtcgaagtcgagaccgacgtcgaggatttgactctgcctgacctagtgccatc

SEQ ID NO: 3086 - DNA, 675 bp, Ljungan virus 87-012
ctcattgcccacacctggttggttcccaggttcatacaataaccatcaataaacttttaacatctaagatagtattatcccatactagactggacgaagccgcttggaataagtctagtcttatcttgtatgtgtcctgcactgaacttgtttctgtctctggagtgctctacacttcagtaggggctgtacccgggcggtcccactcttcacaggaatctgcacaggtggctttcacctctggacagtgcattccacacccgctccacggtagaagatgatgtgtgtctttgcttgtgaaaagcttgtgaaaatcgtgtgtaggcgtagcggctacttgagtgccagcggattacccctagtggtaacactagcctctgggcccaaaaggcatgtcatttgaccactcaggtacacaaccccagtgatgcacacgcttagtaatggcttagtaacaaacattgattgatcatttgaaagctgttaggaggtttaggtatgacgggctgaaggatgccctgaaggtacccataggtaaccttaagcgactatggatctgatcaggggcccaccatgtaacacatgggtagaagtcttcggaccttgggttaaaaaacgtctaggcccgccccccacagggatgtggggtttcccttataaccccaatattgtata

SEQ ID NO: 3087 - DNA, 568 bp, Encephalomyocarditis virus
  B
ctccccctccccccccttactatactggccgaagccacttggaataaggccggtgtgcgtttgtctacatgctattttctaccgcattaccgtcttatggtaatgtgagggtccagaacctgaccctgtcttcttgacgaacactcctaggggtctttcccctctcgacaaaggagtgtaaggtctgttgaatgtcgtgaaggaagcagttcctctggaagcttcttaaagacaaacaacgtctgtagcgaccctttgcaggcagcggaaccccccacctggtgacaggtgcctctgcggccaaaagccacgtgtataagatacacctgcaaaggcggcacaaccccagtgccacgttgtgagttggatagttgtggaaagagtcaaatggctctcctcaagcgtattcaacaaggggctgaaggatgcccagaaggtaccccattgtatgggatctgatctggggcctcggtgcacgtgctttacacgtgttgagtcgaggtgaaaaaacgtctaggccccccgaaccacggggacgtggttttcctttgaaaaccacgattacaat

SEQ ID NO: 3088 - DNA, 675 bp, Yak enterovirus
ctccggcacagccgcaccagtgcactggtacgctagtaccttttcacggggtagtcggtatccccccccgtaacttagaagcatgtaacaaaccgaccaataggtgcgcggcagccagctgcgttgcggtcaagcacttctgtctccccggtccgcaaggatcgttacccgcccactccactacgaggagcctagtaactggccaagtgattgcggagttgcgttcagccacaaccccagtggtagctctggaagatggggctcgcacatcccccgtggtaacacggttgcttgcccgcgtgtgcttccgggttcagtctccgactgttcacttcaacatcacgcaaccagccaagagccgattgtgctggagtggtcttcctccggggccgtgaatgctgctaatcctaacctccgagcgtgtgcgcacaatccagtgttgctacgtcgtaacgcgtaagttggaggcggaacagactactttcggcaccccgtgtttcctttattttattcttattttatggtgacaattgcagagatttgtgatattgcgactttaccgttaaacatagcactgcattacctggttgcattccacaaaacttcagagattcctagttcctacattgacctacttgtttatttgaatcttaaatacaaacttgagcaagtgaa

SEQ ID NO: 3089 - DNA, 645 bp, Caprine Kobuvirus
  d30
ctcttttccggtggccacgcccgggccaccgatacttcccttcactccttcgggactgttggggaggaacacaacagggctcccctgttttcccattccttcccccttttcccaaccccaaccgccgtatctggtggcggcaagacacacgggtctttccctctaaagcacaattgtgtgtgtgtcccaggtcctcctgcgtacggtgcgggagtgctcccacccaactgttgtaagcctgtccaacgcgtcgtcctggcaagactatgacgtcgcatgttccgctgcggatgccgaccgggtaaccggttccccagtgtgtgtagtgcgatcttccaggtcctcctggttggcgttgtccagaaactgcttcaggtaagtggggtgtgcccaatccctacaaaggttgattctttcaccaccttaggaatgctccggaggtaccccagcaacagctgggatctgaccggaggctaattgtctacgggtggtgtttcctttttcttttcacacaactctactgctgacaactcactgactatccacttgctctcttgtgcctttctgctctggttcaagttccttgattgtttttgactgcttttcactgcttttcttctcacaatccttgctcagttcaaagtc

SEQ ID NO: 3090 - DNA, 654 bp, Seneca valley virus
ctgggccctcatgcccagtccttcctttccccttccggggggtaaaccggctgtgtttgctagaggcacagaggagcaacatccaacctgcttttgtggggaacggtgcggctccaattcctgcgtcgccaaaggtgttagcgcacccaaacggcgcatctaccaatgctattggtgtggtctgcgagttctagcctactcgtttctcccctatccactcactcacgcacaaaaagtgtgctgtaattacaagatttagccctcgcacgagatgtgcgataaccgcaagattgactcaagcgcggaaagcgctgtaaccacatgctgttagtcccttcatggctgcgagatggctatccacctcggatcactgaactggagctcgaccctccttagtaagggaaccgagaggccttcttgcaacaagctccgacacagagtccacgtgattgctaccaccatgagtacatggttctcccctctcgacccaggacttctttttgaatatccacggctcgatccagagggtggggcatgatccccctagcatagcgagctacagcgggaactgtagctaggccttagcgtgccttggatactgcctgatagggcgacggcctagtcgtgtcggttctataggtagcacatacaaat

SEQ ID NO: 3091 - DNA, 410 bp, Shingleback nidovirus 1
ctgtgagtaccgacaggctcgaagtctattatgaggcgtcgaaacagaaaacctgtaacaactccggtttcatctatcactgccgtcaagaggcagaagaggacgaccacgtgtcaccagatcacttgtatctgtttcagtcaggaagtcaacttttcgacgaagttcgaccattcatcgacccgctgaaaagcgtagaagtcgatgaagatgagctccaaagagccatcgccgatttcgacaaccaaagtgactgtttccactccttcgagctcgtgaatttcgagctgaaacaacaaatcaacgagaacgagtggtacggttattataattacgacaaccaaaactgcaaagttcagttgccagtcacatgtcgaatcgaggacgtaacctgggatcaggtttacgtg

SEQ ID NO: 3092 - DNA, 291 bp, Camel alphacoronavirus
cttaagtgtcttatctatctatagatagaaaagtcgctttttagactttgtgtctactcttctcaactaaacgaaatttttgctacggccggcatctctgatgctggagtcgtggcgtaattgaaatttcatttgggttgcaacagtttggaaataagtgctgtgcgtcctagtctaagggttctgtgttctgtcacgggattccattctacaaacgccttactcgaggttctgtctcgtgtttgtgtggaagcaaagttctgtctttgtggaaaccagtaactgttccta

SEQ ID NO: 3093 - DNA, 675 bp, Unknown
  Description of Unknown: HAV FH1 sequence
cttgatacctcaccgccgtttgcctaggctataggctaaatttccctttccctgtcctttccctatttccttttgttttgtttgtaaatattaattcctgcaggttcagggttctttaatctgtttctctataagaacactcaattttcacgctttctgtctcctttcttccagggctctccccttgccctaggctctggccgttgcgcccggcggggtcaactccatgattagcatggagctgtaggagtctaaattggggacgcagatgtttgggacgtcgccttgcagtgttaacttggctttcatgaacctctttgatcttccacaaggggtaggctacgggtgaaacctcttaggctaatacttctatgaagagatgccttggatagggtaacagcggcggatattggtgagttgttaagacaaaaaccattcaacgccgaaggactggctctcatccagtggatgcattgagggaattgattgtcagggctgtctctaggtttaatctcagacctctctgtgcttagggcaaacactatttggccttaaatgggatcctgtgagagggggtccctccattgacagctggactgttctttggggccttatgtggtgtttgcctctgaggtactcaggggcatttaggtttttcctcattcttaaacaata

SEQ ID NO: 3094 - DNA, 675 bp, Unknown
  Description of Unknown: Halastavi arva (1x mut) sequence
cttgattctaaccttgccgtatggtgccctaacgggttcatttaatcatgcgatgagggttgctataccgcatccattctaaggcgattcaatgcttcatttaggaattttgttgacgattaaaaggtacccccacaaaaacaaaaccaatcttacttgattttcgttttaactgaccactgcgatcccaaattttcgccttcttatcaaagtatgttgtgttctttgggtgtacaacctgagaacttgtctacaactacatattactcgaggaagaaattcggtttaagccgtgccttctcacgtttagtatatctatctggacacaccttcttcatcttctaatccccatctagtctcctgatcagagacgtcgttattaacaaataaccccccttgttaataagagacaaagtacaatcaagctaagttctcttggagttcctgtaggaacttagccattgtgatagagtcataagtctatgtgcatagacagctctagctcaccatttccttcccaacccatcttttcatcagcttaactctatgaatccgatgcaaaaaccattctaacatcttatggtgctttccaagccaaatgagagctcactcttttgagccgctatttaatggacaataaacgttttatagtgtacatcatattgtaaaaacaaa

SEQ ID NO: 3095 - DNA, 660 bp, Malagasivirus B
ctttattttcttatgtaactcttctttttaagttttattttgcctacttgtgagcttatgcgggaccactgtcttagacaaccccacatttgtcatgagtaagtacacgcaaccattacgattactttttaaccgtctgaccttttgataacaactgaagttaggcgtgaaacatgcatttataccaaagtagccccgcatttccccactacggtgggggggctaccctactggctttggaactgtagccattatgtgttgcctggctttcaggatctcacaacacaacagttctctcacaatggaatatgggtgagattgcagtgacatgaacaagtatctagtagtacatagactcaagcctagttgcctgcggaacaacatgtggtaacacatgccccagggtccaaaagacaagggttaacagccccttctaggtgtctgtgtgtgaagaatactttagtagtgttgttatgatctcacctgttagtacagaatgagtatggcttggtgaaggatgtcctacaggtacccattatatggatctgagtaggagaccactagtggtggctttaccgccaggtgagtggtttaaaaagcgtctagccaagccaacagcactagggatagtgctttctatattttatattttcagtgtat

SEQ ID NO: 3096 - DNA, 675 bp, Hepatovirus D
ctttggatgcccatagtgcgggggtataaataccgcactccctttagctgttccgagggtatcggaacctatatgtttgttttctgtctgtctgtcagctttatgtgtgctcgtcccctttagggcactcatttcagcttgctttcattcttttcttccccggttctcaccttaccggaggcactggccgttgcgcccggcggggtcaacctagtgattagcactaggctgtaggtgtctaaagtggtgacattaagacttggtaactgatttcagcactgttaactgatgttggggatgacttgattgatcttctggaaggggtaggctacgggtgaaaccccttatcttaataccactatgtagagatagattcagtaggttaagggcagtggataaggttgagttcattttggacaataaaccttcaacactggtggacccaatctcactgaccagatgctttcttgactgatccttcagaggggtgattcttctgaataggttgccttgacactgatgcctgagacccattgggtcgggccttaaatcatggaactccactggactttcatggcctagcttctgccttagacagactctggggccccacgaccctctgggcccttcggggtactcaggggcatttaggtttttccacaattaaaagagtta

SEQ ID NO: 3097 - DNA, 675 bp, Unknown
  Description of Unknown: EV C102 sequence
ctttgtacgcctgttttacatcccctcccccacgtaactttagaagcaattcaacaagttcaatagagggggtacaaaccagtatcaccacgaacaagcacttctgtttccccggtgattttacataagctgtgcccacggctgaaagtgaatgatccgttacccgctcgagtacttcgaaaagcctagtatcgctttgggatcttcgacgcgttgcgctcagcactctaccccgagtgtagcttaggctgatgagtctgggcattccccatcggcgacgatggcccaggctgcgttggcggcctacccatggctaacgccatgggacgctagttgtgaacaaggtgtgaagagcctattgagctactcgagagtcctccggcccctgaatgcggctaatcccaaccacggatcaggtgcctccaacccaggaggtggcctgtcgtaacgcgcaagtctgtggcggaaccgactactttgggtgtccgtgtttccttttatcttttaaatggctgcttatggtgacaatcatagattgttatcataaagcgaattggattggccatccggtgaaatacaaacacattatttacttgtttgttggatttactccgctcacacagcttactcctaagataatatttattgtattgctggtaaggagacactattata

SEQ ID NO: 3098 - DNA, 675 bp, Porcine enterovirus 9
gaaccttagaagtttacacaaacaaagaccaataggagtccaacacccagttggattgcggtcaagcacttctgtttccccggacctagtagtgataggctgtacccacggccgaagatgaacccgtccgttatccggctacctacttcgggaagcctagtaacattctgaagtctctgaggcgtttcgctcagcacgaccccggtgtagatcgggctgatgggtctccgcataccccacgggcgaccgtggcggaggccgcgttggcggcccgcctatggcgaaagccataggacgcctcttagatgacagggtgtgaagagcctactgagctgggtagtagtcctccggcccctgaatgcggctaatcctaaccacggagcgtccaccagcaatccagctggcagggcgtcgtaacgggcaactctgtggcggaaccgactactttgggtgtccgtgtttccttttgatcctattttggctgcttatggtgacaacgataagttgttatcataaagctcttgggttggccacctggaaaaagttatcagtgtttgatattgttcggctctcacgcctaccaataagacaagccctatatttacttgttgcattttactcgtcagaagaaatcacagagtatcatttggatttgttactcacattaaggacaag

SEQ ID NO: 3099 - DNA, 138 bp, Mouse Mosavirus
gaagttgatcatgaacttggttattggtggaacgcacatgaactcccaacaatgatcttgaagacacagcgtggtaacaattaccatgcccttgtggctgcccaagacattgatggctattgggtgatttatgatgac

SEQ ID NO: 3100 - DNA, 690 bp, Unknown
  Description of Unknown: Kobuvirus SZAL6 5?76 sequence
gaattaaacgggcaccctacccaagggttacatgggaccatattcctcctcccctgtaactttaagttttgtgcccgtattcttgactccaggcggatgttgtgtcgcccgtcctgtgaacaaacagctagacactttcctcccctccctctgggctgctccggcagtccactccctccccccagcgtaacatgccccgctggagtgatgcacctggaagtcgtggacgtgggttagtaacttcggtgaaaacccactataatgacaactggttgacccccacactcaaaggactcgagtctttctcccttaaggctagcccggccacatgaatttgcagctggcaactagtgagtccaccatgtcccgcaacctcggctgcggagtgctgttccccaagcgtatgccttccttctgtaagagtgcgcctggcaagcacatctgagaagtcgttccgctgcgtcgtgccaacctggcgacaggtgacccagtgtgcgtagacttcttccggattcgtccggctcttctctaggaaacatgcgtgtaaggttcatgtgccaaagccctgcgcgcggtgttcttctactgccctaggaatgtgccgcaggtacccctacttcggtagggatctgagcggtagctaattgtctacgggtagtttcatttccatcttctcttcaggtcgacatc

SEQ ID NO: 3101 - DNA, 150 bp, Bat sapelovirus
gacaggtgttttggagggcggatgacgatatctggctggccaccagggaataacggcaaatgtctgatcatacggttcacaagtctaccggcgatagtggttcaacaccatgtgtagcagggattcttgcgtatgtgaaggcgacagtgc

SEQ ID NO: 3102 - DNA, 675 bp, Unknown
  Description of Unknown: Kobuvirus sheep TB3 sequence
gaccttctggtacttcttcgcctgggtcacaaaagcgaagaacctgcctctctaacgccagacgagcggcattaaacttgaacttctggcactctccactctcccttttccctgtccctttccccactgcgctctcaaggtcgcgcaatcctgggactagcccagttttaaaagttcctggcaccctttgcccctctaggcccttaaggtaggaactgaccttgtgctgtgatctcggtgcgggagtgctaccacgtagtcatcgtaagcctcgtttctggttctgccctggcaaggctacagagtaccgtgttccgctgtggatgccatccgggtaaccggacccccagtgtgtgtagcggtatgttcacggtccgccgtgttcaccagattcctgacctggctttgctagaaatggtgtgtgcccaatccctgtgaccagtatcaattacatcacctaggaatgctaggaaggtaccccagtcctgagctgggatctgatcctaggctaattgtctacggtgatgctccttttattttcttacaactgctattgactgtctgattgctgattctgctcttgtgctcttctgctctggctcattctcaagggttctctttgtccaagatcctttggttctctccttgttccacttgccactgccaacgcttgtc

SEQ ID NO: 3103 - DNA, 459 bp, GB virus C
  K1737
gacgtgggggggttgatcccccccctttggcactgggtgcaagccccagaaaccgacgcctatttaaacagacgttaagaaccggcgccgacccggcgaccggccaaaaggtggtggatgggtgatgccagggttggtaggtcgtaaatcccggtcatcttggtagccactataggtgggtcttaagggttggttaaggtccctctggcgcttgtggcgagaaagcgcacggtccacaggtgttggccctaccggtgtgaataagggcccgacgtcaggctcgtcgttaaaccgagcccactacccacctgggcaaacaacgcccacgtacggtccacgtcgcccttcaatgtctctcttgaccaataggcttagccggcgagttgacaaggaccagtgggggctgggcggtaggggaaggacccctgccgctgcccttcccggtggagtgggaaatgc

SEQ ID NO: 3104 - DNA, 341 bp, Hubei sobemo-like virus 3
gagatgtttgcgtgggccgttgcgctgcgggcggcccacctccctacggggaccgtgagacaccgctggggaaggcccccacccccggccaaggggatcctgccgagaggcaggagaaagaggcccagccctctggggcgcctttaggggtgcctgggagggaagtacccgagccgggcggccggtcgggtgcggctgtgcagttcgaggctaaccgtaaggaaggcctgagctgcctcggcttgtcggaaaggaagacgaaggcacttatcaaggctttcaggaagcaggagcgcaattacagcgcgcgccgtgcggcctggattaaccgcatttggccg

SEQ ID NO: 3105 - DNA, 579 bp, Unknown
  Description of Unknown: RhPV sequence
gataaaagaacctataatcccttcgcacaccgcgtcacaccgcgctatatgctgctcattaggaattacggctccttttttgtggatacaatctcttgtatacgatatacttattgttaatttcattgacctttacgcaatcctgcgtaaatgctggtatagggtgtacttcggatttccgagcctatattggttttgaaaggacctttaagtccctactatactacattgtactagcgtaggccacgtaggcccgtaagatattataactattttattatattttattcaccccccacattaatcccagttaaagctttataactataagtaagccgtgccgaaacgttaatcggtcgctagttgcgtaacaactgttagtttaattttccaaaatttatttttcacaatttttagttaagattttagcttgccttaagcagtctttatatcttctgtatattattttaaagtttataggagcaaagttcgctttactcgcaatagctattttatttattttaggaatattatcacctcgtaattatttaattataacattagctttatctatttata

SEQ ID NO: 3106 - DNA, 212 bp, Betacoronavirus HKU24
gataaagtgtgaatcgcttccgtagcatcgcaccctcgatctcttgttagatctaatctaatctaaactttataaaaacactaggtccctgctagcctatgcctgagggtttaggcgttgcatactagtgtcttaggaatttgactgataacacttccctgctaacggcgtgttgcactctcagtctaagcctcccacccataggaggtatc

SEQ ID NO: 3107 - DNA, 675 bp, Unknown
  Description of Unknown: Parabovirus C sequence
gatgtatccccatcccccagtgtgtatgccatactgcatagctcgcctatgccctatggattcacaaccctttcatataccctccctacccaaccccgtaaccacatgctttactccgcttggggttttgcggccccatgttgtgacgaaatggctacgcaatcaatgcggctaatggggcctgccgcttttaagtggccccagttagaagtttatgcacacccgcccattaggaggccaccagccaggtggtcagagggcaagcacttctgtttccccggtgaagtttgataagctgtgcccacggctgaagcagacagatccgttacccgcctcactactacgagacggctagtagtgtgtaatatccgaatttcattgatccgggtgttccccccacccagaaacgtgtgatgaggagcggcacccctcctatggcaacatagggcctctcctgcgctggcacacgggctctatgagcatgaaatcaggagaaagtcacacgaagaccttattgtgctagtgttgattcctccgcccccctgaatgcggctaatcccaactccggagcgcccgctggcaaacccgccagaagagcgtcgtaatgcgtaagtctggagcggaaccgactactttgggtgtggcgtgtttcctttatttcctttgtatttgtat

SEQ ID NO: 3108 - DNA, 675 bp, Harrier picornavirus 1
gatgtgtgacggtgtaattactttccggatcccactttcctattataactctttcatcccaaggttagggaaagaacctggctcggtaccaccagaccctccgccacgctagtggactctccggagataacggtaccccctttgtagtcacctgtgctggtgaagaaccacctagtattgcttgggtgcgtgccgcctagcttccatttcttctggagcactgtgcaatgaggtttccccacttggtaacaagtgcctcaggtcccgcaaggatactgtggggtggtgtgaccgcagggagctgtctccacggctcctctaatgttacgccgctatccacaggccagtgcgtgtcatcgatcccggatgacagagctagtattgcgaacccccaagtaagaaaagtggctagtaacctgatagctggtgaagagggtgggtcagttgagtagatgccctagaggtacccgaaaggatctgactagggacccgtgactatacattaggtaaaccgggtataaaaaccatgaaaaactgaccacttttcttttaacctcttctttctttttatgtgtgttaagtgttttgagtttggactgtaccttgcccgcctttcttggattttctctatcgctcttcttacacctactgttatcaaggcactctttagagata

SEQ ID NO: 3109 - DNA, 623 bp, Cripavirus sp.
gcaaaatcggtagtacgttaaacgtacgaccaccgatgagactgaaatgacactagttgagattatttcaatatcctagtgttataaagtcaatatttgttggttgatcgtttcgtcaatcgatggcgctgacagccggaaagacggcaataataaaaaccaagatttagtttttaagttttgattgaattgcaaaagctatcttgaatagacaatcaaaatattaagtaaagcaaaagcttcttaaagaagacaatatttaattagttagtaaccaaacctcatcgtgcccctaagggttaaccggttacgtaaaagcgtagaggtattaaggtcactgcggagacctaaaatccgcaattttatgttttgtaatgttttagttatagacttagatgtaactataagagtttataaatacttgtttcaagatttatagacaagatctgatcctatggattttagataaccttcatgttagtggatagtgtgtgtacctatctaaacgcataaggctcttatttcatatttaaagtaggactatgtattacggcgcatctaacggtaacgttagtcaagaccggagaatctcggaatgaattttagtaattcccaaatttata

SEQ ID NO: 3110 - DNA, 570 bp, Plautia stali intestine virus
  (2x mut for Xba1)
gcaaaatgggtacgtagttaaccactgcgtatcaggattgcaggccacgaagggtatttgcatatctttctatgcggtattacggcttaaaacccgttgtatcttgttgtttgactgcctgtatcactagtggccattttatttaggttagagacccctgatagtaggagagttacaaactctttaaaaattgttgaccccggaaaagatggtgacccctgtaagtagttgatcaagaagatctatgcgctggcatagtaatccagtgtttcctgttttaggatgacctctgaaagtagatgaccgtggaaagtcacgtagtgccccaataagcacgtttgggcagcgtgcgctatcacaaggcttgatctccgaggagccccttgttttagctggctggaagccaatgatcttaagtagataagtgctgttgcttgtagttcaacagaaagctttgagtacgtctttcttgcgagaaagaacacatgcattcttatgctctcaattctattatttttattttgggcgaaaggaaagctctcacgcgagtacgaatagccaaccctttat

SEQ ID NO: 3111 - DNA, 675 bp, Hepatovirus G
gcaaggggtggttttaaccttgcacgcgtttaccgtgcgttaacggttttccatgtttgtatgtcttgtttgtattatgtgttttgtaaatattaattcctgcaggttcagggttctttaatcatgttgggctgtacccacactcaacttttggccataagtgagtttcttaacgaaccttttaacacaggatgttattagggcccaatattttccctgaggccttctttggcctctattttttccccttttctatctccttgtattccgggctcacgtgatgccaatggactgacccatgcgcccgtgggggttaactactggagtagccagtagctgtaggtgctaaaagtcacgtacgtgtaagactggacgagacctctcagctataactgaaagtagtaagtatgtctgaacttcttgaaggggtaggctacgggtgaaaccccttaggttaatactcatattgagagatacctctgataggtgaaggtttccggtagaggtgagtttaacgacaaagcctctcaacggatgtgggcccacctcatcagcaagatgctttcatacccaataccgtaggggctgggttgttgagttcagtcccaagcgtccctcccgcaaggttgtaggggtactcaggggcatttaggtttccacaattaaacaaataca

SEQ ID NO: 3112 - DNA, 675 bp, Unknown
  Description of Unknown: EV F1 BEV 261 sequence
gcaatgctgcaccagtgcactggtacgctagtaccttttcacggagtagatggtatcccttaccccggaacctagaagattgcacacaaaccgaccaataggcgcaccgcatccagccgtgcagcggtcaagcacttctgtctccccggtctgtaaagatcgttatccgcccgacccactacgaaaagcctagtaactggccaagtgaacgcgaagttgcgctccgccacaaccccagtggtagctctggaagatggggctcgcaccacccccgtggtaacacggttgcctgcccgcgtgtgcttccgggttcggtctcgtgccgttcacttcaacttcacgcaaccagccaagagcctattgtgctgggacggttttcctccggggccgtgaatgctgctaatcccaacctccgagcgtgtgcgcacaatccagtgttgctacgtcgtaacgcgtaagttggaggcggaacagactactttcggtaccccgtgtttcctctcattttatttaatattttatggtgacaattgttgagatttgcgctcttgcaacgttgccattgaatattggcttatactatttggttgccttttacaaaacctctgatatacccagttcttacattgatctgcttgtttttctcaatttgaagtatagactacaaatagcaaa

SEQ ID NO: 3113 - DNA, 123 bp, Porcine pestivirus 1
gcagatatcggtggtggacctgggggttgggctcaccgtgccccttcatggggtagacctcactgcttgatagagtgccggcggatgcctcaggtaagagtataaaatccgttgttcactaac

SEQ ID NO: 3114 - DNA, 472 bp, Botrytis cinerea mitovirus 4
  RdRp
gccccgccgaccttcctatttatttctaaataggaaggtcccgactagtcggataattcggtttaacgaattatggttagatctattaaagttaaaatagattgaatttctttctcatcctccttattcctatactttgggagtaaatgacaaatgtctatcctcaaaccgaaatggcttaagtgatgaatttgaaagaaaggtaggttttaagaatataaggcatcaatatattatacccttgaatgttaagtgaccacggcgtgacgattagggctatcttaggatagacagccatctaacgcgacagcagtggaaatcagcttagcatctcaagatcatgtataatatatacataaccttacaattataaaaccaaaccaaaacacactataattttatataaattatagaagtatcggacctggacggtacctactattaactgatagtagccaaatgcaggaagctc

SEQ ID NO: 3115 - DNA, 415 bp, Grapevine associated narnavirus-1
gcccggggggtgcagtcctgtgaaagggtctgcaccatactatatatgtatatgattacatcccaaaaggcgacttcgttcaggttttaaatctgacgtaggtccagtaaataagcatgtcaaaacatgtaagtttatcctgtaatctactctcataagatgagataagatgatattgcagttcccatgtaaataaatccattatgaattcattcatataaggtagaagtggtaactatggttgaaacattaatataaaacggtcattttgcatgaacgtcattaaggaactggcataccaatgtctatttagtgactatgatatttagagtatcccttatattaattaacaattattccttttagcatatcatccgacaacaaattttaaaagaagaaatattactcattaaaa

SEQ ID NO: 3116 - DNA, 675 bp, Parechovirus A
gccgtcgggccttacaccccgacttgctgagtttctctaggagagtccctttcccagccagaggtggctggtcaaacaataccaaacgtaactaaacatctaagataacatagccctatgcctggtctccaccagttgaaggcatcttgcaataaaatgggtggattaagacgcttaaagcatggagtcaattatcttttctaactagtgatcttcactgggtggcagatggcgtgccataactctattagtgggataccacgctcgtggatcttatgcccacacagccatcctctagtaagtttgcaaggtgtctgatgaggcgtgggaacttattggaaataattacttgctgcgaagcatcctactgccagcggatcaacacctggtaacaggtgcccctggggccaaaagccacggtttaacagaccctttaggattggttaaaacctgagtaattatggaagatacttagtacctaccaacttggtaacagtgcaaacactagttgtaaggcccacgaaggatgcccagaaggtacccgcaggtaacaagagacactgtggatctgatctggggccacctacctctatcctggtgaggtggttaaaaaacgtctagtgggccaaacccaggggggatccctggtttccttattttagtgtaaatgtcatt

SEQ ID NO: 3117 - DNA, 224 bp, Equine arteritis virus
gctcgaagtgtgtatggtgccatatacggctcaccaccatatacactgcaagaattactattcttgtgggcccctctcggtaaatcctagagggctttcctctcgttattgcgagattcgtcgttagataacggcaagttccctttcttactatcctattttcatcttgtggcttgacgggtcactgccatcgtcgtcgatctctatcaactacccttgcgact

SEQ ID NO: 3118 - DNA, 743 bp, Unknown
  Description of Unknown: CVA10 sequence
gctcttccgatctgggttgttcccacccacagggcccactgggcgccagcactctgattccacggaatctttgtgcgcctgttttacaacccttcccaatttgtaacgtagaagcaatacacactactgatcaatagtaggcatggcgcgccagtcatgtcatgatcaagcacttctgttcccccggactgagtatcaatagactgctcacgcggttgaaggagaaaacgttcgttacccggctaactacttcgagaaacctagtagcaccatggaagctgcggagtgtttcgctcagcactttccccgtgtagatcaggtcgatgagtcactgcaatccccacgggcgaccgtggcagtggctgcgttggcggcctgcctatggggcaacccataggacgctctaatgtggacatggtgcgaagagtctattgagctagttagtagtcctccggcccctgaatgcggctaatcctaactgcggagcacatgccttcaacccaggaggtggtgtgtcgtaacgggtaactctgcagcggaaccgactactttgggtgtccgtgtttccttttatccttatattggctgcttatggtgacaatcacggaattgttgccatatagctattggattggccatccggtgtctaacagagctattgtatacctatttgttggatttactcccctatcatacaaatctctgaacactttgtgctttatactgaacttaaacacacgaaa

SEQ ID NO: 3119 - DNA, 145 bp, Unknown
  Description of Unknown: PSIV IGR sequence
gctgactatgtgatcttattaaaattaggttaaatttcgaggttaaaaatagttttaatattgctatagtcttagaggtcttgtatatttatacttaccacacaagatggaccggagcagccctccaatatctagtgtaccctcg

SEQ ID NO: 3120 - DNA, 664 bp, Unknown; identical to SEQ ID NO: 1316
  Description of Unknown: Aichivirus DVI2321 sequence

SEQ ID NO: 3121 - DNA, 675 bp, Megrivirus E
gcttggcaacctcatatcgttactctgccgaccagtctgggtcgtgtggccacacaatgggattcgttctgttgtgtagagtcacatggcattactgggctgatcggtggggatccgttgccacccctaaacccttacatttactggactgcttttcttggccccggaatgattcgctcacccgcgatgaggactgttgttcttattatggcaggattacgcgtctggtccgcgtaaggactaattcctatgtttatacgttactaccttgttctgaacggtgggcgccaccccgcctagtaggatcctggcttatcgtgtagacctctagggaccacattagctagagtgtaggctgctatggatggagtagtgacccctttttgggtatcactctctaagactccggaatgtgtcatagtacgctggaaatccttacttgtttttccatgagggggaggtggtgctgaaatattgcaagccacccctcggttaaaacagtttggtgccgcttatgccatattaccgccccttgtagttgggctgtttttgcagctccgggttagtagagtaccatagtggacgcggtgttgggaatcaccgccttggctgcacactgcttgatagagctgcggctggtcaagctaattgtggtataaccagttgatttggcat

SEQ ID NO: 3122 - DNA, 631 bp, Avian orthoreovirus
  segment S1
gctttttcaatcccttgtgtcgatgttcccgtatgtcatctggttcatgtaacggtgcaacttctatttttggtaacgttcactgtcaggcagcgcaaaactcggcgggtggtgatcttcaagcgacttcctctcttgttgcttattggccctacttggctgcgggcggtggtctgctcgttgttattattataattgttggcgctgtttgttgttgcaaggctaaggttaaagcggacgcagcccgaaacgttttctaccgagagctgttcgcacttaattcgggtaaaagtgatgcaggacctccgatttaccaggtttagtgtacgacgatttgagttttcacctttcgtcttagaggagtgcactactccatctttcacgactataactaataccgatccggctctctactttaacattgagtttccgtcaagtcatcgtctctcccccttcattccagaactgttgtctcagccttgtaccgttcacgtttcattgattcggagattcgctctctgtgcaaccttatctagtatttgtgaatacgactgtgcgctactgccatccatcaacgctattacgacgatccctacaccaggtgcgtcatcatctctgattgttcattggg

SEQ ID NO: 3123 - DNA, 315 bp, Botrytis cinerea mitovirus 2
  RdRp
ggaacttttcagttccagaagtggctttattaagccttcaaagtttacactttgaacctgcgattaattccccatagtgactcttgttactgtgaattaggaatagttgtagttcaacttctaatgaggtgaacaatataataactcatcttattaaccctatacgtagacaattgtccaaagagacagttggaattctgccaatctggaatgtttggtacgcgtagaagataataagagaccctctattcccctgcctcatgactaagtcatggcccggggtgtaatagagatacttttatatattatacaatc

SEQ ID NO: 3124 - DNA, 458 bp, Basella alba endornavirus
ggaatatggctaatcggcttattctaatcaaacgcaaaagacttatgacacagaccggacctgaacgaggtgataaaacacctcgttcaggttcaaaacgtagaagattcattcctccgattagaaatacaactacgtctaagcacgatagagatggtatcaagatcggttttagaccacgagaaaatcggcaaatgaaagtacaagttgggtggtttaaattaccaagaacagtaacattcaagaacaacggcaacccgtttgttacctcatttcgtaaattgtttagaagtaacaaagataaattatttaatggtgggaagaacctaagtacagtaccagccagaagtagtgaaatgacagaaatgtttatgttcatgtccacgctagagggccaattgtcaatccaagatcgagatccaaaaataatcaataagtctatatacatgatagaggta

SEQ ID NO: 3125 - DNA, 600 bp, Hubei tombus-like virus 9; identical to SEQ ID NO: 196

SEQ ID NO: 3126 - DNA, 675 bp, San Angelo virus
  P-113
ggagatctaagtcaaccgactccgacgaaactaccatcatgcctccccgattatgtgatgctttctgccctgctgggtggagcatcctcgggttgagaaaaccttcttcctttttccttggaccccggtcccccggtctaagccgcttggaataagacagggttatcttcacctcttccttcttctacttcatagtgttctatactatgaaagggtatgtgtcgccccttccttctttggagaacacgcgcggcggtctttccgtctctcgaaaagcgcgtgtgcgacatgcagagaaccgtgaagaaagcagtttgcggactagctttagtgcccacaagaaaacagctgtagcgaccacacaaaggcagcggaccccccctcctggcaacaggagcctctgcggccaaaagccacgtggataagatccacctttgtgtgcggcacaaccccagtgccctggtttcttggtgacacttcagtgaaaacgcaaatggcgatctgaagcgcctctgtaggaaagccaagaatgtccaggaggtaccccttccctcgggaagggatctgacctggagacacatcacatgtgctttacacctgtgcttgtgtttaaaaattgtcacagctttcccaaaccaagtggtcttggttttcactctttaaactgatttcact

SEQ ID NO: 3127 - DNA, 675 bp, Cosavirus B1; identical to SEQ ID NO: 3081

SEQ ID NO: 3128 - DNA, 675 bp, Cosavirus D1; identical to SEQ ID NO: 3082

SEQ ID NO: 3129 - DNA, 675 bp, Unknown; identical to SEQ ID NO: 3083
  Description of Unknown: EV D94 sequence

SEQ ID NO: 3130 - DNA, 675 bp, Rabovirus A; identical to SEQ ID NO: 3084

SEQ ID NO: 3131 - DNA, 113 bp, Antarctic penguin virus A; identical to SEQ ID NO: 3085

SEQ ID NO: 3132 - DNA, 675 bp, Ljungan Virus 87-012; identical to SEQ ID NO: 3086

SEQ ID NO: 3133 - DNA, 568 bp, Encephalomyocarditis virus; identical to SEQ ID NO: 3087
  B

SEQ ID NO: 3134 - DNA, 675 bp, Yak enterovirus; identical to SEQ ID NO: 3088

SEQ ID NO: 3135 - DNA, 645 bp, Caprine kobuvirus; identical to SEQ ID NO: 3089
  d30

SEQ ID NO: 3136 - DNA, 654 bp, Seneca valley virus; identical to SEQ ID NO: 3090

SEQ ID NO: 3137 - DNA, 410 bp, Shingleback nidovirus 1; identical to SEQ ID NO: 3091

SEQ ID NO: 3138 - DNA, 291 bp, Camel alphacoronavirus; identical to SEQ ID NO: 3092

SEQ ID NO: 3139 - DNA, 675 bp, Unknown; identical to SEQ ID NO: 3093
  Description of Unknown: HAV FH1 sequence

SEQ ID NO: 3140 - DNA, 675 bp, Halastavi arva; identical to SEQ ID NO: 3094
  (1x mut)

SEQ ID NO: 3141 - DNA, 660 bp, Malagasivirus B; identical to SEQ ID NO: 3095

SEQ ID NO: 3142 - DNA, 675 bp, Hepatovirus D; identical to SEQ ID NO: 3096

SEQ ID NO: 3143 - DNA, 675 bp, Unknown; identical to SEQ ID NO: 3097
  Description of Unknown: EV C102 sequence

SEQ ID NO: 3144 - DNA, 675 bp, Porcine enterovirus 9; identical to SEQ ID NO: 3098

SEQ ID NO: 3145 - DNA, 138 bp, Mouse Mosavirus; identical to SEQ ID NO: 3099

SEQ ID NO: 3146 - DNA, 690 bp, Kobuvirus sp.; identical to SEQ ID NO: 3100
  SZAL6 5?76

SEQ ID NO: 3147 - DNA, 150 bp, Bat sapelovirus; identical to SEQ ID NO: 3101

SEQ ID NO: 3148 - DNA, 675 bp, Kobuvirus sp.; identical to SEQ ID NO: 3102
  sheep TB3

SEQ ID NO: 3149 - DNA, 459 bp, GB virus C; identical to SEQ ID NO: 3103
  K1737

SEQ ID NO: 3150 - DNA, 341 bp, Hubei sobemo-like virus 3; identical to SEQ ID NO: 3104

SEQ ID NO: 3151 - DNA, 579 bp, Unknown; identical to SEQ ID NO: 3105
  Description of Unknown: RhPV sequence

SEQ ID NO: 3152 - DNA, 212 bp, Betacoronavirus HKU24; identical to SEQ ID NO: 3106

SEQ ID NO: 3153 - DNA, 675 bp, Parabovirus C; identical to SEQ ID NO: 3107

SEQ ID NO: 3154 - DNA, 675 bp, Harrier picornavirus 1; identical to SEQ ID NO: 3108

SEQ ID NO: 3155 - DNA, 623 bp, Cripavirus sp.; identical to SEQ ID NO: 3109

SEQ ID NO: 3156 - DNA, 570 bp, Plautia stali intestine virus; identical to SEQ ID NO: 3110
  (2x mut for Xba1)

SEQ ID NO: 3157 - DNA, 675 bp, Hepatovirus G; identical to SEQ ID NO: 3111

SEQ ID NO: 3158 - DNA, 675 bp, Unknown; identical to SEQ ID NO: 3112
  Description of Unknown: EV F1 BEV 261 sequence

SEQ ID NO: 3159 - DNA, 123 bp, Porcine pestivirus 1; identical to SEQ ID NO: 3113

SEQ ID NO: 3160 - DNA, 472 bp, Botrytis cinerea mitovirus 4; identical to SEQ ID NO: 3114
  RdRp

SEQ ID NO: 3161 - DNA, 415 bp, Grapevine associated narnavirus-1; identical to SEQ ID NO: 3115

SEQ ID NO: 3162 - DNA, 675 bp, Parechovirus A2; identical to SEQ ID NO: 3116

SEQ ID NO: 3163 - DNA, 224 bp, Equine arteritis virus; identical to SEQ ID NO: 3117

SEQ ID NO: 3164 - DNA, 743 bp, Unknown; identical to SEQ ID NO: 3118
  Description of Unknown: CVA10 sequence

SEQ ID NO: 3165 - DNA, 145 bp, Plautia stali intestine virus; identical to SEQ ID NO: 3119
  IGR

SEQ ID NO: 3166 - DNA, 664 bp, Unknown; identical to SEQ ID NO: 1316
  Description of Unknown: Aichivirus DVI2321 sequence

SEQ ID NO: 3167 - DNA, 675 bp, Megrivirus E; identical to SEQ ID NO: 3121

SEQ ID NO: 3168 - DNA, 631 bp, Avian orthoreovirus; identical to SEQ ID NO: 3122
  segment S1

SEQ ID NO: 3169 - DNA, 315 bp, Botrytis cinerea mitovirus 2; identical to SEQ ID NO: 3123
  RdRp

SEQ ID NO: 3170 - DNA, 458 bp, Basella alba endornavirus; identical to SEQ ID NO: 3124

SEQ ID NO: 3171 - DNA, 600 bp, Hubei tombus-like virus 9; identical to SEQ ID NO: 196

SEQ ID NO: 3172 - DNA, 675 bp, San Angelo virus; identical to SEQ ID NO: 3126
  P-113

SEQ ID NO: 3173 - DNA, 675 bp, Hepatovirus I
ggctgcctgtgtctcaggggtaagtactggggccgcgttgaccgtgcggtacggttatgcttttagattaggatgtccgtctgtccggcactctcttttgcttaaaatggccttaaatccatgggaggcgtaaccatgggccctttgttacctagacatgattgcattgggggccgtccttggggcttaggccccagccatttctcttgactcgtctaagagtttacttcatccttttctttactttattttccaggctctcagcatgccgacggctctgaccactgcgcccggtggggttaactgcatgattagcatgcagctgtaggagttaaaagtgctgacaggccaattctgacgtaagtccactctatattaacttgatcaagtaaggttgattgatctttgtgagagggtaggctacgggtgaaaccctctaggttaatactcatattgagagatacctccagaaggtgaaggttggcggatattggtgagttcttttaggacaaaaacctttcaacgcctgtgggcccacctcactggcacaatgctttcatccccaattgtgatgggtagtttggactgaaatcaggagtaacctgccctacgagtttaggggtagttcaggggtatttaggcttccacatttgatagagtttatgagagtgagcc

SEQ ID NO: 3174 - DNA, 280 bp, Hepacivirus K
gggaacaatggtccgtccgcggaacgactctagccatgagtctagtacgagtgcgtgccacccattagcacaaaaaccactgactgagccacacccctcccggaatcctgagtacaggacattcgctcggacgacgcatgagcctccatgccgagaaaattgggtatacccacgggtaaggggtggccacccagcgggaatctgggggctggtcactgactatggtacagcctgatagggtgctgccgcagcgtcagtggtatgcggctgttcatggaac

SEQ ID NO: 3175 - DNA, 280 bp, Hepacivirus K; identical to SEQ ID NO: 3174

SEQ ID NO: 3176 - DNA, 638 bp, Phopivirus; identical to SEQ ID NO: 764
  strain NewEngland

SEQ ID NO: 3177 - DNA, 675 bp, Parechovirus A8
gggccttataccccgacttgctgagtttctctaggagagtccctttcccagccctgaggcggctggataataaaggcctcacatgtaacaaacatctaagacaaaataatttgccttgcacctggtccccactagttgaaggcatctagcaataagatgagtggaacaaggacgcttaaagtgcaatgatagttatcttttctaacccactatttatagtggggtggtggatggcgcaccataattctaatagtgagataccacgcttgtggaccttatgctcacacagccatcctctagtaagtttgtgagacgtctggtgacgtgtgggaacttactggaaacaatgctttgccgtaaggctttcattagccagcggaccaccacctggtaacaggtgcctctggggccaaaagccaaggtttaatagaccctaatggaatggttcaaacctggagcattgtggaaagtacttagtacctgctgatctggtagtaatgcaaacactagttgtacggcccacgaaggatgcccagaaggtacccgtaggtaacaagtgacactatggatctgatctggggccaactacctctatcttggtgagttggttaaaaaacgtctagtgggccaaacccaggggggatccctggtttccttttattttactttgtcaat

SEQ ID NO: 3178 - DNA, 675 bp, Rabbit Kobuvirus
gggctataaatatgggcattcctcttcccccttccccttttgaagatgagtgcgcatattcttgactccgcctggattggccgcccaaggcgtgaacaagcagctaggccaccatgacactgcggtggtgtccgaacccgcgggtgccttcacgggcacctgtggtatgtaggactcccaccgtggtcttccctttccccctcaatctttccccctggttcgactaacgggaccagtgctggaacctgtccggtgaacggtatagcaggcccccccggcagaaacacccggtgcttaccccttaaggctagcccccttccatgaatttggttggggcaactagtgggtgtacagttggcgtgaaccctccggtctaggagtgctcttgcccaatcctctgtgtgtgccttgcagtagggactggcaatccttcgcgtaggtgatccgctgtgccatgccatcctggcgacaggaggcccagtgtgcgcaacctacgtcccttctgggtgctgcattgcattacctttggagtaagcttggtgtgccgaaaccccagggtttacgtaccactcgtggtgtgaggaatgtgccgcaggtaccccatccttgaggtgggatctgagcggtagctaattgtctagcaccactttcttccttttttctttgctggtcacg

SEQ ID NO: 3179 - DNA, 520 bp, Simian pegivirus
ggggaatctcaccccccgtccggttccggaagaatcggaaaccgacaccctgaccaatcattcttgatcatagagtggatgttagtgaaagccagacgaaagccggcggatgggtggtgacagggttggtaggtcgtaaatcccggccaccctggtacccggtataagttgggcggaagctgactgaagctccgtgctcttttctgtgcgttcttggtgcacggtccacaggtgacgcctataccggtgtgaataataggccgactcgagcggagtcgttaaactgagaacctccatacggatggcaacttggcttgcgtacggggacgccgctaaagtcacagtgggttaagtccggcgggttgacaaccccagcaaggcgagggggtcctattgttggactctgccagttcccggtggaggtaggcatggggtggcccagctccgcggcgcgctacagccggggtagcccaaaatccgaaaggtgagggcgggccacatgtccgaaatttagtcaagc

SEQ ID NO: 3180 - DNA, 665 bp, Caprine kobuvirus
  d10
ggggcctcggccccctcaccctcttttccggtggccacgcccgggccaccgatacttcccttcactccttcgggactgttggggaggaacacaacagggctcccctgttttcccattccttcccccttttcccaaccccaaccgccgtatctggtggcggcaagacacacgggtctttccctctaaagcacaattgtgtgtgtgtcccaggtcctcctgcgtacggtgcgggagtgctcccacccaactgttgtaagcctgtccaacgcgtcgtcctggcaagactatgacgtcgcatgttccgctgcggatgccgaccgggtaaccggttccccagtgtgtgtagtgcgatcttccaggtcctcctggttggcgttgtccagaaactgcttcaggtaagtggggtgtgcccaatccctacaaaggttgattctttcaccaccttaggaatgctccggaggtaccccagcaacagctgggatctgaccggaggctaattgtctacgggtggtgtttcctttttcttttcacacaactctactgctgacaactcactgactatccacttgctctcttgtgcctttctgctctggttcaagttccttgattgtttttgactgcttttcactgcttttcttctcacaatccttgctcagttcaaagtc

SEQ ID NO: 3181 - DNA, 549 bp, Unknown
  Description of Unknown: CK SZ1-L1S sequence
gggggtggggggggcctcggccccctcaccctcttttccggtggccacgcccgggccaccgatacttcccttcactccttcgggactgttggggaggaacacaacagggctcccctgttttcccattccttcccccttttcccaaccccaaccgccgtatctggtggcggcaagacacacgggtctttccctctaaagcacaattgtgtgtgtgtcccaggtcctcctgcgtacggtgcgggagtgctcccacccaactgttgtaagcctgtccaacgcgtcgtcctggcaagactatgacgtcgcatgttccgctgcggatgccgaccgggtaaccggttccccagtgtgtgtagtgcgatcttccaggtcctcctggttggcgttgtccagaaactgcttcaggtaagtggggtgtgcccaatccctacaaaggttgaaccacccaggaatgccagggaggtaccccgcttcacagcgggatctgaccctgggctaattgtctacggtggttcttcttgcttccacttctttctactgttcgccacc

SEQ ID NO: 3182 - DNA, 553 bp, Unknown
  Description of Unknown: CK Aichi Scan (AV-S) sequence
gggggtggggggggcctcggccccctcaccctcttttccggtggccacgcccgggccaccgatacttcccttcactccttcgggactgttggggaggaacacaacagggctcccctgttttcccattccttcccccttttcccaaccccaaccgccgtatctggtggcggcaagacacacgggtctttccctctaaagcacaattgtgtgtgtgtcccaggtcctcctgcgtacggtgcgggagtgctcccacccaactgttgtaagcctgtccaacgcgtcgtcctggcaagactatgacgtcgcatgttccgctgcggatgccgaccgggtaaccggttccccagtgtgtgtagtgcgatcttccaggtcctcctggttggcgttgtccagaaactgcttcaggtaagtggggtgtgcccaatccctacaaaggttgattctttcaccaccttaggaatgctccggaggtaccccagcaacagctgggatctgaccggaggctaattgtctacgggtggtgtttcatttccaatccttttatgtcggagtc

SEQ ID NO: 3183 - DNA, 667 bp, Unknown
  Description of Unknown: CK Aichi Loop (AV-L1) sequence
gggggtggggggggcctcggccccctcaccctcttttccggtggccacgcccgggccaccgatacttcccttcactccttcgggactgttggggaggaacacaacagggctcccctgttttcccattccttcccccttttcccaaccccaaccgccgtatctggtggcggcaagacacacgggtctttccctctaaagcacaattgtgtgtgtgtcccaggtcctcctgcgtacggtgcgggagtgctcccacccaactgttgtaagcctgtccaacgcgtcgtcctggcaagactatgacgtcgcatgttccgctgcggatgccgaccgggtaaccggttccccagtgtgtgtagtgcgatcttccaggtcctcctggttggcgttgtccagaaactgcttcaggtaagtggggtgtgcccaatccctacaaaggttgaactgccctaggaatgccaggcaggtaccccacctccgggtgggatctgagcctgggctaattgtctacgggtagttttcctttttcttttcacacaactctactgctgacaactcactgactatccacttgctctcttgtgcctttctgctctggttcaagttccttgattgtttttgactgcttttcactgcttttcttctcacaatccttgctcagttcaaagtc

SEQ ID NO: 3184 - DNA, 693 bp, Unknown
  Description of Unknown: CK SZ1-L2 sequence
gggggtggggggggcctcggccccctcaccctcttttccggtggccacgcccgggccaccgatacttcccttcactccttcgggactgttggggaggaacacaacagggctcccctgttttcccattccttcccccttttcccaaccccaaccgccgtatctggtggcggcaagacacacgggtctttccctctaaagcacaattgtgtgtgtgtcccaggtcctcctgcgtacggtgcgggagtgctcccacccaactgttgtaagcctgtccaacgcctgatcccccgcggaagctgctcacgtggcaactgtggggacccagacaggttatcaaaggcacccggtctttccgccttcaggagtatccctgctagtgaattctagtagggctctgcttgcgttgtccagaaactgcttcaggtaagtggggtgtgcccaatccctacaaaggttgattctttcaccaccttaggaatgctccggaggtaccccagcaacagctgggatctgaccggaggctaattgtctacgggtggtgtttcctttttcttttcacacaactctactgctgacaactcactgactatccacttgctctcttgtgcctttctgctctggttcaagttccttgattgtttttgactgcttttcactgcttttcttctcacaatccttgctcagttcaaagtc

SEQ ID NO: 3185 - DNA, 671 bp, Unknown
  Description of Unknown: CK Aichi TriLoop (AV-L2) sequence
gggggtggggggggcctcggccccctcaccctcttttccggtggccacgcccgggccaccgatacttcccttcactccttcgggactgttggggaggaacacaacagggctcccctgttttcccattccttcccccttttcccaaccccaaccgccgtatctggtggcggcaagacacacgggtctttccctctaaagcacaattgtgtgtgtgtcccaggtcctcctgcgtacggtgcgggagtgctcccacccaactgttgtaagcctgtccaacgcatgtgcctggcaagcatatctgagaaggtgttccgctgtggctgccaacctggtgacaggtgccccagtgtgcgtaaccttcttccgtctccggacggtgcgttgtccagaaactgcttcaggtaagtggggtgtgcccaatccctacaaaggttgattctttcaccaccttaggaatgctccggaggtaccccagcaacagctgggatctgaccggaggctaattgtctacgggtggtgtttcctttttcttttcacacaactctactgctgacaactcactgactatccacttgctctcttgtgcctttctgctctggttcaagttccttgattgtttttgactgcttttcactgcttttcttctcacaatccttgctcagttcaaagtc

SEQ ID NO: 3186 - DNA, 523 bp, Unknown
  Description of Unknown: CK Scan Deletion (?S) sequence
gggggtggggggggcctcggccccctcaccctcttttccggtggccacgcccgggccaccgatacttcccttcactccttcgggactgttggggaggaacacaacagggctcccctgttttcccattccttcccccttttcccaaccccaaccgccgtatctggtggcggcaagacacacgggtctttccctctaaagcacaattgtgtgtgtgtcccaggtcctcctgcgtacggtgcgggagtgctcccacccaactgttgtaagcctgtccaacgcgtcgtcctggcaagactatgacgtcgcatgttccgctgcggatgccgaccgggtaaccggttccccagtgtgtgtagtgcgatcttccaggtcctcctggttggcgttgtccagaaactgcttcaggtaagtggggtgtgcccaatccctacaaaggttgattctttcaccaccttaggaatgctccggaggtaccccagcaacagctgggatctgaccggaggctaattgtctacgggtggtg

SEQ ID NO: 3187 - DNA, 592 bp, Unknown
  Description of Unknown: CK Loop Deletion (?L1) sequence
gggggtggggggggcctcggccccctcaccctcttttccggtggccacgcccgggccaccgatacttcccttcactccttcgggactgttggggaggaacacaacagggctcccctgttttcccattccttcccccttttcccaaccccaaccgccgtatctggtggcggcaagacacacgggtctttccctctaaagcacaattgtgtgtgtgtcccaggtcctcctgcgtacggtgcgggagtgctcccacccaactgttgtaagcctgtccaacgcgtcgtcctggcaagactatgacgtcgcatgttccgctgcggatgccgaccgggtaaccggttccccagtgtgtgtagtgcgatcttccaggtcctcctggttggcgttgtccagaaactgcttcaggtaagtggggtgtgcccaatccctacaaaggttgatttcctttttcttttcacacaactctactgctgacaactcactgactatccacttgctctcttgtgcctttctgctctggttcaagttccttgattgtttttgactgcttttcactgcttttcttctcacaatccttgctcagttcaaagtc

SEQ ID NO: 3188 - DNA, 572 bp, Unknown
  Description of Unknown: CK Triloop Deletion (?L2) sequence
gggggtggggggggcctcggccccctcaccctcttttccggtggccacgcccgggccaccgatacttcccttcactccttcgggactgttggggaggaacacaacagggctcccctgttttcccattccttcccccttttcccaaccccaaccgccgtatctggtggcggcaagacacacgggtctttccctctaaagcacaattgtgtgtgtgtcccaggtcctcctgcgtacggtgcgggagtgctcccacccaactgttgtaagcctgtccaacgcgcgttgtccagaaactgcttcaggtaagtggggtgtgcccaatccctacaaaggttgattctttcaccaccttaggaatgctccggaggtaccccagcaacagctgggatctgaccggaggctaattgtctacgggtggtgtttcctttttcttttcacacaactctactgctgacaactcactgactatccacttgctctcttgtgcctttctgctctggttcaagttccttgattgtttttgactgcttttcactgcttttcttctcacaatccttgctcagttcaaagtc

SEQ ID NO: 3189 - DNA, 675 bp, Caprine kobuvirus
  12Q108
gggggtggggggggcctcggccccctcaccctcttttccggtggccacgcccgggccaccgatacttcccttcactccttcgggactgttggggaggaacacaacagggctcccctgttttcccattccttcccccttttcccaaccccaaccgccgtatctggtggcggcaagacacacgggtctttccctctaaagcacaattgtgtgtgtgtcccaggtcctcctgcgtacggtgcgggagtgctcccacccaactgttgtaagcctgtccaacgcgtcgtcctggcaagactatgacgtcgcatgttccgctgcggatgccgaccgggtaaccggttccccagtgtgtgtagtgcgatcttccaggtcctcctggttggcgttgtccagaaactgcttcaggtaagtggggtgtgcccaatccctacaaaggttgattctttcaccaccttaggaatgctccggaggtaccccagcaacagctgggatctgaccggaggctaattgtctacgggtggtgtttcctttttcttttcacacaactctactgctgacaactcactgactatccacttgctctcttgtgcctttctgctctggttcaagttccttgattgtttttgactgcttttcactgcttttcttctcacaatccttgctcagttcaaagtc

SEQ ID NO: 3190 - DNA, 577 bp, Unknown
  Description of Unknown: REV A sequence
ggggtcgccgtcctacacattgttgtgacgtgcggcccagattcgaatctgtaataaaagctttttcttctatatcctcagattggcagtgagaggagattttgttcgtggtgttggctggcctactgggtggggtagggatccggactgaatccgtagtatttcggtacaacatttgggggctcgtccgggattcctccccatcggcagaggtgcctactgtttcttcgaactccggcgccggtaagtaagtacttgattttggtacctcgcgagggtttgggaggatcggagtggcgggacgctgccgggaagctccacctccgctcagcaggggacgccctggtctgagctctgtggtatctgattgttgttgaaccgtctctaagacggtgatactataagtcgtggtttgtgtgtttgtttgttaccttgtgtttgttcgtcacttgtcgacagcgccctgcgaattggtgtacccacaccgcgcggcttgcgaataatactttggagagtcttttgcctccagtgtcttccgtttgtactcgtcctcctctccctctccggccgggatggg

SEQ ID NO: 3191 - DNA, 675 bp, Orivirus sp.
ggtcccaggccaatattcttcgtaaggcttggttccaattttccaccactcgtgtttgggttctggcctatggtacccagaggggcggtttgggggaattaactccccctcccctgtggtcctataccaccccacacctctgtgggctttctttactatcttcttgttttccgacttttaaacactaggcaggcgcgcctagtcatacaccgcccggctggtctttccagctcttgtgggcggtgcgcgctggtccatcgtgcccagcgacatagcaccttgtggacacctccgaacgccctcccctgtatggggtggtgcccaggggtttcagtgtggtgacacactccctggggcccgaaaggctagtgtgcaacaggtgaggtacagccagctgcccccgtggctggagggaccaagcttgtgaagcacacctcaccttcttgggggtgggctagtaagtggtgaaagcatagtgtccgtgtcgctggccaacactttgggtcaagtccagccactcagtgagtagatgcccaggaggtacccctagtggatctgacttggggcctgttacttaatgcaggttaaaaactatgaaagctgagtagtgtagcccggctggtggcttctcttccttattcattctattttatggtgacaaacgcaactgaagcc

SEQ ID NO: 3192 - DNA, 303 bp, Chicken calicivirus
ggtgcatcatcactgaacaccctcgggcagagatgcaagggtggaagtcactcctgccccctggcaacatgcaggtgcccgatcccaagcttagttctgacttcctctcctgggtggtgcaacactccaaggttgatgaacaaacctggagggacctctgggcaacctggtctctcgaggatctccggcgcatctccacagactacctcatgctcccggaacctgagaagaacactgatgcctatgatggctggctgatggtcggcgagatgttgacctttgccggtctcattggctgggagg

SEQ ID NO: 3193 - DNA, 240 bp, Unknown
  Description of Unknown: Ia Io sequence
ggtgtccgggtgtgtgggatagacccagatgtgcagtggatgcgagcatttgagtcagagtaggagcaagcccaggggcaaagggaccacattgtgtatcccgaatgaaggatcgagatttctctcctcattacccggtgtcttgtcactgttgggggggcccaacagtcttagtcctatactgcctgatagggtcgcggctggccggactcaagtgctatagtcagttgattttcactc

SEQ ID NO: 3194 - DNA, 156 bp, Picobirnavirus sp.
gtaaattaaatgctatttacaaaatttaaacagaaaggagagatgttatgaaccggttttacaaggtttcatacatcgaaaatagcactacctggggcagccgacacactaacatcgtctgtttaaccagaagtgttactgaaaggaggttattta

SEQ ID NO: 3195 - DNA, 675 bp, Lesavirus 1
gtaactaataagcaagttttactgcctgcaaactgcttcaatgggaccaccgcttcggcgacccctttgttgagtttgtatgtttttaagtaatctttgcaaccatacgattattttagccgcctctctataatgatcttgttatagtgggacgtgaaacattggtttttctcacacacgtccggtcacccgggcgtgtgttcttccgtaagtcctatccacataccatcgtgggtaggccagcatgtttgcacaggctgtgacagtgtgggtgggctttccacctctcaacaacacactgaattgcaatgcactcacggaggaaatgacaatttggttatagttttgaactgtgctagtaatttctttcacattaagccatgttgcctgcggaatcacatgtggtaacacatgcctcagggcccaaaaggcacgggttagcagccccttcatggtgtgttagaagtgaaaacacatagtatgagctataatatctttgttgtcttctctgtagtgtaccccgccaaatgtaaggatgcccagcaggtacccattttatggatctgagctggggattgatagtgtatctataaatgcactgatcaatttaaaaagcgtctaagtttggcacaaacactggggacagtgtttttcctttattcttttatttgatta

SEQ ID NO: 3196 - DNA, 675 bp, Goat torovirus
gtacttacaagcgggttaaaccgccctccggaacggttacaaccccctcccgaacgtgcgcttgacgtgactggttctcagtctggctttctgagaaatactccagggttgtatcccaccatcttgacctctggtcattttggtaacaccataaccaaacaaactctacacacctaacccacctccagcttgctgcaggccttttggactaaacgggtttaggtgttttgtgaccaactcgtctacccacctccagttttactgcaggcctttttggactaaacggctttagacttttgtggttagtttttaactacccactgtttagccgccaacctgattttcattgttgtaaaattttgtgtttatacactattttcatacggttggcagtttgtttggttgtttgcacagtttttgttgataccaatttttactgtgcttttagtgtattctgctaaggctgtattttacatacttagtttggttgaagcaatttttacaacatttatattgtttttgatttctaaggtaaagagtcttaggaaacaccatagacgccattcttgtggtgtctagttccaactaatctggcaaacaagtaccaagtcattgactcactttggagtgagacttacgagtaccaatttgcctatttcggacatccatataaag

SEQ ID NO: 3197 - DNA, 373 bp, Classical swine fever virus
gtatacgaggttagttcattctcgtatgcatgattggacaaattaaaatttcaatttggatcagggcctccctccagcgacggccgaactgggctagccatgcccacagtaggactagcaaacggagggactagccgtagtggcgagctccctgggtggtctaagtcctgagtacaggacagtcgtcagtagttcgacgtgagcagaagcccacctcgatatgctatgtggacgagggcatgcccaagacacaccttaaccctagcgggggtcgctagggtgaaatcacaccacgtgatgggagtacgacctgatagggtgctgcagaggcccactattaggctagtataaaaatctctgctgtacatggcac

SEQ ID NO: 3198 - DNA, 373 bp, Classical swine fever virus
  PK15C
gtatacgaggttagttcattctcgtatgcattattggacaaatcaaaatttcaatttggttcagggcctccctccagcgacggccgaactgggctagccatgcccatagtaggactagcaaacggagggactagccgtagtggcgagctccctgggtgttctaagtcctgagtacaggacagtcgtcagtagttcgacgtgagcagaagcccacctcgagatgctatgtggacgagggcatgcccaagacgcaccttaaccctagcgggggtcgctagggtgaaatcacaccacgtgatgggagtccgacctgatagggtgctgcagaggctcactattaggctagtataaaaatctctgctgtacatggcac

SEQ ID NO: 3199 - DNA, 210 bp, Bat dicibavirus
gtatagcaccggaatggtattttactactccaagtatacgtactaggagttaaaccctgtaatttacaggggatttagtgacttttatccgtaaaagtcgattggacgttaatcggtaacgaggccaagtaccgtgaaccaatttaaaaacgtattttctcatgtggtagaaccaacttggaaatagcatggcatataggttgtttaggg

SEQ ID NO: 3200 - DNA, 504 bp, Rosavirus B
gtctctttagtgtctatgcttcagagagcggtgaactgacaccgttgcttcttgcacagcccttcgtgccggtctttccggttctcgacagcgttgggcatcatggctagttaggctaagatagtggatgatctagtgaacagttttggattgtttggagttttgtagcgatgctagtagtgtgtgtggacctccccacgtggtaacacgtgccccacaggccaaaagccaaggtgttgaaagcacccctactagtcccagactcacccatctgggaactcctctcatgaaaaatcttagtaacttttgattcggctattcatcaacctctctagtcaagggctgaaggatgcccggaaggtacccgcaggtaacgataagctcactgtggatctgatccggggctttggtgcgaccgtctgtccggcgtagccagagttaaaaaacgtctaggcccttccaccccaagggattggggtttccccaatcatttgaaagttcact

SEQ ID NO: 3201 - DNA, 675 bp, Encephalomyocarditis virus 1
  JZ1203
gtctgctcgatatcgcaggctgggtccgtgactacccactccccctttcaacgtgaaggctacgatagtgccagggcgggtactgccgtaagtgccaccccaaaacaacaacaaaccccccctaacattactggccgacgccgcttggaataaggccggtgtgcgtttgtctatatgttatttcccaccacattgccgtcttttggcaatgtgtgggcccggaaacctggccctgtcttcttgacgagcattcctaggggtctttcccctctcgccaaaggaatgcaaggtctgttgaatgtcgtgaaggaagcagttcctctggaagcttcttgaagacaaacaacgtctgtagcggccctttgcaggcagcggaaccccccacctggcgacaggtgcctctgcggccaaaagccacgtgtataagatacacctgcaaaggcggcacaaccccagtgccacgttgtgagttggatagttgtggaaagagtcaaatggctctcctcaagcgtattcaacaaggggctgaaggatgcccagaaggtaccccattgtatgggatctgatctggggcctcggtgcacatgctttacatgtgtttagtcgaggttaaaaaacgtctaggccccccgaaccacggggacgtggttttcctttgaaaaacacgatgataat

SEQ ID NO: 3202 - DNA, 182 bp, Human Cosavirus F
gtcttaggacgacgcatgtggtatcccagcccccgcctacattggcgggggcttttgaagcaccagacactggatctgatcaggaggagggtagctgctttacagcccctcttaaaaattgcccaaggtccggccacccaacctaggggactaggttttccttttatttttaaattgtcatt

SEQ ID NO: 3203 - DNA, 282 bp, Hubei zhaovirus-like virus 1
gtgcaggatggcctttcccatcttaagtggtttgtaggatttcgtgggtccataccccccgatttcttggtacgtattccatgcacggagaatacgaccaaaactcttatttcaaaaaatattattttttactcttgtgggctgagtgcgacccaccagttccagcttagcaacctggaagttgttggagatttatggaaccaaattacacatgcgtggagtgccgccactccgtatctgttcactcattacgcgattaagttctgcgacgagacgagcgaa

SEQ ID NO: 3204 - DNA, 628 bp, Saffold virus
  5?93
gtgctatcatgcctccccgattatgtgatgttttctgccctgctgggcggagcattctcgggttgagaaaccttgaatctttttctttggaaccttggttcccccggtctaagccgcttggaatatgacagggttattttcttgatcttatttctacttttgcgggttctatccgtaaaaagggtacgtgctgccccttccttctctggagaattcacacggcggtctttccgtctctcaacaagtgtgaatgcagcatgccggaaacggtgaagaaaacagttttctgtggaaatttagagtgcacatcgaaacagctgtagcgacctcacagtagcagcggactcccctcttggcgacaagagcctctgcggccaaaagccccgtggataagatccactgctgtgagcggtgcaaccccagcaccctggttcgatgatcattctctatggaaccagaaaatggttttctcaagccctccggtagagaagccaagaatgtcctgaaggtaccccgcgtgcgggatctgatcaggagaccaattggcggtgctttacactgtcactttggtttaaaaattgtcacagcttctccaaaccaagtggtcttggttttccaattttgttga

SEQ ID NO: 3205 - DNA, 549 bp, Unknown
  Description of Unknown: CK1.0 sequence
gtggccacgcccgggccaccgatacttcccttcactccttcgggactgttggggaggaacacaacagggctcccctgttttcccattccttcccccttttcccaaccccaaccgccgtatctggtggcggcaagacacacgggtctttccctctaaagcacaattgtgtgtgtgtcccaggtcctcctgcgtacggtgcgggagtgctcccacccaactgttgtaagcctgtccaacgcgtcgtcctggcaagactatgacgtcgcatgttccgctgcggatgccgaccgggtaaccggttccccagtgtgtgtagtgcgatcttccaggtcctcctggttggcgttgtccagaaactgcttcaggtaagtggggtgtgcccaatccctacaaaggttgattctttcaccaccttaggaatgctccggaggtaccccagcaacagctgggatctgaccggaggctaattgtctacgggtggtgtttcctttttcttttcacacaactctactgctgacaactcactgactatccacttgctctgtcacg

SEQ ID NO: 3206 - DNA, 635 bp, Caprine kobuvirus
  5?40
gtggccacgcccgggccaccgatacttcccttcactccttcgggactgttggggaggaacacaacagggctcccctgttttcccattccttcccccttttcccaaccccaaccgccgtatctggtggcggcaagacacacgggtctttccctctaaagcacaattgtgtgtgtgtcccaggtcctcctgcgtacggtgcgggagtgctcccacccaactgttgtaagcctgtccaacgcgtcgtcctggcaagactatgacgtcgcatgttccgctgcggatgccgaccgggtaaccggttccccagtgtgtgtagtgcgatcttccaggtcctcctggttggcgttgtccagaaactgcttcaggtaagtggggtgtgcccaatccctacaaaggttgattctttcaccaccttaggaatgctccggaggtaccccagcaacagctgggatctgaccggaggctaattgtctacgggtggtgtttcctttttcttttcacacaactctactgctgacaactcactgactatccacttgctctcttgtgcctttctgctctggttcaagttccttgattgtttttgactgcttttcactgcttttcttctcacaatccttgctcagttcaaagtc

SEQ ID NO: 3207 - DNA, 513 bp, Caprine kobuvirus
  5?40/3?122
gtggccacgcccgggccaccgatacttcccttcactccttcgggactgttggggaggaacacaacagggctcccctgttttcccattccttcccccttttcccaaccccaaccgccgtatctggtggcggcaagacacacgggtctttccctctaaagcacaattgtgtgtgtgtcccaggtcctcctgcgtacggtgcgggagtgctcccacccaactgttgtaagcctgtccaacgcgtcgtcctggcaagactatgacgtcgcatgttccgctgcggatgccgaccgggtaaccggttccccagtgtgtgtagtgcgatcttccaggtcctcctggttggcgttgtccagaaactgcttcaggtaagtggggtgtgcccaatccctacaaaggttgattctttcaccaccttaggaatgctccggaggtaccccagcaacagctgggatctgaccggaggctaattgtctacgggtggtgtttcctttttcttttcacacaactaaagtc

SEQ ID NO: 3208 - DNA, 549 bp, Caprine kobuvirus
  5?40/3?86_Distal
gtggccacgcccgggccaccgatacttcccttcactccttcgggactgttggggaggaacacaacagggctcccctgttttcccattccttcccccttttcccaaccccaaccgccgtatctggtggcggcaagacacacgggtctttccctctaaagcacaattgtgtgtgtgtcccaggtcctcctgcgtacggtgcgggagtgctcccacccaactgttgtaagcctgtccaacgcgtcgtcctggcaagactatgacgtcgcatgttccgctgcggatgccgaccgggtaaccggttccccagtgtgtgtagtgcgatcttccaggtcctcctggttggcgttgtccagaaactgcttcaggtaagtggggtgtgcccaatccctacaaaggttgattctttcaccaccttaggaatgctccggaggtaccccagcaacagctgggatctgaccggaggctaattgtctacgggtggtgtttcctttttcttttcacacaactctactgctgacaactcactgactatccacttgctctaaagtc

SEQ ID NO: 3209 - DNA, 513 bp, Caprine kobuvirus
  5?40/3? 122_Kozak
gtggccacgcccgggccaccgatacttcccttcactccttcgggactgttggggaggaacacaacagggctcccctgttttcccattccttcccccttttcccaaccccaaccgccgtatctggtggcggcaagacacacgggtctttccctctaaagcacaattgtgtgtgtgtcccaggtcctcctgcgtacggtgcgggagtgctcccacccaactgttgtaagcctgtccaacgcgtcgtcctggcaagactatgacgtcgcatgttccgctgcggatgccgaccgggtaaccggttccccagtgtgtgtagtgcgatcttccaggtcctcctggttggcgttgtccagaaactgcttcaggtaagtggggtgtgcccaatccctacaaaggttgattctttcaccaccttaggaatgctccggaggtaccccagcaacagctgggatctgaccggaggctaattgtctacgggtggtgtttcctttttcttttcacacaactgccacc

SEQ ID NO: 3210 - DNA, 549 bp, Caprine kobuvirus
  5?40/3?86 Proximal
gtggccacgcccgggccaccgatacttcccttcactccttcgggactgttggggaggaacacaacagggctcccctgttttcccattccttcccccttttcccaaccccaaccgccgtatctggtggcggcaagacacacgggtctttccctctaaagcacaattgtgtgtgtgtcccaggtcctcctgcgtacggtgcgggagtgctcccacccaactgttgtaagcctgtccaacgcgtcgtcctggcaagactatgacgtcgcatgttccgctgcggatgccgaccgggtaaccggttccccagtgtgtgtagtgcgatcttccaggtcctcctggttggcgttgtccagaaactgcttcaggtaagtggggtgtgcccaatccctacaaaggttgattctttcaccaccttaggaatgctccggaggtaccccagcaacagctgggatctgaccggaggctaattgtctacgggtggtgtttcctttttcttttcacacaactttcactgcttttcttctcacaatccttgctcagttcaaagtc

SEQ ID NO: 3211 - DNA, 549 bp, Unknown
  Description of Unknown: GLuc CK dCTG1 sequence
gtggccacgcccgggccaccgatacttcccttcactccttcgggactgttggggaggaacacaacagggctcccctgttttcccattccttcccccttttcccaaccccaaccgccgtatctggtggcggcaagacacacgggtctttccctctaaagcacaattgtgtgtgtgtcccaggtcctcctgcgtacggtgcgggagtgctcccacccaactgttgtaagcctgtccaacgcgtcgtcctggcaagactatgacgtcgcatgttccgctgcggatgccgaccgggtaaccggttccccagtgtgtgtagtgcgatcttccaggtcctcctggttggcgttgtccagaaactgcttcaggtaagtggggtgtgcccaatccctacaaaggttgattctttcaccaccttaggaatgctccggaggtaccccagcaacagctgggatctgaccggaggctaattgtctacgggtggtgtttcctttttcttttcacacaactctacgtctgacaactcactgactatccacttgctctaaagtc

SEQ ID NO: 3212 - DNA, 549 bp, Unknown
  Description of Unknown: GLuc CK dCTG1_2 sequence
gtggccacgcccgggccaccgatacttcccttcactccttcgggactgttggggaggaacacaacagggctcccctgttttcccattccttcccccttttcccaaccccaaccgccgtatctggtggcggcaagacacacgggtctttccctctaaagcacaattgtgtgtgtgtcccaggtcctcctgcgtacggtgcgggagtgctcccacccaactgttgtaagcctgtccaacgcgtcgtcctggcaagactatgacgtcgcatgttccgctgcggatgccgaccgggtaaccggttccccagtgtgtgtagtgcgatcttccaggtcctcctggttggcgttgtccagaaactgcttcaggtaagtggggtgtgcccaatccctacaaaggttgattctttcaccaccttaggaatgctccggaggtaccccagcaacagctgggatctgaccggaggctaattgtctacgggtggtgtttcctttttcttttcacacaactctacgtcgtacaactcactgactatccacttgctctaaagtc

SEQ ID NO: 3213 - DNA, 549 bp, Unknown
  Description of Unknown: GLuc CK dCTG1_2_3 sequence
gtggccacgcccgggccaccgatacttcccttcactccttcgggactgttggggaggaacacaacagggctcccctgttttcccattccttcccccttttcccaaccccaaccgccgtatctggtggcggcaagacacacgggtctttccctctaaagcacaattgtgtgtgtgtcccaggtcctcctgcgtacggtgcgggagtgctcccacccaactgttgtaagcctgtccaacgcgtcgtcctggcaagactatgacgtcgcatgttccgctgcggatgccgaccgggtaaccggttccccagtgtgtgtagtgcgatcttccaggtcctcctggttggcgttgtccagaaactgcttcaggtaagtggggtgtgcccaatccctacaaaggttgattctttcaccaccttaggaatgctccggaggtaccccagcaacagctgggatctgaccggaggctaattgtctacgggtggtgtttcctttttcttttcacacaactctacgtcgtacaactcacgtactatccacttgctctaaagtc

SEQ ID NO: 3214 - DNA, 549 bp, Unknown
  Description of Unknown: GLuc CK dAll sequence
gtggccacgcccgggccaccgatacttcccttcactccttcgggactgttggggaggaacacaacagggctcccctgttttcccattccttcccccttttcccaaccccaaccgccgtatctggtggcggcaagacacacgggtctttccctctaaagcacaattgtgtgtgtgtcccaggtcctcctgcgtacggtgcgggagtgctcccacccaactgttgtaagcctgtccaacgcgtcgtcctggcaagactatgacgtcgcatgttccgctgcggatgccgaccgggtaaccggttccccagtgtgtgtagtgcgatcttccaggtcctcctggttggcgttgtccagaaactgcttcaggtaagtggggtgtgcccaatccctacaaaggttgattctttcaccaccttaggaatgctccggaggtaccccagcaacagctgggatctgaccggaggctaattgtctacgggtggtgtttcctttttcttttcacacaactctacgtcgtacaactcacgtactactcactgtctctaaagtc

SEQ ID NO: 3215 - DNA, 635 bp, Caprine kobuvirus; identical to SEQ ID NO: 3206
  d40

SEQ ID NO: 3216 - DNA, 675 bp, Chicken picornavirus 1
gtggccgacttgcagaacttcctaccgaaccaccacctcacccccataactccttccctctacaccttccgctatggtggttaccactgctttattgccttgactgagaatggccaccccctcgacacctgccccctactgccccaccgcgcaaccttttgcttgtccactcggttggagaggcatgggggccccgttcatatccccagtccagttggtgaccttccccctccccgtccggtagatggtccagagggctttgccgacgccctctatgatgcttgcttgtctttcctccgtcagcgcgagcatgcacttgtcgagcccacggaaacacagcctagcttttgcttctctcaccctgcgtaccctgggcgccttccgctcgagattcgctttgttcgacaccctggcgtccccccaccgctacgtgattttactcgtggcatacaccgccctggcgttcagtacattccactgcctaatttgggtggcctccctcaatctcccgcaccccccattgcgcacgtcatcaccgccgccgctaacgcgatccggcgcggttctcactggcactgtcccctcgtccgccgggtttccactcatggttggcttttcacttattctggttactggtgttccatcctacttcatgatggtcgccatgaccatgac

SEQ ID NO: 3217 - DNA, 675 bp, Miniopterus schreibersii picornavirus 1
gttgtcgacccgttgcttggtttaagcatgaggtggattcccccgattatgtctacccgttactatggcgggcggtcgtttcagggtgtttctactgaggactgcaccaagtctttatcttttattctcagatctccggctgtttgacgcttgtaggacagcaggactattttctcttaatctttttctacccactagggtcctatcctagtggagggagggtgccaccccttctctctttagagagtgcgcctggcggtctttccgtctctggaaaaaggagcacatggcatgctacaattggcacaagaaaacaagctttgcggattctttctttgtactagaggaagctgtagcgaccctgtatggcgagcggactcccctctcggcgacgagagcctctcgggccaaaagccaagtgttaatagcacccatacaggcggcagtaccccactgccctttctcaacatacaatgactgatgaaccactgttggtttttctgacacctttgtagtaggattccaaggaatgtcctgaaggtaccctgttagcttacgcgcaggatctgatcaggagtctctttacagtgctgtacactgtgcaagggattaaaaattgtttgaggaatccccgagatagtggtctatctcttcctattttgttttacagacacg

SEQ ID NO: 3218 - DNA, 501 bp, Limnipivirus C
gtttctgagcactggtaagagcttagacaaacgtttttaaaatttattttctctgcaacttttgtttgtgtttatttttatttgttaattttgcgcctaagcatttgttgcgaagtatttgattcattagtaatattacttattgtttatttagatggtattcaaagtggtgggagtatcgaacccaagcgtcgtatgctatctccttgaacaatttttaatcattgcgaagtgatcattgaaaaggataggtgtttaagaactcaaagagtgttaataatgttgggtgacaggtgtccccatagaatttattaacatgatttggactggttatctagtaagaagaaccatcgaacgcacgagcgagcattgcttgcggggcagttaccctgcgtcgatgtaagtgtgtaccggggggtgcacatgttgattctttatggcctgatagggtgcgtcattcgcgcctagataattagtataatgcgaatggaataaatttac

SEQ ID NO: 3219 - DNA, 675 bp, Hunnivirus A1
taacgtttggcaagaaccctcacctgtcaattgggaccaccactttcagtgaccccatgcgaagtagtgagagagaataagctttcttacccttcatttgtgaacccttcagtcgaagccgcttggaataagataggaggaaaagttcattctaaatggagtgaaacatgtacttcagaatttctagcacgcgctgggctttcttgcgtgtgacggcactgtcttgccggagctctccacactgacaccccacgcttgtggaccttggtggcagatgacaacactgcagctggaattgagtgtctggtacactctgtgtaacagtgaaaacaatgtgatcacttcggtgagctagtagcctgtggaccaacaactggtaacagttgcctcaggggccaaaagccacggtgtttacagcaccctactggtttgattggagcaatccaagatgtcacagagttagtaattgccaagcagtccgtactggtatcttgacataccgtgcagttttggatagtgaaggatgccctgacggtacccataggtaacaagtgacactatggatctaagcaggggctcactctacgctgctttacagctggctgtgagttaaaaaacgtctagctatccacaacctaggggactaggttttccttttatttagattacaattat

SEQ ID NO: 3220 - DNA, 675 bp, Enterovirus AN12
taccgctgcaccagtgagctggtacgctagtaccttcgcacggagtagatggcatcccccaccccgtaacttagaagcaaagtacacatctggccaatagtggcgctgcatccagccgcgcaacggtcaagcacttctgtttccccggtccgcaagggtcgttatccgcccagtccactacggaaagcctactaaccattgaagctatcgagaggttgcgctcggccacgaccccggtggtagctctgagtgatggggctcgcaaacacccccgtggtaacacggatgcttgcccgcgcgtgcactcgggttcagcctattggttgttcacctcaacatagtgtaaatggccaagagcctactgtgctggattggttttcctccggagccgtgaatgctgctaatcccaacctccgagcgtgtgcgcacaatccagtgttgctacgtcgtaacgcgtaagttggaggcggaacagactactttcggtactccgtgtttcttttgttttattttgaattttatggtgacaattgctgagatttgcgaattagcgactctaccgctgaacattgccctgtactacctaatcgcatttcacaaaacctcagagataccaagctcttacattgatctgcttgttttcctgaatctcaaatataaattggaacaagcaaa

SEQ ID NO: 3221 - DNA, 675 bp, Unknown
  Description of Unknown: PV3 sequence
tacctttgtacgcctgttttatactccctcccccgcaacttagaagcatacaattcaagctcaataggagggggtgcaagccagcgcctccgtgggcaagcactactgtttccccggtgaggccgcatagactgttcccacggttgaaagtggccgatccgttatccgctcatgtacttcgagaagcctagtatcgctctggaatcttcgacgcgttgcgctcagcactcaaccccggagtgtagcttgggccgatgagtctggacagtccccactggcgacagtggtccaggctgcgctggcggcccacctgtggcccaaagccacgggacgctagttgtgaacagggtgtgaagagcctattgagctacatgagagtcctccggcccctgaatgcggctaatcctaaccatggagcaggcagctgcaacccagcagccagcctgtcgtaacgcgcaagtccgtggcggaaccgactactttgggtgtccgtgtttccttttattcttgaatggctgcttatggtgacaatcatagattgttatcataaagcgagttggattggccatccagtgtgaatcagattaattactcccttgtttgttggatccactcccgaaacgttttactccttaacttattgaaattgtttgaagacaggatttcagtgtcaca

SEQ ID NO: 3222 - DNA, 675 bp, Boone cardiovirus 1
tacgatcgctgtacattccactactgccaattagctcccccttcccgttgctcccctctataaggagagccttctcttgcaaaggtgaagccttcacccccggtcgaagccgcttggaataagacagggttattttctcctctcctcggcgcttgcctcttctaagctgaataggttctatctattcaggcggatggtctggtccgttccttcttggacagagtgtgtatctgggttttccggatctcgaccacacactcaccagagctcaggagtgattaagtcaaggcccgatctgcggcgaaaaggaaatgaagtattttgcagctgtagcgacctctcaaggccagcggatttccccacctggtgacaggtgcctctggggccaaaagccacgtgttaatagcacccttgagagcggtggtaccccaccaccctgcaaattatggatttgacttagtaactaaaagattgacttggcatacctcaacctgagcggcggctaaggatgccctgaaggtacccgtgttgaaatcgcttcggcgaccatggatctgatcaggggccctgcctggagtggttctatcccacacagcgtagggttaaaaaacgtctaaccgccccacaaagaccccggcagggatgccggtttcctttttaccaattcttgacact

SEQ ID NO: 3223 - DNA, 457 bp, Porcine sapelovirus
  JD2011
tacgcatgtattccacactcatttcccccctccacccttaaggtggttgtatccccataccttaccctcccttccacaatggacggacaaatggatttgacctcacggcaaacacatatggtatgatttcggatacaccttaacggcagtagcgtggcgagctatggaaaaatcgcaattgtcgatagccatgttagtgacgcgcttcggcgtgctcctttggtgattcggcgactggttacaggagagtaggcagtgagctatgggcaaacctctacagtattacttagagggaatgtgcaattgagacttgacgagcgtctcctcggagatgtggcgcatgctcttggcattaccatagtgagcttccaggttgggaaacctggactgggcctatactacctgatagggtcgcggctggccgcctgtaactagtatagtcagttgaaaccccccc

SEQ ID NO: 3224 - DNA, 608 bp, Kashmir bee virus
tacgtacaattttgacgcttcgttcatgcaacaatgaactcacatgtggcgctcggtagtaaccagaggggcgtcattcccccgtatggagtggagaatataagctaccgactcgagctgtagaataattcagcaacttataacgaacacgaattttagtcgacgaaaccattttagcctttaattctatgatttgattataatgataaacagctcatgtaactgtctaaactacataaatacaactggattacgaacctttaagtaactatcttagatgaagtctagtagtctcccaatatttccgtgaaaagaatgagggacgagatagctctatttaaagacgtgaggctttaaattctgataaatacattacctgagaattcctcctttaggagttagaatttgaaaagattagtacctatacttaatagaatttaaatatgttaataatgctgaagacaagtatttcgattattaacctctatatttctatataaagtatctgtgagtctcagtggacatcacagtaaggtcgcagttaacttgtaatcttttcattcctgtgtcggagcagtggtaatggagccggacgatttcgccaaaac

SEQ ID NO: 3225 - DNA, 675 bp, Unknown
  Description of Unknown: Aichivirus rat08 sequence
tactccattcagcttcttcggaacctgttcggaggaattaaacgggcacccactttcctgtcctctccccttttctgtaactccaagtgtgtgctcgtaatcttgactcccgcggattgaccgctccgctggtgaacaaactgctaggtcatctcctccccacccttgggcgtccttccgggcgtccacaccctccccccagcctgacgtgtcacaggctgtacaaagaccccgcgaaagctgctaacgtggcaattgtgggtcccccctttgtaaaggaaccgagtctttctcccttaaggctagacccctgtgtgaattcacaggtggcaactagtggttccactgcatgctcccgacctcggccgcggagtgctgttccccaagtcgtaacactgaccttcacttatgtgcctggcaagcatatctgagaagatgttccgctgtggctgccaaacctggtaacaggtgccccagtgtgcgtagtcttcttccgtcttcggacggtaggtgttaggtaaagatgcggcgtaaggttcaagtgccaacgccctggaagggatgacccttctactgccctaggaatgccgcgcaggtaccccaggttcgcctgggatctgagcgcgggctaattgtctacgggtagtttcatttccctcttcttccactggcatc

SEQ ID NO: 3226 - DNA, 675 bp, Unknown
  Description of Unknown: Aichivirus DV sequence
tactccattcagcttcttcggaacctgttcggaggaattaaacgggcacccatacacccccacccccttttctgcaacttaagtatgtgtgctcgtaatcttgactcccacggaacggatcgatccgctggagaacaaactgctagatccacatcctcccttcccctgggaggaccccggtcctcccacatcctccccccagcctgacgtaacacaggctgtgtgaagtccccgcgaaagctgctcacgtggcaattgtgggtccccccttcaccaagacaccaggtctttcctccttaaggctagccccgatgtgtgaattcacattgggcaactagtggtgtcactgtgcgctcccaatctcggccgcggagtgctgttccccaagccaaacccctggcccttcactatgtgcctggcaagcatatctgagaaggtgttccgctgtggctgccagcctggtaacaggtgccccagtgtgcgtaaccttcttccgtctccggacggtagtgattggttaagatttggtgtaaggttcatgtgccaacgccctgtgcgggatgaaacctctactgccctaggaatgccaggcaggtaccccaccttcgggtgggatctgagcctgggctaattgtctacgggtagtttcatttccaattcttttatgtcggagtc

SEQ ID NO: 3227 - DNA, 675 bp, Unknown
  Description of Unknown: Aichivirus DVI2169 sequence
tactccattcagcttcttcggaacctgttcggaggaattaaacgggcacccatacacccccacccccttttctgcaacttaagtatgtgtgctcgtaatcttgactcccacggaatggatcgatccgctggagaacaaactgctagatccacatcctcccttcccctgggaggaccccggtcctcccacatcctccccccagcctgacgtatcacaggctgtgtgaagtccccgcgaaagctgctcacgtggcaattgtgggtccccccttcatcaagacaccaggtctttcctccttaaggctagccccgatgtgtgaattcacattgggcaactagtggtgtcactgtgcgctcccaatctcggccgcggagtgctgttccccaagccaaacccctggcccttcactatgtgcctggcaagcatatctgagaaggtgttccgctgtggctgccagcctggtaacaggtgccccagtgtgcgtaaccttcttccgtctccggacggtagtgattggttaagatttggtgtaaggttcatgtgccaacgccctgtgcgggatgaaacctctactgccctaggaatgccaggcaggtaccccaccttcgggtgggatctgagcctgggctaattgtctacgggtagtttcatttccaattcttttatgtcggagtc

SEQ ID NO: 3228 - DNA, 675 bp, Unknown
  Description of Unknown: Aichivirus KVGH sequence
tactccattcagcttcttcggaacctgttcggaggaattaaacgggcacccatactcccccccaccccccttttgtaactaagtatgtgtgctcgtgaccttgactcccacggaacggaccgatccgttggtgaacaaacagctaggtccacatcctcctttcccctgggagggtccccgccctcccacatcccccccccagcctgacgtgtcacaggctgtgtgaagcccccgcgaaagctgctcacgtggcaattgtgggtccccccttcatcaagacaccaggtctttcctccttaaggctagccccggcgtgtgaactcacgttgggcaactagtggtgtcactgtgcgctcccaatctcggccgcggagtgctgttccccaagccaaacccctggcccttcactatgtgcctggcaagcacacctgagaaggtgttccgctgtggctgccagcctggtaacaggtgccccagtgtgcgtaaccttcttccgtcttcggacggtggtgattggttaagatttggtgtaaggttcatgtgccaacgccctgtgcgggatgaaacctctactgccctaggaatgccaggcaggtaccccaccttcgggtgggatctgagcctgggctaattgtctacgggtggtttcatttccaattctttcatgtcggagtc

SEQ ID NO: 3229 - DNA, 497 bp, Unknown
  Description of Unknown: Ludopivirus sequence
tagacccccacctagcccttttccccgtcagtggggggcttactcactgggcatctgttaatctggcctaactagattgacaccactcccttggaacgtaactccacgctaactcactggctctacgcacagacacacggtctttctgctatccccggggaagataccagatggcgaccggctgtcccagcggcctagtagctactcgggttgagtacccaccacggttttgacgcctgctaaaattcaagagacagaggtaggggtgcttagtgtgtgggggaagttcccacaagcgaggcaaagcattgctccctcgcgtcaccgggtgcaaggtaaattggctggacttccgctctacccttgctactcgccctcttcggagggttcgaagtgacactaggtatacgcatggttgggaaaccatgcctggcctactactgggtgatagcctggcggcgggtccgtctcttggcttatacccgttgatttgggat

SEQ ID NO: 3230 - DNA, 675 bp, Unknown
  Description of Unknown: Kagoshima-2-24-KoV sequence
tatagtttgcctgtttctcgcaccgttaccgctcgttcgggaatgtgaaactggcacccctcctctcccctaccaccctttctccttcgcccccattcataatttacaacgccgcacacagcggcggccgccaagggctagcctggcggttataaaaggaacctgggtctttccctcttcaagccaaaaggtaggttccctgtgtccctgaatgctcggtgaggaatgctgcaccgtaacgctttgtgaagtgtttgcaagttctggcccggcaagcctacagagtgctgtgatccgctgcggacgccatcctggtaacaggacccccagtgtgcgcaacagtatgttcagacttcggtttgttcacttgctttcatggaccattgcgcgaaagtgcgtgcgccatatccctgtacttcaggtgtgcttctctggaccctaggaatgctgcgaaggtaccccgtttcggcgggatctgatcgcaggctaattgtctatgggttcagtttcctttttctttactccacaattgactgcttaactgactctggatcttgtgcttccactgctctttctgctctcaaaacggcttcacttaccaactctcacctttcgaccaacaccatttacacactaacttttttcgactcttctgactcctggcttggtgaagac

SEQ ID NO: 3231 - DNA, 709 bp, Unknown; identical to SEQ ID NO: 1360
  Description of Unknown: Salivirus NG-J1 sequence

SEQ ID NO: 3232 - DNA, 708 bp, Unknown; identical to SEQ ID NO: 1365
  Description of Unknown: Salivirus A BN2 sequence

SEQ ID NO: 3233 - DNA, 699 bp, Unknown; identical to SEQ ID NO: 1359
  Description of Unknown: Salivirus A GUT sequence

SEQ ID NO: 3234 - DNA, 675 bp, Mobovirus A
tattctcccacaaaccttcttgtaactctgttaagccttttacatccatgtaatttaattttctccacctaaaaggatttcccccatggtcctttttggctcgaacaaatgctacatagggtcttgttttctccccctggctctcttgccagggttccataccccaattcctctatttccatgatttttcatcatggtttatttttactgtcttcttattttctgaggtgaccaactcctaagccgactgggtcgcggaagcccggactcctcgcatcactagggtgcgtagcgatgtaggcgaaaatattggttgctagatgcatacatatagtgaattgatactacaccaaactctgttctttttgaaactagctattttctaagtaaggtaggctacgggtgaaaccttaccattgcaggtacgtgaaccgcaacggacatttggccgaagactggtgtacccacgtcagttataggacctcttcaacgttggtggacggcatgtcactgattagttaggctagtgaatttaagttcagggggtatcttttagcttaagcgtgtattctagtaggacttgcagagcctccccacctaggaggatctctgtttatagccccttttccttgttccgttagttttccacacttttacaatatttgatgatttgtt

SEQ ID NO: 3235 - DNA, 214 bp, Forest pouched giant rat arterivirus
tattggatccgcctccgggcaaaggttactttcttgtacctcggcttagccacagggtgaccccttgtacgtaggggccccgacgtagcactggtctgacaacaccttctcggcatttcaccttctgcccgctcttccgggcggtggtgtcaagaagcagcagtgctcttctcttttcttcctgcagttcaccgagccctacggggggtaggtg

SEQ ID NO: 3236 - DNA, 591 bp, Sakobuvirus A
  FFUP1 (1x mut)
tcacgcgcttttccggtggtcacccaccgttagggagcgccagcgttcgcgcttccgctaccaggtgacacactcctttcccctcccccattcccgttcccatcctctggactggtttctcctcacgattgaccagcagctgggagctgttaccagacgttggacagtaagtcccggatgcactatagggctggtggctagtgcttggtaagcactcaacgccatacctaatgtgtacctcggcttgccctcctggtcgtggtgaccggctgtttctcttcccttggctccagacgggctggtgtcctaccaccaccgttgcatgcagacctccccctgcgcactcgaacgccctgtcccagcagggttagtatgtgctgtgcagatctgcatgtgacaccccatccactggtagagcaggaagttgccctagctaacgcggcaagtattactttccgctacacgtccttgagattcctcggacctctggaactagggtgactgtgggcttgggaaaacccaccttggtcctgtactgcctgatagggtcgcggctggccgaccagtggatgtagccagttgttttgggat

SEQ ID NO: 3237 - DNA, 675 bp, Unknown
  Description of Unknown: EV K sequence
tcagcctgacgcaagtgcctccattggagtctctccaagccctccggggcttggagggcgccgaccccctgcctagggggagcccacgacacggctggagtccattggcacaccgcagccacgattcaagccagaattgaaagcgggaagcacttctgtctccccggtgtggatcatacgctgtacccacggcgaaaagtgaagcatcgttacccgactcggtacttcgagaagcccagtacagttgtggatctctgcagggtatacgctcagcgtgacccctacgtagttccttgagatggctgagagaacaccccacgggcgaccgtgtctctcggcgcgtggctcaaggccgggccttcagtggctcggtgccttgcagagtgaagcctccgaacagcctattgagctaccgtttagcctccgccctcttgaatgcggctaatcctaaccatggagcgcccgcccacagtccagtgggtagagcgtcgtaacgcgcaagtccgtggcggaaccgactactttagagtggcgtgtttccaatttatcctttataaagttgcttatggtgacaccacaagagatccacgatttcttgtttcttatcactgagacacaagtcatattcatcaatctttattgcggaattaacttggtgcgtccaaacacatcagc

SEQ ID NO: 3238 - DNA, 222 bp, Human pegivirus
  isolate JD2B1I
tcagggttggtaggtcgtaaatcccggtcaccttggtagccactataggtgggtcttaagagaaggttaagattcctcttgtgcctgcggcgagaccgcgcacggtccacaggtgttggccctaccggtgggaataagggcccgacgtcaggctcgtcgttaaaccgagcccgtcacccacctgggcaaacgacgcccacgtacggtccacgtcgcccttca

SEQ ID NO: 3239 - DNA, 675 bp, Human TMEV-like cardiovirus
tccgacgtggttggaattaacatcttttccgacgaaagtgctattatgcctccccgattgtgtgatgctttctgccctgctgggcggagcgtcctcgggttgagaaaccttgaatcttttcctttggagccttggctcccccggtctaagccgcttggaatatgacagggttattttccaaactctttatttctactttcatgggttctatccatgaaaagggtatgtgttgccccttccttctttggagaatctgcgcggcggtctttccgtctctcaacaggcgtggatgcaacatgccggaaacggtgaagaaaacagttttctgtggaaatttagagtggacatcgaaacagctgtagcgacctcacagtagcagcggattcccctcttggcgacaagagcctctgcggccaaaagccccgtggataagatccactgctgtgagcggtgcaaccccagcaccctggttcgatggccattctctatggaaccagaaaatggttttctcaagccctccggtagagaagccaagaatgtcctgaaggtaccccgcgcgcgggatctgatcaggagaccaattggcagtgctttacgctgccactttggtttaaaaactgtcacagcttctccaaaccaagtggtcttggttttccaattttgttgactgacaat

SEQ ID NO: 3240 - DNA, 650 bp, Salivirus A; identical to SEQ ID NO: 1364
  SZ1

SEQ ID NO: 3241 - DNA, 653 bp, Unknown
  Description of Unknown: SV1.0 sequence
tctgtcctcaccccatcttcccttctttcctgcaccgttacgcttactcgcatgtgcattgagtggtgcacgtgcttgaacaaacagctacactcacatgggggcgggttttcccgccctgcggcctctcgcgaggcccacccctccccttcctcccataactacagtgctttggtaggtaagcatcctgatcccccgcggaagctgctcacgtggcaactgtggggacccagacaggttatcaaaggcacccggtctttccgccttcaggagtatccctgctagtgaattctagtagggctctgcttggtgccaacctcccccaaatgcgcgctgcgggagtgctcttccccaactcaccctagtatcctctcatgtgtgtgcttggtcagcatatctgagacgatgttccgctgtcccagaccagtccagtaatggacgggccagtgtgcgtagtcgtcttccggcttgtccggcgcatgtttggtgaaccggtggggtaaggttggtgtgcccaacgcccgtactttggtgatacctcaagaccacccaggaatgccagggaggtaccccgcttcacagcgggatctgaccctgggctaattgtctacggtggttcttcttgcttccacttctttctactgttcgccacc

SEQ ID NO: 3242 - DNA, 650 bp, Salivirus sp.; identical to SEQ ID NO: 1364
  SZ1

SEQ ID NO: 3243 - DNA, 675 bp, Lesavirus 2
tctttctttattttcttatgtaactcttctttttaagttttattttgcctacttgtgagcttatgcgggaccactgtcttagacaaccccacatttgtcatgagtaagtacacgcaaccattacgattactttttaaccgtctgaccttttgataacaactgaagttaggcgtgaaacatgcatttataccaaagtagccccgcatttccccactacggtgggggggctaccctactggctttggaactgtagccattatgtgttgcctggctttcaggatctcacaacacaacagttctctcacaatggaatatgggtgagattgcagtgacatgaacaagtatctagtagtacatagactcaagcctagttgcctgcggaacaacatgtggtaacacatgccccagggtccaaaagacaagggttaacagccccttctaggtgtctgtgtgtgaagaatactttagtagtgttgttatgatctcacctgttagtacagaatgagtatggcttggtgaaggatgtcctacaggtacccattatatggatctgagtaggagaccactagtggtggctttaccgccaggtgagtggtttaaaaagcgtctagccaagccaacagcactagggatagtgctttctatattttatattttcagtgtatatggtgacaa

SEQ ID NO: 3244 - DNA, 675 bp, Didelphis aurita
  HAV
tctttggtctggggaactaaaataccagacccgcgtttgcctagcgatataggctttaattgttgtttgtcattgtgcgtttgatatgtgttttaatgtaaataataattctagcaggttctagttcttgatcatgtcctctttaaggcactcatttcaacttgctatctttcttttcttccttggttctccctacaccaaatgcactggccgctgcgcccggcggggtcaaccacatgattagcatgtggctgtaggtgttgaaggctgggacatgaacatcaatggaatagtgcgcatgcttactggggtccattgaagtagtgggatctttctattggggtaggctacgggtgaaaccccttaggttaatactcatattgagagataccttggataggttaactgtgctggatatggttgagtttaacgacaaaaagccatcaacagctgtggacagaacctcatccttagattgctcactatggatatgtgctctgggcgtgtttcttgcatgatggccattggtcaattcatgcctgggccaatgtaggattagccttaaattactttttaaaagtagcctcatttagctggactaatggtggggcgtatgatcctgcatttggcctctggggtaatcaggggcatttaggtttccacataatagcaaat

SEQ ID NO: 3245 - DNA, 420 bp, Pasivirus A
  (longer)
tgaaaaagtggttgtgcagctggattttccggctgtgcaactgcttttgaccagtggctctgggttacttagccaaattcctttcccttatccctattggtttgtgttgtgtgttgtttgttttgttttgtcttaactatatacaagatccttcccgccgatacagacctcgacagtctggtgtaggagggttggtgttattaatttgccccaaaagagtgaccgtgacacgtggaaaccatgagtacatgtgtatccgtggaggatcgcccgggactggattccatatcccattgccatcccaacaaacggagggtatacccaccacgtgcgcgtttgcagtgggaatctgcaaatttagtcatactgcctgatagggtgtgggcctgcactttggggtactcaggctgtttatataat

SEQ ID NO: 3246 - DNA, 618 bp, Unknown
  Description of Unknown: Parabovirus 3?60 sequence
tgaaccgttacgcaccactcagttggtgtttggtggcaccaatgatggaacaaaaggctacaccacttgggctacggcccgcgccaccttgtggcgcaaagacattagaagaatagcataccgcccactagggccctgcagccagcagggtaacgggcaagcacttctgtctccccggtagaacggtataggctgtacccacggccgaaaactgaactatcgttacccgactccgtacttcgcaaagcttagtaggaaactggaaagttcgagttattgacccggagtgttccccccactccagaaacgcgtgatgagggttgccaccccgaccatggcgacatggtgggcatccctgcgctggcacgcggcctctaagaggataactcgctcctactggtaaccgaagagccccgtgagctacggtttattcctccgcctccctgaatgcggctaatcctaacccatgagcagttgccatagatccatatggtggactgtcgtaacgcgtaagttgtgggcggaaccgactactttgggatggcgtgtttccttgttttctccatttgttgttgtatggtgacaagttatagatctcgatctatagcgtttgtaagg

SEQ ID NO: 3247 - DNA, 350 bp, GB virus C
  Iowa
tgacgtgggggggttgatccgccccccccggcactcggtgcaagccccataaaccgacgcctatctaagtagacgcaatgactcggcgccgactcggcgaccggccaaaaggtggtggatgggtggtgacagggttggtaggtcgtaaatcccggtcatcctggtagccactataggtgggtcttaagagaaggtcaagactcctcttgtgcctgcggcgagaccgcgcacggtccacaggtgctggccctaccggtgtgaataagggcccgacgtcaggctcgtcgttaaaccgagcccgtcacccacctgggcaaacgacgcccacgtacggtccacgtcgcccttca

SEQ ID NO: 3248 - DNA, 281 bp, GB virus C
  GT110
tgacgtgggggggttgattttccccccccggcactgggtgcaagccccagaaaccgacgcctatctaagtagacgcaatgactcggcgccgactcggcgaccggccaaaaggtggtggatgggtgatgacagggttggtaggtcgtaaatcccggtcatcctggtagccactataggtgggtcttaagagaaggtcaagattcctcttacgcctgcggcgagaccgcgcacggtccacaggtgttggccctaccggtgtgaataagggcccgacatcaggc

SEQ ID NO: 3249 - DNA, 445 bp, Grusopivirus A
tgcctgagtaggattgtgaatttaggtatgagagggttagccaacccattctgaaccataatagatacgtcaatctgaatccatctaaatctatctcttaggcagtggtgctgaaatattgcaagctactagggatagacgtgatctgattcaagaacctatctaatgtggtgatgagaaggctaggtttatccatagtaatcccttgttctgaacaggcaatgcacatgctctagtaggatctcgggctctgcgattggctctaaaccgaccaatccaggtagaggcactaagtgtaggacttgccaaaatgtattacatgctggtaccgactcactagtctggaaactccacactgaaagtgactggggggggccccatcacatttgtgctactgcttgatagagttgcggctggtcaacttggattggtataaccagttgaa

SEQ ID NO: 3250 - DNA, 611 bp, Unknown
  Description of Unknown: Parabovirus 5?67 sequence
tgggctacggcccgcgccaccttgtggcgcaaagacattagaagaatagcataccgcccactagggccctgcagccagcagggtaacgggcaagcacttctgtctccccggtagaacggtataggctgtacccacggccgaaaactgaactatcgttacccgactccgtacttcgcaaagcttagtaggaaactggaaagttcgagttattgacccggagtgttccccccactccagaaacgcgtgatgagggttgccaccccgaccatggcgacatggtgggcatccctgcgctggcacgcggcctctaagaggataactcgctcctactggtaaccgaagagccccgtgagctacggtttattcctccgcctccctgaatgcggctaatcctaacccatgagcagttgccatagatccatatggtggactgtcgtaacgcgtaagttgtgggcggaaccgactactttgggatggcgtgtttccttgttttctccatttgttgttgtatggtgacaagttatagatctcgatctatagcgtttcttgagagatttccaaacatttattcaagtcgtacaattcttgtgtttaagcagtacagtgtaagg

SEQ ID NO: 3251 - DNA, 318 bp, Pegivirus A
  1220
tgtagcaatgcgcatattgctacttcggtacgcctaattggtaggcgcccggccgaccggccccgcaagggcctagtaggacgtgtgacaatgccatgcgggatcatgacactggggtgagcggaggcagcaccgaagtcgggtgaactcgactcccagtgcgaccacctggcttggtcgttcatggagggcatgcccacgggaacgctgatcgtgcaaagggatgggtccctgcactggtgccatgcgcggcaccactccgtacagcctgatagggtggcggcgggcccccccagtgtgacgtccgtggagcgcaac

SEQ ID NO: 3252 - DNA, 675 bp, Tropivirus A
tgtcgcatgttgccaacatcaaaattctgggagagtcgcgaactccttaacactgccttgcctcgacggagccgttgttatagtgtcgacgggatacaaacattaaactaaacccacttgcctcgacggaaccccttaccttttattttattttatagtatgaaagtgaatcttgtatgaatgttcatagaaaactgcaaatgagtaccacgtctaacatgagagaatgatactggagaaatccaagtttagaagtcactacgaatcccagcggaaacaagggaattctgagcttctaataggcgtttaagactatttgcaaaattctggtgcgtaagtgatattttcattgcgtagaacgctggtaaccactccggctagtataagcattgttagtcacttattatgaaactccacactatcctttctggagaagcacacaaacttacatggtaaagctagaccattatcttaagcggtgagtacactgcaaccttgtaacaatgcttgtatgactactttttgtatatcttgagcaatattgttgaggtggacatgtccaaaggtaatgttgttgggaatggaggggtccattttcccgtgcacgtagtgtactagtattgggtgatagccttgcggcggatcaaccatgtattttaatccgttgactttcac

SEQ ID NO: 3253 - DNA, 675 bp, Unknown
  Description of Unknown: EV A114 sequence
tgtgcgcctgttttgaaaccccctcccccaactcgaaacgtagaagtaatgtacactactgatcagtagcaggcgtggcgcaccagccatgtctcgatcaagcacttctgtttccccggactgagtatcaatagactgctcacgcggttgaaggtgaaaacgtccgttacccggctaactacttcgagaaacctagtagcaccatagaaactgcagagtgtttcgctcagcacttcccccgtgtagatcaggtcgatgagtcactgcaatccccacgggtgaccgtggcagtggctgcgttggcggcctgcctatggggcaacccataggacgctctaaggtggacatggtgtgaagagtctattgagctagttagtagtcctccggcccctgaatgcggctaatcctaactgtggagcgcatactcccaaaccagggagcagtgcgtcgtaacgggcaactccgcagcggaaccgactactttgggtgtccgtgtttccttttattcctatactggctgcttatggtgacaattgagagattgttaccatatagctattggattggccatccagtgtgtaatagagcaatcatttaccaatttgttggatttactccattaacccacacgtctctcaacacactacatttcatcttactactgaacactagaaa

SEQ ID NO: 3254 - DNA, 348 bp, Dianke virus
tgttttcaaccataatactactactacaagtataaaaccccgtccgtctgtcggagacgctaaactctgaccaccaatctagccacatcagttgcttaaagaacctcttgagacactctcccacttaacatcttttaggaatcttcgatgctacaacaacttggctagtgaacaataaatccgtacaattcacagttgtaagaggccataggtccagactttgaaaggtttgtttctattgttacaaatacttagattaacagaggctatttaatagtgctcatcacgttaacagagtaaccttgtgcaatagtatgagcttgttgtaaaacgtcttgatacgacacc

SEQ ID NO: 3255 - DNA, 741 bp, Unknown
  Description of Unknown: CVB3 sequence
ttaaaacagcctgtgggttgatcccacccacaggcccattgggcgctagcactctggtatcacggtacctttgtgcgcctgttttataccccctcccccaactgtaacttagaagtaacacacaccgatcaacagtcagcgtggcacaccagccacgttttgatcaagcacttctgttaccccggactgagtatcaatagactgctcacgcggttgaaggagaaagcgttcgttatccggccaactacttcgaaaaacctagtaacaccgtggaagttgcagagtgtttcgctcagcactaccccagtgtagatcaggtcgatgagtcaccgcattccccacgggcgaccgtggcggtggctgcgttggcggcctgcccatggggaaacccatgggacgctctaatacagacatggtgcgaagagtctattgagctagttggtagtcctccggcccctgaatgcggctaatcctaactgcggagcacacaccctcaagccagagggcagtgtgtcgtaacgggcaactctgcagcggaaccgactactttgggtgtccgtgtttcattttattcctatactggctgcttatggtgacaattgagagatcgttaccatatagctattggattggccatccggtgactaatagagctattatatatccctttgttgggtttataccacttagcttgaaagaggttaaaacattacaattcattgttaagttgaatacagcaaa

SEQ ID NO: 3256 - DNA, 651 bp, Unknown
  Description of Unknown: CVB3 3?91 sequence
ttaaaacagcctgtgggttgatcccacccacagggcccattgggcgctagcactctggtatcacggtacctttgtgcgcctgttttataccccctcccccaactgtaacttagaagtaacacacaccgatcaacagtcagcgtggcacaccagccacgttttgatcaagcacttctgttaccccggactgagtatcaatagactgctcacgcggttgaaggagaaagcgttcgttatccggccaactacttcgaaaaacctagtaacaccgtggaagttgcagagtgtttcgctcagcactaccccagtgtagatcaggtcgatgagtcaccgcattccccacgggcgaccgtggcggtggctgcgttggcggcctgcccatggggaaacccatgggacgctctaatacagacatggtgcgaagagtctattgagctagttggtagtcctccggcccctgaatgcggctaatcctaactgcggagcacacaccctcaagccagagggcagtgtgtcgtaacgggcaactctgcagcggaaccgactactttgggtgtccgtgtttcattttattcctatactggctgcttatggtgacaattgagagattgttaccatatagctattggattggccatccggtgaagcaaa

SEQ ID NO: 3257 - DNA, 741 bp, Unknown
  Description of Unknown: CVB1 sequence
ttaaaacagcctgtgggttgttcccacccacaggcccattgggcgctagcactctggtatcacggtacctttgtgcgcctgttttacatcccctccccaaattgtaatttagaagtttcacacaccgatcattagcaagcgtggcacaccagccatgttttgatcaagcacttctgttaccccggactgagtatcaatagaccgctaacgcggttgaaggagaaaacgttcgttacccggccaactacttcgaaaaacctagtaacaccatggaagttgcggagtgtttcgctcagcactaccccagtgtagatcaggtcgatgagtcaccgcgttccccacgggcgaccgtggcggtggctgcgttggcggcctgcctacggggaaacccgtaggacgctctaatacagacatggtgcgaagagtctattgagctagttggtaatcctccggcccctgaatgcggctaatcctaactgcggagcacataccctcaaaccagggggcagtgtgtcgtaacgggcaactctgcagcggaaccgactactttgggtgtccgtgtttcattttattcctatactggctgcttatggtgacaattgacaggttgttaccatatagttattggattggccatccggtgactaacagagcaattatatatctctttgttgggtttataccacttagcttgaaagaggttaaaacactacatctcatcattaaactaaatacaacaaa

SEQ ID NO: 3258 - DNA, 744 bp, Echovirus
  E14
ttaaaacagcctgtgggttgttcccatccacagggcccactgggcgccagcactctggtattgcggtaccttagtgcgcctgttttatatacccgtcccccaaacgtaacttagacgcatgtcaacgaagaccaatagtaagcgcagcacaccagctgtgttccggtcaagcacttctgttaccccggaccgagtatcaataagctactcacgtggctgaaggagaaaacgttcgttacccgaccaattacttcaagaaacctagtaacaccatgaaggttgcgcagtgtttcgctccgcacaaccccagtgtagatcaggtcgatgagtcaccgcattccccacgggtgaccgtggcggtggctgcgctggcggcctgcccatggggaaacccatgggacgcttcaatactgacatggtgcgaagagtctattgagctaattggtagtcctccggcccctgaatgcggctaatcctaactgcggagcagatacccacacaccagtgggcagtctgtcgtaacgggcaactctgcagcggaaccgactactttgggtgtccgtgtttctctttatccttatactggctgcttatggtgacaattgagagattgttaccatatagctattggattggccatccggtgacaaatagagcaattgtgtatttgtttgttggtttcgtgccattaaattacaaggttctaaacacccttaatcttattatagcattcaacacaacaaa

SEQ ID NO: 3259 - DNA, 628 bp, Unknown; identical to SEQ ID NO: 754
  Description of Unknown: HRV14 sequence

SEQ ID NO: 3260 - DNA, 726 bp, Enterovirus D
ttaaaacagctctggggttgttcccaccccagaggcccacgtggcggctagtactccggtaccccggtacccttgtacgcctgttttatactccctttcccaagtaactttagaagaaataaactaatgttcaacaggagggggtacaaaccagtaccaccacgaacacacacttctgtttccccggtgaagttgcatagactgtacccacggttgaaagcgatgaatccgttacccgcttaggtacttcgagaagcctagtatcatcttggaatcttcgatgcgttgcgatcagcactctaccccgagtgtagcttgggtcgatgagtctggacaccccacaccggcgacgtggtccaggctgcgttggcggcctacccatggctagcaccatgggacgctagttgtgaacaaggtgcgaagagcctattgagctacctgagagtcctccggcccctgaatgcggctaatcccaaccacggagcaaatgctcacaatccagtgagtggtttgtcgtaatgcgcaagtctgtggcggaaccgactactttgggtgtccgtgtttccttttatttttattatggctgcttatggtgacaatctgagattgttatcatatagctattggattagccatccggtgatatcttgaaattttgccataactttttcacaaatcctacaacattacactacactttctcttgaataattgagacaactcata

SEQ ID NO: 3261 - DNA, 626 bp, Human rhinovirus 1
ttaaaactgggtgtgggttgttcccacccacaccacccaatgggtgttgtactctgttattccggtaactttgtacgccagtttttccctcccctccccatccttttacgtaacttagaagttttaaatacaagaccaatagtaggcaactctccaggttgtctaaggtcaagcacttctgtttccccggttgatgttgatatgctccaacagggcaaaaacaacagataccgttatccgcaaagtgcctacacagagcttagtaggattctgaaagatctttggttggtcgttcagctgcatacccagcagtagaccttgcagatgaggctggacattccccactggtaacagtggtccagcctgcgtggctgcctgcgcacctctcatgaggtgtgaagccaaagatcggacagggtgtgaagagccgcgtgtgctcactttgagtcctccggcccctgaatgcggctaaccttaaacctgcagccatggctcataagccaatgagtttatggtcgtaacgagtaattgcgggatgggaccgactactttgggtgtccgtgtttcactttttcctttattaattgcttatggtgacaatatatatattgatatatattggcatc

SEQ ID NO: 3262 - DNA, 302 bp, Unknown
  Description of Unknown: Bat Hp-betacoronavirus sequence
ttaagcttcggcttgttgcataggaccggaaaggtactatctaccctaactcttgtagttagactctctaaacgaactttaaaactggttgtgtccttcagtagtctgtatggccattggaggcacaccggtaattatcaaatactaagaagattcatagtacatccttgtctagcttttggttggcagtgagcctacggtttcgtccgtgtcgctcacaattatccacacagtaggtttcgtccgctgtggttgagttgctagtccgttgctgtttcgtcagccatctacaactcgacacc

SEQ ID NO: 3263 - DNA, 675 bp, Apodemus agrarius picornavirus
  strain Longquan-Aa118
ttactcagcgtaactactccgggttacgtgatgaagaagaggctacggagattctcgggctacggccctggagccactccggctcctaaagatttagaagtttgagcacacccgcccactagggccccccatccaggggggcaacgggcaagcacttctgtttccccggtatgatctgataggctgtaaccacggctgaaacagagattatcgttatccgcttcactacttcgagaagcctagtaatgatgggtgaaattgaatccgttgatccggtgtctcccccacaccagaaactcatgatgagggttgccatcccggctacggcgacgtagcgggcatccctgcgctggcatgaggcctcttaggaggacggatgatatggatcttgtcgtgaagagcctattgagctagtgtcgactcctccgcccccgtgaatgcggctaatcctaaccccggagcaggtgggtccaatccagggcctggcctgtcgtaatgcgtaagtctgggacggaaccgactactttcgggaaggcgtgtttccatttgttcattatttgtgtgtttatggtgacaactctgggtaaacgttctattgcgtttattgagagattcccaacaattgaacaaacgagaactacctgttttattaaatttacacagagaagaattaca

SEQ ID NO: 3264 - DNA, 675 bp, Unknown
  Description of Unknown: Aichivirus ETHP4 sequence
ttactccattcagcttcttcggaacctgttcggaggaattaaacgggcacccatacacccccaccccctttttgcaacttaagtatgtgtgctcgtgatcttgactcccacggaatggatcgatccgctggagaacaaactgctagatccacatcctcccttcccttgggaggacctcggtcctcccacatcctccccccagcctgacgtaccacaggctgtgtgaagcccccgcgaaagccgctcacgtggcaattgtgggtccccccttcattaagacaccaggtctttcctccttaaggctagtcccgatgtgtgaattcacattgggcaactagtggtgtcactgtgcgctcccaatctcggccgcggagtgctgttccccaagccaaacccctggcccttcactatgtgcctggcaagcatatctgagaaggtgttccgctgtggctgccagcctggtaacaggtgccccagtgtgcgtaaccttcttccgtcttcggacggtagtgattggttaagatttggcgtaaggttcatgtgccaacgccctgtgcgggatgaaacctctactaccctaggaatgccaggcaggtaccccaccctcgggtgggatctgagcctgggctaattgtctacgggtagtttcatttccaattcttctatgtcggagtc

SEQ ID NO: 3265 - DNA, 675 bp, Kobuvirus sp.
  16317
ttactccattcagcttcttcggaacctgttcggaggaattaaacgggcacccatacacccccatcccctttctgcaacttaagtatgtgtgctcgtgatcttgactcccacggaatggatcgatccgctggagaacaaactgctagatccacatcctcccttcccctgggaggaccttggtcctcccacatcctccccccagcctgacgtaccacaggctgtgtgaagcccccgcgaaagctgctcacgtggcaattgtgggtccccccttcatcaagacaccaggtctttcctccttaaggctagccccgatgtgtgaattcacattgggcaactagtggtgtcactgtgcgctcccaatctcggccgcggagtgctgttccccaagccaaacccctggcccttcactatgtgcctggcaagcatacctgagaaggtgttccgctgtggctgccagcctggtaacaggtgccccagtgtgcgtaaccttcttccgtcttcggacggtagtgattggttaagatttggtgtaaggtccatgtgccaacgccctgtgcgggatgaaacctctactgccctaggaatgccaggcaggtaccccacccccgggtgggatctgagcctgggctaattgtctacgggtagtttcatttccaattcttttatgtcggagtc

SEQ ID NO: 3266 - DNA, 675 bp, Unknown
  Description of Unknown: Aichivirus Chshc7 sequence
ttactccattcagcttcttcggaacctgttcggaggaattaaacgggcacccatacatccccatcccctttctgtaacttaagtatgtgtgcttgtaatcttgactcccacggaatggatcgatccgctggagaacaaactgctagatccacatcctcccttcccctgggaggaccttggtcctcccacatcctccccccagcctgacgtaccacaggctgtgtgaagcccccgcgaaagctgctcacgtggcaattgtgggtccccccttcatcaagacaccaggtctttcctccttaaggctagccccgatgtgtgaattcacattgggcaactagtggtgtcactgtgcgctcccaatctcggccgcggagtgctgttccccaagccaaacccctggcccttcactatgtgcctggcaagcatatctgagaaggtgttccgctgtggctgccagcctggtaacaggtgccccagtgtgcgtaaccttcttccgtctccggacggtagtgattggttaagatttggtgtaaggttcatgtgccaacgccctgtgcgggatgaaatctctactgccctaggaatgccaggcaggtaccccaccctcgggtgggatctgagcctgggctaattgtctacgggtagtttcatttccaatccttttatgtcggagtc

SEQ ID NO: 3267 - DNA, 675 bp, Unknown
  Description of Unknown: A73-675 sequence
ttactccattcagcttcttcggaacctgttcggaggaattaaacgggcacccatactccccccaccccccttttgtaactaagtatgtgtgctcgtgatcttgactcccacggaacggaccgatccgttggtgaacaaacagctaggtccacatcctcccttcccctgggagggcccccgccctcccacatcctccccccagcctgacgtatcacaggctgtgtgaagcccccgcgaaagctgctcacgtggcaattgtgggtccccccttcatcaagacaccaggtctttcctccttaaggctagccccggcgtgtgaattcacgttgggcaactagtggtgtcactgtgcgctcccaatctcggccgcggagtgctgttccccaagccaaacccctggcccttcactatgtgcctggcaagcatatctgagaaggtgttccgctgtggctgccaacctggtgacaggtgccccagtgtgcgtaaccttcttccgtctccggacggtagtgattggttaagatttggtgtaaggttcatgtgccaacgccctgtgcgggatgaaacctctactgccctaggaatgccaggcaggtaccccacctccgggtgggatctgagcctgggctaattgtctacgggtagtttcatttccaatccttttatgtcggagtc

SEQ ID NO: 3268 - DNA, 675 bp, Unknown
  Description of Unknown: EV I sequence
ttagtactttctcacggggatagtggtatccctccctagtaatttagaagacttgaaaaaccgaccaataggcacctcgcatccagcggggtaaaggtcaagcacttctgtttccccgggtcgagtagcgatagactgtgcccacggtcgaaggtgaaacaacccgttatccgactttgtacttcgggaagcctagtaccaccaaagattatgcttggggtttcgctcagcacgaccctggtgtagatcaggccgatggatcaccgcattcctcacaggcgactgtggcggtggtcgcgtggcagcctgccgatggggcaacccatcggacgccaagcatatgacagggtgtgaagagcctactgagctacaaagtattcctccggcccctgaatgcggctaatcccaaccacggagcatttgctaccaaaccaggtagtggaatgtcgtaacgggtaactctgtggcggaaccgactactttgggtgtccgtgtttccttttaatttatcattctgtatatggtgacaactatagtgctatctcgatttgcattactattgttgagattaaaactttattacattgttgcattttaccctttgagtgagttttcacctgaacagattaatttactcatcctgtttatatattacaagcagaaatacttgcaaag

SEQ ID NO: 3269 - DNA, 549 bp, Rodent hepatovirus
ttcaaagaggggtccgggattttcctggtccccctctttgggcacccttggctcgggggtgtgaataccgtgctcgcgtttgccgtgcgttaacggcttcatttatgtttgtttgtctgttttattatgttggtttgtctgtttgttatgttggtattgttcgtgtttaatgttatgaccacattacactccagccaatgaagaacagatggtgcggttattgctggcggaattcctaacgtcctggatccgttggtacgcatcacaaaacaatttgcagagagagtggtgaaacggcttgggaatccctgagtacagggaaatcacactgatagctcatcttggctgttttcagtcatggaccttatgcagtgtaatttgggtgtaccccccatagcttaggaggaatgttctgtcttggcactagagtgggacgctgatgcctccgtgtctaggatggtctaagggacagaatggggtgcctctgatgccatactacctgatagggtgctctcacggcctctgcatcttagtgagaagttcaatttt

SEQ ID NO: 3270 - DNA, 734 bp, Hepatitis A Virus
  HA16
ttcaagaggggtctccggagttttccggaacccctcttggaagtccatggtgaggggacttgatacctcaccgccgtttgcctaggctataggctaaatttccctttccctgtccttcccctatttccttttgttttgtttgtaaatattaattcctgcaggttcagggttctttaatctgtttctctataagaacactcaatttttcacgctttctgtctcctttcttccagggctctccccttgccctaggctctggccgttgcgcccggcggggtcaactccatgattagcatggagctgtaggagtctaaattggggacgcagatgtttgggacgtcgccttgcagtgttaacttggctttcatgaacctctttgatcttccacaaggggtaggctacgggtgaaacctcttaggctaatacttcaatgaagagatgccttggatagggtaacagcggcggatattggtgagttgttaagacaaaaaccattcaacgccggaggactggctctcatccagtggatgcattgagggaattgattgtcagggctgtctctaggtttaatctcagacctctctgtgcttagggcaaacactatttggccttaaatgggatcctgtgagagggggtccctccattgacagctggactgttctttggggccttatgtggtgtttgcctctgaggtactcaggggcatttaggtttttcctcattcttaaataata

SEQ ID NO: 3271 - DNA, 251 bp, Hubei tombus-like virus 32
ttcgggtttacccgcgtaagcggccacactgactggttgtcggtgttgaatttgtataccagatgaggagacgttaccaccgtctcggcagtgctacgtctgggaaaggactgtgatagtggacagtcctaccgtctttagatacattgcgttgtgtatagcccgggagggattaactaatagcaacgcaatgcacacggcggttcggatttgcttgactgatggaaagacatctaagttctaattgaacc

SEQ ID NO: 3272 - DNA, 624 bp, Salivirus A; identical to SEQ ID NO: 1368
  CH

SEQ ID NO: 3273 - DNA, 675 bp, Limnipivirus A
ttctttggatatccatttaacgtgtaccctatacgataattggggtggattctggatgcctagttccagtgattggttaagaactcgtttactacgtatagtatgattagcaaagtgctcgattgatcacgtaatgatctatgtggttaaaaacccagtagtatggtatatactcagtagtgtacactgtgagtacaactcttggcgtagagagaacaattcacccgaatccgtggcgtatccatggaaataagtttacctaattgtatgttacaaggcatatgagacatttatgagatatggtttattttgactaaacgagtgtagaggtggtggagtctatccaacttcaagccatgcaattgttgtgttgattgatatcattgaccatttttgtggattgtgtacacatacaatttgaaaattaaccccctcaagaataagacatgggaccattcgtggtagataccgtgctcggatgcttgagattagatgggttagactagttttggaatgagattgccgagaaagtcccgctagacatgttttacaagtcgtggtattccgctagactttttcgcagacacatggaagggtccatgtgttgtgcaattgcagggtgacagcccaactgcagagttttccttactagaataaaaatctgttgtcaatttt

SEQ ID NO: 3274 - DNA, 604 bp, Unknown; identical to SEQ ID NO: 656
  Description of Unknown: Aalivirus sequence

SEQ ID NO: 3275 - DNA, 489 bp, Porcine Sapelovirus A2; identical to SEQ ID NO: 513

SEQ ID NO: 3276 - DNA, 675 bp, Sclerotinia sclerotiorum
  dsRNA mycovirus-L
ttgaattaatcttttacgtttacgcgcataaaatcaggacacatctcttgtatactttagtatatcaatgatgtttttgttttatgcgattaatcgtaagagaacttctttccatccgcctgtatgggcgggataataagttcaccgccttggtcgaggcgcaaacttgtatgtgcaaaggtgagctatatgctcgaaatagtcgtaactaacacacagccactacctgtagagctctattgatccggaatcctttagtgggaatgcagagctcacaccggacctgcgggtatcttcggcgttagggacttctgtttcagccttgaatcatttacctttataccttctctgaggcgcctgggccgggcgcgatattaagtacaagtcaaggacatcgcgggtagtggtctaatcagccgctagtcctgctggagagttccaacttagttgggtgtggtgcatactagctggatagagtaggtatgtattgctaacgtatgccggaggctatccgtcctcggtagaacgtgccgaggagtagtctctgcagacccccgaacgcgtggggtctttacttaaatgtaggcggagggagcgctcgtaggtggaacgactgcctcccagtcgaatgcaagattttgcacgcggaccagtctgcccggcaattcccgggtg

SEQ ID NO: 3277 - DNA, 608 bp, Kobuvirus sp.
  SZAL6 5?158
ttgactccaggcggatgttgtgtcgcccgtcctgtgaacaaacagctagacactttcctcccctccctctgggctgctccggcagtccactccctccccccagcgtaacatgccccgctggagtgatgcacctggaagtcgtggacgtgggttagtaacttcggtgaaaacccactataatgacaactggttgacccccacactcaaaggactcgagtctttctcccttaaggctagcccggccacatgaatttgcagctggcaactagtgagtccaccatgtcccgcaacctcggctgcggagtgctgttccccaagcgtatgccttccttctgtaagagtgcgcctggcaagcacatctgagaagtcgttccgctgcgtcgtgccaacctggcgacaggtgacccagtgtgcgtagacttcttccggattcgtccggctcttctctaggaaacatgcgtgtaaggttcatgtgccaaagccctgcgcgcggtgttcttctactgccctaggaatgtgccgcaggtacccctacttcggtagggatctgagcggtagctaattgtctacgggtagtttcatttccatcttctcttcaggtcgacatc

SEQ ID NO: 3278 - DNA, 697 bp, Encephalomyocarditis virus
  EMCV-Cf
ttgccagtctgctcgatatcgcaggctgggtccgtgactacccactccccctttcaacgtgaaggctacgatagtgccagggcgggtactgccgtaagtgccaccccaaaacaacaacaaccccccctctccctcctccccccctaacgttactggccgaagccgcttggaataaggccggtgtgcgtttgtctatatgttattttccaccatattgccgtcttttggcaatgtgagggcccggaaacctggccctgtcttcttgacgagcattcctaggggtctttcccctctcgccaaaggaatgcaaggtctgttgaatgtcgtgaaggaagcagttcctctggaagcttcttgaagacaaacaacgtctgtagcgaccctttgcaggcagcggaaccccccacctggcgacaggtgcctctgcggccaaaagccacgtgtataagatacacctgcaaaggcggcacaaccccagtgccacgttgtgagttggatagttgtggaaagagtcaaatggctctcctcaagcgtattcaacaaggggctgaaggatgcccagaaggtaccccattgtatgggatctgatctggggcctcggtgcacatgctttacatgtgtttagtcgaggttaaaaaacgtctaggccccccgaaccacggggacgtggttttcctttgaaaaacacgatgataat

SEQ ID NO: 3279 - DNA, 248 bp, Bovine picornavirus
  isolate TCH6
ttggatctgagcaggggccccctttgggttgctttacaactcaactgggggttaaaaaacgtctaacccgacacgccagagggatctggtttccttttatttcttttactcaccactggatgcagattgacgataaacgttgttgtttgtgactattgacttgatctgcttctacgggtttactttcactgttatacttcttgctttgtttggtgttcactgtactttgtctccttctacatttcaca

SEQ ID NO: 3280 - DNA, 675 bp, Human poliovirus type 2
  isolate IS_061
ttgtgcgcctgttttatactcccctcccgcaacttagaagcacgaaaccaagttcaatagaagggggtacaaaccagtaccactacgaacaagcacttctgtttccccggtgacattgcatagactgctcacgcggttgaaagtgatcgatccgttacccgcttgtgtacttcgaaaagcctagtatcgccttggaatcttcgacgcgttgcgctcagcacccgaccccggggtgtagcttaggccgatgagtctggacattcctcaccggtgacggtggtccaggctgcgttggcggcctacctatggctaacgccataggacgttagatgtgaacaaggtgtgaagagcctattgagctacataagagtcctccggcccctgaatgcggctaatcctaaccacggagcaggcggtcgcgaaccagtgactggcttgtcgtaacgcgcaagtctgtggcggaaccgactactttgggtgtccgtgtttcctgttatttttatcatggctgcttatggtgacaatcagagattgttatcataaagcgaattggattggccatccggtgagtgttgtgtcaggtatacaactgtttgttggaaccactgtgttagctttgcttctcatttaaccaattaatcaaaaacaatacgaggataaaacaacaatactaca

SEQ ID NO: 3281 - DNA, 675 bp, Human poliovirus type 2
  strain NIE0811460
ttgtgcgcctgttttatattccccccccgcaacttagaagcacgaaaccaagttcaatagaagggggtacaaaccagtaccaccacgaacaagcacttctgtttccccggtgacattgcatagactgctcacgcggttgaaagtgatcgatccgttacccgcttgtgtacttcgaaaagcctagtattgccttggaatcttcgacgcgttgcgctcagcacccgaccccggggtgtagcttaggctgatgagtctggacattcctcaccggtgacggtggtccaggctgcgttggcggcctacctatggctaatgccataggacgctagatgtgaacaaggtgtgaagagcctattgagctacataagagtcctccggcccctgaatgcggctaatcctaaccacggagcaggcggtcgcaaaccagtgactagcttgtcgtaacgcgcaagtctgtggcggaaccgactactttgggtgtccgtgtttcctgttatttttattatggctgcttatggtgacaatcagagattgttatcataaagcgaattggattggccatccggtgagtgttgtgtcaggtatacaactgtttgttggaaccactgtgttagtttaacctctctttcaaccaattagtcaaaaacaatacgaagatagaacaacaatactaca

SEQ ID NO: 3282 - DNA, 601 bp, Canine kobuvirus; identical to SEQ ID NO: 1354

SEQ ID NO: 3283 - DNA, 591 bp, Pigeon picornavirus B
tttatttagctgttaagttttatttgtgccgagaccccatagtaggatcttggtgttccacattaagctctcccgaccacacatccaaacgataggcggtgtaagggctccctggctaagtgtttactcattgctagggaagtgttgcgacccgttaccagtaggaatacaggaggtcttagttgcctaaccagataaagtggtgctgaaatattgcaagctcaatgtctggcgaacgacggactaccgttgaactattgttaacgcccgcgtgtgtaggcaacacacgggttagtaggtcacttacattgacatccgtgccgggaaagcggatctgagctatcgattgcctgatagggtgccggcgggcgcggtacgtgtggtatagtccgctgtcttggggtatggcgtctactcggttttgttgtcgttttggaatgtcccatgtcggagatgtcgttaccggtgtttgctttacttgtgcacgaataagaaaacagagtttggagttttggaagttaatggataacatcaagtttccattgcgttcctcgtgcattttaggccagaaaatcgaccacaaaatcgaga

SEQ ID NO: 3284 - DNA, 619 bp, Bat picornavirus; identical to SEQ ID NO: 715
  isolate BtRs-PicoV

SEQ ID NO: 3285 - DNA, 675 bp, Potamipivirus B
tttcaacgtcgtggctgacgttaaaaagccacaattccacttaccttttaccttttatgtttaatgtttgttagttttgtgatctttaacaaatagatctaaataatttgttggtaaccaatctcggatgtttcggctgcattgtagtttatttatttcattttagttgtaggtggccactacgtcctggaatcatacatggtaacatgtacctcggcggttatccactattacgctaatctaagaatatttaaatgaaaatgtaagtgttacggctgactttgggcctgatagttaaatgctcgcactgacagatagtaccctcctttaggatcgattctgttacatgggatccattttggtgccccactgattcaacctctttgttgaaaaagagttagcatactacaaattttccaaacaaaaaccctttttaatgactacaacttatgattttatgaattttactgctcttgaaaaagatattttgacattgatcgctgtactgtttcagacattcattgcatccatttttgttggctactcctcacaaactcaaaacttttccacacgagaaaccttgtttattgaattttgcctttatattttggaacttgttgttggatttattgtttgcttaattattgacctcacacctgttttaaacactacaat

SEQ ID NO: 3286 - DNA, 729 bp, Kobuvirus sp.
  SZAL6 3?37
tttcacaccctcttttccggtggtccggacccagaccaccgttactccattcagctacttcggtacctgttcggaggaattaaacgggcaccctacccaagggttacatgggaccatattcctcctcccctgtaactttaagttttgtgcccgtattcttgactccaggcggatgttgtgtcgcccgtcctgtgaacaaacagctagacactttcctcccctccctctgggctgctccggcagtccactccctccccccagcgtaacatgccccgctggagtgatgcacctggaagtcgtggacgtgggttagtaacttcggtgaaaacccactataatgacaactggttgacccccacactcaaaggactcgagtctttctcccttaaggctagcccggccacatgaatttgcagctggcaactagtgagtccaccatgtcccgcaacctcggctgcggagtgctgttccccaagcgtatgccttccttctgtaagagtgcgcctggcaagcacatctgagaagtcgttccgctgcgtcgtgccaacctggcgacaggtgacccagtgtgcgtagacttcttccggattcgtccggctcttctctaggaaacatgcgtgtaaggttcatgtgccaaagccctgcgcgcggtgttcttctactgccctaggaatgtgccgcaggtacccctacttcggtagggatctgagcggtagctaattggacatc

SEQ ID NO: 3287 - DNA, 718 bp, Salivirus A; identical to SEQ ID NO: 1367
  02394

SEQ ID NO: 3288 - DNA, 576 bp, Porcine kobuvirus
  K-30
tttgaaaagggggtgggggggcctcggccccctcaccctcttttccggtggccacccgcccgggccaccgttactccactccactccttcgggactggtttggaggaacataacagggcttcccatccctgtttacccttactccactcacccctccccttgaccaaccctatccacaccccactgactgactcctttggatcttgacctcggaatgcctacttgacctcccacttgcctctcccttttcggattgccggtggtgcctggcggaaaaagcacaagtgtgttgttggctaccaaactcctacccgacaaaggtgcgtgtccgcgtgctgagtaatgggataggagatgccaataacaggctcgcccatgagtagagcatggactgcggtgcatgtgacttcggtcaccaggggcatagcattgctcacccctgaatcaagtcatcgagatttctctgacctctgaagtgcactgtggttgcgtggctgggaatccacgcttgaccatgtactgcttgatagagtcgcggctggccgactcatgggttaaagtcagttgacaagacac

SEQ ID NO: 3289 - DNA, 576 bp, Porcine kobuvirus
  GS2
tttgaaaagggggtgggggggcctcggccccctcaccctcttttccggtggccattcgcccgggccaccgttactccactccactccttcgggactggtttggaggaacacaacagggcttcccatccctgtttaccctttattccatcatcctttccccaagtttaccctatccacaccccactgactgactcctttggattttgacctcagaatgcctatttgacctcccactcgcctctcccttttcggattgccggtggtgcctggcggaaaaagcacaagtgtgttgcaggctaccaaactcctacccgacaaaggtgcgtgtccgcgtgctgagtaatgggataggagatgcctacaacaggctcgcccatgagtagagcatggactgcggtgcatgtgacttcggtcaccacgggcatagcattgctcacccgtgaatcaagtcatcgagatttctctgacctctgaagtgcactgtggttgcgtggctgggaatccacgcttgaccatgtactgcttgatagagtcgcggctggccgactcatgggttaaagtcagttgacaagacac

SEQ ID NO: 3290 - DNA, 494 bp, Tremovirus A
tttgaaagaggcctccggagtgtccggaggctctctttcgacccaacccatactggggggtgtgtgggaccgtacctggagtgcacggtatatatgcattcccgcatggcaagggcgtgctaccttgccccttgacgcatggtatgcgtcatcatttgccttggttaagccccatagaaacgaggcgtcacgtgccgaaaatccctttgcgtttcacagaaccatcctaaccatgggtgtagtatgggaatcgtgtatggggatgattaggatctctcgtagagggataggtgtgccattcaaatccagggagtactctggctctgacattgggacatttgatgtaaccggacctggttcagtatccgggttgtcctgtattgttacggtgtatccgtcttggcacactgaaagggtatttttgggtaatcctttcctactgcctgatagggtggcgtgcccggccacgagagattaagggtagcaatttaaac

SEQ ID NO: 3291 - DNA, 675 bp, Picornavirales sp.
  isolate RtMruf-PicoV
tttgctcagcgtaacttctccgggttacgtggagaccaaaaggctacggagactcgggctacggccctggagcacctaggtgctcctaaagacgttagaagttgtacaaactcgcccaatagggccccccaaccaggggggtagcgggcaagcacttctgtttccccggtatgatctcataggctgtacccacggctgaaagagagattatcgttacccgcctcactacttcgagaagcccagtaatggttcatgaagttgatctcgttgacccggtgtttcccccacaccagaaacctgtgatgggggtggtcatcccggtcatggcgacatgacggacctccccgcgccggcacagggcctcttcggaggacgagtgacatggattcaaccgtgaagagcctattgagctagtgttgattcctccgcccccgtgaatgcggctaatcccaactccggagcaggcgggcccaaaccagggtctggcctgtcgtaacgcgaaagtctggagcggaaccgactactttcgggaaggcgtgtttccttttgttccttttatcaagttttatggtgacaactcctggtagacgttttattgcgtttattgagagatttccaacaattgaacagactagaaccacttgttttatcaaaccctcacagaataagataaca

SEQ ID NO: 3292 - DNA, 675 bp, Coxsackievirus
  A10
tttgtgcgcctgttttacaacccttccccaacttgtaacgtagaagtaatacacactactgatcaatagcaggcatggcgcgccagtcatgtctcgatcaagcacttctgttcccccggactgagtatcaatagactgctcacgcggttgaaggagaaaacgttcgttacccggctaactacttcgagaaacctagtagcaccatagaagctgcagagtgtttcgctcagcacttcccccgtgtagatcaggctgatgagtcactgcaatccccacgggtgaccgtggcagtggctgcgttggcggcctgcctatggggcaacccataggacgctctaatgtggacatggtgcgaagagtctattgagctagttagtagtcctccggcccctgaatgcggctaatcctaactgcggagcacatgccttcaacccagaaggtagtgtgtcgtaacgggcaactctgcagcggaaccgactactttgggtgtccgtgtttctttttattcctatattggctgcttatggtgacaatcacggaattgttgccatatagctattggattggccatccggtgtctaatagagctattgtgtacctatttgttggatttactccgctatcacataaatctctgaacactttgtgctttatattgaacttaaacacccgaaa

SEQ ID NO: 3293 - DNA, 579 bp, Simian sapelovirus 2
ttttaacttgttatgacattcaaggaaaaaatgtctttttcattatgggactgacctgtttatgaacatgagcagcggcactgctccacgggctatccgtgtaagaaatattgattattcttatggatcatgatttcagggttggccgcccagtctaaaaggcaattgtggtaagctatgtaagtagttggctgttgaaaggagccaagtacatcctaggtctacgctgtgcgggccgaagtaagacttggaacaactctgagtaggcagtttttctctttagcccaacacgaccgcatactgaagagctagaggcactttggggcaaaggtaaaagcattgcttagaccgaatgttcaatgagaccttgacgagtgctgtcacagtgtcccctgatggcagtatggcgcatgctcttggcattacccatatgtgtatctatagggggggggccccctatacttagtctagtgctacctgacagggccgcggctggtcgtcggtgtgtggtataaccagtagtaatcccccatggattgctttaactccccctcctccctcaacaaaactttctctaag

SEQ ID NO: 3294 - DNA, 675 bp, Saffold virus
  V13C
ttttcgacgtggttggaattgccatcatttccgacgaaagtgctatcatgcctccccgattatgtgatgttttctgccctgctgggcggagcattctcgggttgagaaaccttgaatctttttctttggaaccttggttcccccggtctaagccgcttggaatatgacagggttattttcttgatcttatttctacttttgcgggttctatccgtaaaaagggtacgtgctgccccttccttctctggagaattcacacggcggtctttccgtctctcaacaagtgtgaatgcagcatgccggaaacggtgaagaaaacagttttctgtggaaatttagagtgcacatcgaaacagctgtagcgacctcacagtagcagcggactcccctcttggcgacaagagcctctgcggccaaaagccccgtggataagatccactgctgtgagcggtgcaaccccagcaccctggttcgatgatcattctctatggaaccagaaaatggttttctcaagccctccggtagagaagccaagaatgtcctgaaggtaccccgcgtgcgggatctgatcaggagaccaattggcggtgctttacactgtcactttggtttaaaaattgtcacagcttctccaaaccaagtggtcttggttttccaattttgttgaatggcaat

SEQ ID NO: 3295 - DNA, 512 bp, Unknown
  Description of Unknown: Boosepivirus B sequence
ttttctcccctccccctccaactaccttttccccctcttgtaacgctagaagtttgtgcaaaccgcctgtagggtactgcaatccagcagtgcataggctaagcttttcttgttaccccaccccacattatactgaggaggattgtgaaattgtgttagtatgggttagtagcggtgacccgggtaaccccaacccagaaactcacggatgagatgaacaggaccccacatggtaacgtgtgtgttcgtctgccccgcaaggtgaggccgtgagagctttgcacgcgaaaaccttgaaaacccaaaagtaccttgagctcttcgctattttgtgtttcctccaggaccctgaatgcggctaaacctaacccgcgatccgcacgtagcaacccagctagagtgtggtcgtaatgcgcaagttgcgggcggtaccgactactttggtgttcctgtgtttcctttattttattttgaatttttatggtgacaacagctagaaaataagagtgaac

SEQ ID NO: 3296 - DNA, 512 bp, Bovine picornavirus; identical to SEQ ID NO: 3295

SEQ ID NO: 3297 - DNA, 537 bp, Bovine rhinitis A virus
ttttgcggctctgccgccgttcgggttttacctgttttcacagagcaaaacaggacctctagtttcgtgcttaaacgagatcatgctcgaactagaactataacgctggtcactggacccgtgccgcgccttgcggatctttgcgggaatggtggctagtgggctgtggaagtgactctaaccacacgcccctcaagtgtgggaaaacacgaactggtgtagcgacgacgataggccttgggacaccctctccagtgatggagacccaaggggccaaaagccacgccttgtgccctgtcgttcacaaccccagtgcagttcgtgccagtacctgcttttgggaagtgtgctttggacagctgaaaacagtcctagtgggagactaaggatgcccaggaggtacccggaggtaacaagtgacactctggatctgacttggggagagcgggtctgctttacagacgccactctttaaaaaacttctatgtctcgtcaggcaccggaggccgggccttttcctttaaaacaatacacttt

SEQ ID NO: 3298 - DNA, 593 bp, Rhinolophus picornavirus
  strain Guizhou-Rr100
ttttttttctcaggcggtagcatccagccaaggcctgatgctaccaacgtgtgactaaaccacactctctttttgtgatacattgtgtcacctatccctttcttggtaacttagaagcttgtacacccacgcacgtaggtaccccacatccagtggggtttgtgcaaagcattcttgttccccggtaaaccctgataggctgtaaccacggctgaaacaaggtttgtcgttacccgactcactactacgcaaagcctagtaaagttcaatgaaagtgcgcagcgtgatccggtcaaaacccccttgaccagaaacacatgatgagggtcaccaacccccactggcgacagtgtggtgtccctgcgttggcatgtggcctcatagaggcgttgcaatctggatttgctccgaagagccccgtgtgctagtgtttatacctccggccccttgaatgcggctaatcctaacccccgagcatgtacacacacgccagtgtgcagcatgtcgtaatgagcaatttggggatggaaccgactactttagggtgtccgtgtttctcattattctttgtttgatgttttatggtgacaaca

SEQ ID NO: 3299 - DNA, 240 bp, Artificial Sequence
  Description of Artificial Sequence: Synthetic polynucleotide
gaagaaattctttaagtggatgctctcaaactcagggaaacctaaatctagttatagacaaggcaatcctgagccaagccgaagtagtaattagtaagttaacaatagatgacttacaactaatcggaaggtgcagagactcgacgggagctaccctaacgtcaagacgagggtaaagagagagtccaattctcaaagccaataggcagtagcgaaagctgcaagagaatgaaaatccgt

SEQ ID NO: 3300 - DNA, 239 bp, Artificial Sequence
  Description of Artificial Sequence: Synthetic polynucleotide
aagaaattctttaagtggatgctctcaaactcagggaaacctaaatctagttatagacaaggcaatcctgagccaagccgaagtagtaattagtaagttaacaatagatgacttacaactaatcggaaggtgcagagactcgacgggagctaccctaacgtcaagacgagggtaaagagagagtccaattctcaaagccaataggcagtagcgaaagctgcaagagaatgaaaatccgt

SEQ ID NO: 3301 - DNA, 238 bp, Artificial Sequence
  Description of Artificial Sequence: Synthetic polynucleotide
agaaattctttaagtggatgctctcaaactcagggaaacctaaatctagttatagacaaggcaatcctgagccaagccgaagtagtaattagtaagttaacaatagatgacttacaactaatcggaaggtgcagagactcgacgggagctaccctaacgtcaagacgagggtaaagagagagtccaattctcaaagccaataggcagtagcgaaagctgcaagagaatgaaaatccgt

SEQ ID NO: 3302 - DNA, 190 bp, Artificial Sequence
  Description of Artificial Sequence: Synthetic polynucleotide
gttatagacaaggcaatcctgagccaagccgaagtagtaattagtaagttaacaatagatgacttacaactaatcggaaggtgcagagactcgacgggagctaccctaacgtcaagacgagggtaaagagagagtccaattctcaaagccaataggcagtagcgaaagctgcaagagaatgaaaatccgt

SEQ ID NO: 3303 - DNA, 189 bp, Artificial Sequence
  Description of Artificial Sequence: Synthetic polynucleotide
ttatagacaaggcaatcctgagccaagccgaagtagtaattagtaagttaacaatagatgacttacaactaatcggaaggtgcagagactcgacgggagctaccctaacgtcaagacgagggtaaagagagagtccaattctcaaagccaataggcagtagcgaaagctgcaagagaatgaaaatccgt

SEQ ID NO: 3304 - DNA, 188 bp, Artificial Sequence
  Description of Artificial Sequence: Synthetic polynucleotide
tatagacaaggcaatcctgagccaagccgaagtagtaattagtaagttaacaatagatgacttacaactaatcggaaggtgcagagactcgacgggagctaccctaacgtcaagacgagggtaaagagagagtccaattctcaaagccaataggcagtagcgaaagctgcaagagaatgaaaatccgt

SEQ ID NO: 3305 - DNA, 187 bp, Artificial Sequence
  Description of Artificial Sequence: Synthetic polynucleotide
atagacaaggcaatcctgagccaagccgaagtagtaattagtaagttaacaatagatgacttacaactaatcggaaggtgcagagactcgacgggagctaccctaacgtcaagacgagggtaaagagagagtccaattctcaaagccaataggcagtagcgaaagctgcaagagaatgaaaatccgt

SEQ ID NO: 3306 - DNA, 186 bp, Artificial Sequence
  Description of Artificial Sequence: Synthetic polynucleotide
tagacaaggcaatcctgagccaagccgaagtagtaattagtaagttaacaatagatgacttacaactaatcggaaggtgcagagactcgacgggagctaccctaacgtcaagacgagggtaaagagagagtccaattctcaaagccaataggcagtagcgaaagctgcaagagaatgaaaatccgt

SEQ ID NO: 3307 - DNA, 139 bp, Artificial Sequence
  Description of Artificial Sequence: Synthetic polynucleotide
acaatagatgacttacaactaatcggaaggtgcagagactcgacgggagctaccctaacgtcaagacgagggtaaagagagagtccaattctcaaagccaataggcagtagcgaaagctgcaagagaatgaaaatccgt

SEQ ID NO: 3308 - DNA, 138 bp, Artificial Sequence
  Description of Artificial Sequence: Synthetic polynucleotide
caatagatgacttacaactaatcggaaggtgcagagactcgacgggagctaccctaacgtcaagacgagggtaaagagagagtccaattctcaaagccaataggcagtagcgaaagctgcaagagaatgaaaatccgt

SEQ ID NO: 3309 - DNA, 137 bp, Artificial Sequence
  Description of Artificial Sequence: Synthetic polynucleotide
aatagatgacttacaactaatcggaaggtgcagagactcgacgggagctaccctaacgtcaagacgagggtaaagagagagtccaattctcaaagccaataggcagtagcgaaagctgcaagagaatgaaaatccgt

SEQ ID NO: 3310 - DNA, 136 bp, Artificial Sequence
  Description of Artificial Sequence: Synthetic polynucleotide
atagatgacttacaactaatcggaaggtgcagagactcgacgggagctaccctaacgtcaagacgagggtaaagagagagtccaattctcaaagccaataggcagtagcgaaagctgcaagagaatgaaaatccgt

SEQ ID NO: 3311 - DNA, 135 bp, Artificial Sequence
  Description of Artificial Sequence: Synthetic polynucleotide
tagatgacttacaactaatcggaaggtgcagagactcgacgggagctaccctaacgtcaagacgagggtaaagagagagtccaattctcaaagccaataggcagtagcgaaagctgcaagagaatgaaaatccgt

SEQ ID NO: 3312 - DNA, 134 bp, Artificial Sequence
  Description of Artificial Sequence: Synthetic polynucleotide
agatgacttacaactaatcggaaggtgcagagactcgacgggagctaccctaacgtcaagacgagggtaaagagagagtccaattctcaaagccaataggcagtagcgaaagctgcaagagaatgaaaatccgt

SEQ ID NO: 3313 - DNA, 133 bp, Artificial Sequence
  Description of Artificial Sequence: Synthetic polynucleotide
gatgacttacaactaatcggaaggtgcagagactcgacgggagctaccctaacgtcaagacgagggtaaagagagagtccaattctcaaagccaataggcagtagcgaaagctgcaagagaatgaaaatccgt

SEQ ID NO: 3314 - DNA, 132 bp, Artificial Sequence
  Description of Artificial Sequence: Synthetic polynucleotide
atgacttacaactaatcggaaggtgcagagactcgacgggagctaccctaacgtcaagacgagggtaaagagagagtccaattctcaaagccaataggcagtagcgaaagctgcaagagaatgaaaatccgt

SEQ ID NO: 3315 - DNA, 131 bp, Artificial Sequence
  Description of Artificial Sequence: Synthetic polynucleotide
tgacttacaactaatcggaaggtgcagagactcgacgggagctaccctaacgtcaagacgagggtaaagagagagtccaattctcaaagccaataggcagtagcgaaagctgcaagagaatgaaaatccgt

SEQ ID NO: 3316 - DNA, 78 bp, Artificial Sequence
  Description of Artificial Sequence: Synthetic polynucleotide
caagacgagggtaaagagagagtccaattctcaaagccaataggcagtagcgaaagctgcaagagaatgaaaatccgt

SEQ ID NO: 3317 - DNA, 77 bp, Artificial Sequence
  Description of Artificial Sequence: Synthetic polynucleotide
aagacgagggtaaagagagagtccaattctcaaagccaataggcagtagcgaaagctgcaagagaatgaaaatccgt

SEQ ID NO: 3318 - DNA, 76 bp, Artificial Sequence
  Description of Artificial Sequence: Synthetic polynucleotide
agacgagggtaaagagagagtccaattctcaaagccaataggcagtagcgaaagctgcaagagaatgaaaatccgt

SEQ ID NO: 3319 - DNA, 75 bp, Artificial Sequence
  Description of Artificial Sequence: Synthetic polynucleotide
gacgagggtaaagagagagtccaattctcaaagccaataggcagtagcgaaagctgcaagagaatgaaaatccgt

SEQ ID NO: 3320 - DNA, 74 bp, Artificial Sequence
  Description of Artificial Sequence: Synthetic polynucleotide
acgagggtaaagagagagtccaattctcaaagccaataggcagtagcgaaagctgcaagagaatgaaaatccgt

SEQ ID NO: 3321 - DNA, 40 bp, Artificial Sequence
  Description of Artificial Sequence: Synthetic polynucleotide
aataggcagtagcgaaagctgcaagagaatgaaaatccgt

SEQ ID NO: 3322 - DNA, 39 bp, Artificial Sequence
  Description of Artificial Sequence: Synthetic polynucleotide
ataggcagtagcgaaagctgcaagagaatgaaaatccgt

SEQ ID NO: 3323 - DNA, 38 bp, Artificial Sequence
  Description of Artificial Sequence: Synthetic polynucleotide
taggcagtagcgaaagctgcaagagaatgaaaatccgt

SEQ ID NO: 3324 - DNA, 37 bp, Artificial Sequence
  Description of Artificial Sequence: Synthetic polynucleotide
aggcagtagcgaaagctgcaagagaatgaaaatccgt

SEQ ID NO: 3325 - DNA, 36 bp, Artificial Sequence
  Description of Artificial Sequence: Synthetic polynucleotide
ggcagtagcgaaagctgcaagagaatgaaaatccgt

SEQ ID NO: 3326 - DNA, 27 bp, Artificial Sequence
  Description of Artificial Sequence: Synthetic polynucleotide
gaaagctgcaagagaatgaaaatccgt

SEQ ID NO: 3327 - DNA, 26 bp, Artificial Sequence
  Description of Artificial Sequence: Synthetic polynucleotide
aaagctgcaagagaatgaaaatccgt

SEQ ID NO: 3328 - DNA, 25 bp, Artificial Sequence
  Description of Artificial Sequence: Synthetic polynucleotide
aagctgcaagagaatgaaaatccgt

SEQ ID NO: 3329 - DNA, 24 bp, Artificial Sequence
  Description of Artificial Sequence: Synthetic polynucleotide
agctgcaagagaatgaaaatccgt

SEQ ID NO: 3330 - DNA, 23 bp, Artificial Sequence
  Description of Artificial Sequence: Synthetic polynucleotide
gctgcaagagaatgaaaatccgt

SEQ ID NO: 3331 - DNA, 22 bp, Artificial Sequence
  Description of Artificial Sequence: Synthetic polynucleotide
ctgcaagagaatgaaaatccgt

SEQ ID NO: 3332 - DNA, 18 bp, Artificial Sequence
  Description of Artificial Sequence: Synthetic polynucleotide
aagagaatgaaaatccgt

SEQ ID NO: 3333 - DNA, 17 bp, Artificial Sequence
  Description of Artificial Sequence: Synthetic polynucleotide
agagaatgaaaatccgt

SEQ ID NO: 3334 - DNA, 16 bp, Artificial Sequence
  Description of Artificial Sequence: Synthetic polynucleotide
gagaatgaaaatccgt

SEQ ID NO: 3335 - DNA, 35 bp, Artificial Sequence
  Description of Artificial Sequence: Synthetic polynucleotide
gcagtagcgaaagctgcaagagaatgaaaatccgt

SEQ ID NO: 3336 - DNA, 33 bp, Artificial Sequence
  Description of Artificial Sequence: Synthetic polynucleotide
agtagcgaaagctgcaagagaatgaaaatccgt

SEQ ID NO: 3337 - DNA, 32 bp, Artificial Sequence
  Description of Artificial Sequence: Synthetic polynucleotide
gtagcgaaagctgcaagagaatgaaaatccgt

SEQ ID NO: 3338 - DNA, 26 bp, Artificial Sequence
  Description of Artificial Sequence: Synthetic polynucleotide
acggacttaaataattgagccttaaa

SEQ ID NO: 3339 - DNA, 27 bp, Artificial Sequence
  Description of Artificial Sequence: Synthetic polynucleotide
acggacttaaataattgagccttaaag

SEQ ID NO: 3340 - DNA, 28 bp, Artificial Sequence
  Description of Artificial Sequence: Synthetic polynucleotide
acggacttaaataattgagccttaaaga

SEQ ID NO: 3341 - DNA, 76 bp, Artificial Sequence
  Description of Artificial Sequence: Synthetic polynucleotide
acggacttaaataattgagccttaaagaagaaattctttaagtggatgctctcaaactcagggaaacctaaatcta

SEQ ID NO: 3342 - DNA, 77 bp, Artificial Sequence
  Description of Artificial Sequence: Synthetic polynucleotide
acggacttaaataattgagccttaaagaagaaattctttaagtggatgctctcaaactcagggaaacctaaatctag

SEQ ID NO: 3343 - DNA, 78 bp, Artificial Sequence
  Description of Artificial Sequence: Synthetic polynucleotide
acggacttaaataattgagccttaaagaagaaattctttaagtggatgctctcaaactcagggaaacctaaatctagt

SEQ ID NO: 3344 - DNA, 79 bp, Artificial Sequence
  Description of Artificial Sequence: Synthetic polynucleotide
acggacttaaataattgagccttaaagaagaaattctttaagtggatgctctcaaactcagggaaacctaaatctagtt

SEQ ID NO: 3345 - DNA, 80 bp, Artificial Sequence
  Description of Artificial Sequence: Synthetic polynucleotide
acggacttaaataattgagccttaaagaagaaattctttaagtggatgctctcaaactcagggaaacctaaatctagtta

SEQ ID NO: 3346 - DNA, 127 bp, Artificial Sequence
  Description of Artificial Sequence: Synthetic polynucleotide
acggacttaaataattgagccttaaagaagaaattctttaagtggatgctctcaaactcagggaaacctaaatctagttatagacaaggcaatcctgagccaagccgaagtagtaattagtaagtta

SEQ ID NO: 3347 - DNA, 128 bp, Artificial Sequence
  Description of Artificial Sequence: Synthetic polynucleotide
acggacttaaataattgagccttaaagaagaaattctttaagtggatgctctcaaactcagggaaacctaaatctagttatagacaaggcaatcctgagccaagccgaagtagtaattagtaagttaa

SEQ ID NO: 3348 - DNA, 129 bp, Artificial Sequence
  Description of Artificial Sequence: Synthetic polynucleotide
acggacttaaataattgagccttaaagaagaaattctttaagtggatgctctcaaactcagggaaacctaaatctagttatagacaaggcaatcctgagccaagccgaagtagtaattagtaagttaac

SEQ ID NO: 3349 - DNA, 130 bp, Artificial Sequence
  Description of Artificial Sequence: Synthetic polynucleotide
acggacttaaataattgagccttaaagaagaaattctttaagtggatgctctcaaactcagggaaacctaaatctagttatagacaaggcaatcctgagccaagccgaagtagtaattagtaagttaaca

SEQ ID NO: 3350 - DNA, 131 bp, Artificial Sequence
  Description of Artificial Sequence: Synthetic polynucleotide
acggacttaaataattgagccttaaagaagaaattctttaagtggatgctctcaaactcagggaaacctaaatctagttatagacaaggcaatcctgagccaagccgaagtagtaattagtaagttaacaa

SEQ ID NO: 3351 - DNA, 132 bp, Artificial Sequence
  Description of Artificial Sequence: Synthetic polynucleotide
acggacttaaataattgagccttaaagaagaaattctttaagtggatgctctcaaactcagggaaacctaaatctagttatagacaaggcaatcctgagccaagccgaagtagtaattagtaagttaacaat

SEQ ID NO: 3352 - DNA, 133 bp, Artificial Sequence
  Description of Artificial Sequence: Synthetic polynucleotide
acggacttaaataattgagccttaaagaagaaattctttaagtggatgctctcaaactcagggaaacctaaatctagttatagacaaggcaatcctgagccaagccgaagtagtaattagtaagttaacaata

SEQ ID NO: 3353 - DNA, 134 bp, Artificial Sequence
  Description of Artificial Sequence: Synthetic polynucleotide
acggacttaaataattgagccttaaagaagaaattctttaagtggatgctctcaaactcagggaaacctaaatctagttatagacaaggcaatcctgagccaagccgaagtagtaattagtaagttaacaatag

SEQ ID NO: 3354 - DNA, 135 bp, Artificial Sequence
  Description of Artificial Sequence: Synthetic polynucleotide
acggacttaaataattgagccttaaagaagaaattctttaagtggatgctctcaaactcagggaaacctaaatctagttatagacaaggcaatcctgagccaagccgaagtagtaattagtaagttaacaataga

SEQ ID NO: 3355 - DNA, 188 bp, Artificial Sequence
  Description of Artificial Sequence: Synthetic polynucleotide
acggacttaaataattgagccttaaagaagaaattctttaagtggatgctctcaaactcagggaaacctaaatctagttatagacaaggcaatcctgagccaagccgaagtagtaattagtaagttaacaatagatgacttacaactaatcggaaggtgcagagactcgacgggagctaccctaacgt

SEQ ID NO: 3356 - DNA, 189 bp, Artificial Sequence
  Description of Artificial Sequence: Synthetic polynucleotide
acggacttaaataattgagccttaaagaagaaattctttaagtggatgctctcaaactcagggaaacctaaatctagttatagacaaggcaatcctgagccaagccgaagtagtaattagtaagttaacaatagatgacttacaactaatcggaaggtgcagagactcgacgggagctaccctaacgtc

SEQ ID NO: 3357 - DNA, 190 bp, Artificial Sequence
  Description of Artificial Sequence: Synthetic polynucleotide
acggacttaaataattgagccttaaagaagaaattctttaagtggatgctctcaaactcagggaaacctaaatctagttatagacaaggcaatcctgagccaagccgaagtagtaattagtaagttaacaatagatgacttacaactaatcggaaggtgcagagactcgacgggagctaccctaacgtca

SEQ ID NO: 3358 - DNA, 191 bp, Artificial Sequence
  Description of Artificial Sequence: Synthetic polynucleotide
acggacttaaataattgagccttaaagaagaaattctttaagtggatgctctcaaactcagggaaacctaaatctagttatagacaaggcaatcctgagccaagccgaagtagtaattagtaagttaacaatagatgacttacaactaatcggaaggtgcagagactcgacgggagctaccctaacgtcaa

SEQ ID NO: 3359 - DNA, 192 bp, Artificial Sequence
  Description of Artificial Sequence: Synthetic polynucleotide
acggacttaaataattgagccttaaagaagaaattctttaagtggatgctctcaaactcagggaaacctaaatctagttatagacaaggcaatcctgagccaagccgaagtagtaattagtaagttaacaatagatgacttacaactaatcggaaggtgcagagactcgacgggagctaccctaacgtcaag

SEQ ID NO: 3360 - DNA, 226 bp, Artificial Sequence
  Description of Artificial Sequence: Synthetic polynucleotide
acggacttaaataattgagccttaaagaagaaattctttaagtggatgctctcaaactcagggaaacctaaatctagttatagacaaggcaatcctgagccaagccgaagtagtaattagtaagttaacaatagatgacttacaactaatcggaaggtgcagagactcgacgggagctaccctaacgtcaagacgagggtaaagagagagtccaattctcaaagcc

SEQ ID NO: 3361 - DNA, 227 bp, Artificial Sequence
  Description of Artificial Sequence: Synthetic polynucleotide
acggacttaaataattgagccttaaagaagaaattctttaagtggatgctctcaaactcagggaaacctaaatctagttatagacaaggcaatcctgagccaagccgaagtagtaattagtaagttaacaatagatgacttacaactaatcggaaggtgcagagactcgacgggagctaccctaacgtcaagacgagggtaaagagagagtccaattctcaaagcca

SEQ ID NO: 3362 - DNA, 228 bp, Artificial Sequence
  Description of Artificial Sequence: Synthetic polynucleotide
acggacttaaataattgagccttaaagaagaaattctttaagtggatgctctcaaactcagggaaacctaaatctagttatagacaaggcaatcctgagccaagccgaagtagtaattagtaagttaacaatagatgacttacaactaatcggaaggtgcagagactcgacgggagctaccctaacgtcaagacgagggtaaagagagagtccaattctcaaagccaa

SEQ ID NO: 3363 - DNA, 229 bp, Artificial Sequence
  Description of Artificial Sequence: Synthetic polynucleotide
acggacttaaataattgagccttaaagaagaaattctttaagtggatgctctcaaactcagggaaacctaaatctagttatagacaaggcaatcctgagccaagccgaagtagtaattagtaagttaacaatagatgacttacaactaatcggaaggtgcagagactcgacgggagctaccctaacgtcaagacgagggtaaagagagagtccaattctcaaagccaat

SEQ ID NO: 3364 - DNA, 230 bp, Artificial Sequence
  Description of Artificial Sequence: Synthetic polynucleotide
acggacttaaataattgagccttaaagaagaaattctttaagtggatgctctcaaactcagggaaacctaaatctagttatagacaaggcaatcctgagccaagccgaagtagtaattagtaagttaacaatagatgacttacaactaatcggaaggtgcagagactcgacgggagctaccctaacgtcaagacgagggtaaagagagagtccaattctcaaagccaata

SEQ ID NO: 3365 - DNA, 239 bp, Artificial Sequence
  Description of Artificial Sequence: Synthetic polynucleotide
acggacttaaataattgagccttaaagaagaaattctttaagtggatgctctcaaactcagggaaacctaaatctagttatagacaaggcaatcctgagccaagccgaagtagtaattagtaagttaacaatagatgacttacaactaatcggaaggtgcagagactcgacgggagctaccctaacgtcaagacgagggtaaagagagagtccaattctcaaagccaataggcagtagc

SEQ ID NO: 3366 - DNA, 240 bp, Artificial Sequence
  Description of Artificial Sequence: Synthetic polynucleotide
acggacttaaataattgagccttaaagaagaaattctttaagtggatgctctcaaactcagggaaacctaaatctagttatagacaaggcaatcctgagccaagccgaagtagtaattagtaagttaacaatagatgacttacaactaatcggaaggtgcagagactcgacgggagctaccctaacgtcaagacgagggtaaagagagagtccaattctcaaagccaataggcagtagcg

SEQ ID NO: 3367 - DNA, 241 bp, Artificial Sequence
  Description of Artificial Sequence: Synthetic polynucleotide
acggacttaaataattgagccttaaagaagaaattctttaagtggatgctctcaaactcagggaaacctaaatctagttatagacaaggcaatcctgagccaagccgaagtagtaattagtaagttaacaatagatgacttacaactaatcggaaggtgcagagactcgacgggagctaccctaacgtcaagacgagggtaaagagagagtccaattctcaaagccaataggcagtagcga

SEQ ID NO: 3368 - DNA, 242 bp, Artificial Sequence
  Description of Artificial Sequence: Synthetic polynucleotide
acggacttaaataattgagccttaaagaagaaattctttaagtggatgctctcaaactcagggaaacctaaatctagttatagacaaggcaatcctgagccaagccgaagtagtaattagtaagttaacaatagatgacttacaactaatcggaaggtgcagagactcgacgggagctaccctaacgtcaagacgagggtaaagagagagtccaattctcaaagccaataggcagtagcgaa

SEQ ID NO: 3369 - DNA, 243 bp, Artificial Sequence
  Description of Artificial Sequence: Synthetic polynucleotide
acggacttaaataattgagccttaaagaagaaattctttaagtggatgctctcaaactcagggaaacctaaatctagttatagacaaggcaatcctgagccaagccgaagtagtaattagtaagttaacaatagatgacttacaactaatcggaaggtgcagagactcgacgggagctaccctaacgtcaagacgagggtaaagagagagtccaattctcaaagccaataggcagtagcgaaa

SEQ ID NO: 3370 - DNA, 244 bp, Artificial Sequence
  Description of Artificial Sequence: Synthetic polynucleotide
acggacttaaataattgagccttaaagaagaaattctttaagtggatgctctcaaactcagggaaacctaaatctagttatagacaaggcaatcctgagccaagccgaagtagtaattagtaagttaacaatagatgacttacaactaatcggaaggtgcagagactcgacgggagctaccctaacgtcaagacgagggtaaagagagagtccaattctcaaagccaataggcagtagcgaaag

SEQ ID NO: 3371 - DNA, 248 bp, Artificial Sequence
  Description of Artificial Sequence: Synthetic polynucleotide
acggacttaaataattgagccttaaagaagaaattctttaagtggatgctctcaaactcagggaaacctaaatctagttatagacaaggcaatcctgagccaagccgaagtagtaattagtaagttaacaatagatgacttacaactaatcggaaggtgcagagactcgacgggagctaccctaacgtcaagacgagggtaaagagagagtccaattctcaaagccaataggcagtagcgaaagctgc

SEQ ID NO: 3372 - DNA, 249 bp, Artificial Sequence
  Description of Artificial Sequence: Synthetic polynucleotide
acggacttaaataattgagccttaaagaagaaattctttaagtggatgctctcaaactcagggaaacctaaatctagttatagacaaggcaatcctgagccaagccgaagtagtaattagtaagttaacaatagatgacttacaactaatcggaaggtgcagagactcgacgggagctaccctaacgtcaagacgagggtaaagagagagtccaattctcaaagccaataggcagtagcgaaagctgca

SEQ ID NO: 3373 - DNA, 250 bp, Artificial Sequence
  Description of Artificial Sequence: Synthetic polynucleotide
acggacttaaataattgagccttaaagaagaaattctttaagtggatgctctcaaactcagggaaacctaaatctagttatagacaaggcaatcctgagccaagccgaagtagtaattagtaagttaacaatagatgacttacaactaatcggaaggtgcagagactcgacgggagctaccctaacgtcaagacgagggtaaagagagagtccaattctcaaagccaataggcagtagcgaaagctgcaa

SEQ ID NO: 3374 - DNA, 231 bp, Artificial Sequence
  Description of Artificial Sequence: Synthetic polynucleotide
acggacttaaataattgagccttaaagaagaaattctttaagtggatgctctcaaactcagggaaacctaaatctagttatagacaaggcaatcctgagccaagccgaagtagtaattagtaagttaacaatagatgacttacaactaatcggaaggtgcagagactcgacgggagctaccctaacgtcaagacgagggtaaagagagagtccaattctcaaagccaatag

SEQ ID NO: 3375 - DNA, 233 bp, Artificial Sequence
  Description of Artificial Sequence: Synthetic polynucleotide
acggacttaaataattgagccttaaagaagaaattctttaagtggatgctctcaaactcagggaaacctaaatctagttatagacaaggcaatcctgagccaagccgaagtagtaattagtaagttaacaatagatgacttacaactaatcggaaggtgcagagactcgacgggagctaccctaacgtcaagacgagggtaaagagagagtccaattctcaaagccaataggc

SEQ ID NO: 3376 - DNA, 234 bp, Artificial Sequence
  Description of Artificial Sequence: Synthetic polynucleotide
acggacttaaataattgagccttaaagaagaaattctttaagtggatgctctcaaactcagggaaacctaaatctagttatagacaaggcaatcctgagccaagccgaagtagtaattagtaagttaacaatagatgacttacaactaatcggaaggtgcagagactcgacgggagctaccctaacgtcaagacgagggtaaagagagagtccaattctcaaagccaataggca

SEQ ID NO: 3377 - DNA, 104 bp, Azoarcus olearius
tgcgccgatgaaggtgtagagactagacggcacccacctaaggcaaacgctatggtgaaggcatagtccagggagtggcgaaagtcacacaaaccggaatccgt

SEQ ID NO: 3378 - DNA, 141 bp, Azoarcus olearius
ccgggcgtatggcaacgccgagccaagcttcggcgcctgcgccgatgaaggtgtagagactagacggcacccacctaaggcaaacgctatggtgaaggcatagtccagggagtggcgaaagtcacacaaaccggaatccgt

SEQ ID NO: 3379 - DNA, 78 bp, Azoarcus olearius
acggcacccacctaaggcaaacgctatggtgaaggcatagtccagggagtggcgaaagtcacacaaaccggaatccgt

SEQ ID NO: 3380 - DNA, 58 bp, Azoarcus olearius
acgctatggtgaaggcatagtccagggagtggcgaaagtcacacaaaccggaatccgt

SEQ ID NO: 3381 - DNA, 75 bp, Thiomargarita namibiensis
attaaagttatagaattatcagagaatgatatagtccaagccttatggtaacatgagggcacttgaccctggtag

SEQ ID NO: 3382 - DNA, 195 bp, Unknown
  Description of Unknown: Staphylococcus phage Twort sequence
aagatgtaggcaatcctgagctaagctcttagtaataagagaaagtgcaacgactattccgataggaagtagggtcaagtgactcgaaatggggattacccttctagggtagtgatatagtctgaacatatatggaaacatatagaaggataggagtaacgaacctattcgtaacataattgaacttttagttat

SEQ ID NO: 3383 - DNA, 163 bp, Unknown
  Description of Unknown: Staphylococcus phage Twort sequence
taataagagaaagtgcaacgactattccgataggaagtagggtcaagtgactcgaaatggggattacccttctagggtagtgatatagtctgaacatatatggaaacatatagaaggataggagtaacgaacctattcgtaacataattgaacttttagttat

SEQ ID NO: 3384 - DNA, 133 bp, Unknown
  Description of Unknown: Staphylococcus phage Twort sequence
taggaagtagggtcaagtgactcgaaatggggattacccttctagggtagtgatatagtctgaacatatatggaaacatatagaaggataggagtaacgaacctattcgtaacataattgaacttttagttat

SEQ ID NO: 3385 - DNA, 92 bp, Unknown
  Description of Unknown: Staphylococcus phage Twort sequence
ctagggtagtgatatagtctgaacatatatggaaacatatagaaggataggagtaacgaacctattcgtaacataattgaacttttagttat

SEQ ID NO: 3386 - DNA, 92 bp, Aspergillus pseudoglaucus
agttaataaagatgatgaaatagtctgaaccattttgagaaaagtggaaataaaagaaaatcttttatgataacataaattgaacaggctaa

SEQ ID NO: 3387 - DNA, 62 bp, Unknown
  Description of Unknown: Bacteriophage Phi I sequence
caaagactgatgatatagtccgacactcctagtaataggagaatacagaaaggatgaaatcc

SEQ ID NO: 3388 - DNA, 76 bp, Nostoc sp.
  PCC 7524
agtcgagggtaaagggagagtccaattctcaaagcctattggcagtagcgaaagctgcgggagaatgaaaatccgt

SEQ ID NO: 3389 - DNA, 76 bp, Nostoc sp.
  CENA543
agccgagggtaaagggagagtccaattctcaaagccaataggcagtagcgaaagctgcgggagaatgaaaatccgt

SEQ ID NO: 3390 - DNA, 89 bp, Nodularia spumigena
agccgagggtaaagggagagtccaattctcaaagccgaaggttattaaaacctggcagcagtgaaagctgcgggagaatgaaaatccgt

SEQ ID NO: 3391 - DNA, 79 bp, Pleurocapsa sp.
  PCC 7327
agctgagggtaaagagagagtccaattctcaaagccagcagatggcagtagcgaaagctgcgggagaatgaaaatccgt

SEQ ID NO: 3392 - DNA, 76 bp, Planktothrix agardhii
agccgagggtaaagagagagtccaattctcaaagccaattggtagtagcgaaagctacgggagaatgaaaatccgt

SEQ ID NO: 3393 - DNA, 118 bp, Azoarcus olearius
gcggactcatatttcgatgtgccttgcgccgggaaaccacgcaagggatggtgtcaaattcggcgaaacctaagcgcccgcccgggcgtatggcaacgccgagccaagcttcggcgcc

SEQ ID NO: 3394 - DNA, 81 bp, Azoarcus olearius
gcggactcatatttcgatgtgccttgcgccgggaaaccacgcaagggatggtgtcaaattcggcgaaacctaagcgcccgc

SEQ ID NO: 3395 - DNA, 144 bp, Azoarcus olearius
gcggactcatatttcgatgtgccttgcgccgggaaaccacgcaagggatggtgtcaaattcggcgaaacctaagcgcccgcccgggcgtatggcaacgccgagccaagcttcggcgcctgcgccgatgaaggtgtagagactag

SEQ ID NO: 3396 - DNA, 164 bp, Azoarcus olearius
gcggactcatatttcgatgtgccttgcgccgggaaaccacgcaagggatggtgtcaaattcggcgaaacctaagcgcccgcccgggcgtatggcaacgccgagccaagcttcggcgcctgcgccgatgaaggtgtagagactagacggcacccacctaaggcaa

SEQ ID NO: 3397 - DNA, 179 bp, Thiomargarita namibiensis
aggattagatactacactaagtgtcccccagactggtgacagtctggtgtgcatccagctatatcggtgaaaccccattggggtaataccgagggaagctatattatatatatattaataaatagccccgtagagactatgtaggtaaggagatagaagatgataaaatcaaaatcatc

SEQ ID NO: 3398 - DNA, 84 bp, Unknown
  Description of Unknown: Staphylococcus phage Twort sequence
actactgaaagcataaataattgtgcctttatacagtaatgtatatcgaaaaatcctctaattcagggaacacctaaacaaact

SEQ ID NO: 3399 - DNA, 116 bp, Unknown
  Description of Unknown: Staphylococcus phage Twort sequence
actactgaaagcataaataattgtgcctttatacagtaatgtatatcgaaaaatcctctaattcagggaacacctaaacaaactaagatgtaggcaatcctgagctaagctcttag

SEQ ID NO: 3400 - DNA, 146 bp, Unknown
  Description of Unknown: Staphylococcus phage Twort sequence
actactgaaagcataaataattgtgcctttatacagtaatgtatatcgaaaaatcctctaattcagggaacacctaaacaaactaagatgtaggcaatcctgagctaagctcttagtaataagagaaagtgcaacgactattccga

SEQ ID NO: 3401 - DNA, 187 bp, Unknown
  Description of Unknown: Staphylococcus phage Twort sequence
actactgaaagcataaataattgtgcctttatacagtaatgtatatcgaaaaatcctctaattcagggaacacctaaacaaactaagatgtaggcaatcctgagctaagctcttagtaataagagaaagtgcaacgactattccgataggaagtagggtcaagtgactcgaaatggggattaccctt

SEQ ID NO: 3402 - DNA, 216 bp, Aspergillus pseudoglaucus
cgctagggatttataactgtgagtcctccaatattataaaatgttggtaatatattgggtaaatttcaaagacaacttttctccacgtcaggatatagtgtatttgaagcgaaacttattttagcagtgaaaaagcaaataaggacgttcaacgactaaaaggtgagtattgctaacaataatccttttttttaatgcccaacatctttattaact

SEQ ID NO: 3403 - DNA, 559 bp, Unknown
  Description of Unknown: Bacteriophage Phi I sequence
gtgggtgcataaactatttcattgtgcacattaaatctggtgaactcggtgaaaccctaatggggcaataccgagccaagccatagggaggatatatgagaggcaagaagttaattcttgaggccactgagactggctgtatcatccctacgtcacacaaacttaatgccgatggttatttcagaaagaaaaccaatggcgtcttagagatgtatcacagaacggtgtggaaggagcataacggagacatacctgatggcttcgagatagaccataagtgtcgcaatagggcttgctgtaatatagagcatttacagatgcttgagggtacagcccacactgttaagaccaatcgtgaacgctacgcagacagaaaggaaacagctagggaatactggctggagactggatgtaccggcctagcactcggtgagaagtttggtgtgtcgttctcttctgcttgtaagtggattagagaatggaaggcgtagagactatccgaaaggagtagggccgagggtgagactccctcgtaacccgaagcgccagacagtcaact

SEQ ID NO: 3404 - DNA, 218 bp, Nostoc sp.
  PCC 7524
acggacttaagtaattgagccttaaagaagaaattctttaagtggcagctctcaaactcagggaaacctaaatctgttcacagacaaggcaatcctgagccaagccgaaagagtcatgagtgctgagtagtgagtaaaataaaagctcacaactcagaggttgtaactctaagctagtcggaaggtgcagagactcgacgggagctaccctaacgtaa

SEQ ID NO: 3405 - DNA, 165 bp, Nostoc sp.
  CENA543
acggacttaaactgaattgagccttagagaagaaattctttaagtgtcagctctcaaactcagggaaacctaaatctgttgacagacaaggcaatcctgagccaagccgagaactctaagttattcggaaggtgcagagactcgacgggagctaccctaacgtca

SEQ ID NO: 3406 - DNA, 181 bp, Nodularia spumigena
acggacttagaaaactgagccttgatcgagaaatctttcaagtggaagctctcaaattcagggaaacctaaatctgtttacagatatggcaatcctgagccaagccgaaacaagtcctgagtgttaaagctcataactcatcggaaggtgcagagactcgacgggagctaccctaacgtta

SEQ ID NO: 3407 - DNA, 188 bp, Pleurocapsa sp.
  PCC 7327
acggacttaaaaaaattgagccttggcagagaaatctgtcatgcgaacgctctcaaattcagggaaacctaagtctggcaacagatatggcaatcctgagccaagccttaatcaaggaaaaaaacatttttaccttttaccttgaaaggaaggtgcagagactcaacgggagctaccctaacaggtca

SEQ ID NO: 3408 - DNA, 200 bp, Planktothrix agardhii
acggacttaaagataaattgagccttgaggcgagaaatctctcaagtgtaagctgtcaaattcagggaaacctaaatctgtaaattcagacaaggcaatcctgagccaagcctaggggtattagaaatgagggagtttccccaatctaagatcaatacctaggaaggtgcagagactcgacgggagctaccctaacgtta

SEQ ID NO: 3409 - DNA, 162 bp, Artificial Sequence
  Description of Artificial Sequence: Synthetic polynucleotide
gctgcgagccacggacttaaataattgagccttaaagaagaaattctttaagtggatgctctcaaactcagggaaacctaaatctagttatagacaaggcaatcctgagccaagccgaagtagtaattagtaagttaacaacacaaacacaacttatatact

SEQ ID NO: 3410 - DNA, 172 bp, Artificial Sequence
  Description of Artificial Sequence: Synthetic polynucleotide
gctgcgagccacggacttaaataattgagccttaaagaagaaattctttaagtggatgctctcaaactcagggaaacctaaatctagttatagacaaggcaatcctgagccaagccgaagtagtaattagtaagttaacaacacaaacacaagagtataagtataatttcag

SEQ ID NO: 3411 - DNA, 182 bp, Artificial Sequence
  Description of Artificial Sequence: Synthetic polynucleotide
gctgcgagccacggacttaaataattgagccttaaagaagaaattctttaagtggatgctctcaaactcagggaaacctaaatctagttatagacaaggcaatcctgagccaagccgaagtagtaattagtaagttaacaacacaaacacaagtcatatactgagtataagtataatttcag

SEQ ID NO: 3412 - DNA, 192 bp, Artificial Sequence
  Description of Artificial Sequence: Synthetic polynucleotide
gctgcgagccacggacttaaataattgagccttaaagaagaaattctttaagtggatgctctcaaactcagggaaacctaaatctagttatagacaaggcaatcctgagccaagccgaagtagtaattagtaagttaacaacacaaacacaagtcatatactgagtataagtataatttcatattgttgatg

SEQ ID NO: 3413 - DNA, 202 bp, Artificial Sequence
  Description of Artificial Sequence: Synthetic polynucleotide
gctgcgagccacggacttaaataattgagccttaaagaagaaattctttaagtggatgctctcaaactcagggaaacctaaatctagttatagacaaggcaatcctgagccaagccgaagtagtaattagtaagttaacaacacaaacacaagcgataatgcttcatatactgagtataagtatagtttcatattgttgatg

SEQ ID NO: 3414 - DNA, 162 bp, Artificial Sequence
  Description of Artificial Sequence: Synthetic polynucleotide
gctgcgagccacggacttaaataattgagccttaaagaagaaattctttaagtggatgctctcaaactcagggaaacctaaatctagttatagacaaggcaatcctgagccaagccgaagtagtaattagtaagttaacaaaacaaaaacaagctgacgcta

SEQ ID NO: 3415 - DNA, 172 bp, Artificial Sequence
  Description of Artificial Sequence: Synthetic polynucleotide
gctgcgagccacggacttaaataattgagccttaaagaagaaattctttaagtggatgctctcaaactcagggaaacctaaatctagttatagacaaggcaatcctgagccaagccgaagtagtaattagtaagttaacaaaacaaaaacaagctgacgctagtatgagtat

SEQ ID NO: 3416 - DNA, 182 bp, Artificial Sequence
  Description of Artificial Sequence: Synthetic polynucleotide
gctgcgagccacggacttaaataattgagccttaaagaagaaattctttaagtggatgctctcaaactcagggaaacctaaatctagttatagacaaggcaatcctgagccaagccgaagtagtaattagtaagttaacaaaacaaaaacaagctgacgctagtatgagtatagcttcacac

SEQ ID NO: 3417 - DNA, 192 bp, Artificial Sequence
  Description of Artificial Sequence: Synthetic polynucleotide
gctgcgagccacggacttaaataattgagccttaaagaagaaattctttaagtggatgctctcaaactcagggaaacctaaatctagttatagacaaggcaatcctgagccaagccgaagtagtaattagtaagttaacaaaacaaaaacaagctgacgctagtatgagtatagcttcacactcaggtgagg

SEQ ID NO: 3418 - DNA, 202 bp, Artificial Sequence
  Description of Artificial Sequence: Synthetic polynucleotide
gctgcgagccacggacttaaataattgagccttaaagaagaaattctttaagtggatgctctcaaactcagggaaacctaaatctagttatagacaaggcaatcctgagccaagccgaagtagtaattagtaagttaacaaaacaaaaacaagctgacgctagtatgagtatagcttcacactcaggtgaggcatcattcgg

SEQ ID NO: 3419 - DNA, 162 bp, Artificial Sequence
  Description of Artificial Sequence: Synthetic polynucleotide
gctgcgagccacggacttaaataattgagccttaaagaagaaattctttaagtggatgctctcaaactcagggaaacctaaatctagttatagacaaggcaatcctgagccaagccgaagtagtaattagtaagttaacaaaacaaaaacaagctcgcaccg

SEQ ID NO: 3420 - DNA, 172 bp, Artificial Sequence
  Description of Artificial Sequence: Synthetic polynucleotide
gctgcgagccacggacttaaataattgagccttaaagaagaaattctttaagtggatgctctcaaactcagggaaacctaaatctagttatagacaaggcaatcctgagccaagccgaagtagtaattagtaagttaacaaaacaaaaacaagctcgcactgggtcggagcg

SEQ ID NO: 3421 - DNA, 182 bp, Artificial Sequence; identical to SEQ ID NO: 3411
  Description of Artificial Sequence: Synthetic polynucleotide

SEQ ID NO: 3422 - DNA, 182 bp, Artificial Sequence; identical to SEQ ID NO: 3411
  Description of Artificial Sequence: Synthetic polynucleotide

SEQ ID NO: 3423 - DNA, 182 bp, Artificial Sequence; identical to SEQ ID NO: 3411
  Description of Artificial Sequence: Synthetic polynucleotide

SEQ ID NO: 3424 - DNA, 182 bp, Artificial Sequence; identical to SEQ ID NO: 3411
  Description of Artificial Sequence: Synthetic polynucleotide

SEQ ID NO: 3425 - DNA, 182 bp, Artificial Sequence
  Description of Artificial Sequence: Synthetic polynucleotide
gctgcgagccacggacttaaataattgagccttaaagaagaaattctttaagtggatgctctcaaactcagggaaacctaaatctagttatagacaaggcaatcctgagccaagccgaagtagtaattagtaagttaacaacacaaacacaagtaacttagagagtataagtataatttcag

SEQ ID NO: 3426 - DNA, 182 bp, Artificial Sequence
  Description of Artificial Sequence: Synthetic polynucleotide
gctgcgagccacggacttaaataattgagccttaaagaagaaattctttaagtggatgctctcaaactcagggaaacctaaatctagttatagacaaggcaatcctgagccaagccgaagtagtaattagtaagttaacaacacaaacacaagtaacttagatgtaacacacataatttcag

SEQ ID NO: 3427 - DNA, 182 bp, Artificial Sequence
  Description of Artificial Sequence: Synthetic polynucleotide
gctgcgagccacggacttaaataattgagccttaaagaagaaattctttaagtggatgctctcaaactcagggaaacctaaatctagttatagacaaggcaatcctgagccaagccgaagtagtaattagtaagttaacaacacaaacacaagtaacttagatgtaacacacaccgatcaac

SEQ ID NO: 3428 - DNA, 182 bp, Artificial Sequence
  Description of Artificial Sequence: Synthetic polynucleotide
ctgtttaatcacggacttaaataattgagccttaaagaagaaattctttaagtggatgctctcaaactcagggaaacctaaatctagttatagacaaggcaatcctgagccaagccgaagtagtaattagtaagttaacaacacaaacacaagtcatatactgagtataagtataatttcag

SEQ ID NO: 3429 - DNA, 192 bp, Artificial Sequence
  Description of Artificial Sequence: Synthetic polynucleotide
cgtaatttatattgtgaatcacggacttaaataattgagccttaaagaagaaattctttaagtggatgctctcaaactcagggaaacctaaatctagttatagacaaggcaatcctgagccaagccgaagtagtaattagtaagttaacaacacaaacacaagtcatatactgagtataagtataatttcag

SEQ ID NO: 3430 - DNA, 182 bp, Artificial Sequence
  Description of Artificial Sequence: Synthetic polynucleotide
gctatgatccacggacttaaataattgagccttaaagaagaaattctttaagtggatgctctcaaactcagggaaacctaaatctagttatagacaaggcaatcctgagccaagccgaagtagtaattagtaagttaacaacacaaacacaagtcatatactgagtataagtataatttcag

SEQ ID NO: 3431 - DNA, 192 bp, Artificial Sequence
  Description of Artificial Sequence: Synthetic polynucleotide
cggatattatgctgcgatccacggacttaaataattgagccttaaagaagaaattctttaagtggatgctctcaaactcagggaaacctaaatctagttatagacaaggcaatcctgagccaagccgaagtagtaattagtaagttaacaacacaaacacaagtcatatactgagtataagtataatttcag

SEQ ID NO: 3432 - DNA, 192 bp, Artificial Sequence
  Description of Artificial Sequence: Synthetic polynucleotide
cggtaggcgcgctgcgagccacggacttaaataattgagccttaaagaagaaattctttaagtggatgctctcaaactcagggaaacctaaatctagttatagacaaggcaatcctgagccaagccgaagtagtaattagtaagttaacaacacaaacacaagtcatatactgagtataagtataatttcag

SEQ ID NO: 3433 - DNA, 215 bp, Artificial Sequence
  Description of Artificial Sequence: Synthetic polynucleotide
gcgctaacgtcgacgccggcaaacggtaggcgcgctgcgagccacggacttaaataattgagccttaaagaagaaattctttaagtggatgctctcaaactcagggaaacctaaatctagttatagacaaggcaatcctgagccaagccgaagtagtaattagtaagttaacaacacaaacacaagtcatatactgagtataagtataatttcag

SEQ ID NO: 3434 - DNA, 215 bp, Artificial Sequence
  Description of Artificial Sequence: Synthetic polynucleotide
gcatgtcacttgtatcctcgaaacggatattatgctgcgatccacggacttaaataattgagccttaaagaagaaattctttaagtggatgctctcaaactcagggaaacctaaatctagttatagacaaggcaatcctgagccaagccgaagtagtaattagtaagttaacaacacaaacacaagtcatatactgagtataagtataatttcag

SEQ ID NO: 3435 - DNA, 215 bp, Artificial Sequence
  Description of Artificial Sequence: Synthetic polynucleotide
gttagagttatcatttatcgaaacgtaatttagattgtgaatcacggacttaaataattgagccttaaagaagaaattctttaagtggatgctctcaaactcagggaaacctaaatctagttatagacaaggcaatcctgagccaagccgaagtagtaattagtaagttaacaacacaaacacaagtcatatactgagtataagtataatttcag

SEQ ID NO: 3436 - DNA, 152 bp, Artificial Sequence
  Description of Artificial Sequence: Synthetic polynucleotide
gctgcgagccacggacttaaataattgagccttaaagaagaaattctttaagtggatgctctcaaactcagggaaacctaaatctagttatagacaaggcaatcctgagccaagccgaagtagtaattagtaagttaacaacacaaacacaa

SEQ ID NO: 3437 - DNA, 157 bp, Artificial Sequence
  Description of Artificial Sequence: Synthetic polynucleotide
gctgcgagccacggacttaaataattgagccttaaagaagaaattctttaagtggatgctctcaaactcagggaaacctaaatctagttatagacaaggcaatcctgagccaagccgaagtagtaattagtaagttaacaaaacaaaaacaagcccg

SEQ ID NO: 3438 - DNA, 182 bp, Artificial Sequence
  Description of Artificial Sequence: Synthetic polynucleotide
gctgcgagccacggacttaaataattgagccttaaagaagaaattctttaagtggatgctctcaaactcagggaaacctaaatctagttatagacaaggcaatcctgagccaagccgaagtagtaattagtaagttaacaaaacaaaaacaagctcgcactggccggaagctcgtcggagcg

SEQ ID NO: 3439 - DNA, 251 bp, Artificial Sequence
  Description of Artificial Sequence: Synthetic polynucleotide
gctgcgagccacggacttaaataattgagccttaaagaagaaattctttaagtggatgctctcaaactcagggaaacctaaatctagttatagacaaggcaatcctgagccaagccgaagtagtaattagtaagttaacaatagatgacttacaactaatcggaaggtgcagagactcgacgggagctaccctaacgtcaagacgagggtaaagagagagtccaattctcaaagccaatacacaaacacaa

SEQ ID NO: 3440 - DNA, 261 bp, Artificial Sequence
  Description of Artificial Sequence: Synthetic polynucleotide
gctgcgagccacggacttaaataattgagccttaaagaagaaattctttaagtggatgctctcaaactcagggaaacctaaatctagttatagacaaggcaatcctgagccaagccgaagtagtaattagtaagttaacaatagatgacttacaactaatcggaaggtgcagagactcgacgggagctaccctaacgtcaagacgagggtaaagagagagtccaattctcaaagccaatacacaaacacaacttatatact

SEQ ID NO: 3441 - DNA, 271 bp, Artificial Sequence
  Description of Artificial Sequence: Synthetic polynucleotide
gctgcgagccacggacttaaataattgagccttaaagaagaaattctttaagtggatgctctcaaactcagggaaacctaaatctagttatagacaaggcaatcctgagccaagccgaagtagtaattagtaagttaacaatagatgacttacaactaatcggaaggtgcagagactcgacgggagctaccctaacgtcaagacgagggtaaagagagagtccaattctcaaagccaatacacaaacacaagagtataagtataatttcag

SEQ ID NO: 3442 - DNA, 281 bp, Artificial Sequence
  Description of Artificial Sequence: Synthetic polynucleotide
gctgcgagccacggacttaaataattgagccttaaagaagaaattctttaagtggatgctctcaaactcagggaaacctaaatctagttatagacaaggcaatcctgagccaagccgaagtagtaattagtaagttaacaatagatgacttacaactaatcggaaggtgcagagactcgacgggagctaccctaacgtcaagacgagggtaaagagagagtccaattctcaaagccaatacacaaacacaagtcatatactgagtataagtataatttcag

SEQ ID NO: 3443 - DNA, 261 bp, Artificial Sequence
  Description of Artificial Sequence: Synthetic polynucleotide
gctgcgagccacggacttaaataattgagccttaaagaagaaattctttaagtggatgctctcaaactcagggaaacctaaatctagttatagacaaggcaatcctgagccaagccgaagtagtaattagtaagttaacaatagatgacttacaactaatcggaaggtgcagagactcgacgggagctaccctaacgtcaagacgagggtaaagagagagtccaattctcaaagccaataaacaaaaacaagctgacgcta

SEQ ID NO: 3444 - DNA, 271 bp, Artificial Sequence
  Description of Artificial Sequence: Synthetic polynucleotide
gctgcgagccacggacttaaataattgagccttaaagaagaaattctttaagtggatgctctcaaactcagggaaacctaaatctagttatagacaaggcaatcctgagccaagccgaagtagtaattagtaagttaacaatagatgacttacaactaatcggaaggtgcagagactcgacgggagctaccctaacgtcaagacgagggtaaagagagagtccaattctcaaagccaataaacaaaaacaagctgacgctagtatgagtat

SEQ ID NO: 3445 - DNA, 281 bp, Artificial Sequence
  Description of Artificial Sequence: Synthetic polynucleotide
gctgcgagccacggacttaaataattgagccttaaagaagaaattctttaagtggatgctctcaaactcagggaaacctaaatctagttatagacaaggcaatcctgagccaagccgaagtagtaattagtaagttaacaatagatgacttacaactaatcggaaggtgcagagactcgacgggagctaccctaacgtcaagacgagggtaaagagagagtccaattctcaaagccaataaacaaaaacaagctgacgctagtatgagtatagcttcacac

SEQ ID NO: 3446 - DNA, 261 bp, Artificial Sequence
  Description of Artificial Sequence: Synthetic polynucleotide
gctgcgagccacggacttaaataattgagccttaaagaagaaattctttaagtggatgctctcaaactcagggaaacctaaatctagttatagacaaggcaatcctgagccaagccgaagtagtaattagtaagttaacaatagatgacttacaactaatcggaaggtgcagagactcgacgggagctaccctaacgtcaagacgagggtaaagagagagtccaattctcaaagccaataaacaaaaacaagctcgcaccg

SEQ ID NO: 3447 - DNA, 271 bp, Artificial Sequence
  Description of Artificial Sequence: Synthetic polynucleotide
gctgcgagccacggacttaaataattgagccttaaagaagaaattctttaagtggatgctctcaaactcagggaaacctaaatctagttatagacaaggcaatcctgagccaagccgaagtagtaattagtaagttaacaatagatgacttacaactaatcggaaggtgcagagactcgacgggagctaccctaacgtcaagacgagggtaaagagagagtccaattctcaaagccaataaacaaaaacaagctcgcactgggtcggagcg

SEQ ID NO: 3448 - DNA, 281 bp, Artificial Sequence
  Description of Artificial Sequence: Synthetic polynucleotide
gctgcgagccacggacttaaataattgagccttaaagaagaaattctttaagtggatgctctcaaactcagggaaacctaaatctagttatagacaaggcaatcctgagccaagccgaagtagtaattagtaagttaacaatagatgacttacaactaatcggaaggtgcagagactcgacgggagctaccctaacgtcaagacgagggtaaagagagagtccaattctcaaagccaataaacaaaaacaagctcgcactggccggaagctcgtcggagcg

SEQ ID NO: 3449 - DNA, 210 bp, Artificial Sequence
  Description of Artificial Sequence: Synthetic polynucleotide
gctgcgagccacggacttaaataattgagccttaaagaagaaattctttaagtggatgctctcaaactcagggaaacctaaatctagttatagacaaggcaatcctgagccaagccgaagtagtaattagtaagttaacaatagatgacttacaactaatcggaaggtgcagagactcgacgggagctaccctaacgtccacaaacacaa

SEQ ID NO: 3450 - DNA, 220 bp, Artificial Sequence
  Description of Artificial Sequence: Synthetic polynucleotide
gctgcgagccacggacttaaataattgagccttaaagaagaaattctttaagtggatgctctcaaactcagggaaacctaaatctagttatagacaaggcaatcctgagccaagccgaagtagtaattagtaagttaacaatagatgacttacaactaatcggaaggtgcagagactcgacgggagctaccctaacgtccacaaacacaacttatatact

SEQ ID NO: 3451 - DNA, 230 bp, Artificial Sequence
  Description of Artificial Sequence: Synthetic polynucleotide
gctgcgagccacggacttaaataattgagccttaaagaagaaattctttaagtggatgctctcaaactcagggaaacctaaatctagttatagacaaggcaatcctgagccaagccgaagtagtaattagtaagttaacaatagatgacttacaactaatcggaaggtgcagagactcgacgggagctaccctaacgtccacaaacacaagagtataagtataatttcag

SEQ ID NO: 3452 - DNA, 240 bp, Artificial Sequence
  Description of Artificial Sequence: Synthetic polynucleotide
gctgcgagccacggacttaaataattgagccttaaagaagaaattctttaagtggatgctctcaaactcagggaaacctaaatctagttatagacaaggcaatcctgagccaagccgaagtagtaattagtaagttaacaatagatgacttacaactaatcggaaggtgcagagactcgacgggagctaccctaacgtccacaaacacaagtcatatactgagtataagtataatttcag

SEQ ID NO: 3453 - DNA, 220 bp, Artificial Sequence
  Description of Artificial Sequence: Synthetic polynucleotide
gctgcgagccacggacttaaataattgagccttaaagaagaaattctttaagtggatgctctcaaactcagggaaacctaaatctagttatagacaaggcaatcctgagccaagccgaagtagtaattagtaagttaacaatagatgacttacaactaatcggaaggtgcagagactcgacgggagctaccctaacgtcaacaaaaacaagctgacgcta

SEQ ID NO: 3454 - DNA, 230 bp, Artificial Sequence
  Description of Artificial Sequence: Synthetic polynucleotide
gctgcgagccacggacttaaataattgagccttaaagaagaaattctttaagtggatgctctcaaactcagggaaacctaaatctagttatagacaaggcaatcctgagccaagccgaagtagtaattagtaagttaacaatagatgacttacaactaatcggaaggtgcagagactcgacgggagctaccctaacgtcaacaaaaacaagctgacgctagtatgagtat

SEQ ID NO: 3455 - DNA, 240 bp, Artificial Sequence
  Description of Artificial Sequence: Synthetic polynucleotide
gctgcgagccacggacttaaataattgagccttaaagaagaaattctttaagtggatgctctcaaactcagggaaacctaaatctagttatagacaaggcaatcctgagccaagccgaagtagtaattagtaagttaacaatagatgacttacaactaatcggaaggtgcagagactcgacgggagctaccctaacgtcaacaaaaacaagctgacgctagtatgagtatagcttcacac

SEQ ID NO: 3456 - DNA, 220 bp, Artificial Sequence
  Description of Artificial Sequence: Synthetic polynucleotide
gctgcgagccacggacttaaataattgagccttaaagaagaaattctttaagtggatgctctcaaactcagggaaacctaaatctagttatagacaaggcaatcctgagccaagccgaagtagtaattagtaagttaacaatagatgacttacaactaatcggaaggtgcagagactcgacgggagctaccctaacgtcaacaaaaacaagctcgcaccg

SEQ ID NO: 3457 - DNA, 230 bp, Artificial Sequence
  Description of Artificial Sequence: Synthetic polynucleotide
gctgcgagccacggacttaaataattgagccttaaagaagaaattctttaagtggatgctctcaaactcagggaaacctaaatctagttatagacaaggcaatcctgagccaagccgaagtagtaattagtaagttaacaatagatgacttacaactaatcggaaggtgcagagactcgacgggagctaccctaacgtcaacaaaaacaagctcgcactgggtcggagcg

SEQ ID NO: 3458 - DNA, 240 bp, Artificial Sequence
  Description of Artificial Sequence: Synthetic polynucleotide
gctgcgagccacggacttaaataattgagccttaaagaagaaattctttaagtggatgctctcaaactcagggaaacctaaatctagttatagacaaggcaatcctgagccaagccgaagtagtaattagtaagttaacaatagatgacttacaactaatcggaaggtgcagagactcgacgggagctaccctaacgtcaacaaaaacaagctcgcactggccggaagctcgtcggagcg

SEQ ID NO: 3459 - DNA, 172 bp, Artificial Sequence
  Description of Artificial Sequence: Synthetic polynucleotide
acggacttaaataattgagccttaaagaagaaattctttaagtggatgctctcaaactcagggaaacctaaatctagttatagacaaggcaatcctgagccaagccgaagtagtaattagtaagttaacaacacaaacacaagtcatatactgagtataagtataatttcag

SEQ ID NO: 3460 - DNA, 271 bp, Artificial Sequence
  Description of Artificial Sequence: Synthetic polynucleotide
acggacttaaataattgagccttaaagaagaaattctttaagtggatgctctcaaactcagggaaacctaaatctagttatagacaaggcaatcctgagccaagccgaagtagtaattagtaagttaacaatagatgacttacaactaatcggaaggtgcagagactcgacgggagctaccctaacgtcaagacgagggtaaagagagagtccaattctcaaagccaatacacaaacacaagtcatatactgagtataagtataatttcag

SEQ ID NO: 3461 - DNA, 281 bp, Artificial Sequence
  Description of Artificial Sequence: Synthetic polynucleotide
ctgtttaatcacggacttaaataattgagccttaaagaagaaattctttaagtggatgctctcaaactcagggaaacctaaatctagttatagacaaggcaatcctgagccaagccgaagtagtaattagtaagttaacaatagatgacttacaactaatcggaaggtgcagagactcgacgggagctaccctaacgtcaagacgagggtaaagagagagtccaattctcaaagccaatacacaaacacaagtcatatactgagtataagtataatttcag

SEQ ID NO: 3462 - DNA, 291 bp, Artificial Sequence
  Description of Artificial Sequence: Synthetic polynucleotide
cgtaatttatattgtgaatcacggacttaaataattgagccttaaagaagaaattctttaagtggatgctctcaaactcagggaaacctaaatctagttatagacaaggcaatcctgagccaagccgaagtagtaattagtaagttaacaatagatgacttacaactaatcggaaggtgcagagactcgacgggagctaccctaacgtcaagacgagggtaaagagagagtccaattctcaaagccaatacacaaacacaagtcatatactgagtataagtataatttcag

SEQ ID NO: 3463 - DNA, 281 bp, Artificial Sequence
  Description of Artificial Sequence: Synthetic polynucleotide
gctatgatccacggacttaaataattgagccttaaagaagaaattctttaagtggatgctctcaaactcagggaaacctaaatctagttatagacaaggcaatcctgagccaagccgaagtagtaattagtaagttaacaatagatgacttacaactaatcggaaggtgcagagactcgacgggagctaccctaacgtcaagacgagggtaaagagagagtccaattctcaaagccaatacacaaacacaagtcatatactgagtataagtataatttcag

SEQ ID NO: 3464 - DNA, 291 bp, Artificial Sequence
  Description of Artificial Sequence: Synthetic polynucleotide
cggatattatgctgcgatccacggacttaaataattgagccttaaagaagaaattctttaagtggatgctctcaaactcagggaaacctaaatctagttatagacaaggcaatcctgagccaagccgaagtagtaattagtaagttaacaatagatgacttacaactaatcggaaggtgcagagactcgacgggagctaccctaacgtcaagacgagggtaaagagagagtccaattctcaaagccaatacacaaacacaagtcatatactgagtataagtataatttcag

SEQ ID NO: 3465 - DNA, 291 bp, Artificial Sequence
  Description of Artificial Sequence: Synthetic polynucleotide
cggtaggcgcgctgcgagccacggacttaaataattgagccttaaagaagaaattctttaagtggatgctctcaaactcagggaaacctaaatctagttatagacaaggcaatcctgagccaagccgaagtagtaattagtaagttaacaatagatgacttacaactaatcggaaggtgcagagactcgacgggagctaccctaacgtcaagacgagggtaaagagagagtccaattctcaaagccaatacacaaacacaagtcatatactgagtataagtataatttcag

SEQ ID NO: 3466 - DNA, 230 bp, Artificial Sequence
  Description of Artificial Sequence: Synthetic polynucleotide
acggacttaaataattgagccttaaagaagaaattctttaagtggatgctctcaaactcagggaaacctaaatctagttatagacaaggcaatcctgagccaagccgaagtagtaattagtaagttaacaatagatgacttacaactaatcggaaggtgcagagactcgacgggagctaccctaacgtccacaaacacaagtcatatactgagtataagtataatttcag

SEQ ID NO: 3467 - DNA, 240 bp, Artificial Sequence
  Description of Artificial Sequence: Synthetic polynucleotide
ctgtttaatcacggacttaaataattgagccttaaagaagaaattctttaagtggatgctctcaaactcagggaaacctaaatctagttatagacaaggcaatcctgagccaagccgaagtagtaattagtaagttaacaatagatgacttacaactaatcggaaggtgcagagactcgacgggagctaccctaacgtccacaaacacaagtcatatactgagtataagtataatttcag

SEQ ID NO: 3468 - DNA, 250 bp, Artificial Sequence
  Description of Artificial Sequence: Synthetic polynucleotide
cgtaatttatattgtgaatcacggacttaaataattgagccttaaagaagaaattctttaagtggatgctctcaaactcagggaaacctaaatctagttatagacaaggcaatcctgagccaagccgaagtagtaattagtaagttaacaatagatgacttacaactaatcggaaggtgcagagactcgacgggagctaccctaacgtccacaaacacaagtcatatactgagtataagtataatttcag

SEQ ID NO: 3469 - DNA, 240 bp, Artificial Sequence
  Description of Artificial Sequence: Synthetic polynucleotide
gctatgatccacggacttaaataattgagccttaaagaagaaattctttaagtggatgctctcaaactcagggaaacctaaatctagttatagacaaggcaatcctgagccaagccgaagtagtaattagtaagttaacaatagatgacttacaactaatcggaaggtgcagagactcgacgggagctaccctaacgtccacaaacacaagtcatatactgagtataagtataatttcag

SEQ ID NO: 3470 - DNA, 250 bp, Artificial Sequence
  Description of Artificial Sequence: Synthetic polynucleotide
cggatattatgctgcgatccacggacttaaataattgagccttaaagaagaaattctttaagtggatgctctcaaactcagggaaacctaaatctagttatagacaaggcaatcctgagccaagccgaagtagtaattagtaagttaacaatagatgacttacaactaatcggaaggtgcagagactcgacgggagctaccctaacgtccacaaacacaagtcatatactgagtataagtataatttcag

SEQ ID NO: 3471 - DNA, 250 bp, Artificial Sequence
  Description of Artificial Sequence: Synthetic polynucleotide
cggtaggcgcgctgcgagccacggacttaaataattgagccttaaagaagaaattctttaagtggatgctctcaaactcagggaaacctaaatctagttatagacaaggcaatcctgagccaagccgaagtagtaattagtaagttaacaatagatgacttacaactaatcggaaggtgcagagactcgacgggagctaccctaacgtccacaaacacaagtcatatactgagtataagtataatttcag

SEQ ID NO: 3472 - DNA, 162 bp, Artificial Sequence; identical to SEQ ID NO: 3409
  Description of Artificial Sequence: Synthetic polynucleotide

SEQ ID NO: 3473 - DNA, 172 bp, Artificial Sequence; identical to SEQ ID NO: 3410
  Description of Artificial Sequence: Synthetic polynucleotide

SEQ ID NO: 3474 - DNA, 182 bp, Artificial Sequence; identical to SEQ ID NO: 3411
  Description of Artificial Sequence: Synthetic polynucleotide

SEQ ID NO: 3475 - DNA, 192 bp, Artificial Sequence; identical to SEQ ID NO: 3412
  Description of Artificial Sequence: Synthetic polynucleotide

SEQ ID NO: 3476 - DNA, 202 bp, Artificial Sequence; identical to SEQ ID NO: 3413
  Description of Artificial Sequence: Synthetic polynucleotide

SEQ ID NO: 3477 - DNA, 162 bp, Artificial Sequence; identical to SEQ ID NO: 3414
  Description of Artificial Sequence: Synthetic polynucleotide

SEQ ID NO: 3478 - DNA, 172 bp, Artificial Sequence; identical to SEQ ID NO: 3415
  Description of Artificial Sequence: Synthetic polynucleotide

SEQ ID NO: 3479 - DNA, 182 bp, Artificial Sequence; identical to SEQ ID NO: 3416
  Description of Artificial Sequence: Synthetic polynucleotide

SEQ ID NO: 3480 - DNA, 192 bp, Artificial Sequence; identical to SEQ ID NO: 3417
  Description of Artificial Sequence: Synthetic polynucleotide

SEQ ID NO: 3481 - DNA, 202 bp, Artificial Sequence; identical to SEQ ID NO: 3418
  Description of Artificial Sequence: Synthetic polynucleotide

SEQ ID NO: 3482 - DNA, 162 bp, Artificial Sequence; identical to SEQ ID NO: 3419
  Description of Artificial Sequence: Synthetic polynucleotide

SEQ ID NO: 3483 - DNA, 172 bp, Artificial Sequence; identical to SEQ ID NO: 3420
  Description of Artificial Sequence: Synthetic polynucleotide

SEQ ID NO: 3484 - DNA, 182 bp, Artificial Sequence; identical to SEQ ID NO: 3411
  Description of Artificial Sequence: Synthetic polynucleotide

SEQ ID NO: 3485 - DNA, 182 bp, Artificial Sequence; identical to SEQ ID NO: 3411
  Description of Artificial Sequence: Synthetic polynucleotide

SEQ ID NO: 3486 - DNA, 182 bp, Artificial Sequence; identical to SEQ ID NO: 3411
  Description of Artificial Sequence: Synthetic polynucleotide

SEQ ID NO: 3487 - DNA, 182 bp, Artificial Sequence; identical to SEQ ID NO: 3411
  Description of Artificial Sequence: Synthetic polynucleotide

SEQ ID NO: 3488 - DNA, 182 bp, Artificial Sequence; identical to SEQ ID NO: 3425
  Description of Artificial Sequence: Synthetic polynucleotide

SEQ ID NO: 3489 - DNA, 182 bp, Artificial Sequence; identical to SEQ ID NO: 3426
  Description of Artificial Sequence: Synthetic polynucleotide

SEQ ID NO: 3490 - DNA, 182 bp, Artificial Sequence; identical to SEQ ID NO: 3427
  Description of Artificial Sequence: Synthetic polynucleotide

SEQ ID NO: 3491 - DNA, 182 bp, Artificial Sequence; identical to SEQ ID NO: 3428
  Description of Artificial Sequence: Synthetic polynucleotide

SEQ ID NO: 3492 - DNA, 192 bp, Artificial Sequence; identical to SEQ ID NO: 3429
  Description of Artificial Sequence: Synthetic polynucleotide

SEQ ID NO: 3493 - DNA, 182 bp, Artificial Sequence; identical to SEQ ID NO: 3430
  Description of Artificial Sequence: Synthetic polynucleotide

SEQ ID NO: 3494 - DNA, 192 bp, Artificial Sequence; identical to SEQ ID NO: 3431
  Description of Artificial Sequence: Synthetic polynucleotide

SEQ ID NO: 3495 - DNA, 192 bp, Artificial Sequence; identical to SEQ ID NO: 3432
  Description of Artificial Sequence: Synthetic polynucleotide

SEQ ID NO: 3496 - DNA, 215 bp, Artificial Sequence; identical to SEQ ID NO: 3433
  Description of Artificial Sequence: Synthetic polynucleotide

SEQ ID NO: 3497 - DNA, 215 bp, Artificial Sequence; identical to SEQ ID NO: 3434
  Description of Artificial Sequence: Synthetic polynucleotide

SEQ ID NO: 3498 - DNA, 215 bp, Artificial Sequence; identical to SEQ ID NO: 3435
  Description of Artificial Sequence: Synthetic polynucleotide

SEQ ID NO: 3499 - DNA, 152 bp, Artificial Sequence; identical to SEQ ID NO: 3436
  Description of Artificial Sequence: Synthetic polynucleotide

SEQ ID NO: 3500 - DNA, 157 bp, Artificial Sequence; identical to SEQ ID NO: 3437
  Description of Artificial Sequence: Synthetic polynucleotide

SEQ ID NO: 3501 - DNA, 182 bp, Artificial Sequence; identical to SEQ ID NO: 3438
  Description of Artificial Sequence: Synthetic polynucleotide

SEQ ID NO: 3502 - DNA, 251 bp, Artificial Sequence; identical to SEQ ID NO: 3439
  Description of Artificial Sequence: Synthetic polynucleotide

SEQ ID NO: 3503 - DNA, 261 bp, Artificial Sequence; identical to SEQ ID NO: 3440
  Description of Artificial Sequence: Synthetic polynucleotide

SEQ ID NO: 3504 - DNA, 271 bp, Artificial Sequence; identical to SEQ ID NO: 3441
  Description of Artificial Sequence: Synthetic polynucleotide

SEQ ID NO: 3505 - DNA, 281 bp, Artificial Sequence; identical to SEQ ID NO: 3442
  Description of Artificial Sequence: Synthetic polynucleotide

SEQ ID NO: 3506 - DNA, 261 bp, Artificial Sequence; identical to SEQ ID NO: 3443
  Description of Artificial Sequence: Synthetic polynucleotide

SEQ ID NO: 3507 - DNA, 271 bp, Artificial Sequence; identical to SEQ ID NO: 3444
  Description of Artificial Sequence: Synthetic polynucleotide

SEQ ID NO: 3508 - DNA, 281 bp, Artificial Sequence; identical to SEQ ID NO: 3445
  Description of Artificial Sequence: Synthetic polynucleotide

SEQ ID NO: 3509 - DNA, 261 bp, Artificial Sequence; identical to SEQ ID NO: 3446
  Description of Artificial Sequence: Synthetic polynucleotide

SEQ ID NO: 3510 - DNA, 271 bp, Artificial Sequence; identical to SEQ ID NO: 3447
  Description of Artificial Sequence: Synthetic polynucleotide

SEQ ID NO: 3511 - DNA, 281 bp, Artificial Sequence; identical to SEQ ID NO: 3448
  Description of Artificial Sequence: Synthetic polynucleotide

SEQ ID NO: 3512 - DNA, 210 bp, Artificial Sequence; identical to SEQ ID NO: 3449
  Description of Artificial Sequence: Synthetic polynucleotide

SEQ ID NO: 3513 - DNA, 220 bp, Artificial Sequence; identical to SEQ ID NO: 3450
  Description of Artificial Sequence: Synthetic polynucleotide

SEQ ID NO: 3514 - DNA, 230 bp, Artificial Sequence; identical to SEQ ID NO: 3451
  Description of Artificial Sequence: Synthetic polynucleotide

SEQ ID NO: 3515 - DNA, 240 bp, Artificial Sequence; identical to SEQ ID NO: 3452
  Description of Artificial Sequence: Synthetic polynucleotide

SEQ ID NO: 3516 - DNA, 220 bp, Artificial Sequence; identical to SEQ ID NO: 3453
  Description of Artificial Sequence: Synthetic polynucleotide

SEQ ID NO: 3517 - DNA, 230 bp, Artificial Sequence; identical to SEQ ID NO: 3454
  Description of Artificial Sequence: Synthetic polynucleotide

SEQ ID NO: 3518 - DNA, 240 bp, Artificial Sequence; identical to SEQ ID NO: 3455
  Description of Artificial Sequence: Synthetic polynucleotide

SEQ ID NO: 3519 - DNA, 220 bp, Artificial Sequence; identical to SEQ ID NO: 3456
  Description of Artificial Sequence: Synthetic polynucleotide

SEQ ID NO: 3520 - DNA, 230 bp, Artificial Sequence; identical to SEQ ID NO: 3457
  Description of Artificial Sequence: Synthetic polynucleotide

SEQ ID NO: 3521 - DNA, 240 bp, Artificial Sequence; identical to SEQ ID NO: 3458
  Description of Artificial Sequence: Synthetic polynucleotide

SEQ ID NO: 3522 - DNA, 172 bp, Artificial Sequence; identical to SEQ ID NO: 3459
  Description of Artificial Sequence: Synthetic polynucleotide

SEQ ID NO: 3523 - DNA, 271 bp, Artificial Sequence; identical to SEQ ID NO: 3460
  Description of Artificial Sequence: Synthetic polynucleotide

SEQ ID NO: 3524 - DNA, 281 bp, Artificial Sequence; identical to SEQ ID NO: 3461
  Description of Artificial Sequence: Synthetic polynucleotide

SEQ ID NO: 3525 - DNA, 291 bp, Artificial Sequence; identical to SEQ ID NO: 3462
  Description of Artificial Sequence: Synthetic polynucleotide

SEQ ID NO: 3526 - DNA, 281 bp, Artificial Sequence; identical to SEQ ID NO: 3463
  Description of Artificial Sequence: Synthetic polynucleotide

SEQ ID NO: 3527 - DNA, 291 bp, Artificial Sequence; identical to SEQ ID NO: 3464
  Description of Artificial Sequence: Synthetic polynucleotide

SEQ ID NO: 3528 - DNA, 291 bp, Artificial Sequence; identical to SEQ ID NO: 3465
  Description of Artificial Sequence: Synthetic polynucleotide

SEQ ID NO: 3529 - DNA, 230 bp, Artificial Sequence; identical to SEQ ID NO: 3466
  Description of Artificial Sequence: Synthetic polynucleotide

SEQ ID NO: 3530 - DNA, 240 bp, Artificial Sequence; identical to SEQ ID NO: 3467
  Description of Artificial Sequence: Synthetic polynucleotide

SEQ ID NO: 3531 - DNA, 250 bp, Artificial Sequence; identical to SEQ ID NO: 3468
  Description of Artificial Sequence: Synthetic polynucleotide

SEQ ID NO: 3532 - DNA, 240 bp, Artificial Sequence; identical to SEQ ID NO: 3469
  Description of Artificial Sequence: Synthetic polynucleotide

SEQ ID NO: 3533 - DNA, 250 bp, Artificial Sequence; identical to SEQ ID NO: 3470
  Description of Artificial Sequence: Synthetic polynucleotide

SEQ ID NO: 3534 - DNA, 250 bp, Artificial Sequence; identical to SEQ ID NO: 3471
  Description of Artificial Sequence: Synthetic polynucleotide

SEQ ID NO: 3535 - DNA, 1137 bp, Artificial Sequence
  Description of Artificial Sequence: Synthetic polynucleotide
atgctgctgctggtcacatctctgctgctgtgcgagctgccccatcctgcctttctgctgatccccgacatccagatgacccagaccacaagcagcctgtctgccagcctgggcgatagagtgaccatcagctgtagagccagccaggacatcagcaagtacctgaactggtatcagcaaaagcccgacggcaccgtgaagctgctgatctaccacaccagcagactgcacagcggcgtgccaagcagattttctggcagcggctctggcaccgactacagcctgacaatcagcaacctggaacaagaggatatcgctacctacttctgccagcaaggcaacaccctgccttacacctttggcggaggcaccaagctggaaatcaccggctctacaagcggcagcggcaaacctggatctggcgagggatctaccaagggcgaagtgaaactgcaagagtctggccctggactggtggccccatctcagtctctgagcgtgacctgtacagtcagcggagtgtccctgcctgattacggcgtgtcctggatcagacagcctcctcggaaaggcctggaatggctgggagtgatctggggcagcgagacaacctactacaacagcgccctgaagtcccggctgaccatcatcaaggacaactccaagagccaggtgttcctgaagatgaacagcctgcagaccgacgacaccgccatctactattgcgccaagcactactactacggcggcagctacgccatggattattggggccagggcaccagcgtgaccgtttcttctgccgccgctatcgaagtgatgtaccctcctccttacctggacaacgagaagtccaacggcaccatcatccacgtgaagggcaagcacctgtgtccttctccactgttccccggacctagcaagcctttctgggtgctcgttgttgttggcggcgtgctggcctgttacagcctgctggttaccgtggccttcatcatcttttgggtcaagagaggccggaagaaacttctttatatattcaagcagccctttatgcgacccgttcagactacccaagaggaagatggatgcagttgccgctttccagaagaggaggagggcgggtgcgaactgtaa

SEQ ID NO: 3536 - DNA, 1134 bp, Artificial Sequence
  Description of Artificial Sequence: Synthetic polynucleotide
atgctgctgctggtcacatctctgctgctgtgcgagctgccccatcctgcctttctgctgatccccgacatccagatgacccagaccacaagcagcctgtctgccagcctgggcgatagagtgaccatcagctgtagagccagccaggacatcagcaagtacctgaactggtatcagcaaaagcccgacggcaccgtgaagctgctgatctaccacaccagcagactgcacagcggcgtgccaagcagattttctggcagcggctctggcaccgactacagcctgacaatcagcaacctggaacaagaggatatcgctacctacttctgccagcaaggcaacaccctgccttacacctttggcggaggcaccaagctggaaatcaccggctctacaagcggcagcggcaaacctggatctggcgagggatctaccaagggcgaagtgaaactgcaagagtctggccctggactggtggccccatctcagtctctgagcgtgacctgtacagtcagcggagtgtccctgcctgattacggcgtgtcctggatcagacagcctcctcggaaaggcctggaatggctgggagtgatctggggcagcgagacaacctactacaacagcgccctgaagtcccggctgaccatcatcaaggacaactccaagagccaggtgttcctgaagatgaacagcctgcagaccgacgacaccgccatctactattgcgccaagcactactactacggcggcagctacgccatggattattggggccagggcaccagcgtgaccgtttcttctgccgccgctatcgaagtgatgtaccctcctccttacctggacaacgagaagtccaacggcaccatcatccacgtgaagggcaagcacctgtgtccttctccactgttccccggacctagcaagcctttctgggtgctcgttgttgttggcggcgtgctggcctgttacagcctgctggttaccgtggccttcatcatcttttgggtccgaagcaagcggagccggctgctgcactccgactacatgaacatgacccctagacggcccggaccaaccagaaagcactaccagccttacgctcctcctagagacttcgccgcctaccggtcctaa

SEQ ID NO: 3537 - DNA, 1470 bp, Artificial Sequence
  Description of Artificial Sequence: Synthetic polynucleotide
atgctgctgctggtcacatctctgctgctgtgcgagctgccccatcctgcctttctgctgatccccgacatccagatgacccagaccacaagcagcctgtctgccagcctgggcgatagagtgaccatcagctgtagagccagccaggacatcagcaagtacctgaactggtatcagcaaaagcccgacggcaccgtgaagctgctgatctaccacaccagcagactgcacagcggcgtgccaagcagattttctggcagcggctctggcaccgactacagcctgacaatcagcaacctggaacaagaggatatcgctacctacttctgccagcaaggcaacaccctgccttacacctttggcggaggcaccaagctggaaatcaccggctctacaagcggcagcggcaaacctggatctggcgagggatctaccaagggcgaagtgaaactgcaagagtctggccctggactggtggccccatctcagtctctgagcgtgacctgtacagtcagcggagtgtccctgcctgattacggcgtgtcctggatcagacagcctcctcggaaaggcctggaatggctgggagtgatctggggcagcgagacaacctactacaacagcgccctgaagtcccggctgaccatcatcaaggacaactccaagagccaggtgttcctgaagatgaacagcctgcagaccgacgacaccgccatctactattgcgccaagcactactactacggcggcagctacgccatggattattggggccagggcaccagcgtgaccgtttcttctgccgccgctatcgaagtgatgtaccctcctccttacctggacaacgagaagtccaacggcaccatcatccacgtgaagggcaagcacctgtgtccttctccactgttccccggacctagcaagcctttctgggtgctcgttgttgttggcggcgtgctggcctgttacagcctgctggttaccgtggccttcatcatcttttgggtccgaagcaagcggagccggctgctgcactccgactacatgaacatgacccctagacggcccggaccaaccagaaagcactaccagccttacgctcctcctagagacttcgccgcctaccggtccagagtgaagttcagcagatccgccgatgctcccgcctatcagcagggccaaaaccagctgtacaacgagctgaacctggggagaagagaagagtacgacgtgctggacaagcggagaggcagagatcctgaaatgggcggcaagcccagacggaagaatcctcaagagggcctgtataatgagctgcagaaagacaagatggccgaggcctacagcgagatcggaatgaagggcgagcgcagaagaggcaagggacacgatggactgtaccagggactgagcaccgccaccaaggatacctatgacgccctgcacatgcaggccctgcctccaagataa

SEQ ID NO: 3538 - DNA, 1347 bp, Artificial Sequence
  Description of Artificial Sequence: Synthetic polynucleotide
atgctgctgctggtcacatctctgctgctgtgcgagctgccccatcctgcctttctgctgatccccgacatccagatgacccagaccacaagcagcctgtctgccagcctgggcgatagagtgaccatcagctgtagagccagccaggacatcagcaagtacctgaactggtatcagcaaaagcccgacggcaccgtgaagctgctgatctaccacaccagcagactgcacagcggcgtgccaagcagattttctggcagcggctctggcaccgactacagcctgacaatcagcaacctggaacaagaggatatcgctacctacttctgccagcaaggcaacaccctgccttacacctttggcggaggcaccaagctggaaatcaccggctctacaagcggcagcggcaaacctggatctggcgagggatctaccaagggcgaagtgaaactgcaagagtctggccctggactggtggccccatctcagtctctgagcgtgacctgtacagtcagcggagtgtccctgcctgattacggcgtgtcctggatcagacagcctcctcggaaaggcctggaatggctgggagtgatctggggcagcgagacaacctactacaacagcgccctgaagtcccggctgaccatcatcaaggacaactccaagagccaggtgttcctgaagatgaacagcctgcagaccgacgacaccgccatctactattgcgccaagcactactactacggcggcagctacgccatggattattggggccagggcaccagcgtgaccgtttcttctgccgccgctatcgaagtgatgtaccctcctccttacctggacaacgagaagtccaacggcaccatcatccacgtgaagggcaagcacctgtgtccttctccactgttccccggacctagcaagcctttctgggtgctcgttgttgttggcggcgtgctggcctgttacagcctgctggttaccgtggccttcatcatcttttgggtcagagtgaagttcagcagatccgccgatgctcccgcctatcagcagggccaaaaccagctgtacaacgagctgaacctggggagaagagaagagtacgacgtgctggacaagcggagaggcagagatcctgaaatgggcggcaagcccagacggaagaatcctcaagagggcctgtataatgagctgcagaaagacaagatggccgaggcctacagcgagatcggaatgaagggcgagcgcagaagaggcaagggacacgatggactgtaccagggactgagcaccgccaccaaggatacctatgacgccctgcacatgcaggccctgcctccaagataa

SEQ ID NO: 3539 - DNA, 1461 bp, Artificial Sequence
  Description of Artificial Sequence: Synthetic polynucleotide
atggctctcccggtcacagcccttctcctgcccctggcactcttgctgcatgcggcacgacccgacatccagatgacccagaccacaagcagcctgtctgccagcctgggcgatagagtgaccatcagctgtagagccagccaggacatcagcaagtacctgaactggtatcagcaaaagcccgacggcaccgtgaagctgctgatctaccacaccagcagactgcacagcggcgtgccaagcagattttctggcagcggctctggcaccgactacagcctgacaatcagcaacctggaacaagaggatatcgctacctacttctgccagcaaggcaacaccctgccttacacctttggcggaggcaccaagctggaaatcaccggtggaggtggttctggcggagggggatctggtggaggcggttcagaagtgaaactgcaagagtctggccctggactggtggccccatctcagtctctgagcgtgacctgtacagtcagcggagtgtccctgcctgattacggcgtgtcctggatcagacagcctcctcggaaaggcctggaatggctgggagtgatctggggcagcgagacaacctactacaacagcgccctgaagtcccggctgaccatcatcaaggacaactccaagagccaggtgttcctgaagatgaacagcctgcagaccgacgacaccgccatctactattgcgccaagcactactactacggcggcagctacgccatggattattggggccagggcaccagcgtgaccgtttcttctaccacaacgcccgccccgcgaccgcctactcccgctcccacaattgcatcacaacccctgtctttgagacccgaagcttgtcgaccagctgccggtggcgcggttcacacgcgggggctcgatttcgcctgtgatatatatatatgggccccattggctggaacatgcggagtattgcttctgagcctggtgattaccctctactgtaagagaggccggaagaaacttctttatatattcaagcagccctttatgcgacccgttcagactacccaagaggaagatggatgcagttgccgctttccagaagaggaggagggcgggtgcgaactgagagtgaagttcagcagatccgccgatgctcccgcctatcagcagggccaaaaccagctgtacaacgagctgaacctggggagaagagaagagtacgacgtgctggacaagcggagaggcagagatcctgaaatgggcggcaagcccagacggaagaatcctcaagagggcctgtataatgagctgcagaaagacaagatggccgaggcctacagcgagatcggaatgaagggcgagcgcagaagaggcaagggacacgatggactgtaccagggactgagcaccgccaccaaggatacctatgacgccctgcacatgcaggccctgcctccaagataa

SEQ ID NO: 3540 - DNA, 1461 bp, Artificial Sequence
  Description of Artificial Sequence: Synthetic polynucleotide
atggctctcccggtcacagcccttctcctgcccctggcactcttgctgcatgcggcacgacccgacatccagatgacccagaccacaagcagcctgtctgccagcctgggcgatagagtgaccatcagctgtagagccagccaggacatcagcaagtacctgaactggtatcagcaaaagcccgacggcaccgtgaagctgctgatctaccacaccagcagactgcacagcggcgtgccaagcagattttctggcagcggctctggcaccgactacagcctgacaatcagcaacctggaacaagaggatatcgctacctacttctgccagcaaggcaacaccctgccttacacctttggcggaggcaccaagctggaaatcaccggtggaggtggttctggcggagggggatctggtggaggcggttcagaagtgaaactgcaagagtctggccctggactggtggccccatctcagtctctgagcgtgacctgtacagtcagcggagtgtccctgcctgattacggcgtgtcctggatcagacagcctcctcggaaaggcctggaatggctgggagtgatctggggcagcgagacaacctactacaacagcgccctgaagtcccggctgaccatcatcaaggacaactccaagagccaggtgttcctgaagatgaacagcctgcagaccgacgacaccgccatctactattgcgccaagcactactactacggcggcagctacgccatggattattggggccagggcaccagcgtgaccgtttcttctaccacaacgcccgccccgcgaccgcctactcccgctcccacaattgcatcacaacccctgtctttgagacccgaagcttgtcgaccagctgccggtggcgcggttcacacgcgggggctcgatttcgcctgtgatatatatatatgggccccattggctggaacatgcggagtattgcttctgagcctggtgattaccctctactgtaagagaggccggaagaaacttctttatatattcaagcagccctttatgcgacccgttcagactacccaagaggaagatggatgcagttgccgctttccagaagaggaggagggcgggtgcgaactgagagtgaagttcagcagatccgccgatgctcccgcctataagcagggccaaaaccagctgtacaacgagctgaacctggggagaagagaagagtacgacgtgctggacaagcggagaggcagagatcctgaaatgggcggcaagcccagacggaagaatcctcaagagggcctgtataatgagctgcagaaagacaagatggccgaggcctacagcgagatcggaatgaagggcgagcgcagaagaggcaagggacacgatggactgtaccagggactgagcaccgccaccaaggatacctatgacgccctgcacatgcaggccctgcctccaagataa

SEQ ID NO: 3541 - DNA, 1452 bp, Artificial Sequence
  Description of Artificial Sequence: Synthetic polynucleotide
atgctgctgctggtcacatctctgctgctgtgcgagctgccccatcctgcctttctgctgatcccccaggttcaactccagcagtctggtcccggcctcgttaaaccaagccagactttgtctcttacctgtgctatcagtggcgatagcgtgtctagtaattcagccgcatggaactggatccgacaatcaccgagtaggggacttgaatggctgggtagaacctattaccggtccaaatggtacaatgactatgcagtgtctgtaaaaagcaggatcacgatcaaccctgatacgtctaaaaaccagttttctctgcaacttaatagtgtgacccctgaagacaccgctgtgtattactgtgcacgggaggttaccggtgatcttgaagatgcttttgatatatggggccaaggtacgatggtcacggtgtctagtgggggaggcggcagcgacatacagatgacgcagagcccatccagtctctccgcgtctgttggtgacagagtgactattacatgtagggcgtctcagaccatttggtcttacctcaattggtatcaacagcgaccaggcaaagcaccgaacttgctcatttacgctgccagctcactccaaagtggtgtgccgtccagatttagtggtaggggcagtggcactgatttcactctgactatttcaagtcttcaagctgaggattttgccacatactactgccagcaaagttactcaatacctcagacttttggacaggggacaaaattggagattaaatccggaaccacaacgcccgccccgcgaccgcctactcccgctcccacaattgcatcacaacccctgtctttgagacccgaagcttgtcgaccagctgccggtggcgcggttcacacgcgggggctcgatttcgcctgtgatatatatatatgggccccattggctggaacatgcggagtattgcttctgagcctggtgattaccctctactgtaagagaggccggaagaaacttctttatatattcaagcagccctttatgcgacccgttcagactacccaagaggaagatggatgcagttgccgctttccagaagaggaggagggcgggtgcgaactgagagtgaagttcagcagatccgccgatgctcccgcctataagcagggccaaaaccagctgtacaacgagctgaacctggggagaagagaagagtacgacgtgctggacaagcggagaggcagagatcctgaaatgggcggcaagcccagacggaagaatcctcaagagggcctgtataatgagctgcagaaagacaagatggccgaggcctacagcgagatcggaatgaagggcgagcgcagaagaggcaagggacacgatggactgtaccagggactgagcaccgccaccaaggatacctatgacgccctgcacatgcaggccctgcctccaagataa

SEQ ID NO: 3542 - DNA, 2202 bp, Artificial Sequence
  Description of Artificial Sequence: Synthetic polynucleotide
atgctgctgctggtcacatctctgctgctgtgcgagctgccccatcctgcctttctgctgatccccgacatccagatgacccagaccacaagcagcctgtctgccagcctgggcgatagagtgaccatcagctgtagagccagccaggacatcagcaagtacctgaactggtatcagcaaaagcccgacggcaccgtgaagctgctgatctaccacaccagcagactgcacagcggcgtgccaagcagattttctggcagcggctctggcaccgactacagcctgacaatcagcaacctggaacaagaggatatcgctacctacttctgccagcaaggcaacaccctgccttacacctttggcggaggcaccaagctggaaatcaccggcggcggaggatcccaggttcaactccagcagtctggtcccggcctcgttaaaccaagccagactttgtctcttacctgtgctatcagtggcgatagcgtgtctagtaattcagccgcatggaactggatccgacaatcaccgagtaggggacttgaatggctgggtagaacctattaccggtccaaatggtacaatgactatgcagtgtctgtaaaaagcaggatcacgatcaaccctgatacgtctaaaaaccagttttctctgcaacttaatagtgtgacccctgaagacaccgctgtgtattactgtgcacgggaggttaccggtgatcttgaagatgcttttgatatatggggccaaggtacgatggtcacggtgtctagtggctctacaagcggcagcggcaaacctggatctggcgagggatctaccaagggcgacatacagatgacgcagagcccatccagtctctccgcgtctgttggtgacagagtgactattacatgtagggcgtctcagaccatttggtcttacctcaattggtatcaacagcgaccaggcaaagcaccgaacttgctcatttacgctgccagctcactccaaagtggtgtgccgtccagatttagtggtaggggcagtggcactgatttcactctgactatttcaagtcttcaagctgaggattttgccacatactactgccagcaaagttactcaatacctcagacttttggacaggggacaaaattggagattaaagggggaggcggcagcgaagtgaaactgcaagagtctggccctggactggtggccccatctcagtctctgagcgtgacctgtacagtcagcggagtgtccctgcctgattacggcgtgtcctggatcagacagcctcctcggaaaggcctggaatggctgggagtgatctggggcagcgagacaacctactacaacagcgccctgaagtcccggctgaccatcatcaaggacaactccaagagccaggtgttcctgaagatgaacagcctgcagaccgacgacaccgccatctactattgcgccaagcactactactacggcggcagctacgccatggattattggggccagggcaccagcgtgaccgtttcttcttccggaaccacaacgcccgccccgcgaccgcctactcccgctcccacaattgcatcacaacccctgtctttgagacccgaagcttgtcgaccagctgccggtggcgcggttcacacgcgggggctcgatttcgcctgtgatatatatatatgggccccattggctggaacatgcggagtattgcttctgagcctggtgattaccctctactgtaagagaggccggaagaaacttctttatatattcaagcagccctttatgcgacccgttcagactacccaagaggaagatggatgcagttgccgctttccagaagaggaggagggcgggtgcgaactgagagtgaagttcagcagatccgccgatgctcccgcctataagcagggccaaaaccagctgtacaacgagctgaacctggggagaagagaagagtacgacgtgctggacaagcggagaggcagagatcctgaaatgggcggcaagcccagacggaagaatcctcaagagggcctgtataatgagctgcagaaagacaagatggccgaggcctacagcgagatcggaatgaagggcgagcgcagaagaggcaagggacacgatggactgtaccagggactgagcaccgccaccaaggatacctatgacgccctgcacatgcaggccctgcctccaagataa

SEQ ID NO: 3543 - DNA, 2262 bp, Artificial Sequence
  Description of Artificial Sequence: Synthetic polynucleotide
atgctgctgctggtcacatctctgctgctgtgcgagctgccccatcctgcctttctgctgatcccccaggttcaactccagcagtctggtcccggcctcgttaaaccaagccagactttgtctcttacctgtgctatcagtggcgatagcgtgtctagtaattcagccgcatggaactggatccgacaatcaccgagtaggggacttgaatggctgggtagaacctattaccggtccaaatggtacaatgactatgcagtgtctgtaaaaagcaggatcacgatcaaccctgatacgtctaaaaaccagttttctctgcaacttaatagtgtgacccctgaagacaccgctgtgtattactgtgcacgggaggttaccggtgatcttgaagatgcttttgatatatggggccaaggtacgatggtcacggtgtctagtgggggaggcggcagcgacatacagatgacgcagagcccatccagtctctccgcgtctgttggtgacagagtgactattacatgtagggcgtctcagaccatttggtcttacctcaattggtatcaacagcgaccaggcaaagcaccgaacttgctcatttacgctgccagctcactccaaagtggtgtgccgtccagatttagtggtaggggcagtggcactgatttcactctgactatttcaagtcttcaagctgaggattttgccacatactactgccagcaaagttactcaatacctcagacttttggacaggggacaaaattggagattaaagggggaggcggatccggcggtggtggctccggcggtggtggttctggaggcggcggaagcggtgggggtggtagcgacatccagatgacccagaccacaagcagcctgtctgccagcctgggcgatagagtgaccatcagctgtagagccagccaggacatcagcaagtacctgaactggtatcagcaaaagcccgacggcaccgtgaagctgctgatctaccacaccagcagactgcacagcggcgtgccaagcagattttctggcagcggctctggcaccgactacagcctgacaatcagcaacctggaacaagaggatatcgctacctacttctgccagcaaggcaacaccctgccttacacctttggcggaggcaccaagctggaaatcaccggctctacaagcggcagcggcaaacctggatctggcgagggatctaccaagggcgaagtgaaactgcaagagtctggccctggactggtggccccatctcagtctctgagcgtgacctgtacagtcagcggagtgtccctgcctgattacggcgtgtcctggatcagacagcctcctcggaaaggcctggaatggctgggagtgatctggggcagcgagacaacctactacaacagcgccctgaagtcccggctgaccatcatcaaggacaactccaagagccaggtgttcctgaagatgaacagcctgcagaccgacgacaccgccatctactattgcgccaagcactactactacggcggcagctacgccatggattattggggccagggcaccagcgtgaccgtttcttcttccggaaccacaacgcccgccccgcgaccgcctactcccgctcccacaattgcatcacaacccctgtctttgagacccgaagcttgtcgaccagctgccggtggcgcggttcacacgcgggggctcgatttcgcctgtgatatatatatatgggccccattggctggaacatgcggagtattgcttctgagcctggtgattaccctctactgtaagagaggccggaagaaacttctttatatattcaagcagccctttatgcgacccgttcagactacccaagaggaagatggatgcagttgccgctttccagaagaggaggagggcgggtgcgaactgagagtgaagttcagcagatccgccgatgctcccgcctataagcagggccaaaaccagctgtacaacgagctgaacctggggagaagagaagagtacgacgtgctggacaagcggagaggcagagatcctgaaatgggcggcaagcccagacggaagaatcctcaagagggcctgtataatgagctgcagaaagacaagatggccgaggcctacagcgagatcggaatgaagggcgagcgcagaagaggcaagggacacgatggactgtaccagggactgagcaccgccaccaaggatacctatgacgccctgcacatgcaggccctgcctccaagataa

SEQ ID NO: 3544 - protein, 42 aa, Artificial Sequence
  Description of Artificial Sequence: Synthetic polynucleotide
KRGRKKLLYIFKQPFMRPVQTTQEEDGCSCRFPEEEEGGCEL

SEQ ID NO: 3545 - protein, 112 aa, Artificial Sequence
  Description of Artificial Sequence: Synthetic polynucleotide
RVKFSRSADAPAYKQGQNQLYNELNLGRREEYDVLDKRRGRDPEMGGKPRRKNPQEGLYNELQKDKMAEAYSEIGMKGERRRGKGHDGLYQGLSTATKDTYDALHMQALPPR

SEQ ID NO: 3546 - protein, 241 aa, Artificial Sequence
  Description of Artificial Sequence: Synthetic polynucleotide
QVQLVQSGAEVEKPGASVKVSCKASGYTFTDYYMHWVRQAPGQGLEWMGWINPNSGGTNYAQKFQGRVTMTRDTSISTAYMELSRLRSDDTAVYYCASGWDFDYWGQGTLVTVSSGGGGSGGGGSGGGGSGGGGSDIVMTQSPSSLSASVGDRVTITCRASQSIRYYLSWYQQKPGKAPKLLIYTASILQNGVPSRFSGSGSGTDFTLTISSLQPEDFATYYCLQTYTTPDFGPGTKVEIK

SEQ ID NO: 3547 - protein, 120 aa, Artificial Sequence
  Description of Artificial Sequence: Synthetic polynucleotide
EVKLQESGPGLVAPSQSLSVTCTVSGVSLPDYGVSWIRQPPRKGLEWLGVIWGSETTYYNSALKSRLTIIKDNSKSQVFLKMNSLQTDDTAIYYCAKHYYYGGSYAMDYWGQGTSVTVSS

SEQ ID NO: 3548 - protein, 107 aa, Artificial Sequence
  Description of Artificial Sequence: Synthetic polynucleotide
DIQMTQTTSSLSASLGDRVTISCRASQDISKYLNWYQQKPDGTVKLLIYHTSRLHSGVPSRFSGSGSGTDYSLTISNLEQEDIATYFCQQGNTLPYTFGGGTKLEIT

SEQ ID NO: 3549 - protein, 447 aa, Artificial Sequence
  Description of Artificial Sequence: Synthetic polynucleotide
QVQLVQSGVEVKKPGASVKVSCKASGYTFTNYYMYWVRQAPGQGLEWMGGINPSNGGTNFNEKFKNRVTLTTDSSTTTAYMELKSLQFDDTAVYYCARRDYRFDMGFDYWGQGTTVTVSSASTKGPSVFPLAPCSRSTSESTAALGCLVKDYFPEPVTVSWNSGALTSGVHTFPAVLQSSGLYSLSSVVTVPSSSLGTKTYTCNVDHKPSNTKVDKRVESKYGPPCPPCPAPEFLGGPSVFLFPPKPKDTLMISRTPEVTCVVVDVSQEDPEVQFNWYVDGVEVHNAKTKPREEQFNSTYRVVSVLTVLHQDWLNGKEYKCKVSNKGLPSSIEKTISKAKGQPREPQVYTLPPSQEEMTKNQVSLTCLVKGFYPSDIAVEWESNGQPENNYKTTPPVLDSDGSFFLYSRLTVDKSRWQEGNVFSCSVMHEALHNHYTQKSLSLSLGK

SEQ ID NO: 3550 - protein, 218 aa, Artificial Sequence
  Description of Artificial Sequence: Synthetic polynucleotide
EIVLTQSPATLSLSPGERATLSCRASKGVSTSGYSYLHWYQQKPGQAPRLLIYLASYLESGVPARFSGSGSGTDFTLTISSLEPEDFAVYYCQHSRDLPLTFGGGTKVEIKRTVAAPSVFIFPPSDEQLKSGTASVVCLLNNFYPREAKVQWKVDNALQSGNSQESVTEQDSKDSTYSLSSTLTLSKADYEKHKVYACEVTHQGLSSPVTKSFNRGEC

SEQ ID NO: 3551 - protein, 440 aa, Artificial Sequence
  Description of Artificial Sequence: Synthetic polynucleotide
QVQLVESGGGVVQPGRSLRLDCKASGITFSNSGMHWVRQAPGKGLEWVAVIWYDGSKRYYADSVKGRFTISRDNSKNTLFLQMNSLRAEDTAVYYCATNDDYWGQGTLVTVSSASTKGPSVFPLAPCSRSTSESTAALGCLVKDYFPEPVTVSWNSGALTSGVHTFPAVLQSSGLYSLSSVVTVPSSSLGTKTYTCNVDHKPSNTKVDKRVESKYGPPCPPCPAPEFLGGPSVFLFPPKPKDTLMISRTPEVTCVVVDVSQEDPEVQFNWYVDGVEVHNAKTKPREEQFNSTYRVVSVLTVLHQDWLNGKEYKCKVSNKGLPSSIEKTISKAKGQPREPQVYTLPPSQEEMTKNQVSLTCLVKGFYPSDIAVEWESNGQPENNYKTTPPVLDSDGSFFLYSRLTVDKSRWQEGNVFSCSVMHEALHNHYTQKSLSLSLGK

SEQ ID NO: 3552 - protein, 214 aa, Artificial Sequence
  Description of Artificial Sequence: Synthetic polynucleotide
EIVLTQSPATLSLSPGERATLSCRASQSVSSYLAWYQQKPGQAPRLLIYDASNRATGIPARFSGSGSGTDFTLTISSLEPEDFAVYYCQQSSNWPRTFGQGTKVEIKRTVAAPSVFIFPPSDEQLKSGTASVVCLLNNFYPREAKVQWKVDNALQSGNSQESVTEQDSKDSTYSLSSTLTLSKADYEKHKVYACEVTHQGLSSPVTKSFNRGEC

SEQ ID NO: 3553 - protein, 448 aa, Artificial Sequence
  Description of Artificial Sequence: Synthetic polynucleotide
EVQLVESGGGLVQPGGSLRLSCAASGFTFSDSWIHWVRQAPGKGLEWVAWISPYGGSTYYADSVKGRFTISADTSKNTAYLQMNSLRAEDTAVYYCARRHWPGGFDYWGQGTLVTVSSASTKGPSVFPLAPSSKSTSGGTAALGCLVKDYFPEPVTVSWNSGALTSGVHTFPAVLQSSGLYSLSSVVTVPSSSLGTQTYICNVNHKPSNTKVDKKVEPKSCDKTHTCPPCPAPELLGGPSVFLFPPKPKDTLMISRTPEVTCVVVDVSHEDPEVKFNWYVDGVEVHNAKTKPREEQYASTYRVVSVLTVLHQDWLNGKEYKCKVSNKALPAPIEKTISKAKGQPREPQVYTLPPSREEMTKNQVSLTCLVKGFYPSDIAVEWESNGQPENNYKTTPPVLDSDGSFFLYSKLTVDKSRWQQGNVFSCSVMHEALHNHYTQKSLSLSPGK

SEQ ID NO: 3554 - protein, 214 aa, Artificial Sequence
  Description of Artificial Sequence: Synthetic polynucleotide
DIQMTQSPSSLSASVGDRVTITCRASQDVSTAVAWYQQKPGKAPKLLIYSASFLYSGVPSRFSGSGSGTDFTLTISSLQPEDFATYYCQQYLYHPATFGQGTKVEIKRTVAAPSVFIFPPSDEQLKSGTASVVCLLNNFYPREAKVQWKVDNALQSGNSQESVTEQDSKDSTYSLSSTLTLSKADYEKHKVYACEVTHQGLSSPVTKSFNRGEC

SEQ ID NO: 3555 - protein, 450 aa, Artificial Sequence
  Description of Artificial Sequence: Synthetic polynucleotide
EVQLLESGGGLVQPGGSLRLSCAASGFTFSSYIMMWVRQAPGKGLEWVSSIYPSGGITFYADTVKGRFTISRDNSKNTLYLQMNSLRAEDTAVYYCARIKLGTVTTVDYWGQGTLVTVSSASTKGPSVFPLAPSSKSTSGGTAALGCLVKDYFPEPVTVSWNSGALTSGVHTFPAVLQSSGLYSLSSVVTVPSSSLGTQTYICNVNHKPSNTKVDKKVEPKSCDKTHTCPPCPAPELLGGPSVFLFPPKPKDTLMISRTPEVTCVVVDVSHEDPEVKFNWYVDGVEVHNAKTKPREEQYNSTYRVVSVLTVLHQDWLNGKEYKCKVSNKALPAPIEKTISKAKGQPREPQVYTLPPSRDELTKNQVSLTCLVKGFYPSDIAVEWESNGQPENNYKTTPPVLDSDGSFFLYSKLTVDKSRWQQGNVFSCSVMHEALHNHYTQKSLSLSPGK

SEQ ID NO: 3556 - protein, 216 aa, Artificial Sequence
  Description of Artificial Sequence: Synthetic polynucleotide
QSALTQPASVSGSPGQSITISCTGTSSDVGGYNYVSWYQQHPGKAPKLMIYDVSNRPSGVSNRFSGSKSGNTASLTISGLQAEDEADYYCSSYTSSSTRVFGTGTKVTVLGQPKANPTVTLFPPSSEELQANKATLVCLISDFYPGAVTVAWKADGSPVKAGVETTKPSKQSNNKYAASSYLSLTPEQWKSHRSYSCQVTHEGSTVEKTVAPTECS

SEQ ID NO: 3557 - protein, 451 aa, Artificial Sequence
  Description of Artificial Sequence: Synthetic polynucleotide
EVQLVESGGGLVQPGGSLRLSCAASGFTFSRYWMSWVRQAPGKGLEWVANIKQDGSEKYYVDSVKGRFTISRDNAKNSLYLQMNSLRAEDTAVYYCAREGGWFGELAFDYWGQGTLVTVSSASTKGPSVFPLAPSSKSTSGGTAALGCLVKDYFPEPVTVSWNSGALTSGVHTFPAVLQSSGLYSLSSVVTVPSSSLGTQTYICNVNHKPSNTKVDKRVEPKSCDKTHTCPPCPAPEFEGGPSVFLFPPKPKDTLMISRTPEVTCVVVDVSHEDPEVKFNWYVDGVEVHNAKTKPREEQYNSTYRVVSVLTVLHQDWLNGKEYKCKVSNKALPASIEKTISKAKGQPREPQVYTLPPSREEMTKNQVSLTCLVKGFYPSDIAVEWESNGQPENNYKTTPPVLDSDGSFFLYSKLTVDKSRWQQGNVFSCSVMHEALHNHYTQKSLSLSPGK

SEQ ID NO: 3558 - protein, 215 aa, Artificial Sequence
  Description of Artificial Sequence: Synthetic polynucleotide
EIVLTQSPGTLSLSPGERATLSCRASQRVSSSYLAWYQQKPGQAPRLLIYDASSRATGIPDRFSGSGSGTDFTLTISRLEPEDFAVYYCQQYGSLPWTFGQGTKVEIKRTVAAPSVFIFPPSDEQLKSGTASVVCLLNNFYPREAKVQWKVDNALQSGNSQESVTEQDSKDSTYSLSSTLTLSKADYEKHKVYACEVTHQGLSSPVTKSFNRGEC

SEQ ID NO: 3559 - protein, 133 aa, Homo sapiens [sequence omitted]

SEQ ID NO: 3560 - protein, 197 aa, Homo sapiens
RNLPVATPDPGMFPCLHHSQNLLRAVSNMLQKARQTLEFYPCTSEEIDHEDITKDKTSTVEACLPLELTKNESCLNSRETSFITNGSCLASRKTSFMMALCLSSIYEDLKMYQVEFKTMNAKLLMDPKRQIFLDQNMLAVIDELMQALNFNSETVPQKSSLEEPDFYKTKIKLCILLHAFRIRAVTIDRVMSYLNAS

SEQ ID NO: 3561 - protein, 306 aa, Homo sapiens
IWELKKDVYVVELDWYPDAPGEMVVLTCDTPEEDGITWTLDQSSEVLGSGKTLTIQVKEFGDAGQYTCHKGGEVLSHSLLLLHKKEDGIWSTDILKDQKEPKNKTFLRCEAKNYSGRFTCWWLTTISTDLTFSVKSSRGSSDPQGVTCGAATLSAERVRGDNKEYEYSVECQEDSACPAAEESLPIEVMVDAVHKLKYENYTSSFFIRDIIKPDPPKNLQLKPLKNSRQVEVSWEYPDTWSTPHSYFSLTFCVQVQGKSKREKKDRVFTDKTSATVICRKNASISVRAQDRYYSSSWSEWASVPCS

SEQ ID NO: 3562 - protein, 152 aa, Homo sapiens
DCDIEGKDGKQYESVLMVSIDQLLDSMKEIGSNCLNNEFNFFKRHICDANKEGMFLFRAARKLRQFLKMNSTGDFDLHLLKVSEGTTILLNCTGQVKGRKPAALGEAQPTKSLEENKSLKEQKKLNDLCFLKRLLQEIKTCWNKILMGTKEH

SEQ ID NO: 3563 - protein, 160 aa, Homo sapiens
SPGQGTQSENSCTHFPGNLPNMLRDLRDAFSRVKTFFQMKDQLDNLLLKESLLEDFKGYLGCQALSEMIQFYLEEVMPQAENQDPDIKAHVNSLGENLKTLRLRLRRCHRFLPCENKSKAVEQVKNAFNKLQEKGIYKAMSEFDIFINYIEAYMTMKIRN

SEQ ID NO: 3564 - protein, 114 aa, Homo sapiens
NWVNVISDLKKIEDLIQSMHIDATLYTESDVHPSCKVTAMKCFLLELQVISLESGDASIHDTVENLIILANNSLSSNGNVTESGCKECEELEEKNIKEFLQSFVHIVQMFINTS

SEQ ID NO: 3565 - protein, 157 aa, Homo sapiens
YFGKLESKLSVIRNLNDQVLFIDQGNRPLFEDMTDSDCRDNAPRTIFIISMYKDSQPRGMAVTISVKCEKISTLSCENKIISFKEMNPPDNIKDTKSDIIFFQRSVPGHDNKMQFESSSYEGYFLACEKERDLFKLILKKEDELGDRSIMFTVQNED

SEQ ID NO: 3566 - protein, 209 aa, Homo sapiens
RKGPPAALTLPRVQCRASRYPIAVDCSWTLPPAPNSTSPVSFIATYRLGMAARGHSWPCLQQTPTSTSCTITDVQLFSMAPYVLNVTAVHPWGSSSSFVPFITEHIIKPDPPEGVRLSPLAERQLQVQWEPPGSWPFPEIFSLKYWIRYKRQGAARFHRVGPIEATSFILRAVRPRARYYVQVAAQDLTDYGELSDWSLPATATMSLGK

SEQ ID NO: 3567 - protein, 138 aa, Homo sapiens
QDPYVKEAENLKKYFNAGHSDVADNGTLFLGILKNWKEESDRKIMQSQIVSFYFKLFKNFKDDQSIQKSVETIKEDMNVKFFNSNKKKRDDFEKLTNYSVTDLNVQRKAIHELIQVMAELSPAAKTGKRKRSQMLFRG

SEQ ID NO: 3568 - protein, 112 aa, Homo sapiens
ALDTNYCFSSTEKNCCVRQLYIDFRKDLGWKWIHEPKGYHANFCLGPCPYIWSLDTQYSKVLALYNQHNPGASAAPCCVPQALEPLPIVYYVGRKPKVEQLSNMIVRSCKCS

SEQ ID NO: 3569 - protein, 133 aa, Homo sapiens [sequence omitted]

SEQ ID NO: 3570 - protein, 197 aa, Homo sapiens; identical to SEQ ID NO: 3560

SEQ ID NO: 3571 - protein, 306 aa, Homo sapiens; identical to SEQ ID NO: 3561

SEQ ID NO: 3572 - protein, 152 aa, Homo sapiens; identical to SEQ ID NO: 3562

SEQ ID NO: 3573 - protein, 160 aa, Homo sapiens; identical to SEQ ID NO: 3563

SEQ ID NO: 3574 - protein, 114 aa, Homo sapiens; identical to SEQ ID NO: 3564

SEQ ID NO: 3575 - protein, 157 aa, Homo sapiens; identical to SEQ ID NO: 3565

SEQ ID NO: 3576 - protein, 209 aa, Homo sapiens; identical to SEQ ID NO: 3566

SEQ ID NO: 3577 - protein, 138 aa, Homo sapiens; identical to SEQ ID NO: 3567

SEQ ID NO: 3578 - protein, 112 aa, Homo sapiens; identical to SEQ ID NO: 3568

SEQ ID NO: 3579 - protein, 431 aa, Homo sapiens
MPNPRPGKPSAPSLALGPSPGASPSWRAAPKASDLLGARGPGGTFQGRDLRGGAHASSSSLNPMPPSQLQLPTLPLVMVAPSGARLGPLPHLQALLQDRPHFMHQLSTVDAHARTPVLQVHPLESPAMISLTPPTTATGVFSLKARPGLPPGINVASLEWVSREPALLCTFPNPSAPRKDSTLSAVPQSSYPLLANGVCKWPGCEKVFEEPEDFLKHCQADHLLDEKGRAQCLLQREMVQSLEQQLVLEKEKLSAMQAHLAGKMALTKASSVASSDKGSCCIVAAGSQGPVVPAWSGPREAPDSLFAVRRHLWGSHGNSTFPEFLHNMDYFKFHNMRPPFTYATLIRWAILEAPEKQRTLNEIYHWFTRMFAFFRNHPATWKNAIRHNLSLHKCFVRVESEKGAVWTVDELEFRKKRSQRPSRCSNPTPGP

SEQ ID NO: 3580 - protein, 417 aa, Homo sapiens
MPNPRPGKPSAPSLALGPSPGASPSWRAAPKASDLLGARGPGGTFQGRDLRGGAHASSSSLNPMPPSQLQLPTLPLVMVAPSGARLGPLPHLQALLQDRPHFMHQLSTVDAHARTPVLQVHPLESPAMISLTPPTTATGVFSLKARPGLPPGINVASLEWVSREPALLCTFPNPSAPRKDSTLSAVPQSSYPLLANGVCKWPGCEKVFEEPEDFLKHCQADHLLDEKGRAQCLLQREMVQSLEQQLVLEKEKLSAMQAHLAGKMALTKASSVASSDKGSCCIVAAGSQGPVVPAWSGPREAPDSLFAVRRHLWGSHGNSTFPEFLHNMDYFKFHNMRPPFTYATLIRWAILEAPEKQRTLNEIYHWFTRMFAFFRNHPATWKNAIRHNLSLHKCFVRVESEKGAVWTVDELEFRKKR

SEQ ID NO: 3581 - protein, 366 aa, Homo sapiens
GGAHASSSSLNPMPPSQLQLPTLPLVMVAPSGARLGPLPHLQALLQDRPHFMHQLSTVDAHARTPVLQVHPLESPAMISLTPPTTATGVFSLKARPGLPPGINVASLEWVSREPALLCTFPNPSAPRKDSTLSAVPQSSYPLLANGVCKWPGCEKVFEEPEDFLKHCQADHLLDEKGRAQCLLQREMVQSLEQQLVLEKEKLSAMQAHLAGKMALTKASSVASSDKGSCCIVAAGSQGPVVPAWSGPREAPDSLFAVRRHLWGSHGNSTFPEFLHNMDYFKFHNMRPPFTYATLIRWAILEAPEKQRTLNEIYHWFTRMFAFFRNHPATWKNAIRHNLSLHKCFVRVESEKGAVWTVDELEFRKKR

SEQ ID NO: 3582 - protein, 787 aa, Homo sapiens
MAVWIQAQQLQGEALHQMQALYGQHFPIEVRHYLSQWIESQAWDSVDLDNPQENIKATQLLEGLVQELQKKAEHQVGEDGFLLKIKLGHYATQLQNTYDRCPMELVRCIRHILYNEQRLVREANNGSSPAGSLADAMSQKHLQINQTFEELRLVTQDTENELKKLQQTQEYFIIQYQESLRIQAQFGPLAQLSPQERLSRETALQQKQVSLEAWLQREAQTLQQYRVELAEKHQKTLQLLRKQQTIILDDELIQWKRRQQLAGNGGPPEGSLDVLQSWCEKLAEIIWQNRQQIRRAEHLCQQLPIPGPVEEMLAEVNATITDIISALVTSTFIIEKQPPQVLKTQTKFAATVRLLVGGKLNVHMNPPQVKATIISEQQAKSLLKNENTRNDYSGEILNNCCVMEYHQATGTLSAHFRNMSLKRIKRSDRRGAESVTEEKFTILFESQFSVGGNELVFQVKTLSLPVVVIVHGSQDNNATATVLWDNAFAEPGRVPFAVPDKVLWPQLCEALNMKFKAEVQSNRGLTKENLVFLAQKLFNNSSSHLEDYSGLSVSWSQFNRENLPGRNYTFWQWFDGVMEVLKKHLKPHWNDGAILGFVNKQQAHDLLINKPDGTFLLRFSDSEIGGITIAWKFDSQERMFWNLMPFTTRDFSIRSLADRLGDLNYLIYVFPDRPKDEVYSKYYTPVPCESATAKAVDGYVKPQIKQVVPEFVNASADAGGGSATYMDQAPSPAVCPQAHYNMYPQNPDSVLDTDGDFDLEDTMDVARRVEELLGRPMDSQWIPHAQS

SEQ ID NO: 3583 - protein, 526 aa, Homo sapiens [sequence omitted]

SEQ ID NO: 3584 - DNA, 167 bp, Artificial Sequence
  Description of Artificial Sequence: Synthetic polynucleotide
ccctgcagccgtcaccgtaagtttgaagttaccgcatatcagcctctgcttcccagcgcgtccaattcctgttcttattgtttcccctccaggcgttacgcgtgacgacgaactgtgtcgcagctaccacattattccggagccttcattctcgcggctctgatcgt

SEQ ID NO: 3585 - DNA, 43 bp, Artificial Sequence
  Description of Artificial Sequence: Synthetic polynucleotide
ggagaccgcggccacgccgagtaggatcgagggtacagtctcc

SEQ ID NO: 3586 - DNA, 167 bp, Artificial Sequence
  Description of Artificial Sequence: Synthetic polynucleotide
gacaccaggatcactcttgctctgacccgccctgtgtagaatagactcatgcttccctaagacctggatttcttcccaggcactttcacccgcctgccctgctccttcagtggactgcacccagggaggcggtctctgactgtcctttactttctattctggattgc

SEQ ID NO: 3587 - DNA, 30 bp, Artificial Sequence
  Description of Artificial Sequence: Synthetic polynucleotide
aaacccccctaagccgccgccgccgccacc

SEQ ID NO: 3588 - DNA, 18 bp, Artificial Sequence
  Description of Artificial Sequence: Synthetic polynucleotide
cccccccaacccgtcacg

SEQ ID NO: 3589 - DNA, 6 bp, Artificial Sequence
  Description of Artificial Sequence: Synthetic polynucleotide
gtcacg

SEQ ID NO: 3590 - DNA, 141 bp, Artificial Sequence
  Description of Artificial Sequence: Synthetic polynucleotide
tctgcgcactcgtaatcagtactaacccccctttgtcggacactatgcgataatcgatccgcctttttcaccgccttcggaattttatttacctcaactgatcctggagtctctcttggttttcacggaggcctccgccca

SEQ ID NO: 3591 - DNA, 43 bp, Artificial Sequence; identical to SEQ ID NO: 3585
  Description of Artificial Sequence: Synthetic polynucleotide

SEQ ID NO: 3592 - DNA, 141 bp, Artificial Sequence
  Description of Artificial Sequence: Synthetic polynucleotide
ccccttgaaacccccgccccaggttcagtctctcttcatccctctgtcctgcatggtgatacaaagaccctttgtggaccctaagccatgtagttgctgctccctccttccagttgtgaatattggtttctgttaatcaca

SEQ ID NO: 3593 - DNA, 30 bp, Artificial Sequence; identical to SEQ ID NO: 3587
  Description of Artificial Sequence: Synthetic polynucleotide

SEQ ID NO: 3594 - DNA, 18 bp, Artificial Sequence
  Description of Artificial Sequence: Synthetic polynucleotide
cccccccaacccgtcacg

SEQ ID NO: 3595 - DNA, 6 bp, Artificial Sequence
  Description of Artificial Sequence: Synthetic polynucleotide
gtcacg

SEQ ID NO: 3596 - DNA, 6 bp, Artificial Sequence
  Description of Artificial Sequence: Synthetic polynucleotide
gtcacg

SEQ ID NO: 3597 - DNA, 43 bp, Artificial Sequence
  Description of Artificial Sequence: Synthetic polynucleotide
aataagagagaaaagaagagtaagaagaaatataagagccacc

SEQ ID NO: 3598 - DNA, 49 bp, Artificial Sequence
  Description of Artificial Sequence: Synthetic polynucleotide
cgaactagtattcttctggtccccacagactcagagagaacccgccacc

SEQ ID NO: 3599 - DNA, 7 bp, Artificial Sequence
  Description of Artificial Sequence: Synthetic polynucleotide
agccacc

SEQ ID NO: 3600 - DNA, 14 bp, Artificial Sequence
  Description of Artificial Sequence: Synthetic polynucleotide
tgatagctaactag

SEQ ID NO: 3601 - DNA, 14 bp, Artificial Sequence
  Description of Artificial Sequence: Synthetic polynucleotide
tagtagctaactag

SEQ ID NO: 3602 - DNA, 14 bp, Artificial Sequence
  Description of Artificial Sequence: Synthetic polynucleotide
tgatgactgagtga

SEQ ID NO: 3603 - DNA, 14 bp, Artificial Sequence
  Description of Artificial Sequence: Synthetic polynucleotide
tagtagctaggtag

SEQ ID NO: 3604 - DNA, 3 bp, Artificial Sequence
  Description of Artificial Sequence: Synthetic polynucleotide
taa

SEQ ID NO: 3605 - DNA, 14 bp, Artificial Sequence
  Description of Artificial Sequence: Synthetic polynucleotide
taatagctaactag

SEQ ID NO: 3606 - DNA, 15 bp, Artificial Sequence
  Description of Artificial Sequence: Synthetic polynucleotide
taactagctaactag

SEQ ID NO: 3607 - protein, 329 aa, Brucella ceti
MKFGSKIRRLAVAAVAGAIALGASFAVAQAPTFFRIGTGGTAGTYYPIGGLIANAISGAGEKGVPGLVATAVSSNGSVANINAIKSGALESGFTQSDVAYWAYNGTGLYDGKGKVEDLRLLATLYPETIHIVARKDANIKSVADLKGKRVSLDEPGSGTIVDARIVLEAYGLTEDDIKAEHLKPGPAGERLKDGALDAYFFVGGYPTGAISELAISNGISLVPISGPEADKILEKYSFFSKDVVPAGAYKDVAETPTLAVAAQWVTSAKQPDDLIYNITKVLWNEDTRKALDAGHAKGKLIKLDSATSSLGIPLHPGAERFYKEAGVLK

SEQ ID NO: 3608 - protein, 402 aa, Chlamydia psittaci
MKKLLKSALLFAATGSALSLQALPVGNPAEPSLLIDGTMWEGASGDPCDPCATWCDAISIRAGYYGDYVFDRVLKVDVNKTFSGMAATPTQATGNASNTNQPEANGRPNIAYGRHMQDAEWFSNAAFLALNIWDRFDIFCTLGASNGYFKASSAAFNLVGLIGFSAASSISTDLPMQLPNVGITQGVVEFYTDTSFSWSVGARGALWECGCATLGAEFQYAQSNPKIEMLNVTSSPAQFVIHKPRGYKGASSNFPLPITAGTTEATDTKSATIKYHEWQVGLALSYRLNMLVPYIGVNWSRATFDADTIRIAQPKLKSEILNITTWNPSLIGSTTALPNNSGKDVLSDVLQIASIQINKMKSRKACGVAVGATLIDADKWSITGEARLINERAAHMNAQFRF

SEQ ID NO: 3609 - protein, 370 aa, Fusobacterium nucleatum
MKKLALVLGLLLVVGSVASAKEVMPAPTPAPEKVVEYVEKPVIVYRDREVAPAWRPNGSVDVQYRWYGEVEKKNPKDDKDENWATGKVNAGRLQTLTKVNFTEKQTLEVRTRNHHTLNDTDANNKKSNGAADEYRLRHFYNFGKLGSSKVNATSRVEFKQKTNDGEKSLGASVLFDFADYIYSNNFFKVDKLGLRPGYKYVWKGHGNGEEGTPTVHNEYHLAFESDFTLPFNFALNLEYDLSYNRYREKFETTDGLKKAEWYGELTAVLSNYTPLYKAGAFELGFNAEGGYDTYNMHQYKRIGGEDGTSVDRRDYELYLEPTLQVSYKPTDFVKLYAAAGADYRNRITGESEVKRWRWQPTASAGMKVTF

SEQ ID NO: 3610 - protein, 495 aa, Mycobacterium tuberculosis
MNQHFDVLIIGAGLSGIGTACHVTAEFPDKTIALLERRERLGGTWDLFRYPGVRSDSDMFTFGYKFRPWRDVKVLADGASIRQYIADTATEFGVDEKIHYGLKVNTAEWSSRQCRWTVAGVHEATGETRTYTCDYLISCTGYYNYDAGYLPDFPGVHRFGGRCVHPQHWPEDLDYSGKKVVVIGSGATAVTLVPAMAGSNPGSAAHVTMLQRSPSYIFSLPAVDKISEVLGRFLPDRWVYEFGRRRNIAIQRKLYQACRRWPKLMRRLLLWEVRRRLGRSVDMSNFTPNYLPWDERLCAVPNGDLFKTLASGAASVVTDQIETFTEKGILCKSGREIEADIIVTATGLNIQMLGGMRLIVDGAEYQLPEKMTYKGVLLENAPNLAWIIGYTNASWTLKSDIAGAYLCRLLRHMADNGYTVATPRDAQDCALDVGMFDQLNSGYVKRGQDIMPRQGSKHPWRVLMHYEKDAKILLEDPIDDGVLHFAAAAQDHAAA

SEQ ID NO: 3611 - protein, 95 aa, Neisseria gonorrhoeae
MTEQQWNFAGIEAAASAIQGNVTSIHSLLDEGKQSLTKLAAAWGGSGSEAYQGVQQKWDATATELNNALQNLARTISEAGQAMASTEGNVTGMFA

SEQ ID NO: 3612 - protein, 311 aa, Neisseria gonorrhoeae
MKKSLIALTLAALPVAAMADVTLYGTIKAGVETYRFVAHNGAQASGVETATEIADLGSKIGFKGQEDLGNGLKAIWQLEQKAYVSGTNTGWGNRQSFIGLKGGFGKVRVGRLNSVLKDTGGFNPWEGKSEYLSLSNIARPEERPISVRYDSPEFAGFSGSVQYVPNDNSGENKSESYHAGFNYKNSGFFVQYAGSYKRHNYTTEKHQIHRLVGGYDHDALYASVAVQQQDAKLAWPDDNSHNSQTEVATTVAYRFGNVTPRVSYAHGFKGSVYEANHDNTYDQVVVGAEYDFSKRTSALVSAGWLQEGKGA

SEQ ID NO: 3613 - protein, 107 aa, Staphylococcus aureus
FVGYKPYSQNPRDYFVPDNELPPLVHSGFNPSFIATVSHEKGSGDTSEFEITYGRNMDVTHATRRTTHYGNSYLEGSRIHNAFVNRNYTVKYEVNWKTHEIKVKGHN

SEQ ID NO: 3614 - protein, 301 aa, Rhodobacter capsulatus
EVKLSGDARMGVMYNGDDWNFSSRSRVLFTMSGTTDSGLEFGASFKAHESVGAETGEDGTVFLSGAFGKIEMGDALGASEALFGDLYEVGYTDLDDRGGNDIPYLTGDERLTAEDNPVLLYTYSAGAFSVAASMSDGKVGETSEDDAQEMAVAAAYTFGNYTVGLGYEKIDSPDTALMADMEQLELAAIAKFGATNVKAYYADGELDRDFARAVFDLTPVAAAATAVDHKAYGLSVDSTFGATTVGGYVQVLDIDTIDDVTYYGLGASYDLGGGASIVGGIADNDLPNSDMVADLGVKFKF

SEQ ID NO: 3615 - protein, 346 aa, Escherichia coli
MKKTAIAIAVALAGFATVAQAAPKDNTWYTGAKLGWSQYHDTGFINNNGPTHENQLGAGAFGGYQVNPYVGFEMGYDWLGRMPYKGSVENGAYKAQGVQLTAKLGYPITDDLDIYTRLGGMVWRADTKSNVYGKNHDTGVSPVFAGGVEYAITPEIATRLEYQWTNNIGDAHTIGTRPDNGMLSLGVSYRFGQGEAAPVVAPAPAPAPEVQTKHFTLKSDVLFNFNKATLKPEGQAALDQLYSQLSNLDPKDGSVVVLGYTDRIGSDAYNQGLSERRAQSVVDYLISKGIPADKISARGMGESNPVTGNTCDNVKQRAALIDCLAPDRRVEIEVKGIKDVVTQPQA

SEQ ID NO: 3616 - protein, 87 aa, Chlamydia pneumoniae
AGVATATGTKSATINYHEWQVGASLSYRLNSLVPYIGVQWSRATFDADNIRIAQPKLPTAVLNLTAWNPSLLGNATALSTTDSFSDF

SEQ ID NO: 3617 - protein, 631 aa, Streptococcus pyogenes
MTTYQDDFYQAVNGKWAETAVIPDDKPRTGGFSDLADEIEALMLDTTDAWLAGENIPDDAILKNFVKFHRLVADYAKRDEVGVSPILPLIEEYQSLKSFSEFVANIAKYELAGLPNEFPFSVAPDFMNAQLNVLWAEAPSILLPDTTYYEEGNEKAEELRGIWRQSQEKLLPQFGFSTEEIKDLLDKVIELDKQLAKYVLSREEGSEYAKLYHPYVWADFKKLAPELPLDSIFEKILGQVPDKVIVPEERFWTEFAATYYSEANWDLLKANLIVDAANAYNAYLTDDIRVESGAYSRALSGTPQAMDKQKAAFYLAQGPFSQALGLWYAGQKFSPEAKADVESKVARMIEVYKSRLETADWLAPATREKAITKLNVITPHIGYPEKLPETYAKKVIDESLSLVENAQNLAKITIAHTWSKWNKPVDRSEWHMPAHLVNAYYDPQQNQIVFPAAILQEPFYSLDQSSSANYGGIGAVIAHEISHAFDTNGASFDEHGSLNDWWTQEDYAAFKERTDKIVAQFDGLESHGAKVNGKLTVSENVADLGGVACALEAAQSEEDFSARDFFINFATIWRMKAREEYMQMLASIDVHAPGELRTNVTLTNFDAFHETFDIKEGDAMWRAPKDRVIIW

SEQ ID NO: 3618 - protein, 341 aa, Vibrio cholerae
MNKTLIALAVSAAAVATGAYADGINQSGDKAGSTVYSAKGTSLEVGGRAEARLSLKDGKAQDNSRVRLNFLGKAEINDSLYGVGFYEGEFTTNDQGKNASNNSLDNRYTYAGIGGTYGEVTYGKNDGALGVITDFTDIMSYHGNTAAEKIAVADRVDNMLAYKGQFGDLGVKASYRFADRNAVDAMGNVVTETNAAKYSDNGEDGYSLSAIYTFGDTGFNVGAGYADQDDQNEYMLAASYRMENLYFAGLFTDGELAKDVDYTGYELAAGYKLGQAAFTATYNNAETAKETSADNFAIDATYYFKPNFRSYISYQFNLLDSDKVGKVASEDELAIGLRYDF

SEQ ID NO: 3619 - protein, 160 aa, Mycobacterium tuberculosis
MKGGAGVPDLPSLDASGVRLAIVASSWHGKICDALLDGARKVAAGCGLDDPTVVRVLGAIEIPVVAQELARNHDAVVALGVVIRGQTPHFDYVCDAVTQGLTRVSLDSSTPIANGVLTTNTEEQALDRAGLPTSAEDKGAQATVAALATALTLRELRAHS

SEQ ID NO: 3620 - protein, 150 aa, Pasteurella multocida
MKKLTKVLLVAGSVAVLAACGSSKKDESAGQMFGGYSVQDLQQRYNTVYFGFDKYNIEGEYVQILDAHAAFLNATPATKVVVEGNTDERGTPEYNIALGQRRADAVKHYLSAKGVQAGQVSTVSYGEEKPAVLGHDEAAYSKNRRAVLAY

SEQ ID NO: 3621 - protein, 177 aa, Brucella melitensis
MGISKASLLSLAAAGIVLAGCQSSRLGNLDNVSPPPPPAPVNAVPAGTVQKGNLDSPTQFPNAPSTDMSAQSGTQVASLPPASAPDLTPGAVAGVWNASLGGQSCKIATPQTKYGQGYRAGPLRCPGELANLASWAVNGKQLVLYDANGGTVASLYSSGQGRFDGQTTGGQAVTLSR

SEQ ID NO: 3622 - protein, 359 aa, Escherichia coli
MQILADLLNTIPAIDSTAMSRAQRHIDGLLKPVGSLGKLEVLAIQLAGMPGLNGIPHVGKKAVLVMCADHGVWEEGVAISPKEVTAIQAENMTRGTTGVCVLAEQAGANVHVIDVGIDTAEPIPGLINMRVARGSGNIASAPAMSRRQAEKLLLDVICYTQELAKNGVTLFGVGELGMANTTPAAAIVSTITGRDPEEVVGIGANLPTDKLANKIDVVRRAITLNQPNPQDGVDVLAKVGGFDLVGIAGVMLGAASCGLPVLLDGFLSYAAALAACQMSPAIKPYLIPSHLSAEKGARIALSHLGLEPYLNMEMRLGEGSGAALAMPIIEAACAIYNNMGELAASNIVLPGNTTSDLNS

SEQ ID NO: 3623 - protein, 172 aa, Mycobacterium tuberculosis
MKNARTTLIAAAIAGTLVTTSPAGIANADDAGLDPNAAAGPDAVGFDPNLPPAPDAAPVDTPPAPEDAGFDPNLPPPLAPDFLSPPAEEAPPVPVAYSVNWDAIAQCESGGNWSINTGNGYYGGLRFTAGTWRANGGSGSAANASREEQIRVAENVLRSQGIRAWPVCGRRG

SEQ ID NO: 3624 - protein, 130 aa, Mycobacterium tuberculosis
MAKLSTDELLDAFKEMTLLELSDFVKKFEETFEVTAAAPVAVAAAGAAPAGAAVEAAEEQSEFDVILEAAGDKKIGVIKVVREIVSGLGLKEAKDLVDGAPKPLLEKVAKEAADEAKAKLEAAGATVTVK

SEQ ID NO: 3625 - protein, 199 aa, Mycobacterium tuberculosis
MAENSNIDDIKAPLLAALGAADLALATVNELITNLRERAEETRTDTRSRVEESRARLTKLQEDLPEQLTELREKFTAEELRKAAEGYLEAATSRYNELVERGEAALERLRSQQSFEEVSARAEGYVDQAVELTQEALGTVASQTRAVGERAAKLVGIELPKKAAPAKKAAPAKKAAPAKKAAAKKAPAKKAAAKKVTQK

SEQ ID NO: 3626 - protein, 594 aa, Neisseria meningitidis
MNKIYRIIWNSALNAWVAVSELTRNHTKRASATVATAVLATLLFATVQASTTDDDDLYLEPVQRTAVVLSFRSDKEGTGEKEVTEDSNWGVYFDKKGVLTAGTITLKAGDNLKIKQNTNENTNASSFTYSLKKDLTDLTSVGTEKLSFSANSNKVNITSDTKGLNFAKKTAETNGDTTVHLNGIGSTLTDTLLNTGATTNVTNDNVTDDEKKRAASVKDVLNAGWNIKGVKPGTTASDNVDFVRTYDTVEFLSADTKTTTVNVESKDNGKRTEVKIGAKTSVIKEKDGKLVTGKDKGENDSSTDKGEGLVTAKEVIDAVNKAGWRMKTTTANGQTGQADKFETVTSGTNVTFASGKGTTATVSKDDQGNITVMYDVNVGDALNVNQLQNSGWNLDSKAVAGSSGKVISGNVSPSKGKMDETVNINAGNNIEITRNGKNIDIATSMTPQFSSVSLGAGADAPTLSVDDEGALNVGSKDANKPVRITNVAPGVKEGDVTNVAQLKGVAQNLNNHIDNVDGNARAGIAQAIATAGLVQAYLPGKSMMAIGGGTYRGEAGYAIGYSSISDGGNWIIKGTASGNSRGHFGASASVGYQW

SEQ ID NO: 3627 - protein, 376 aa, Escherichia coli
MAKQDYYEILGVSKTAEEREIRKAYKRLAMKYHPDRNQGDKEAEAKFKEIKEAYEVLTDSQKRAAYDQYGHAAFEQGGMGGGGFGGGADFSDIFGDVFGDIFGGGRGRQRAARGADLRYNMELTLEEAVRGVTKEIRIPTLEECDVCHGSGAKPGTQPQTCPTCHGSGQVQMRQGFFAVQQTCPHCQGRGTLIKDPCNKCHGHGRVERSKTLSVKIPAGVDTGDRIRLAGEGEAGEHGAPAGDLYVQVQVKQHPIFEREGNNLYCEVPINFAMAALGGEIEVPTLDGRVKLKVPGETQTGKLFRMRGKGVKSVRGGAQGDLLCRVVVETPVGLNERQKQLLQELQESFGGPTGEHNSPRSKSFFDGVKKFFDDLTR

SEQ ID NO: 3628 - protein, 471 aa, Streptococcus pneumoniae
MANKAVNDFILAMNYDKKKLLTHQGESIENRFIKEGNQLPDEFVVIERKKRSLSTNTSDISVTATNDSRLYPGALLVVDETLLENNPTLLAVDRAPMTYSIDLPGLASSDSFLQVEDPSNSSVRGAVNDLLAKWHQDYGQVNNVPARMQYEKITAHSMEQLKVKFGSDFEKTGNSLDIDFNSVHSGEKQIQIVNFKQIYYTVSVDAVKNPGDVFQDTVTVEDLKQRGISAERPLVYISSVAYGRQVYLKLETTSKSDEVEAAFEALIKGVKVAPQTEWKQILDNTEVKAVILGGDPSSGARVVTGKVDMVEDLIQEGSRFTADHPGLPISYTTSFLRDNVVATFQNSTDYVETKVTAYRNGDLLLDHSGAYVAQYYITWDELSYDHQGKEVLTPKAWDRNGQDLTAHFTTSIPLKGNVRNLSVKIRECTGLAWEWWRTVYEKTDLPLVRKRTISIWGTTLYPQVEDKVEND

SEQ ID NO: 3629 - protein, 498 aa, Escherichia coli
MAQVINTNSLSLITQNNINKNQSALSSSIERLSSGLRINSAKDDAAGQAIANRFTSNIKGLTQAARNANDGISVAQTTEGALSEINNNLQRVRELTVQATTGTNSESDLSSIQDEIKSRLDEIDRVSGQTQFNGVNVLAKNGSMKIQVGANDNQTITIDLKQIDAKTLGLDGFSVKNNDTVTTSAPVTAFGATTTNNIKLTGITLSTEAATDTGGTNPASIEGVYTDNGNDYYAKITGGDNDGKYYAVTVANDGTVTMATGATANATVTDANTTKATTITSGGTPVQIDNTAGSATANLGAVSLVKLQDSKGNDTDTYALKDTNGNLYAADVNETTGAVSVKTITYTDSSGAASSPTAVKLGGDDGKTEVVDIDGKTYDSADLNGGNLQTGLTAGGEALTAVANGKTTDPLKALDDAIASVDKFRSSLGAVQNRLDSAVTNLNNTTTNLSEAQSRIQDADYATEVSNMSKAQIIQQAGNSVLAKANQVPQQVLSLLQG

SEQ ID NO: 3630 - protein, 189 aa, Homo sapiens
MASPFALLMVLVVLSCKSSCSLGCDLPETHSLDNRRTLMLLAQMSRISPSSCLMDRHDFGFPQEEFDGNQFQKAPAISVLHELIQQIFNLFTTKDSSAAWDEDLLDKFCTELYQQLNDLEACVMQEERVGETPLMNADSILAVKKYFRRITLYLTEKKYSPCAWEVVRAEIMRSLSLSTNLQERLRRKE

SEQ ID NO: 3631 - protein, 166 aa, Homo sapiens
MKYTSYILAFQLCIVLGSLGCYCQDPYVKEAENLKKYFNAGHSDVADNGTLFLGILKNWKEESDRKIMQSQIVSFYFKLFKNFKDDQSIQKSVETIKEDMNVKFFNSNKKKRDDFEKLTNYSVTDLNVQRKAIHELIQVMAELSPAAKTGKRKRSQMLFRGRRASQ

SEQ ID NO: 3632 - protein, 153 aa, Homo sapiens
MYRMQLLSCIALSLALVTNSAPTSSSTKKTQLQLEHLLLDLQMILNGINNYKNPKLTRMLTFKFYMPKKATELKHLQCLEEELKPLEEVLNLAQSKNFHLRPRDLISNINVIVLELKGSETTFMCEYADETATIVEFLNRWITFCQSIISTLT

SEQ ID NO: 3633 - protein, 39 aa, Homo sapiens
MWPPGSASQPPPSPAAATGLHPAARPVSLQCRLSMCPAR

SEQ ID NO: 3634 - protein, 338 aa, Homo sapiens [sequence omitted]

SEQ ID NO: 3635 - protein, 162 aa, Homo sapiens
MRISKPHLRSISIQCYLCLLLNSHFLTEAGIHVFILGCFSAGLPKTEANWVNVISDLKKIEDLIQSMHIDATLYTESDVHPSCKVTAMKCFLLELQVISLESGDASIHDTVENLIILANNSLSSNGNVTESGCKECEELEEKNIKEFLQSFVHIVQMFINTS

SEQ ID NO: 3636 - protein, 193 aa, Homo sapiens
MAAEPVEDNCINFVAMKFIDNTLYFIAEDDENLESDYFGKLESKLSVIRNLNDQVLFIDQGNRPLFEDMTDSDCRDNAPRTIFIISMYKDSQPRGMAVTISVKCEKISTLSCENKIISFKEMNPPDNIKDTKSDIIFFQRSVPGHDNKMQFESSSYEGYFLACEKERDLFKLILKKEDELGDRSIMFTVQNED

SEQ ID NO: 3637 - protein, 162 aa, Homo sapiens
MRSSPGNMERIVICLMVIFLGTLVHKSSSQGQDRHMIRMRQLIDIVDQLKNYVNDLVPEFLPAPEDVETNCEWSAFSCFQKAQLKSANTGNNERIINVSIKKLKRKPPSTNAGRRQKHRLTCPSCDSYEKKPPKEFLERFKSLLQKMIHQHLSSRTHGSEDS

SEQ ID NO: 3638 - protein, 144 aa, Homo sapiens
MWLQSLLLLGTVACSISAPARSPSPSTQPWEHVNAIQEARRLLNLSRDTAAEMNETVEVISEMFDLQEPTCLQTRLELYKQGLRGSLTKLKGPLTMMASHYKQHCPPTPETSCATQIITFESFKENLKDFLLVIPFDCWEPVQE

SEQ ID NO: 3639 - protein, 269 aa, Homo sapiens
MAEVPELASEMMAYYSGNEDDLFFEADGPKQMKCSFQDLDLCPLDGGIQLRISDHHYSKGFRQAASVVVAMDKLRKMLVPCPQTFQENDLSTFFPFIFEEEPIFFDTWDNEAYVHDAPVRSLNCTLRDSQQKSLVMSGPYELKALHLQGQDMEQQVVFSMSFVQGEESNDKIPVALGLKEKNLYLSCVLKDDKPTLQLESVDPKNYPKKKMEKRFVFNKIEINNKLEFESAQFPNWYISTSQAENMPVFLGGTKGGQDITDFTMQFVSS

SEQ ID NO: 3640 - protein, 212 aa, Homo sapiens
MNSFSTSAFGPVAFSLGLLLVLPAAFPAPVPPGEDSKDVAAPHRQPLTSSERIDKQIRYILDGISALRKETCNKSNMCESSKEALAENNLNLPKMAEKDGCFQSGFNEETCLVKIITGLLEFEVYLEYLQNRFESSEEQARAVQMSTKVLIQFLQKKAKNLDAITTPDPTTNASLLTKLQAQNQWLQDMTTHLILRSFKEFLQSSLRALRQM

SEQ ID NO: 3641 - protein, 233 aa, Homo sapiens
MSTESMIRDVELAEEALPKKTGGPQGSRRCLFLSLFSFLIVAGATTLFCLLHFGVIGPQREEFPRDLSLISPLAQAVRSSSRTPSDKPVAHVVANPQAEGQLQWLNRRANALLANGVELRDNQLVVPSEGLYLIYSQVLFKGQGCPSTHVLLTHTISRIAVSYQTKVNLLSAIKSPCQRETPEGAEAKPWYEPIYLGGVFQLEKGDRLSAEINRPDYLDFAESGQVYFGIIAL

SEQ ID NO: 3642 - protein, 177 aa, Homo sapiens
MFHVSFRYIFGLPPLILVLLPVASSDCDIEGKDGKQYESVLMVSIDQLLDSMKEIGSNCLNNEFNFFKRHICDANKEGMFLFRAARKLRQFLKMNSTGDFDLHLLKVSEGTTILLNCTGQVKGRKPAALGEAQPTKSLEENKSLKEQKKLNDLCFLKRLLQEIKTCWNKILMGTKEH

SEQ ID NO: 3643 - protein, 155 aa, Homo sapiens
MTPGKTSLVSLLLLLSLEAIVKAGITIPRNPGCPNSEDKNFPRTVMVNLNIHNRNTNTNPKRSSDYYNRSTSPWNLHRNEDPERYPSVIWEAKCRHLGCINADGNVDYHMNSVPIQQEILVLRREPPHCPNSFRLEKILVSVGCTCVTPIVHHVA

SEQ ID NO: 3644 - skipped

SEQ ID NO: 3645 - protein, 235 aa, Homo sapiens
MTVLAPAWSPTTYLLLLLLLSSGLSGTQDCSFQHSPISSDFAVKIRELSDYLLQDYPVTVASNLQDEELCGGLWRLVLAQRWMERLKTVAGSKMQGLLERVNTEIHFVTKCAFQPPPSCLRFVQTNISRLLQETSEQLVALKPWITRQNFSRCLELQCQPDSSTLPPPWSPRPLEATAPTAPQPPLLLLLLLPVGLLLLAAAWCLHWQRTRRRTPRPGEQVPPVPSPQDLLLVEH

SEQ ID NO: 3646 - protein, 448 aa, Artificial Sequence
  Description of Artificial Sequence: Synthetic polypeptide
QVQLVESGGGVVQPGRSLRLSCAASGFTFSSYTMHWVRQAPGKGLEWVTFISYDGNNKYYADSVKGRFTISRDNSKNTLYLQMNSLRAEDTAIYYCARTGWLGPFDYWGQGTLVTVSSASTKGPSVFPLAPSSKSTSGGTAALGCLVKDYFPEPVTVSWNSGALTSGVHTFPAVLQSSGLYSLSSVVTVPSSSLGTQTYICNVNHKPSNTKVDKRVEPKSCDKTHTCPPCPAPELLGGPSVFLFPPKPKDTLMISRTPEVTCVVVDVSHEDPEVKFNWYVDGVEVHNAKTKPREEQYNSTYRVVSVLTVLHQDWLNGKEYKCKVSNKALPAPIEKTISKAKGQPREPQVYTLPPSRDELTKNQVSLTCLVKGFYPSDIAVEWESNGQPENNYKTTPPVLDSDGSFFLYSKLTVDKSRWQQGNVFSCSVMHEALHNHYTQKSLSLSPGK

SEQ ID NO: 3647 - protein, 440 aa, Artificial Sequence; identical to SEQ ID NO: 3551
  Description of Artificial Sequence: Synthetic polypeptide

SEQ ID NO: 3648 - protein, 442 aa, Artificial Sequence
  Description of Artificial Sequence: Synthetic polypeptide
EVQLVQSGAEVKKPGESLRISCKGSGYSFSTYWISWVRQMPGKGLEWMGKIYPGDSYTNYSPSFQGQVTISADKSISTAYLQWSSLKASDTAMYYCARGYGIFDYWGQGTLVTVSSASTKGPSVFPLAPCSRSTSESTAALGCLVKDYFPEPVTVSWNSGALTSGVHTFPAVLQSSGLYSLSSVVTVPSSNFGTQTYTCNVDHKPSNTKVDKTVERKCCVECPPCPAPPVAGPSVFLFPPKPKDTLMISRTPEVTCVVVDVSHEDPEVQFNWYVDGVEVHNAKTKPREEQFNSTFRVVSVLTVVHQDWLNGKEYKCKVSNKGLPAPIEKTISKTKGQPREPQVYTLPPSREEMTKNQVSLTCLVKGFYPSDIAVEWESNGQPENNYKTTPPMLDSDGSFFLYSKLTVDKSRWQQGNVFSCSVMHEALHNHYTQKSLSLSPGK

SEQ ID NO: 3649 - protein, 1464 aa, Homo sapiens
MPEQERQITAREGASRKILSKLSLPTRAWEPAMKKSFAFDNVGYEGGLDGLGPSSQVATSTVRILGMTCQSCVKSIEDRISNLKGIISMKVSLEQGSATVKYVPSVVCLQQVCHQIGDMGFEASIAEGKAASWPSRSLPAQEAVVKLRVEGMTCQSCVSSIEGKVRKLQGVVRVKVSLSNQEAVITYQPYLIQPEDLRDHVNDMGFEAAIKSKVAPLSLGPIDIERLQSTNPKRPLSSANQNFNNSETLGHQGSHVVTLQLRIDGMHCKSCVLNIEENIGQLLGVQSIQVSLENKTAQVKYDPSCTSPVALQRAIEALPPGNFKVSLPDGAEGSGTDHRSSSSHSPGSPPRNQVQGTCSTTLIAIAGMTCASCVHSIEGMISQLEGVQQISVSLAEGTATVLYNPSVISPEELRAAIEDMGFEASVVSESCSTNPLGNHSAGNSMVQTTDGTPTSVQEVAPHTGRLPANHAPDILAKSPQSTRAVAPQKCFLQIKGMTCASCVSNIERNLQKEAGVLSVLVALMAGKAEIKYDPEVIQPLEIAQFIQDLGFEAAVMEDYAGSDGNIELTITGMTCASCVHNIESKLTRTNGITYASVALATSKALVKFDPEIIGPRDIIKIIEEIGFHASLAQRNPNAHHLDHKMEIKQWKKSFLCSLVFGIPVMALMIYMLIPSNEPHQSMVLDHNIIPGLSILNLIFFILCTFVQLLGGWYFYVQAYKSLRHRSANMDVLIVLATSIAYVYSLVILVVAVAEKAERSPVTFFDTPPMLFVFIALGRWLEHLAKSKTSEALAKLMSLQATEATVVTLGEDNLIIREEQVPMELVQRGDIVKVVPGGKFPVDGKVLEGNTMADESLITGEAMPVTKKPGSTVIAGSINAHGSVLIKATHVGNDTTLAQIVKLVEEAQMSKAPIQQLADRFSGYFVPFIIIMSTLTLVVWIVIGFIDFGVVQRYFPNPNKHISQTEVIIRFAFQTSITVLCIACPCSLGLATPTAVMVGTGVAAQNGILIKGGKPLEMAHKIKTMFDKTGTITHGVPRVMRVLLLGDVATLPLRKVLAVVGTAEASSEHPLGVAVTKYCKEELGTETLGYCTDFQAVPGCGIGCKVSNVEGILAHSERPLSAPASHLNEAGSLPAEKDAVPQTFSVLIGNREWLRRNGLTISSDVSDAMTDHEMKGQTAILVAIDGVLCGMIAIADAVKQEAALAVHTLQSMGVDVVLITGDNRKTARAIATQVGINKVFAEVLPSHKVAKVQELQNKGKKVAMVGDGVNDSPALAQADMGVAIGTGTDVAIEAADVVLIRNDLLDVVASIHLSKRTVRRIRINLVLALIYNLVGIPIAAGVFMPIGIVLQPWMGSAAMAASSVSVVLSSLQLKCYKKPDLERYEAQAHGHMKPLTASQVSVHIGMDDRWRDSPRATPWDQVSYVSQVSLSSLTSDKPSRHSAAADDDGDKWSLLLNGRDEEQYI

SEQ ID NO: 3650 - protein, 1321 aa, Homo sapiens
MSDSVILRSIKKFGEENDGFESDKSYNNDKKSRLQDEKKGDGVRVGFFQLFRFSSSTDIWLMFVGSLCAFLHGIAQPGVLLIFGTMTDVFIDYDVELQELQIPGKACVNNTIVWTNSSLNQNMTNGTRCGLLNIESEMIKFASYYAGIAVAVLITGYIQICFWVIAAARQIQKMRKFYFRRIMRMEIGWFDCNSVGELNTRFSDDINKINDAIADQMALFIQRMTSTICGFLLGFFRGWKLTLVIISVSPLIGIGAATIGLSVSKFTDYELKAYAKAGVVADEVISSMRTVAAFGGEKREVERYEKNLVFAQRWGIRKGIVMGFFTGFVWCLIFLCYALAFWYGSTLVLDEGEYTPGTLVQIFLSVIVGALNLGNASPCLEAFATGRAAATSIFETIDRKPIIDCMSEDGYKLDRIKGEIEFHNVTFHYPSRPEVKILNDLNMVIKPGEMTALVGPSGAGKSTALQLIQRFYDPCEGMVTVDGHDIRSLNIQWLRDQIGIVEQEPVLFSTTIAENIRYGREDATMEDIVQAAKEANAYNFIMDLPQQFDTLVGEGGGQMSGGQKQRVAIARALIRNPKILLLDMATSALDNESEAMVQEVLSKIQHGHTIISVAHRLSTVRAADTIIGFEHGTAVERGTHEELLERKGVYFTLVTLQSQGNQALNEEDIKDATEDDMLARTFSRGSYQDSLRASIRQRSKSQLSYLVHEPPLAVVDHKSTYEEDRKDKDIPVQEEVEPAPVRRILKFSAPEWPYMLVGSVGAAVNGTVTPLYAFLFSQILGTFSIPDKEEQRSQINGVCLLFVAMGCVSLFTQFLQGYAFAKSGELLTKRLRKFGFRAMLGQDIAWFDDLRNSPGALTTRLATDASQVQGAAGSQIGMIVNSFTNVTVAMIIAFSFSWKLSLVILCFFPFLALSGATQTRMLTGFASRDKQALEMVGQITNEALSNIRTVAGIGKERRFIEALETELEKPFKTAIQKANIYGFCFAFAQCIMFIANSASYRYGGYLISNEGLHFSYVFRVISAVVLSATALGRAFSYTPSYAKAKISAARFFQLLDRQPPISVYNTAGEKWDNFQGKIDFVDCKFTYPSRPDSQVLNGLSVSISPGQTLAFVGSSGCGKSTSIQLLERFYDPDQGKVMIDGHDSKKVNVQFLRSNIGIVSQEPVLFACSIMDNIKYGDNTKEIPMERVIAAAKQAQLHDFVMSLPEKYETNVGSQGSQLSRGEKQRIAIARAIVRDPKILLLDEATSALDTESEKTVQVALDKAREGRTCIVIAHRLSTIQNADIIAVMAQGVVIEKGTHEELMAQKGAYYKLVTTGSPIS

SEQ ID NO: 3651 - protein, 654 aa, Homo sapiens
MQAARMAASLGRQLLRLGGGSSRLTALLGQPRPGPARRPYAGGAAQLALDKSDSHPSDALTRKKPAKAESKSFAVGFKGQLTTDQVFPYPSVLNEEQTQFLKELVEPVSRFFEEVNDPAKNDALEMVEETTWQGLKELGAFGLQVPSELGGVGLCNTQYARLVEIVGMHDLGVGITLGAHQSIGFKGILLFGTKAQKEKYLPKLASGETVAAFCLTEPSSGSDAASIRTSAVPSPCGKYYTLNGSKLWISNGGLADIFTVFAKTPVTDPATGAVKEKITAFVVERGFGGITHGPPEKKMGIKASNTAEVFFDGVRVPSENVLGEVGSGFKVAMHILNNGRFGMAAALAGTMRGIIAKAVDHATNRTQFGEKIHNFGLIQEKLARMVMLQYVTESMAYMVSANMDQGATDFQIEAAISKIFGSEAAWKVTDECIQIMGGMGFMKEPGVERVLRDLRIFRIFEGTNDILRLFVALQGCMDKGKELSGLGSALKNPFGNAGLLLGEAGKQLRRRAGLGSGLSLSGLVHPELSRSGELAVRALEQFATVVEAKLIKHKKGIVNEQFLLQRLADGAIDLYAMVVVLSRASRSLSEGHPTAQHEKMLCDTWCIEAAARIREGMAALQSDPWQQELYRNFKSISKALVERGGVVTSNPLGF

SEQ ID NO: 3652 - protein, 1532 aa, Homo sapiens
MGHSKQIRILLLNEMEKLEKTLFRLEQGYELQFRLGPTLQGKAVTVYTNYPFPGETFNREKFRSLDWENPTEREDDSDKYCKLNLQQSGSFQYYFLQGNEKSGGGYIVVDPILRVGADNHVLPLDCVTLQTFLAKCLGPFDEWESRLRVAKESGYNMIHFTPLQTLGLSRSCYSLANQLELNPDFSRPNRKYTWNDVGQLVEKLKKEWNVICITDVVYNHTAANSKWIQEHPECAYNLVNSPHLKPAWVLDRALWRFSCDVAEGKYKEKGIPALIENDHHMNSIRKIIWEDIFPKLKLWEFFQVDVNKAVEQFRRLLTQENRRVTKSDPNQHLTIIQDPEYRRFGCTVDMNIALTTFIPHDKGPAAIEECCNWFHKRMEELNSEKHRLINYHQEQAVNCLLGNVFYERLAGHGPKLGPVTRKHPLVTRYFTFPFEEIDFSMEESMIHLPNKACFLMAHNGWVMGDDPLRNFAEPGSEVYLRRELICWGDSVKLRYGNKPEDCPYLWAHMKKYTEITATYFQGVRLDNCHSTPLHVAEYMLDAARNLQPNLYVVAELFTGSEDLDNVFVTRLGISSLIREAMSAYNSHEEGRLVYRYGGEPVGSFVQPCLRPLMPAIAHALFMDITHDNECPIVHRSAYDALPSTTIVSMACCASGSTRGYDELVPHQISVVSEERFYTKWNPEALPSNTGEVNFQSGIIAARCAISKLHQELGAKGFIQVYVDQVDEDIVAVTRHSPSIHQSVVAVSRTAFRNPKTSFYSKEVPQMCIPGKIEEVVLEARTIERNTKPYRKDENSINGTPDITVEIREHIQLNESKIVKQAGVATKGPNEYIQEIEFENLSPGSVIIFRVSLDPHAQVAVGILRNHLTQFSPHFKSGSLAVDNADPILKIPFASLASRLTLAELNQILYRCESEEKEDGGGCYDIPNWSALKYAGLQGLMSVLAEIRPKNDLGHPFCNNLRSGDWMIDYVSNRLISRSGTIAEVGKWLQAMFFYLKQIPRYLIPCYFDAILIGAYTTLLDTAWKQMSSFVQNGSTFVKHLSLGSVQLCGVGKFPSLPILSPALMDVPYRLNEITKEKEQCCVSLAAGLPHFSSGIFRCWGRDTFIALRGILLITGRYVEARNIILAFAGTLRHGLIPNLLGEGIYARYNCRDAVWWWLQCIQDYCKMVPNGLDILKCPVSRMYPTDDSAPLPAGTLDQPLFEVIQEAMQKHMQGIQFRERNAGPQIDRNMKDEGFNITAGVDEETGFVYGGNRFNCGTWMDKMGESDRARNRGIPATPRDGSAVEIVGLSKSAVRWLLELSKKNIFPYHEVTVKRHGKAIKVSYDEWNRKIQDNFEKLFHVSEDPSDLNEKHPNLVHKRGIYKDSYGASSPWCDYQLRPNFTIAMVVAPELFTTEKAWKALEIAEKKLLGPLGMKTLDPDDMVYCGIYDNALDNDNYNLAKGFNYHQGPEWLWPIGYFLRAKLYFSRLMGPETTAKTIVLVKNVLSRHYVHLERSPWKGLPELTNENAQYCPFSCETQAWSIATILETLYDL

SEQ ID NO: 3653 - protein, 2351 aa, Homo sapiens
MQIELSTCFFLCLLRFCFSATRRYYLGAVELSWDYMQSDLGELPVDARFPPRVPKSFPFNTSVVYKKTLFVEFTDHLFNIAKPRPPWMGLLGPTIQAEVYDTVVITLKNMASHPVSLHAVGVSYWKASEGAEYDDQTSQREKEDDKVFPGGSHTYVWQVLKENGPMASDPLCLTYSYLSHVDLVKDLNSGLIGALLVCREGSLAKEKTQTLHKFILLFAVFDEGKSWHSETKNSLMQDRDAASARAWPKMHTVNGYVNRSLPGLIGCHRKSVYWHVIGMGTTPEVHSIFLEGHTFLVRNHRQASLEISPITFLTAQTLLMDLGQFLLFCHISSHQHDGMEAYVKVDSCPEEPQLRMKNNEEAEDYDDDLTDSEMDVVRFDDDNSPSFIQIRSVAKKHPKTWVHYIAAEEEDWDYAPLVLAPDDRSYKSQYLNNGPQRIGRKYKKVRFMAYTDETFKTREAIQHESGILGPLLYGEVGDTLLIIFKNQASRPYNIYPHGITDVRPLYSRRLPKGVKHLKDFPILPGEIFKYKWTVTVEDGPTKSDPRCLTRYYSSFVNMERDLASGLIGPLLICYKESVDQRGNQIMSDKRNVILFSVFDENRSWYLTENIQRFLPNPAGVQLEDPEFQASNIMHSINGYVFDSLQLSVCLHEVAYWYILSIGAQTDFLSVFFSGYTFKHKMVYEDTLTLFPFSGETVFMSMENPGLWILGCHNSDFRNRGMTALLKVSSCDKNTGDYYEDSYEDISAYLLSKNNAIEPRSFSQNSRHPSTRQKQFNATTIPENDIEKTDPWFAHRTPMPKIQNVSSSDLLMLLRQSPTPHGLSLSDLQEAKYETFSDDPSPGAIDSNNSLSEMTHFRPQLHHSGDMVFTPESGLQLRLNEKLGTTAATELKKLDFKVSSTSNNLISTIPSDNLAAGTDNTSSLGPPSMPVHYDSQLDTTLFGKKSSPLTESGGPLSLSEENNDSKLLESGLMNSQESSWGKNVSSTESGRLFKGKRAHGPALLTKDNALFKVSISLLKTNKTSNNSATNRKTHIDGPSLLIENSPSVWQNILESDTEFKKVTPLIHDRMLMDKNATALRLNHMSNKTTSSKNMEMVQQKKEGPIPPDAQNPDMSFFKMLFLPESARWIQRTHGKNSLNSGQGPSPKQLVSLGPEKSVEGQNFLSEKNKVVVGKGEFTKDVGLKEMVFPSSRNLFLTNLDNLHENNTHNQEKKIQEEIEKKETLIQENVVLPQIHTVTGTKNFMKNLFLLSTRQNVEGSYDGAYAPVLQDFRSLNDSTNRTKKHTAHFSKKGEEENLEGLGNQTKQIVEKYACTTRISPNTSQQNFVTQRSKRALKQFRLPLEETELEKRIIVDDTSTQWSKNMKHLTPSTLTQIDYNEKEKGAITQSPLSDCLTRSHSIPQANRSPLPIAKVSSFPSIRPIYLTRVLFQDNSSHLPAASYRKKDSGVQESSHFLQGAKKNNLSLAILTLEMTGDQREVGSLGTSATNSVTYKKVENTVLPKPDLPKTSGKVELLPKVHIYQKDLFPTETSNGSPGHLDLVEGSLLQGTEGAIKWNEANRPGKVPFLRVATESSAKTPSKLLDPLAWDNHYGTQIPKEEWKSQEKSPEKTAFKKKDTILSLNACESNHAIAAINEGQNKPEIEVTWAKQGRTERLCSQNPPVLKRHQREITRTTLQSDQEEIDYDDTISVEMKKEDFDIYDEDENQSPRSFQKKTRHYFIAAVERLWDYGMSSSPHVLRNRAQSGSVPQFKKVVFQEFTDGSFTQPLYRGELNEHLGLLGPYIRAEVEDNIMVTFRNQASRPYSFYSSLISYEEDQRQGAEPRKNFVKPNETKTYFWKVQHHMAPTKDEFDCKAWAYFSDVDLEKDVHSGLIGPLLVCHTNTLNPAHGRQVTVQEFALFFTIFDETKSWYFTENMERNCRAPCNIQMEDPTFKENYRFHAINGYIMDTLPGLVMAQDQRIRWYLLSMGSNENIHSIHFSGHVFTVRKKEEYKMALYNLYPGVFETVEMLPSKAGIWRVECLIGEHLHAGMSTLFLVYSNKCQTPLGMASGHIRDFQITASGQYGQWAPKLARLHYSGSINAWSTKEPFSWIKVDLLAPMIIHGIKTQGARQKFSSLYISQFIIMYSLDGKKWQTYRGNSTGTLMVFFGNVDSSGIKHNIFNPPIIARYIRLHPTHYSIRSTLRMELMGCDLNSCSMPLGMESKAISDAQITASSYFTNMFATWSPSKARLHLQGRSNAWRPQVNNPKEWLQVDFQKTMKVTGVTTQGVKSLLTSMYVKEFLISSSQDGHQWTLFFQNGKVKVFQGNQDSFTPVVNSLDPPLLTRYLRIHPQSWVHQIALRMEVLGCEAQDLY

SEQ ID NO: 3654 - protein, 461 aa, Homo sapiens
MQRVNMIMAESPGLITICLLGYLLSAECTVFLDHENANKILNRPKRYNSGKLEEFVQGNLERECMEEKCSFEEAREVFENTERTTEFWKQYVDGDQCESNPCLNGGSCKDDINSYECWCPFGFEGKNCELDVTCNIKNGRCEQFCKNSADNKVVCSCTEGYRLAENQKSCEPAVPFPCGRVSVSQTSKLTRAETVFPDVDYVNSTEAETILDNITQSTQSFNDFTRVVGGEDAKPGQFPWQVVLNGKVDAFCGGSIVNEKWIVTAAHCVETGVKITVVAGEHNIEETEHTEQKRNVIRIIPHHNYNAAINKYNHDIALLELDEPLVLNSYVTPICIADKEYTNIFLKFGSGYVSGWGRVFHKGRSALVLQYLRVPLVDRATCLRSTKFTIYNNMFCAGFHEGGRDSCQGDSGGPHVTEVEGTSFLTGIISWGEECAMKGKYGIYTKVSRYVNWIKEKTKLT

SEQ ID NO: 3655 - protein, 452 aa, Homo sapiens
MSTAVLENPGLGRKLSDFGQETSYIEDNCNQNGAISLIFSLKEEVGALAKVLRLFEENDVNLTHIESRPSRLKKDEYEFFTHLDKRSLPALTNIIKILRHDIGATVHELSRDKKKDTVPWFPRTIQELDRFANQILSYGAELDADHPGFKDPVYRARRKQFADIAYNYRHGQPIPRVEYMEEEKKTWGTVFKTLKSLYKTHACYEYNHIFPLLEKYCGFHEDNIPQLEDVSQFLQTCTGFRLRPVAGLLSSRDFLGGLAFRVFHCTQYIRHGSKPMYTPEPDICHELLGHVPLFSDRSFAQFSQEIGLASLGAPDEYIEKLATIYWFTVEFGLCKQGDSIKAYGAGLLSSFGELQYCLSEKPKLLPLELEKTAIQNYTVTEFQPLYYVAESFNDAKEKVRNFAATIPRPFSVRYDPYTQRIEVLDNTQQLKILADSINSEIGILCSALQKIK

SEQ ID NO: 3656 - protein, 361 aa, Homo sapiens [sequence omitted]

SEQ ID NO: 3657 - protein, 952 aa, Homo sapiens
MGVRHPPCSHRLLAVCALVSLATAALLGHILLHDFLLVPRELSGSSPVLEETHPAHQQGASRPGPRDAQAHPGRPRAVPTQCDVPPNSRFDCAPDKAITQEQCEARGCCYIPAKQGLQGAQMGQPWCFFPPSYPSYKLENLSSSEMGYTATLTRTTPTFFPKDILTLRLDVMMETENRLHFTIKDPANRRYEVPLETPHVHSRAPSPLYSVEFSEEPFGVIVRRQLDGRVLLNTTVAPLFFADQFLQLSTSLPSQYITGLAEHLSPLMLSTSWTRITLWNRDLAPTPGANLYGSHPFYLALEDGGSAHGVFLLNSNAMDVVLQPSPALSWRSTGGILDVYIFLGPEPKSVVQQYLDVVGYPFMPPYWGLGFHLCRWGYSSTAITRQVVENMTRAHFPLDVQWNDLDYMDSRRDFTFNKDGFRDFPAMVQELHQGGRRYMMIVDPAISSSGPAGSYRPYDEGLRRGVFITNETGQPLIGKVWPGSTAFPDFTNPTALAWWEDMVAEFHDQVPFDGMWIDMNEPSNFIRGSEDGCPNNELENPPYVPGVVGGTLQAATICASSHQFLSTHYNLHNLYGLTEAIASHRALVKARGTRPFVISRSTFAGHGRYAGHWTGDVWSSWEQLASSVPEILQFNLLGVPLVGADVCGFLGNTSEELCVRWTQLGAFYPFMRNHNSLLSLPQEPYSFSEPAQQAMRKALTLRYALLPHLYTLFHQAHVAGETVARPLFLEFPKDSSTWTVDHQLLWGEALLITPVLQAGKAEVTGYFPLGTWYDLQTVPVEALGSLPPPPAAPREPAIHSEGQWVTLPAPLDTINVHLRAGYIIPLQGPGLTTTESRQQPMALAVALTKGGEARGELFWDDGESLEVLERGAYTQVIFLARNNTIVNELVRVTSEGAGLQLQKVTVLGVATAPQQVLSNGVPVSNFTYSPDTKVLDICVSLLMGEQFLVSWC

SEQ ID NO: 3658 - protein, 412 aa, Homo sapiens
MSSKGSVVLAYSGGLDTSCILVWLKEQGYDVIAYLANIGQKEDFEEARKKALKLGAKKVFIEDVSREFVEEFIWPAIQSSALYEDRYLLGTSLARPCIARKQVEIAQREGAKYVSHGATGKGNDQVRFELSCYSLAPQIKVIAPWRMPEFYNRFKGRNDLMEYAKQHGIPIPVTPKNPWSMDENLMHISYEAGILENPKNQAPPGLYTKTQDPAKAPNTPDILEIEFKKGVPVKVTNVKDGTTHQTSLELFMYLNEVAGKHGVGRIDIVENRFIGMKSRGIYETPAGTILYHAHLDIEAFTMDREVRKIKQGLGLKFAELVYTGFWHSPECEFVRHCIAKSQERVEGKVQVSVLKGQVYILGRESPLSLYNEELVSMNVQGDYEPTDATGFININSLRLKEYHRLQSKVTAK

SEQ ID NO: 3659 - protein, 357 aa, Homo sapiens
MEEGMNVLHDFGIQSTHYLQVNYQDSQDWFILVSVIADLRNAFYVLFPIWFHLQEAVGIKLLWVAVIGDWLNLVFKWILFGQRPYWWVLDTDYYSNTSVPLIKQFPVTCETGPGSPSGHAMGTAGVYYVMVTSTLSIFQGKIKPTYRFRCLNVILWLGFWAVQLNVCLSRIYLAAHFPHQVVAGVLSGIAVAETFSHIHSIYNASLKKYFLITFFLFSFAIGFYLLLKGLGVDLLWTLEKAQRWCEQPEWVHIDTTPFASLLKNLGTLFGLGLALNSSMYRESCKGKLSKWLPFRLSSIVASLVLLHVFDSLKPPSQVELVFYVLSFCKSAVVPLASVSVIPYCLAQVLGQPHKKSL

SEQ ID NO: 3660 - protein, 354 aa, Homo sapiens
MLFNLRILLNNAAFRNGHNFMVRNFRCGQPLQNKVQLKGRDLLTLKNFTGEEIKYMLWLSADLKFRIKQKGEYLPLLQGKSLGMIFEKRSTRTRLSTETGFALLGGHPCFLTTQDIHLGVNESLTDTARVLSSMADAVLARVYKQSDLDTLAKEASIPIINGLSDLYHPIQILADYLTLQEHYSSLKGLTLSWIGDGNNILHSIMMSAAKFGMHLQAATPKGYEPDASVTKLAEQYAKENGTKLLLTNDPLEAAHGGNVLITDTWISMGQEEEKKKRLQAFQGYQVTMKTAKVAASDWTFLHCLPRKPEEVDDEVFYSPRSLVFPEAENRKWTIMAVMVSLLTDYSPQLQKPKF

(The sequence listing continues in the following parts.)

1. A precursor RNA polynucleotide comprising:
a. a 3′ group I intron fragment
b. a core functional element, and
c. a 5′ group I intron fragment,
wherein the core functional element comprises:
i. a translation initiation element (TIE) comprising an internal ribosome entry (TRES) comprising a polynucleotide having at least 95% sequence identity to SEQ ID NO: 1284 or a functional fragment thereof, and
ii. a polynucleotide encoding an amino acid sequence having at least 95% sequence identity to SEQ ID NO: 3691 or a functional fragment thereof.

2. (canceled)

3. The precursor RNA polynucleotide of claim 1, wherein the TIE further comprises a UTR or a fragment thereof, an aptamer complex or a fragment thereof, or a combination thereof.

4.-6. (canceled)

7. The precursor RNA of claim 1, wherein the 3′ group I intron fragment comprises a first or a first and a second nucleotide of a 3′ group I intron splice site dinucleotide.

8. The precursor RNA of claim 1, wherein the 5′ group I intron fragment comprises a first or a first and a second nucleotide of a 5′ group I intron splice site dinucleotide.

9. A circular RNA polynucleotide comprising a TIE and a polynucleotide encoding an amino acid sequence having at least 95% sequence identity to SEQ ID NO: 3691 or a functional fragment thereof, wherein the TIE comprises an IRES comprising a polynucleotide having at least 95% sequence identity to SEQ ID NO: 1284 or a functional fragment thereof.

10. The circular RNA polynucleotide of claim 9, further comprising a polynucleotide comprising a sequence encoding a CAR comprising an antigen binding molecule that specifically binds to CD19.

11. The circular RNA polynucleotide of claim 9, wherein the polynucleotide encoding the amino acid sequence is codon optimized.

12. The circular RNA polynucleotide of claim 9, wherein the CAR comprises an amino acid sequence of SEQ ID NO: 3690.

13. The circular RNA polynucleotide of claim 9, wherein the circular RNA is formed from a precursor RNA polynucleotide that was transcribed from a vector or DNA comprising a PCR product, a linearized plasmid, non-linearized plasmid, linearized minicircle, a non-linearized minicircle, viral vector, cosmid, ceDNA, or an artificial chromosome.

14.-15. (canceled)

16. The circular RNA polynucleotide of claim 9, further comprising an internal spacer sequence.

17. The circular RNA polynucleotide of claim 9, further comprising 1 to 100 natural nucleotides derived from a natural exon.

18. A pharmaceutical composition comprising:
a. a circular RNA polynucleotide comprising a coding element encoding a chimeric antigen receptor (CAR), wherein the CAR comprises an antigen binding molecule that specifically binds to BCMA; and
b. a nanoparticle, and optionally, a targeting moiety operably connected to the nanoparticle.

19. The pharmaceutical composition of claim 18, wherein the nanoparticle is a lipid nanoparticle, a core-shell particle, or a biodegradable nanoparticle.

20. The pharmaceutical composition of claim 18, wherein the nanoparticle comprises one or more cationic lipids, ionizable lipids, or poly β-amino esters.

21. The pharmaceutical composition of claim 18, wherein the nanoparticle comprises one or more non-cationic lipids.

22. The pharmaceutical composition of claim 18, wherein the nanoparticle comprises one or more PEG-modified lipids, polyglutamic acid lipids, or hyaluronic acid lipids.

23. The pharmaceutical composition of claim 18, wherein the nanoparticle comprises cholesterol.

24. The pharmaceutical composition of claim 18, wherein the nanoparticle comprises arachidonic acid, leukotriene, or oleic acid.

25. (canceled)

26. A method of treating a subject in need thereof comprising administering a therapeutically effective amount of a composition comprising the circular RNA of claim 9, a nanoparticle, and optionally, a targeting moiety operably connected to the nanoparticle.

27. The method of claim 26, wherein the subject has a cancer selected from the group consisting of: acute myeloid leukemia (AML); alveolar rhabdomyosarcoma; B cell malignancies; bladder cancer (e.g., bladder carcinoma); bone cancer; brain cancer (e.g., medulloblastoma and glioblastoma multiforme); breast cancer; cancer of the anus, anal canal, or anorectum; cancer of the eye; cancer of the intrahepatic bile duct; cancer of the joints; cancer of the neck; gallbladder cancer; cancer of the pleura; cancer of the nose, nasal cavity, or middle ear; cancer of the oral cavity; cancer of the vulva; chronic lymphocytic leukemia; chronic myeloid cancer; colon cancer; esophageal cancer, cervical cancer; fibrosarcoma; gastrointestinal carcinoid tumor; head and neck cancer (e.g., head and neck squamous cell carcinoma); Hodgkin lymphoma; hypopharynx cancer; kidney cancer; larynx cancer; leukemia; liquid tumors; lipoma; liver cancer; lung cancer (e.g., non-small cell lung carcinoma, lung adenocarcinoma, and small cell lung carcinoma); lymphoma; mesothelioma; mastocytoma; melanoma; multiple myeloma; nasopharynx cancer; non-Hodgkin lymphoma; B-chronic lymphocytic leukemia; hairy cell leukemia; Burkitt's lymphoma; ovarian cancer; pancreatic cancer; cancer of the peritoneum; cancer of the omentum; mesentery cancer; pharynx cancer; prostate cancer; rectal cancer; renal cancer; skin cancer; small intestine cancer; soft tissue cancer; solid tumors; synovial sarcoma; gastric cancer; teratoma; testicular cancer; thyroid cancer; and ureter cancer.

28. A eukaryotic cell comprising a circular RNA polynucleotide according to claim 9.

29. The eukaryotic cell of claim 28, wherein the eukaryotic cell is an immune cell.

30. The eukaryotic cell of claim 28, wherein the eukaryotic cell is a T cell, dendritic cell, macrophage, B cell, neutrophil or basophil.

31. The precursor RNA polynucleotide of claim 1, wherein the IRES has 100% sequence identity to SEQ ID NO: 1284 or a functional fragment thereof.

32. The precursor RNA polynucleotide of claim 1, wherein the amino acid sequence has 100% sequence identity to SEQ ID NO: 3691 or a functional fragment thereof.

33. The circular RNA polynucleotide of claim 9, wherein the TRES has 100% sequence identity to SEQ ID NO: 1284 or a functional fragment thereof.

34. The circular RNA polynucleotide of claim 9, wherein the amino acid sequence has 100% sequence identity to SEQ ID NO: 3691 or a functional fragment thereof.

35. The precursor RNA polynucleotide of claim 1, wherein the precursor RNA polynucleotide further comprises a stop codon or a stop cassette.
